United States Patent Application Publication US 2013/0034624 A1 - sequence listing, part 16

SEQ ID NO: 49756 - DNA, 917 bp, Bovine  19866881109487
  misc_feature (1)..(1): n is a, c, g, or t
ncccgtgctggggtggcagccccgccccgcgtctccggcctcccgctccccccactagtttcctgtcttgaaccactggaggcaaagtttagccagctgggagctggatggttgaaccacagacaaaggcaacaacacttcatttttaaaatgagagaaaaaagagatagcacccctccccaaatatagagctatatatgtatattttatatatatagaattcattcgtgcacaattcattaaatgagcttttcaaaaattaaaaaaaaattataagatacatttctttaggcttttgcgtttttaaattaaaaccaacaagaagtctccatctctactccacccaatagcaaggggaggccccagaacccttggttccttgtactgtggcctcttgcaaggggtccctcaattagaccaccagcccctctttgcctaactgaagctctgcatacaacaggcactcacccactgctggagtggggtgctgactccttcaaggcgggatggggtgaccccacaggcctgggagatgggtacctcggtctccacccagcctgtccccatcttggtgtcttggcaactatcagtaagacagggccaggatggggacaccctccctctctcctggagtggtagcccctaattctgggctttctcaatctgagaggagatgcagacagaaaaaaaaaaagaaaaaaccctttaaacactttcctttttttttttttccaaaagtgattccttaaaccatacaagcccccaaaaggctgccttgggctagtgcatgggagcctgaaagtggaactgaccaggcgggtcccactgtccggcatgggccaagtgcaaaaaaaaaaaaaaaaaacagaaccgaaaaaaaccccccaaaacacaaaactaacaaccaccaacaaaac

SEQ ID NO: 49757 - DNA, 692 bp, Bovine  19866881244710
  misc_feature (1)..(1): n is a, c, g, or t
ncaacccccacccatccacccccacactctgacagcacgctgtgtgataaacaccctgacacacactccggcagctccccatcttcacaatggaggtgatttcccagcccggggtgaacagtgcactgatcatgtggacccagcagggtggggttccagccttttcctcttactgtccctcagacagacagatgtcgggacagacaccagacagcagacagagagagcagacaggagacagacaggggtcaggggaagtagatgcaatggctttggggtgtctgggcttttaaggaggtcagggatggggaaggtggggcggtgggcagcagggctgtgctctgacgggaaagccgcgggccagagcaagtgacggaacggggcttcttctgcttaatgccctcgagtgtgtacagagggagactgcagagcagaaccctcagaatcctgggaccatggaggctctgccctccaatggtcaatgcaggcgtggaggtccagcgctgggacctctcagggctcctgattccagcaaagagccttttctggctccctgtgtggcctggaccagagtcccctggtctctgtcccaagagcagcaaagagcttttgaattgcattaaggggaaaggagggcagacggctcacagggtctctaggactgggcagaagggcttggggtggctcttgaa

SEQ ID NO: 49758 - DNA, 1251 bp, Bovine  19866881465754
  misc_feature (1)..(1): n is a, c, g, or t
ntgtgtgtgtgttgccggggcggtgtcttctgatatgcaaaagatttgagctcctagaggctcacctcttgttttgttttggaggacagagccttgacctttttcatcttgtgaaacccaggctcagttttgtgttagcagttataaactgttttgtgatagcagaaccctaggagaaagatgaaaaggcacccctctgggtagggtgtgcactgctgatggttttcagcaaccccttcccccagccccaacacacacacacctctccatctacatatttctttatattcttgccaacggcagcctgagttctgcataaacattttgctttgttcctgccccagggcaaaagcttcatcaactttatcagggcagggttaagaggaggagcctgtgcctgtgtgggcatctggagctttcaggtagggagggtagtagtgggggtggaattaccttataaggagttgaatatagaaaaggacccaggccaacttcctgctgtggctactaccagtcggtccctttaccaacctcggcctaaaccagggatgatgccaggtgagcatcctacctgtgaggacaccaataagtcccaagacatgagactgcttatgttccagaagagaactttgtagaattctctagccagaccaactagatctcctggtttccatagtgagttgggatgtgttagagcctatggccacctcacaacccagagaagtagtaatttaagtatcaaccagggagggggcttccatggtggctcagtggtgaagcatccacctgccaaggcaggagacctgggttatatccctgatccaggaagattccacatgccagagcagctaagcccatgcaccagccctctgcaacaagagaagccactgcaatgagaagcccgcgcagctgcagcaacagagactgagcacagcttaaaaaaaagtatcaaccaggaatattagaagtgataacaagtcacaagtactactagggccaaagtgtaacagtgactttgtaacacaggccaacaaaggcaccatgtttggagtgctcacacggtttatcagagattctgaatttgggtttctagagctaaaaggtttattaatccccctgtgttgtagaatgccgccttttgccaggttttttcaccttggcctcgtcccagagcccttggtttccacccactgtggtgactggtctggctggtagaggctgacagtaatctcacacagctgctccaccggc

SEQ ID NO: 49759 - DNA, 1206 bp, Bovine  19866881484046
  misc_feature (1)..(1): n is a, c, g, or t
ntcggacctctcttcctataccccgacgctcggtctctctcctccctggggtgcaaagcagatggcagaagaaaaggaaacactggtgacatttaagggtaagtaaggcgtccgctccacctggccctctgctgtctacgggggaggggggcacccaccacaggctaccacccatcctagggtcgggctcctcccgttgctctctttaggccatgacaatggggcaaagtgttcaactcccagggctccctcttctcaactgactaaaggtgagggcacagccaccggtcccatctgctgaggtgggactcagggggcatctccaaaaacacgtgggtcttcatggccccaaggtcaggccagacctctgctctctatgcactgggaacaacccccagaacatttccagtttccactcttaggagacttgtagagacacctctcaatcaaatttgccttgaatgggcccaggggagctgaggagaatggcggacgagtccttctgcatgtgaggctctgcccagaactccccgccaatttggcatctgcacgaacctggtggggaagacaggctcccattgcctgtatcgtctggctggggaaggggagaaaaactagcttgcattcagtccccagcagatgccagactctctgccggatgccctcctcacttcacacacatgcaaggcacaacctgaggacgcatacaaagacacacacaccgcaacacgcgagatgccccagccctgtgctggagcagagggatgattcaaagtcactgcgcttggcttcactccactcatgctttctgaggccttaggccagtctctcagtctgagcccagttaagccagtaggtccatggcccctgtttccctcctcaaaggagtggctgccacccgcttccaggcatcagactccaggggcgctgggggcggagctgtccctcccaccctgtggagcttcagcaggtctgccctggggtcccagaaccagggtttgagagaagcaccaagggcatgcgatacccagaccaatcaggcctctccgatcctggagagtgagaatctagtctcagagcccggtgctggagcccaggtcacccctacctgagccaggggacaccctggctggccaccctccctctctgggcctcagtttcctggtctggagcacgagcttcccttctcagctgggccctggggct

SEQ ID NO: 49760 - DNA, 1708 bp, Bovine  19866881539830
  misc_feature (1)..(1): n is a, c, g, or t
ncctttgaagccctcacatttactctttttcagttgaatttagaaagttggagcaagagaaaatgctggttttttggttatgtagttatttgcattctccaagggtaaagaaaaaaatcttaaaagatttttaaagaacatactggtaatgaagttctgtagaaagaaggagctgaactgagggggtgaatgtgtgataaatttgttagcttttctaccaacagactcttcttttgaattccttgttacattgccatggtctcactaacattcttgggaaatcagggcacagccagaacatttggcagcatgctgggtatgttctactcatatatttccagaacatttggctacatggtgggtgggttccacctggctgcttgtgtaaaattggcatcataatggaagtagatggacatgaaagcacatgacataataggggagcctttcaggctggcattttctcaatctgctgcacccattcttttacttacagaatgtggctgacattaagaaactgaagtcagtaggcatctgtaccatcaaagggatacagatgacaacaagaagagccctgtgcaatgtcaaaggactctcagaagcgaaagtggacaagattaaagaggcagccaacaagcttattgtaagcaaaatccattctttgttattttagcttaaatgggccctgggaatctctgtagcctttttcattatgtacactagaaactattgtgataactgtgagttcctgtgcatcaccactatacattatatgccccatgttaacttttcatcatgtaagtttcaaagcaataatttctgaaaaaaaatgagacagaggttaagagaccaggaaaactatgaaggcaatcattttttacaaaaccttttatttttgtctccttttctatcacttttcccttttctgtgcctctgcctttccttcttttcttctttttttgtccaggatgtgctgcttgcaagatcttagttccatgacctgggatcaaatccaggctcccagcagtgagagtaccaaatcccaaccactggactaccaggggctccctccttttcatattttttttaccttcctcctccttatttttttgcattatctcctcaaacattgtatatatggctgttgtgaagcactcagcaccaaagaaattgctctctcctggtataggcatttgataagagaacattgcatttgaaaaagaccaacagtggctgggtctccatttgtgcagttaagatagatatgaccaagaatgtgctcattgaggcacctgagcataaagctaagtgaaacctgtactttgtacctgggcccatagaccataagagacctatgccgctgatggctccaagcagaagcacatgcctttgacccaagtttttgtgtagcacttttgggggccgctggaggcagcacctctgggaataagaatgtgcagaaaggccaaagcctctctttgcagaagagcaggcttctccttttctacatgtgtataagagagtctcattctcaccaagtcctagaaattctcttcaccaacagttacctctttccttccagttgcaagtgtcagtgtggtcctgaacttggagaggacacaactgaactggtctgaacacaactcagttgctgtatgttctgagtactcttgggctgtatacccacaaggcagttccgtaactgcca

SEQ ID NO: 49761 - DNA, 1291 bp, Bovine  19866881618176
  misc_feature (1)..(1): n is a, c, g, or t
ncacagcagaaggggttcctgtgagcccgcacttggttttggggtttccggcctggcttatgcttgaaactgcctctcctcacttcctgttccctgaatataaaacagcccagcttagagagaagaaacagcactgggccctggcaccctcggaggtgtggctgaccggacatgggcaaggtctggtctctgcccacggaagtcacaacggcaagaggcagcacggtgaagggcccaagacatctgctcggtgggtcgggggacccatgcgggctgggggttgggaggtgagcccctacctgagagggctgtccttaaacagggtgctctgactccccatcactgagctccctccgctgctgctgctgccgccatcatcctcaccctgggaggagtagcgcgttaggcgctggcttcgccgagacatgatgaggtgggcggggggacccttcccctgaagggagtctggggagagaaaggcggccaggtgaggcttccaggggcccggcgtggcaggggcagggaggaaagacaagacacagcctcccagcaaacacacacccctctgcattcaaccaaagagcttgacatgtgggcgagacccggcgttgattaagcatccctgccccgcccacctgcagccctctgcactctgccagcctctttcaaaacaggttcataggatttccaaactttcagattattggatgctgagctccgagatccagaattgggccttctgcaacttctgacacgaggcggagctcgtagctaggtagctacaggtgctaaataaacaccgctcctcactgctgccctgcagactctccagtccagcctcttattgggctgcccagtcctaaagctgtgcccgttcttgttctagcttgtttcccttaagtgggacatgcatttctttctttgtagctgtatccattgattcagagccccagtcaaactctgactccagaaaacctttccacggtaacccccgcttacattctgctagagcctgcgtgcctagcctattagtgattactggcctgcaacatcagtgcctcttgatatgatgctgacggtggtgataaaatactcagttaaatgcctcctgggtacggggctcctgacatactcatctctgatccttatgatcaagggaggtatcaccgctcccactgttcagtggggaacccgggggcactgagaggatcagtaacctgcccatagatcagtaacccaggctgtaagtgacagaggcagaagggtgtgctgcgctggggcctggatattt

SEQ ID NO: 49762 - DNA, 645 bp, Bovine  19866881685527
  misc_feature (1)..(1): n is a, c, g, or t
nattgtgcttaccctgtttctccacttgagtacttgcctatctttgcccttttgccctcactcaattctagcccatccacaaggtctggctgaaatgacgctttctgactgaagtctttcctgagcccccataactaccccctgacagagccctaaagtctgcctgggacagtctgccctagaaagctggtggtccagcacaatgagaggtcaaggccctgttggtcccagttctcagagggactcctgccccaccacaccagggcgtgaagccacagggcattactgtccctgaggtctggggttccctcttgttttcagatcaagcgctcatccatccggaagggcatggtgatggtttctccacgcctgaatccccaagcttcctgggagtttgaggccgagatcctggtccttcaccaccccaccacaatcagcccgcggtaccaggccatgggtaggtgtcaaagggcactgccagcccggaagtccccggctccagcagccctcaccccaaagttccagctgcagccaagagtcaggtctctgtcctgtttaatgacaccatcccctctgttccacctacaagctgtagcctgtgggtctgttcattcttgcaaacactgaccgagcgctgcttctgcg

SEQ ID NO: 49763 - DNA, 744 bp, Bovine  19866881881230
  misc_feature (1)..(1): n is a, c, g, or t
nagtgttaattcttcatatccaactgtttcacatattttaaagacttaattcagcattatgagtcacttcaaaacgcctcaaattccgcttctctagacaaattgaggtaggatcaataatactttttcaaatgtattgatgcacacttaaaagcagcgccaacactgaaagcactaggaagcccaatatggcactcagccccctgcagtggaagcacaggtcccaaccactgaccccccggggagttccaacagtctctccaaactctttaagaccttaatccaaaagagtggaacaacacaagctatttttaaatatgttttctcagtcttctccaccagaccttgaactccttcctctgctatttggtaccaatatggccataccaattgttaaattattaaaatactttcatgccagctgctaagtagctaatcttagctccccttgccaaacaagttgttacatatttgtaatagtgcctctctccagaactgttttatttctaataaataaaaatagtagttaagtttctaaaagtagttaacagagaaggaactccatttttgtagaatgaatgaatatctatgtatctttcaacattctaggcatacatcttcatcttggaatcccggttcttccagcacaacttgatcctccttcatattgaagggtgaacagcagaaaaataatcaattctggaaaaacaagaaatattagtaagttgtcacagatcatatagt

SEQ ID NO: 49764 - DNA, 3524 bp, Bovine  19866880372379
  misc_feature (1)..(1): n is a, c, g, or t
naaaaaaaatggacatggctgtgttctaagaactttatttatgggcactgaaatttgaatttcatataattttcaagtgtcataaaatcttattcttcttttgattttttccccaataatttaaaatgtaaaaaccattcttagctcacgagctatacaataacaagaggcaggctggatcactttgtcgacactgctctaaagcaagaatctattatggcactctagaaagaattgaaaagagttaaccaggcaacgaaatgtgtcaagcctcaaccctgctcttctaggcagcgtggagtctaggataataggtcttttcaaccaacagtggaagactattaaatacagacaaacaaccaatataacccatcaccactgccactccaagatgctacaaaatgagcagacaggctaagagtcacagggccttagaatctaaccctggggactcagctgctcctcaagacttgtttaatctcaaacgacactggaaaataacaaaaggtttgactctgaatccaaaatattgttggatacagtgcagtatagctggagaaagctcctgtagggctattctgaactgattttataataattcccagatgctctctcagctaatggggagtgcagaatccagggtcatatcacaactcccttgcagtctatcctcaacatgttagaataatttaaagttaccctgccctagaagtttctgagaccttttcatggagccttacagacattaacatccttatatacagctcttatttggacatttctttcaaagtacctaatggagcaggtgaacagatagaactgtgatttctctcaatcaccctgctgttcccctactcttgactcaaaaaagcaaaagagaatctatggctttttcttccctccagttttattgtgatatgattggcatagagaactctttaaggtgtatggtataatgatttgacttgaatctatagcttttttttttactagccttatatcctgcaaacttgctacaatcacttattagttccaggagtttccttgttgatttttgggatttgaaagactaaatgtttagtttttctaacatgtagtttcgtatcacaatttaaagactgatttctacacttcaggtatttgtaagtgaaataatatgatggcttgtatttgctttaaagtacttaaaaaaataaagtggtggtaggggagatgaaacaagattgtcaaaagtgaaattaaggaagctgaatgatggggtttcattacattacttttttgacctctacataaatttgaaaatttctaaaattatatttcaaagccagatacattatttgagattacagaagaagtctctttctgtattaaagggaaaatttttcttttctccccaacatttctcttctgttttcctagaaggtatataatacattttggaagaatagttggctgaatagatggataaatggatggatggatatgtctcatcttcttcttatccatttaaatcttcaacttggcaccaggaatatactggaacttaccttcaccacagaccaaaaatatgatgagcctttgtgatgcccatctcagtaactcaactgcgtttactgatttgatgatagttcaattttatatttttgtattatttcccatttaagaattgtgataaataaatgaatttaccatttctcataaaccctctgtgaagcagatgctccatccagttcacagaattaataagcccctggacctgacccacaatgatacagaaccacagaacctgagagctgagagggaattcagaagttatagacctccacattctacctagtgtcggaatccatctataacgatgatccatttcatttatttggtacttttctaagcactggggatacaacagttggggcaaaaaaaaggcaaagttcctgtcttcacggagcttacattccagtgggggagaaaggtaatatataaagatgtgcctgaggtgagggactataccacgagcatatctaaggaaaaagaattctaccattggaaacagtgatgacaaaggcccggaggtgggagcatgcctgtcttctaggaatggcaaggaggccagtgtggctggtaccaggtgagaggggaagagaagccagcagctggggggcttcgtgggccactgcaagaactttggcttctactctgagctgggaagcatatgttttgataggatcactatagctatggtgttgaggagagacttcggggaggcaaggcagaacttaagaaactggtcagaatgaaactgcagcaaccactgcatgctagcagtagaggtggagagaagtgggcagattctacctccatgctttgaaggtagaaccgacaggtttggctgacagggcagaggtggggagtgagaggagaaggggcccagggtaagttcaatgttttgggatgaatgggactgccattcactgagaagactggaggagaagcaggtttgggaacgggtggatgaagataggaatttggctttcgatacactgagattgaagggacttactcaccactggtgtgcagatgtcaaatagttagctggctgtatatgaaactgagttgagggttggagagaacagtttgggactcaccagcacgtaggtggtaattcataccttggaagtggatgaggtcacttaagctgagacttggagaagaaaagcacaggcctgaacttgggcgctccaacatttggaggttgggagataaggagaagacagtgatggagatcgaggaggggtagcagtgggtgtcagaggatgagatggctggatggcatcatcaatgaaatggacgtgaacttgggcaaactctgggaggtggtgagggacagggaggcctggcgtgctgcagtccatggggtcgaaaagagtcagatacgactgggcagctgaactacaacaagaagccagtgagacaagagaaaaaccaagacaggatggaattctggaagccaaggaaagacagtgcttcaaggacagcattccagctctgtttcgtgggctgacagttcaagtgaggtaagtaatgaaacctgaacattggcctcagcactaaggatcctcagtgagcctgaatggagggttccgatgcctgcagggagaggaagtgaagacagagagcacagaaaactctttcaaggagcttgttataaagagaggctgaggaatgggacattgtctagaggggggatgtacaggaagacgagttctttgttttaaacaagagcaactacaggatgtgtgcacgctgataggagtgagccggtagaaagagacctgttaggaaatagtcttacagagggaagctgtctgagatgcaaggcgagttctattggctctgaagatatcaatgtgttttgcagcttattgtccctcatcataattaaattcaagctttcagtcagaggttaatggaaatattatgcaacattttttcctacccaagctcacgagaggcccggtttcagg

SEQ ID NO: 49765 - DNA, 1720 bp, Bovine  19866880456147
  misc_feature (1)..(1): n is a, c, g, or t
ntagctttgattgttggtgcccacgcagggtttccttgtcctaaaagaaatttaaaattttagcacattgaattatagcttttaaatatcacttttcttctcgtagggcttccttggtggctcagttggtaaagaatctgcctacaatgcaggagacccgggttcaatccctaggtcaggaagatcccttggagaaggaaatggcaacccactccagtatttttgcctggagaattccatgcacagaggagcctggcgggctacagtccatggagtcacaaagagtcggacacgactgagcgactaacactttcttcttatccccctctttctggtcacctatccatcctccaccaaacagtctgtaccaatatttactccattgagaaaaaaaaaaaagaaccaccaccacgcaacaacagcagatttaagaaaaataatatggtttattaaagggggaagaagattcagtacacgaagccaagtggtaaagagcagacttctcagagagaaaaacagagcagagtcctccttgctttatgtccaagctgaagcactccatgttctgatgctaatttagcccataagattcataagaaccatagtcatgattctcctgtaactggctgtacattttaaataaaaccagcttctctgtgaaagttcctggaataattaaggcagtacatattctaggattagcatctggtcagccagtccatcctccctttaaaacacatgatctccaaggttaattacagcatgattcaaaagaaggctaaaaaacctgctatttattaaaattcttcagtcttaagagtgacttgcttagatgacctaatgcagtttcaatttgctagatctttttttgcttatcagatgatcccttaataatcttgactggatctagaattcacactctcccttgtcagggacagctatagaaagggcactgctgagtaaccatctagcattttgccaaattctattcacagcactggtggatgggaatagaggtggaagggtttattttatatttcacagttaagatatgaaacttaaataaacttcaataagtttatatataagctttataacttactcataaataagtttacaataacttaaatgaacttcagcctccaatgtcctctgggccacagtgcatgagacctattaagatgtggctttcaacatttctttatcctaaagaagcaacacagtcattgactggacaccgtctctgtgccggacactgggctgggtatgagagacatgaagatgaataagacactccctaacctcaaggagcacagttaggaagggaaaaaaccctgctcagcaaagaaaccaaaaccacagtattgtatttgctgctactcaggctgaccctgcccacagtgtacatccgggcggacgcctgccagtggaaattcaagccacatagttggttcctgttctctgggccctgctctactacactgtctacttggccaagggtataaacaaagcaatccagagactgtctacagggctagaggctggggacctgaagccacagggcgaagacaaaagaaagggcatggctaaaactcagatccctggctcagagcgtgtttccaccacatcctcaggtgtttcctggtctcttttaagagtcttacaccctggtgcaaaagggtttaggaagaaggaaacatgggcaagacatctgttgatt

SEQ ID NO: 49766 - DNA, 1045 bp, Bovine  19866880519428
  misc_feature (1)..(1): n is a, c, g, or t
nttaaaactctatttatgagcaatctccctagcttctattggctacattgcaatcactcatttataataccacctttcagaacagttaaaattagaattctgagatcctcaggggactggtgatataaaaaggctaagaacagggaaaatacattgtactattccttctgagttcctgattagatgtcctcattaccccttccaataaaattctaaaatagctggaatttatcacattggtacattaaacaacagtataagaaaagaaagttcttctcatgcatcatttactagtgaagaaattgtggaaaaaggtatgttttctataaaatattttcaagggtcaaagtaaatgttttatgtttttcctcatgtgtcttttcccaaaaaatcactaaatacaaatactgctttctataggctgagagcttttacacactcattatgtttgaaattgaatgattaaaataaaaatataatttctattcatcttgaaaggagagaagcaaagcatgggtgagaaagaaaacattccaactacagctaagcgttattaatctaatggtataaaaaataatatctctacatttccaatgagcaatttttcctcatcaggagacaataacttcacacgtttcacttttaaatgaaattacagagaaatggaaagttcagctaatattttcttccagcaaaatgacaaatggcatctcaagcatggtctcagcaagacaaatgcaaatacaatacagcatcatattaacccaactcctgaggacaggggatcacaggattatcagggtttgctaaatagggaagagggtatttatagatatcagggttctgcctgaaagggacaaagtaagctgatttaagagattggacaaaagtgcagaataagtctactctgtgcttctattcatatatatctatattttaatgtcaaacgaaaggaaacacagccattataagttaattttattatggggctgagtttcgaggtattcagttcagttcagtcgctcagtcgtgtccgactctgcga

SEQ ID NO: 49767 - DNA, 1793 bp, Bovine  19866880579879
  misc_feature (1)..(1): n is a, c, g, or t
ntctagggctgggccgggaatgcaccctggttccctgaaagtctagccaggaaaggcagaggaggcaaattggggttctcttagtaagaaaatgagtggccagcagatgggcaaaagagttttctgtccccttacccaagtggtacctggggtcagaggatccttgtatattgatcaggatgccaggccagtattaaagtgtcatgtggaaagagaatgtgaccgggtagctgctgttgtttcacctgctacacagatttagaacaaaatccagtcaccatcatgaaccagaaagttctgcagtaactttaccagtagacacttcaacttctttccctcttactttacagccagttcctcttacttccccattcccttttatttttgtgatcagttcattctttcttctcagattgccagtgattgctcccctgcccccccaccaccaccctctgggtttcattagaaagaaaccattccccaactcagcagggcttgatttctgaactgcgctttagaattctgctggaaaggctgtctgttctcagttctgccattggtagactttaaccacaaattccaaggcaatttcacttgagttttaggagaaacgtggccctccaaccttgtaactgacactggaaattcaagtgcctttgcttgctgctgtttaatggcaacctcatgacatgggctaagtcggctcactttgtgattcaggcccaagcagggagatgggggtgggggtgggtggcatcgactgagcatcctgagttctgtggtacggacagactaatgccaacaagagatttttttttactttacattttttccttttcccatttattaaagaaatacttgctcattataaacctgaaacatagaattatgtgacagagtgaagtcctttgtaattcattcccgcactgagaaaacgttggtgttctattttttaattttccttttttctgtgataatttcttttttaaaaaaatttttgaattggaggaaaattgctttacaatgttgtgttggtatatgtcatacaacaatgcagatcagctgtaattatattaatacatatatcacctctgattttcttttcaatgcatgtatctagaaagaattgtcattatgttataaaaatagaccatgtttttcataatgtttttcaacttgcttttttttttaacttcatatcttttggctatctttccatgtcagtatattttttctaactgtatacttttttaaattatctagatacactgtactttaaccattttcctagtgttgagcatttgggtgatttctagtttttccctaccacaaacttgcagtgtgcatccttgtctatttgtgtctttgtactcttgcctaagtatttctgtgggataaattcctagaagttggattgctaggttaagggaaatgaacattttatatggtaaccgccattgcagatgaatgattatattatttaagaatactcctgtgatcatccataaatgttataattgttttcaacaaacaacagaatgattgttacatcaaattactttcatagcaacatagtactcttctgagtccttgagaatggtccccttccttaggttacttggcctgaggaggcttgttaatacatgttgaacggcatgcgtttggggttaggaaacgtgcaggctcttatgtggttcttaaacagtttagatttagcccgggaacccatccatcatgcttcctgtctctgaagctggaagtggtgagggacacagcctgctgcctgaagtcag

SEQ ID NO: 49768 - DNA, 2607 bp, Bovine  19866880586235
  misc_feature (1)..(1): n is a, c, g, or t
naacttcccttgtgcctcctctcagtcatcttttcttttcctttttctttccttctttcttcctttcttcccttccctccctccctatctccctcctttccatccttcctgttttactgcatagtacaggctctcagctccacgtgcctgagcttgttggtaagttaggtaggtagctatagacgaggtagcccccatttctgcttctttccctggcacactttgccactggcacatttcgccatctggcacattactactagatcaagggggacagcatagtatgatggtacaagcatgggccctgggcccatactgcctgccttttatttcagctctgccagttattgcctcctgaccttgtgcaacataacccatttgctcatctataaagcagaaataataatagtaactatgcatgaagttattgagatgatgaaatgagttaataccctcaaagcacttagaatagtgcttctttctccccccacccccgctctctctctctctctctctatatatatatatgtatatatataaaacctccaattattattattcggtcttcaaaaactttatatgaataaaaaaggtgggtacccttgatctttttttttttttttacagtgttaataaagaccccattttacaggaaaaccctggttgtcccattgcctgtttctgtatcagatgcctgccttagctgatatggtaacagttttggtgccattatccttctcccacaccgaaaatcaataataatgatacaaataaaatcacctcattttatatgtatcacattgtaaaacgaaaaagcaaattcagttcaactgtggctccttgatttatgtagttggcagtgcctgtaaagtcttaagcaaatcaaatcctattctaaatgcactagagcccatgtactttagtagaaccttgtaagtaaatccttctttataaggtgaaaaatctttttatagttttctcggagcagggcacactttcctgatgctgcggagaacctcccttgttatgtgcaggcattgctctgccctgactggttccactgtacaaggatcacacatacgctgttatacagaacatgtattttatgtctgatgtgtacatagatagatccacgcgtgtacctagcagcatagttctgtgtgatggtcttgcctcacttggctgtccaccttaaactcagtgacttacatgaagcaccctgcctatttgcatgtgagaacatgttgagcagtatctagtaagtggagtgcttagacctgcttttccaggtctgaacagcatccacagcattgccatccagacttagaaacagcattagggcggtggggagggcaaaggaaagagacaagactctagggggtgtgatggggggtggtggtgctctcaccctgtcgtggggctgcatggggcagtctctgaagcttgctctgaagaatgacttagatgggttccataacttagccccgacctgctagagggcagtcatcttctggttgatttgctcagagatgggaagctgagctgtagagaaaaggaagtagaaatgtgagcagcctgggaaagataagtatccagagaaggtgaagaagtcaaggtgtgggggtggggcaggtcagtgtttattttagtctggatggttctagtcataaacagatgacagaagcccaacactaactacctgaaataagaacagacttcatcggctcaggttactgggatgtccagggcttcaagcacggatttacctatatgttcaaaaagtgtcctcagggctcctacttgtgtgttggttttgtactgtagactgactctgcccacgtgccaggaaagatgagcaccaccaaccagagtatcccgttctcccagtttgtacccggcaggcagaaggcttttttcttccaacatctctccatcagtcctggggaaggactcagattagttctgtctaggtaaatgggttcccccagttaagggtggtccagatgggagcaccaagatttgtgtttaaagtcttccctgctcctcacttccaactacgtggagtgggagagaagtcctctagagcacagggcagaaagcactggagaaaacatgcaggtctagcccttggctggcaaagttagctgttctcacagggctttaggggcatctaggacctcagacctggtgtgcagttaatggaagttaggtcattagaggatgcaggtggagcgggcaccttttgttcttgtatctgttgggatggttttgactacaagtaatcgaacaccatgactaaaatggcctaacaatagtgccgttatcttacatagtaagtcatctggaggtggggagttccagggttggttattatctgttcagcaatgctgttaaggacctgagttctttctaacttcctgctctgtcttcttcagtgctttggattgtctttttaaactgcggttccctgatgttctagagagagctgctggaatccctaccatcctgaaatcacacttgacagagtctaccagcagcaaaaaagacacttctgtcctgtgtctcttttcaagaccaatcaaaaccttcacagaactgccctcattg

SEQ ID NO: 49769 - DNA, 1691 bp, Bovine  19866880598880
  misc_feature (1)..(1): n is a, c, g, or t
ncctgcacagcaaccaagacccagcacgccaaaactaaataaataaaactttaaaaataaatattaaaaaaaaaaattctgggaaagaggcagggagagataagttatttgctagtactgacaatgaaaccagcctttatgttaagaacttttatttaaccaacatctcatgatcccatcatgtaggtattaatatccttactgctcagctgtagaaactgaggcatatggagacctgcccaaggtcacatagcaggcagagtaagagcaaggatctgaatgacgtctctggctccaaagactctttcctttacagtaatacaggagtcatgatattaaaccagaagtgaccagtaaagcaaaaaccggaactgagggtcagctaaacgctaagcagacactcatgttcccagtcagtgttctagaaccctctgtagactgtcacttaccactggatctgacagtggtgttcccaaggacagggtcagggccttgcattcggaccgactctggggcctgacctccatgaggtaaaagactaggacagtcctaaagttctcaaaagttcccaacatgcacctggtccccacacgaggagcaaggtggcatggaaggtcttccatgccttggatctcaggtaagctggtgaaatgttcattggccagcagaggctaaaggagactagggctgagggctctgagtttctcatttcgcaatcaaggaatctgaagaaagagggttttgtcagaacaggatagcaactgccaacttccagggcaggagttaatctccagacctaaagccttttatttccagacgctttgagtagaggctgtgatgcagacacagaacatctaagataaaaataagagacctttcttatcactctcaggctgtctacaagcacatttaaatgccttcaagttctgactcaaaaaatgcagaaatgaatacttacccaaaccccagactgacagaagcaccacaatcaaagtcaaaccaagacatcatgtcacgaatgcaaagctgggcatcaataaaaggatcctgaagtaattattttggggaatgccataggaagaattccaagcccagaacaaagatttgcagaaccttgctaagtagaaatgttacggactgttcagctgccagaaatcaagaatactaacttatctgtgtcctggggctggacaaaggcagacaaggagcaagcctgccgaggcaaggtaacacacctctcctggcttccgagagggacaaggagttctacaaggcacagggcttgtttcttctacaaggcctccgtgaaaacccggggatgctctcctactactttcctgagtcttcccagaagttggctgggtaaacagcccacaactgcagtacacaatcacttgttaaacatcagatgatatatttcagagagggagaacctgaacctatgttgctatctcatattttacagatgacaaacatgcgcttcagtgtagttaggtaactctttcaaaaacacacacctagtaggcagttggagccggcatttcagccagacctgtgtggttggacaaaatggcttgaacacgcatggacacagtgttttgatattacacccgtcacttccccctcttctgtgacatgatagtcacagtcacgtccagccaccaggatagaccacggggagggaaagatca

SEQ ID NO: 49770 - DNA, 2797 bp, Bovine  19866880600038
  misc_feature (1)..(1): n is a, c, g, or t
ngaacaagcattgcaaggaaaaagcgtaatcaggttttggggatggattttttatttgggcttctcacagtggttagagccactctgtcctcagaacaatcacagcacaggaaatgcgtcaccaagactgcccagaaaagtctgaccagctgaatcttattgcttaaaatacacatattcacaataactgacaaagggtgatgtgcctcacacaggaatgtgttagcaattgcaaatcttccgactgtagcaccaaacccttgacccgtccctttcttctcatttgcctggaacaccaggctccctcaaatctgcccggcccctcaagggtccttcagctccctacttcagtgcctccgtgtgcagggcagcctcatgtagcaggggccaggcggtgacactggactcgagtccagctccacccgccgcattttcgttttcttctcgtgcctttagggtcagacactgcagtgaacccagcagtaaacctgcagaccagttccccactctgactggagaaggaatcttcagagggccagaatccacccctttaaccagttaactccaacacggttcattttggtaaaacttaatagcctttgagacacttcagtgagttgtttgggattaaaaaaaaaaggcatcaggaaaggcatctgaggggggctgcaggcacactcctgcctgctctggccacacgtcagccacgtgctggacctcagcagagggaggtaagccctatggcactgtggtggccatcaaagcctcctggcaattctgggtagggccgatgcctgggccaaagccagtctgagcttgaccttgaagatccagtcaagcttctgtctgaggttccaccttggccctctgtcctgagggggtctggaccctcctgggggctgatgccgagggctgggagcagctggggaaagcagacaggttcagagcactttccgcttacagggaacaggacacaggcctccgtgtgtccatagagcaatgtgcaaattgcagtgaggggtagagtaaaacctctacttggagcacagtatctctggcaaacgtggaggactgccgtcaacagcactgctgagtacacccaagtgcacagtcagacatttgctcagtaaacagtaaatgcgtaaaataaattaccttgagagggctgcgcctgctccgaacgcatgggtaatgtgaacagagtggctgccgttcaaagtatattcacaggaaaacagggctaggggctcacacacaatggacagacacacacaggttactggaaaagtcatcgtatacagactgcacttgttcaacatggattttggttttgtggactccaaatgcagacacttgttcacctcacagcctcagatttgtctattttgtgtgtatgtgtttatatacatatacatatatatatacacacatacacatagatacgtgtgtattcatatatatacagatatataccttcctttcttaaccaaaacgtcaacgcctactctgaatatcatcattcaagagtgggggaagaaccaagctcttcatgtgaacagggctgggcagggaatgttagtttcggcagtttgctttctccattcagattattcctatcaaagctcacctggtttctgaagcaaaactacaggaatcaaggatcctgtggtccttcaggagggctgcctacaccttcctatctgggccactgagactctttacataggctacaaaaatcagataccccactcaaggggtggtgcggagcaggcaaagggcatgaaaaccacagataaccaaggcattcttattccaagtggtcagtttgaaaaaataaacaaataaacaaaacaacttattcagaatcaagagaaaatactgtgtgagagccagactgtgggcctgcccttcctcaggacccacagcctcatttgttcgtagagaacagtgagacgtgaaggctggcagacgtgtgtctgggatgggggtagggcactggtcacccatgggtgcagatcaaagggcagagacaacgggaagttgcacctccatccgctgccacactgcagggcctcctgctcatccacaggagttccagagacagcccccacccaagcctgcacattatgtatctcctggctcaactatagccaggctctttgaaggccaagttgagaaaaagacacaaacttcccttttccaaaacagaattcttgcctgcccactggtcaaattcttgttttcagcttgcttttgttgttgtttttttttttcttaaaaaaaaaaaaaaaaggcaggtatataatcttccagcctggaaccagcctgtggccagccagatcctgctgagaagggaggggcccctccagaacaccctggcaccgcgagctcgtcagctggaatttgagagcacaagtcccttaccaatccaccacacaactgccagtcaactctcctccccaccacagcagaacacaattctggctccacagatgctggtagcaaggggagacaatccctgggcctctgtgagcttccttcttcatccagggctgagaccagccacctcctctggacagagatgcagcgaggttctcatacactaacaccggaaagcacatccattccatcaccaagagtcacctcagggcacggtctcattccctccttgggggcttttgaacacacatctctctgacccaagcaggcagtgagatgtgactttaaaagaggtaaaggggaatggggtggggtatgaggaatgagtcacaggataacttctcagccctccacagca

SEQ ID NO: 49771 - DNA, 1668 bp, Bovine  19866880611972
  misc_feature (1)..(1): n is a, c, g, or t
ngcattgaatatacttacagtgttgtacagcctcaccactgtctacttccaaactgtcttcttaaccccaaacataaagtatatccacgaagcaataactcccccttcgcctccccccaggccctggtaaactctaatctgtctctgtgaatatgcctatttcacttaagtggaatcatataacatttggtcttttgtgactggcttgtttcactaggcgtaatgttttcaaggttcatctactttgtagcatacgtcagaacttcattcatttcctaaatatttgtttatttggttgtgctgggagttggctgcagtactcaagatctttagtcttcattgcagcatgtgggttctagttccctggccagggattgaacctgagccccctgcattagaggtgtagaatcttagccaccggaccacaagggaaggcccctccactccttcttatgactgaacaatcttctagtaagcgggtatgccacctttcgtttgttcatcctcagttgatggacacttaggttgtttccactttcggctactgtgaataatgctgctatggacaggggtgtacacgtccacagcatgtacatagtatctatttgggtccctgttttcaattttgggggtggtaaatacgtggaagtggaatcgctgggtcatatagtaactctattgttacttaacctgttttacggagaaggaaatggcaccccactccagtgttcttgcctggaaaatcccagggacgggggagcctggtgggctgccgtctctgggctcgcacagagtcggacatgactgaagtgacttagcagcaacctgttttaaaattcagtttcctctctataatgggaataacagtggaatatacttcttgttttttaaagtttaatgttcatttattcatttattaatcaattaattaactattggcttccaagaccttaacttttcaaaagccctttgttcccaacgttagtgtggacgatgctcttgcaggatgcctttccttttgggtcttagacaggtaatggaacgggtggtctggggattgggttcggaaagggaagggggtgggagcttacttatcgcactactgctttgggtggagggagccttttagaaaatgtctcgcagttatagcaggccagctcccttacagaattttccaggcttttcttcctgctttctagttgctccttactcccctggccaccgggttcttaacccccatgtatccctgagctcttgctggattatctgttctgattttccatgagacaccgtaaaaccattgccaaagccttagtgaggaaacagttgaggggtgaggccgggaaggggagaggcggagcaggattcctgatcaaaaccccttttattccttctccattttgattgggttagtgagcaaagatttcttcacagttctctgcttctgaagagattctgagttggggtggggggtcttcttttaaagggaagggctccttttagagactttctccttttaagcctgtggtcagggctgtgggtccgatggacgtcctgaatgtttcagaggggtgggggtgggactgaccacactctggtcttcctgatggatttttccaagccagcagacccccgtggcacagacttgagtactttgcgagctgccgt

SEQ ID NO: 49772 - DNA, 2448 bp, Bovine  19866880611973
  misc_feature (1)..(1): n is a, c, g, or t
ncaattgaggatgaacaaaccaaaggtggcatacccgcttactagaagattgttcagtcataagaaggagtggaggggccttcccttgtggtccggtggctaagattctacacctctaacgcagggggctcaggttcaatccctggccagggaactagaacccacatgctgcaatgaagactaaagatcttgagtactgcagccaactcccagcacaaccaaataaacaaatatttaggaaatgaatgaagttctgacgtatgctacaaagtagatgaaccttgaaaacattacgcctagtgaaacaagccagtcacaaaagaccaaatgttatatgattccacttaagtgaaataggcatattcacagagacagattagagtttaccagggcctggggggaggcgaagggggagttattgcttcgtggatatactttatgtttggggttaagaagacagttttggaagtagacagtggtgatggctgtacaacactgtgaagtatattcaatgctactgaattgtacactcaaaatggcaaatttcatgctatgtatactttaacatactaaacctttttaagtcatatagcaagaaaggggttaagctagaatttgaggctaaacccgtctgacaatagggcccctgatctcaacccaagggtttcactcccccaggcaaaagcagcaaacatggaatgaagagaactgcattcaatgcatcactatctgtgtgactttattcaagccttaccctgggaagcctcactttgctcaactgataaaattggatagctgtctgttgattgtgatttcgtaatacagagtgtcccaagccgtgattcctgatccagatatcatttgcttctgcccactctagagacgttgatagacagtgagcaagggacagggactagctatctgtgcccttacctagcccctcccctaggggtttgccctggtgtggagccagctcttgaaagaagcctcctctcccttcctcattctggaagaggactcctggctgtgctgcaggataaacttccacaaggtgagcattaacataaagtcaaggagaaggtcaggggagcccttaaaaaggccttcttgcaccctaaggtggctgaagccactccacagctctttgtcctgactgctgccacccagacacaatgtggctgctcctggctgtctttctgctcaccctcgcctatttattttggcccaagaccaagcactctggtgccaagtaccccaggagcctcccatccctgcccctggtgggcagcctgccgttcctccccagacgtggccagcagcacaagaacttcttcaagctgcaggaaaaatatggccccatctattcctttcgtttgggttccaagacgactgtgatgattggacaccaccagttggccagggaggtgcttctcaagaagggcaaggaattctctgggcgtcccaaagtggtaagtaatgcctctgacccctcccctcaccagcccctgggcacgttgagctcttcagccaaggccatgcctgcaatgccccttctagttccagaagaatcctgtgattcttccagtaacagcctggtggggctgtgggtggggagcgacccctcagacttcacccagcttctaagctaggcaggaagaattaaaggaagactttattttctggctttttctggaggtgggacagggtgggagtggtggtttgagggggtcagggagcccttacaacatcatctctcccagctgaaaaagtgaaagtgtgagctgctgagtcttgaccgactccttgcaaccccatggactagcccacaacactcctctctccacagatttctccaggcaagcatactagagtgggttgccatttcctactctggggtagcctcctgacccgggaatcgaacccaggtctcacccattgtgtaaaagttctttatcatctaagccacttggaaagcccaagagtctagctctctgagcctgaaatctgagctctcatgattcactgaaagagtatctgtaaagcatttagcccagtgctggaagttctcaataactagccttgatgaacactgttcacatggaaaacgggttagtgattcctgtcctccgcaaaaagttgtgagggggaagtaccctgattcttggagggctgggatcactatttccctggggcttcctcgagctgctccagccctggggaattgacctatgcaagcacttttggggaggacgctgaagattcaacctgtcgagctttctgtttgttcccgggggcagaagggagtaggagctagtcaaccaggaacactgccagcctccaatacagcacctggctgaggggactcccctgaatgtcctgggcaatgccccctggctgctcatctttgatcagaccaaggcttgactcttctttgcttgggccagtcgg

SEQ ID NO: 49773 - DNA, 2854 bp, Bovine  19866880616711
  misc_feature (1)..(1): n is a, c, g, or t
ncttcgagagtcccaagtcccagaactgcacaggcttttcccacagttgcatcacaacggcgtgtctgttcctcgtgagagcatccaggagctgatgcatcgcggctgtctatctccagtgtcctgttgataggatctgttaacattctcagctccaggtctgaaatatacaaagaacagggcctgtttgttcaatctaagcttctaaggtttaactcccaaaggaaattaaattaggtgcctggagctatgacagtctgtcgtgtttctttgtagggaatgtcacccttaatatcatgcagatctcatggacaattttccccattcaattcttttaaaataatgcgaagtttccagcaggaaccagccaatcactaaaagtgaaaattgaggagccactagggtttgtccctccttttggtcctgccgtcccctcccccagctgagtataaaatgagtccacacacagatattaatagtacacatttggtagttgatctaccgaaagccaccataactcatactctctccaccaccaactccacacctttgtcagaagaactggcttaggactgaactcctgttggtgggattattttccccatttctccagctctttggagcctctctgtgtggtcaccattcctgtgaaccctcccccaccccctctcacccccagcactagttacagtcccaggcctatttacctctctggcagaaatgtccaccctcccaagtatttgtgggttagaaatcggttcagcctggcccggactggagccattgtaatataattgggttttaggtatgcttgtgtttgtgctcacatttgcagagatggcaacaagccccggaaattcccaaaatgtgaatatgacttttgtactgctcaagcagactggtgataactggtcgagagactccaggctttggggggtgggggtggtggtgggggaaccctaggataagagcaagaggaacagaggctccggctgtgggagctggaatcagtggcattgggcagcgccacagtagtccatgagaggagttaccgggtcccagcttagggagccaggaggaaggtgggagggagcatctcaggtgggcattctcacagacccgctttgcctgtccaaactttgtctctgtctccacttgaagcctaagcttcttaaacagaaactggtgaggagatacgggctggtggttggagctgttttgtccctgactgtgggcttgtagcctgagaaggagacgacctttggctccctgttaaccccaggaagaagcttgtccagctggggaatggactgctttcatggctgtttccctagggctccacccagggccaggcctagcaaaggcacccagggaatgcttctggaatcaagtaggttgatgggcaggtgaccggaagaatcaatacatgagtaaatgccgtgagggttagacttcaggaattggaagctctgctttgcacactaactttagagtccagagaagactgggacatggggacttccctggtggtccagtggttaagactccgccttccagtgcagggggcctgggttaaatctgtggttggggaactaaggtcttacatgccatggggcaactaagcctgcacaccccagtgaagacccagctcagccaaaaaaataaggaccaggagatgatcttttctccgctgctcacaagccatgtgacactgggcaaatctcataacctatctgtgtctcagtttcctcatctgaaggagataagctctatgagcgcttagcacagtgcccggtgtggtgatattttgtctgcccacttggggtagttttctcattccttgctcacacctccacccagtcaacttcctcccttcggaaacttccctcctgtgaggtgcctagtgagcctgcttgcttgccctccttcctctgccattccactttgtctgatacactgacctattccaaatgttgagccatatgttcttatcagaatggacaattccctggggaaacctgctggtattttctcaagtcctggatcctcctccttgtcataggggatttttcccacaccttggtcttcacctcgttgtttctcttcctctgtccccacatcccaccctggggcattcagaggctactggagaaggcaaagtagaggtggggagagccacagcctggggttacagaagggtccactgcagaagtcaggaggtcccatggaccagcatgcggaggagatgggtggaagacaggatcaggttgggaagaggaaagacatgcccagcctgggcccagtgtgggactggcctgaatagaggagcctgttgagaagatggccctgcaggttgaggaagtcctgggtatccttgctgttgactgcatgcatggttgactacacacatggttgagggtggtggttgtgcccctgtacgaaggggcaaggctgttctcaacagcaagcgtgaagcctcaaggtagcagaccagagtagtgaagtgggataggtgggaggtgccctggagaagacgtttcttaaaacttgtaggactcagtggctgaatggggctggcaaggcagggctttgggagcttggggcctgagaaaagatagacactacgcatgggagttgaggtgtccctttcccttcgctaaaatgagagaggctggtgcagctcatacattcctagaggtaccttccagggcatttccagattccaggcaaggcttgtattccaaacctggacagattccttttgtcctcccaagcggggctcggggaacacacaaaccttgttgaacaaggaagatgttggagtcactctcctctgccctgcggcttttctgtt

SEQ ID NO: 49774 - DNA, 1635 bp, Bovine  19866880688807
  misc_feature (1)..(1): n is a, c, g, or t
nggtaggtactcaataaatgttgaaggaacgggtgaaggccccatgttccacaatgggatgaaacaccgtttaacttttcagaaaattcatgtgtgaaaataatgacctttcaggcaaagaagggtggagccccaagcgtgttgcctctcttcactgccaagtagaaaattttcccaaagtcaaagagctccttaagggcagggaccttatcttttccatcaaagacaaaatgttgattgtgtttggggattttagtggatttatttaagcatctaaagtgttaaaagcaagtgaagaagaataacttaaaccaaggatgttctagtttattagttaaaagctcaggatctggagtcagatgaattagctagctgcatggcctcaggcaagttacttagcctctcttgacttcagttctcttttactacccacttcatcctcttgtaaggaatttagaacagtgcctagcacataggaggtactcagtattattcacccacctcattctgccttcatggaggctgcatagccattgtttcattcaccaaacctttgtgagcccagcactgtgcccattcttggagttggggatggggattaaggagacagagctcttgcccataggaagggcacaggtttttctctcattcactcttgaggagggaaggggaggggtgggatattaacttcccacttgagacttagcctaaacaatgtaatttgtgtatagtccttggagatgcttggaagaaaagcaaaggatactcatgaagagtgctgagaatttttcatatttgaactttccattgcattctctccagttcctttttctattcgttatgtccgaagcagcccacattgccagtgagctttactgttctgagaaatagttctaagtgaatgcacagtgctctttattgaatactctctcactgaatgcaaagtgctccttattgaatgggctttcatgcccagcaataatgactcagagaataacattgatattaagagctcagagaagttcagttactactgaagttaccacagttaataagcgtagtgtgagagccaaactttgaacccagatctgactgaatcttaaccatttggatcttgagctgcctggagatccctgagagtcctctgggtgacttcctcctatagggaagggtagaagagcagcaagcaacatttgcacacctctattctttgctttgactgagaggagacacaggttacaggaacttttgcattggctgctgccaaaaggcaccccactccagtactcttgcctggaaaatcccatccatggacagaggagcctggtgggctgcagtccatggggtctctaagagtcggacacgactgagcaacttccctttcacttttcactttcatgcattggagaaggaaatggcaacccactcatgttcttgcctggagaatcccagggacgggggagcctggtggctgccgtctctggggtcgcacagagtcggacacgactgaagtgacttagcagcagcagtaacagctgccgaaaggaatgggaagtgggtaggctggtagactcttcaggatgaaggagacatgagtgagcatcttaactagctcttgggccactgagtgagtga

SEQ ID NO: 49775 - DNA, 2499 bp, Bovine  19866880702473
  misc_feature (1)..(1): n is a, c, g, or t
ngacatacggcaggtctctccttctacccgcaccccacagtaatccgtttgggaggtcaagtggcaaaaaaaaaaaaaaaaaaaaggctttggagccagacaggccagggttcaagtctgctacttttatgctgtgtgaccttgggcaaatgacttaaccatctctgagcttggggttgctctcctataatattggaacagtgctgtaaactttgtatgggttttataaagatgataatgataccaccaatatttattgagcactttctgtgagttacctcatttaatccttttattcttctgagtagccatgatcacccacttttcccttttacagaagagaaaactgaggctggggttaactagcttgcccaagattctactgtaggcacagtgtgtgcccaggcccagggctgtcaggttagaatatggatgaaagaagatgccctagcatgcgacctgactctgcacttgctagctgtctgccttctcttcccacgcctttatcagtttccttttactccctaatagtggtatgtagtccagcattgttttagctggtgattcccactggcgattccccagttttgtgtgcaaactttctcccagtgagatgactcagaggtctggggttaggagcaggggtggctctgatccctgcagctaactggctccttcttccccagggacaagtatggccagaatgcccatggccatgggcgcacctcagtgctcctggggctgaggctgggctggctgccatgaggctgggtgggccctgggcctggctgctgggcctgcccacggctgtggtctatggctccctggccctctttgtctctgtcctgcacaacgtgttcctgctttactacgtggacacctttgtctcagtgtacaagatcgacaaagctgccttctgggttggagaggtaggccagcactggggcagtcagcccaggtgggagctgggcagatggcagggcagggtcctacccaggcaggagcagagggtaagctggcttgcccactaagattcagcaagaaaaggtagagctggaggcctcagtggggattatgccaactctcccgtcctctgtcctgtgagccaggcactgtatgcacacttataatatattcacatgtatttatcagcagtgccctggatggtgggagtttgatggggggcagtggcttgtgggttatggcagagggactgacctgagcacctgtttgcaggcaggaaagctggcatcatctctgaggggtggcgagcaggctggggtggggaaagccctggagaggacgctgcctggagcccacctacccgtctcccctctgcccacagaccgtgtttctcctctggaacagtctcaacgaccccctcttcggctggctgagtgaccgtcagttcctcagctcccaaccccggtttgtttcctggggaaagctcaggcctggtcctctcccacctccccctccccagggctggaggaccgctgcctgtgtgtggggtggggaaagaaagggaaaccactgccagccgttggctgggccttctcatttcctgagttcaggcagggagtggggcctgccagggctgccagggcatctcccaacggcccccctctccctggcaggtcaggtgctgggctctcctcacgggctgtggtgctggcacgggtgcgggcactgggctggcatgggccgctgctggcactgtcgttcctggcattctgggtgccctgggcacctgctgggctgcagttcttgctgtgcctgtgcctctacgacggcttcctgacgctcgtagacctgcaccatcatgccttgctggccgacctggctctctcagcccacgaccgcacccacctcaacttctactgctccctcttcagcgcggccggctccctgtctgtctttgcctcctacgccttctggaacaaagaggacttctcttccttccgcgccttctgcctggcgctggccactggctctgggctgggctttgtgggggccgcacggctgctgaggcggcgggttgaggcggccggcagggagccagggtgcccagccatggctgtgaatgacgggtgagtggccagcactctgctgggcttgattgccatgctggggctcctggctgatggatggctgcctggggtgggtgatgtctctggcccagcttaagctgttcttgattcccctctgccccgtagcctatgtgaagaagagctgcttgtgggcggcgaggaggcgggtagcatcaccttgggccagtacctccagcagctggcacgccaccggaacttcctgtggttcgtgggcatggacttggtgcaggtatgggagcaatgcccattcataggatggcttcaaatgcctcactcaagggaaccaccttcccagaagctggaaaatcagttctggccttgcctgaggctgagccgctgaatggcaggaatacaagttgggtagttagagacctgattctcactgcat

SEQ ID NO: 49776 - DNA, 1901 bp, Bovine  19866880747220
  misc_feature (1)..(1): n is a, c, g, or t
nattctttggcactcagctctcaatagttcagatctcaatagcctatggaaaggcttgtagttacagattactagaagagatacttttttcctctcaattcagacctttcttattctcgctgtgtgccagtgggctcttttttctagtctgctttctctctttgagggttttcaccttacattggaactcaggtccaagtgcctgttttaggtggactcaagaaaataaaacagctcctttccacagccactggaaaggcctgatctcatttatcactgtagtttctagttccccacccccaacatttttggccctggggttcttccttgctttcagctatataattaaaataatattatgatattttttaagttacctactcagctatatcatcagaagcaagatctttccccctagagtctcttgctcagtgcagtagctgtagcatctaacacaatgcctggcttgtgaagaaagtgatatcaatacatatttgttattcaattttagaaatgggtgtttccattaggaaaccattcctcttcccagtagagaaggccagagatggtgctccaaattcactagtacccaacagccaagagatttagcgtttgtgatttagcaacttgtgaaggatttcagttttcctatttttcactattaaacgttaatgctttcctaagggcatgaagatgctgttgccagttgctagcagggttttccagccccataaatcggcaaattaaaaccatccctggggaactattattgcccagtgtctctttttatgctggcattttgaaagttcttacactgattaaattgacctttacagtggctcagctaagaatagcaactcaaagacatggaaactcttaaggaaaatgatgttagtcccatagtttatgctgccgccaaagagatgagataattttttgcatatgtgcaaagacatactattcatccttttccattgtaaaaaatgttctttccagttcattgttggtctagctcactggttcttcctgcctgtgctttttgtttggtgaccatatatgccctgtttcttagagcagctggtcactgtgctaccagaagtcacacctataacaaatgagaattttgagggtcatcaccacagttattctgaggtgaaaggcctcagcatatgagcatgtgttattcactcaaagttcctttttgacaagtctacatttcttgtattttggggccaggagtttgtgcaaatggaacattgctgagaagtatctttaaaatgcgaatctcatcttacccccacgcacctaactcactacctactttttcaagcatctacagctgaaggactttccttgtactgtttcctttgttcttcccacccctcttccgtggctactaactttctaaccatcctggcagtctcagttcaggcttaccttcctcacagctgtctggacctccttaactagtttctgttgtaaactcttaccaaatgaggtgtttttccttcctacttgcagttttatgtgtatgattactttatcatcttttgttagactttaagctccatgagggtaaagacctttatttatttatttttaagcttgttttattttattttaacattttatttatttctttttgcctgtgctgggtcttcattgctgcgtgcaggctttctctagttgtagcaagtcggggctactctctagtggtacgcggacttctcattgcagtggcttctcgtttcagagcacgggctcgggggtgctcagatttaagtagttgcagcaggcaggctcagtggttgtggctcataggctctagagtgtagactcagggagttgtaatgcatgggctcagttgccccacagcatgtgaaatcctcggaccaaggatt

SEQ ID NO: 49777 - DNA, 992 bp, Bovine  19866880798844
  misc_feature (1)..(1): n is a, c, g, or t
ntggacagaggagcctggcaggctatggtccatagggtcgcaaagagtcagacaggactgaagtgacttagcaggcaggcaggccagccatcgtgcgaagttctgtaaacaccaccccaagccagtctggcatggaccctcccctcaggaatctttccttgccagtgggcacctttgaggtaatatccttgttgactgttgcctccctgacacctcccagctccagttcaggtcctcctctgggcagtaacaggaaaggcacaaacccccagcctccaaacactttagacagatcagccttcctgaaccagagcggagttaagtcttcccagcttcccatactccaggttgcaggcagcagctatggaaagtgcccccgccccgcccgccagcaggtcagctggtggggcccgacctctgagcgccctctgctggcaggactggggctctcacacacatctggaggacactgcccctcagcagggctccccattcaaatcccctctgcctccataacagatacccagtagaaagctgcccctcaccctccacgttctgccttgggttcctgcagctgagtaaatatttttcctatctctttgagtgcattcatgttgagttacatacaataaaagaagcccagccccctctgtaatcagccgtaaaacaagagggaagacggtattcagtgggaacactgctcttgatttctctaagatgatttgataaaatagtgcaagtctctatagatcaggaaatattgaggtacgcacctttgatggtgtttgtgcgggttcctacagatggaaagtgccacgtaagtgctgagctattcaccttagaaggcaaaaagaagatggttatcttattcatctctcttttatttgtaaaatcttttttgtctcctggcaggtgatcttttttttttcctggaaaccaattagctcctaaaattaaacatccttctcttgaaattagtccttttcataaaa

SEQ ID NO: 49778 - DNA, 1988 bp, Bovine  19866880856375
  misc_feature (1)..(1): n is a, c, g, or t
ncccccccaaatcatagaaaagcaaactggccacacccccagacacacgccttacggcaatgaggggagatgccatctctctagacgctgttgccccctcacagcaccctgcagcggtactgtcccgttctcacggcactgtgtcaccaccctggcaggtataccagatgttgaaaataaggcgtagggggcatgctgggggcttcagaatcaagaagcggtcctagagggctgactctaagggttgactggcttgaggttgcttggcaggatgcgtcagagctgcaattgttgatcattctttgaggacactgcctctctggtgtctgggttaccatcgtgttctgtcccaaattaatatcaaatgaaggggagcctgctcttccggtacacagttcctcggtgtaaagcgtaaggcttttaggcggcagaagcctccctgtgggacaccaacccaaagcagcaggaaatagacaccaaccctgagggtagttgagacagccaacagaaaaaaacgaaacacttctaggataactagtgtgtggttgatggctctgttaccttgagagtaccaggtaacagagcactggtattagcatccataatagcagattcaactcaaaaccctcagcccagtcatcagagaatcctagagttgggaaagcagttttgaaatcttctgttccgacctcctccctaattgggcagcttgttgcttgtgtggggtggtttatctctggctttcctggaccagttaatgatatcagattggttgctaagtaggaaagaatcagacgcctccaggccctccacatcctggaatggttcatctgtccatcaaaggctatttgtttcatatctttttctatctagatccgtgcaaccaatgagacaggctaccttggttgccaggtgaccgagccctccggtgacctcacctgaacgccctctcctgtgagagctgagcaagactggatctgccagaatcggtcgcggatggtgtgcaggttcagtccttctgcaatttcagaggcaggggctgctgtgagcagatcctgcttattagcaaagatgagcacgggcacgcaacttagcttttcttcctccagtaattcagctagttcctggatcatttggggaatagatggggaagagggggacgaaatctatgatatttaaccatgtacttctaattgaaactaaataaaagttaagctgatcaactagtaactttcaagggcagtagttctcaaacttgagcgtgtggaagaatcccctggcagatttctgggcccaccccaaagatgctgactttggaaagtctaagccagggcccaggaatctgcatgtactcctactaataaagtagttctgttatagggggattcataaatcatgcttagagaaactcaagggagaacaaaagttgtggttagacatttaaaacttacccaaggttattatatgcaaataactttcaatgcatatatatacacatatacatatgtatatatgtacagatacatatatatttttaaaaacttgaataaaaatgacagttgctttagagactataattctggttcatcaatctctatctccaaaacatgcatgcatgtgcattacatttcctcaaacccacatcctaaagtaactgcgttagtctatctgacaaggtctctgagttttaggtgattgtttgggatctaaactgtatgttaattctgtctgcaacaagtccaggagaaggtatatacttacctaaaagccaggacccaccccttcctccctcgacccacactttggccagttaaaacactggagctgtcagagagaactggatggtttgacgggcagatccctgtctgacacctttcagccccaagttcatgtgtagcactggttcacatgagtgatggtccagaaatcatcgaggtatggaagggagaagggctgtctccaggcgagttctcaaactaatttccagg

SEQ ID NO: 49779 - DNA, 870 bp, Bovine  19866880879847
  misc_feature (1)..(1): n is a, c, g, or t
ncccagacaagctggaacacaggtctcctgactcttaggagtctttcctcttcctaccccttcccaggccgtgaaagtcaagatttgttttgcttattccaatccagtgaggatgtcccatgtcttctctcaataggcctgtaagcctagttaggtttctaggcagtcagacagcacagactccagtcctactatttccctaccctgggataaggggcaatgatcacgactttttacttctgggggacttgggactcagttccctggctccaccacttcttttacaggaaccgtcattttgtgagtctctgctttactccttagagggattttgtgggcattaaatgagaaataggggtgtaaaagttttgttgtcaacaggaatattaaccgtatcttccatcctgacaacctgggtggcacccattgcaaagggcacacctgttgcaaacagtccagcacaagagcctaagtgtccaggggtagagtctcttcacccagttcctggagagtcctagaggccccatgaaccttgcccccagcgtccatctcccactagtctgtctcattttcctcctccccaatcctgcccttcagaccctcttcttaccacctgtatcctccccgccttggccacacaggcatcatctctcttctaaagacttcaagcaattgctgaatcccctcatgttctagaaagccctcattactagaatgaagactaccatttctctcccattgctaccccttatccctgtctatgctttcctggctgtgagaatagaaggcaggaaacccagcattcagtatggactctgatacactaggtcccccataaatgactaaaggagtctttctggcatcccatct

SEQ ID NO: 49780 - DNA, 1322 bp, Bovine  19866880919793
  misc_feature (1)..(1): n is a, c, g, or t
nagccgagcggagccatcgctgggtaggggcggaagaagaggctggagaagctacaggcggcccgcgcgcaggcgcactggctggcagctggctcccggcagccgtgggattaggcttcgcgtgccacaattgcggtgagcggctggccggcggcaggggctagggggcagcgggccggactgggggccagtcagacacaaaggacacacggagggggacaggagtgctgtctgctctgggagtcctgggggctgtcttcgggggttcctgaagtgatctggttgtggattgagaaagtgcttgggtcagggtgggaaaagcttgagctcaaggggtgaggatggaattcttgcagaggggactccctagagtcgccggcagctttaggccgggatccatttcattaacataatggcctttaaccctggtgatgtagtagaacctatagaggagctttaaaagaacaccgatgctgggccccttctctagagattccaatttatttaattggttgggagtgaggctgggccttggtttgattgagcagctcctcgggtgattttaatgtgcagacaggctggagagccaccacatggttcagcaccatggttgatcccagactcctctgtggcttggaacgggtgggtggtcttggggtgaagttactgaccctccaaggaaatggtcccaactcccaacagggtgaaattgacttctagcctaagaaagaggatgggcccattagtcactgcatggaaagtgggcacccttccagggtgggcctccccaacagccctgccaggggttgtgggaagactaaacagggagacaaaggggatgtgaaacaggaaactcagcagacaattcaaaggtcaccttgttgaaaaaaggacaaccttaatatttgcatagggttttatacctttaaaattcatttaataccccctggggacagacagggaatggaatttttctcccgctttgcagatataggaataaactagttagtgaatagctagttagtgataaggttcagacttgcagggctcccaactccaaataatgcttactagtagatttttcccctccatactaattgcttctcatacagtctgcagtccttcgggagcccctcaccccagggggccctatctggcccccttggttttctctcccaagtttatcagctccctgcccaccataggctggttcaaagagcagggagctactcttgtttccgtgcttttctagttatttccaggagcccgatggggtgaagaggggagcatttttgaaagatgcggggggggattcttctaaa

SEQ ID NO: 49781 - DNA, 1512 bp, Bovine  19866880980137
  misc_feature (1)..(1): n is a, c, g, or t
ntggggccaggtcagtgggatgttgagtcatcttcccaccttggtcccatcccagggaaccctgcctcttcacagatctgccaaggaccaggaggtgagaaaagagtctcttggtggaattatttctttgcaagatgctttgctggtcttcggggtaaagcttactactctggtcccctacactgagattttggtctaagacttatttctgcaaacacacactaaaaagaaaattaatgttggttgatcaaagggtgggcttagggtagatgctgaacatgattagtgatttttctagctgtttgttacagcctcatggatcttacttaaaagaatttttttaaaatagccaataatggttgaaattttggacaaagctgtgaatccttccttaaattagctctttttcgcaaaagcaactgaatgagtctaataactgtacagtctctcagaacctccctggggcttggcacatcattagaacaagcaggaaggaaagaaaagggtcagatatttgcatgaggggtttaagttgttctttatggaaagaaaaccttttataattgctatcacatgtgtttgtattttatgcaggaccaagtatcttactcttcaaaacataaagaaagggggaagcatagagaaaggaagtagagcagctataagcacatgtctttatatatggctgcttttcttttgaagatagttagggatgccctttctttaaaaccatgactgcttctctagccaagactagcatgctgagcttccaacaggagagccataccctccttctccaaggcccacccgcctaggttcagaggtaagggtgcttgcccctgcccttactttgtatctgcaagacagtgtgtgtgtgggcggggggtagagtctataaactggtctcatactcaggcctttcccatcagaggcctgggcagagctgaggccagtatgatcctcgggtttggcacggctttcaggctagagctgggccctgtgtcaattctgtgggtggccagggcttgttctcctgcacttgggtggactatggtcgtttcctgtaactgttctagggcttccactcacctccccgacctcagattgcaaggggcaaacctaaaacacaatggtccctgctggaggtacaatgtgaaatacatacacacaaaacccaggagaaatgggtcagtaaagctccctccattccaccttgctggagatctcactggcggtttaaatactgccaagaaatgctaaaacccagcctgggcaaggggaaggcaaggcccccacctttgccggagagccgccggggctgagcgcccacgcagatgctccggctgtcctcgtcatcctcggggggccggctcaggtcatcccaggcgcacttggcactgacaccactcaggttggagccgtctgtctcgatgcctttgtcaactcgctcctgctggaaagaaccaaagagccagagttccttcagccaaccagggcccaaggtcaccaccc

SEQ ID NO: 49782 - DNA, 1943 bp, Bovine  19866880986139
  misc_feature (1)..(1): n is a, c, g, or t
ntgtcctttgggagaggtgtctgtaatcccaaactcaacccaccactacccctccctcttgtcttgttccccaaagactggtaggtctccttttccttgttctgtactggagtaaccatgaccagggaagggcttccacagcagccttttgctgaagcaccaaggctctgtccccattccccacccccaaaccccaggaagtctataaacgtcttactagaaaacagaaccttgttcaaaccttaaaaccagcatctttaaaccttggctgctcaccagtctgcaaggaaacgatgtcctgagatgccctgggagaaactggcccttgctctttagcctagacagaggccccaaccacagctccttggcgccagccagaccagggtcagatcatcagcgacccaatccttccgactggagaagggctctggaccagctggcagggcaagattgagaccctcctggccaagttccagacagacgaaatcaagggagccccacaaggagggagggtcaaagttttccatcacagcagcatcttcttccttcagagagctttgctaatccaggggtacctgactcctgtcccccaactcagtcctagccttccctggcccatgaccctgaggccttgctaaagagcccagaggagacggtgggcagctgtggctgactcagcccccagcacacgcagccgagagagatgacaccacccgtgagctgatgagaaagaggttaaactggaggtggcaccgtccttctcacgggtcccttgaccccatcggccggtcgctgatccagagctgagcaacccctcagctcagaaagtggagagcgtcccagctggaggagggaagtgatccaatctgctcagactctgaaaggaacaggtaaacaacatcccctttagaagaggtgggcgagtgtaactgggatggaatcaaccactccccaactactgattcagaccattgactggccgtgaaatgagaggtgaagaggagaaacctgagggccaggggggcaggcatgtggggatgacgtgccctaaatcacccagcgactcagcagcagggctggggcaagaacccaggatatttcagtgatgtggaatgagaagccagcacgctctacccacaggtcttctgcatctgtgcagaagggcttggctgtctggctggcaagagagggtagagttgagtgtcctttcaggaagtgacctctgacacctgcccaaactgcccttcccctgcctggaaggccttttcctactgacctaaatccttttagtgctcagcttttgttccttggtgtggaatcgcatgtgcatctgagcacctgcctgagctgcaaatgggtgcggagacctccagggacactgtctgccccagcatctctggaattcaagactgagccctcttgtgttcttttggctgaatgacaacctgacaagcagaaggttagacacacaagagaaatgagtcagatgctctacgtcactcaactaattggtctggtgataaaagaaccctaactccttatgcagaaggaaatccagatctttggcaaagttcgaaggtcttcatcaagactctacagccaccttttcagcctcagactgcccttaaccagagtagtggtgtgatagcaaataaacattaaacaacacaagttatttggtgctggtgggagggaacagccctgatttgtagtttgctgatcactgtggtgtgaacattcccatcatgaccaatttccagccaccaatataatatcacacaggagctggggaagagactcacagtagcaaaacatactatttgccattatattacagttaataccattatacagtattcccaccctacatagacataaacctcaagggcatcgataatagcaatgtagtaaaataattagaaaatgatcagtgttgtgtattt

SEQ ID NO: 49783 - DNA, 2513 bp, Bovine  19866881023374
  misc_feature (1)..(1): n is a, c, g, or t
nctgcctgcagtctgacttatcagggaccttcttcccctcattggctcgagcattggcctctcctaccttgagagcctcttccctgatgctccctcagcggtgggcacctccccccagtcttcatgcctcccccaccctttcattcacagcagcctcccccacctcagccattccccttgcaccatcagcactgaacataactgactccaaattgactccaaagcacttatgagtctctagaatgttcatttgtcagccctcactagaactttaagtttcatgaaaccaaggagcctgagggtccaaatagtaggtggcccataaaatacttgttgaaagaaacgagtgaacaaatgagtgagctgctcagatgcctttggagaaagaaactgttttatgtacatcactgccagggctgcaggctgggaaagaaggcagagtgggaggggaggaagaaggaatggtgggagggggtgggggagctccctctaattctgtgcggtgggggtcacatagggtggagtgcatgaggtgctaccctcagcctgggcttccttccaggcctggcgcacctcgatcttcaccttgaaaggtttgatctgcaaaacgagactggcatggccctccagagagggtagcttcccatcatccgggatctccaggttgaacctctgcagcagccgggacatgaagaggaagagctcctggcgggctagcatctcacctacgcaggagcggggtcctgctccaaagggcaagtagcttaacgatggcgagatgagttgcgcccccgtggggtccaagaagcgctctgcagacacggggaggcgtcagccaggggccagggtcagtgtcagtagaggagtagggggaggacaagccctgcctggggagccccagtctgagaaggtggacagccttatttgggtgggggggggggcggcaatcttaggagagataaatgccctgctctcaggtagcccttaatcacacagagaagatggaatattcaggaaggatgaaaaggtgtattaaacatgaaaatggcaccatcccacaggagagggggctgacttcacaggagacatatgcctatgggccttctcagaagaggaggctgcagttggtggaaggagagtggggaacccagctgtgaagaatctgggtaagtgtagggtaggctaggggtgtcaacaggtccatgtagtgggagtcaggagtcttctagcaggaagcttggcagaagggaagcaatgctggagaggtgggcacagagggggctgtgtggctggcggggcaggacagaacagggactcaccgggcatgaacaggtcgggatgctgccactccttctcactgtgatgcagtgcccacaggttgaccacaacgtctgtgcctttgtcaatggtaaggtcgccaatgctgctccagagagggagaggaaaagagggtctggagtatcgttcttccccaccttctctgccccaagtctccgtggtcactaccctggggaaaagagtcctttgctccctcatgcccgctccctcatgcccactccctcatgcccactcctgcatcttctcctcagcttctgccagattgaatatgaatccagccctctcttcctgagtagcacttaggatcaacacttgtgggtctgttagggcctgtgggtgtgcatattgagctggtgcgtgtgtgcatgagtgcgtgtgtgtgtgtgttgcggcttttggattgggtaggagcacgtgtctcccaggcagcgggcagcttctgagggaggtcaggtcgatgggtcagtgggtatcagtgggtaggagacacactggtcagtaggtcgtgggtacgatgatcggttgtcagtggttgactgtaggttgaccagccagctggaagggtcagatgctgggggagggaccaggagggttgggtgttcctgggagggaaggcacacctggagtcaatgcacagccttgtgggggatcagcgtaggggccacaggccggattcggagcacttctctgatggtcgcctccagcaggacaaggcggttccggtcactgatggttggggtgcgattgaaacctataatctggtcaatgtcatcctggatcctcttcttcaactgggggccagaacagggtggatgttaccaggatgtatcagcccaggaggagcaagggcttagaagaacctactgtcacacccagaagggcaagacccttcccagaggtggctctacaaccctggctttgcttgcagaagatgaggcagctccacccaaaggccagagccaaccactgcttgggtaaagggtgcagcacagtcatcctgcgaatcctgcgaagaacccccgagatactgactctccctttctctggagcagaggtgagtgtgcctggggtcaggagtgcttgggaaggctcgggtagagagaaactcactgaaggatggtgtagcaggtaggccacgatccactttatcacagacgggggtctctacaccagcc

SEQ ID NO: 49784 - DNA, 756 bp, Bovine  19866881034973
  misc_feature (1)..(1): n is a, c, g, or t
ncagacggcgcaccgacccctgccaacttagttcagcaaaacctccatcccaatcgcctttcacgcccgtaaaccatcagctcatcccagccctcacggccagtcctcaggcagcttcttgccctcctgtaggcagcctcgcaccaccaggactcctccagcccggattttaacacggatgtgtgggagacgggtgcgcaacccatgacgcccccgctcctcagcctggcacacgaaggtactggaggccataaagagatccacaggtagcgcctttccttgccacgtggctttggcaggtggaagcccagcccgcgccgcagcctcgcctgggcagtcaggacagaaatgcaaactccctcctgggatgtggggaataaaacctggcacaggtagatgttgcaggaggcctcctctcaagatccttacctggatccgggagaaacggactaacacagccgcttccaaaagcagcccgctttggcagccaggccaggatgcccttctggcctccgccagggaacctcccctcgccccgccctcacaccctccctctggaccaatcacaagcctggtggcccccgccagccacgtgggcgagatttcaccattccccaggtctctgcagcctgccgccttctccggccgctccagcagcccgcctgcgcagtgggagggcagattggcgcgcttgcgcacattggggaaagcggagctggaccccgccccgttctgctgctttgctcctctgccgtg

SEQ ID NO: 49785 - DNA, 725 bp, Bovine  19866881051950
  misc_feature (1)..(1): n is a, c, g, or t
nctgcggtcttctgagaacacagctgttgccaactatttgttccgggcttctgagatcaggccacccctgccccctctttggtctgagaggcaagtctgtattggaatgtgtagctgtaatcagcagcggctgtaagcgggggtggggacagacacacacccttctgctgcctgttcctgggtgagaaaaagccacagatgtgatcaaaccagagtcttacaaaagaaatatatatgcttctagggactgctgtttaacctcatgcttagaacaggactagagtgtcccttgggtggcctgaaattcttctaaaagtaagcttttctgaaaagctccacatgttctattactgcttttgttactgttcagagttcctttgatgcagagacaggcagagagagtggggaccctattggagcacttcctctgtccctcaggaagggctgtccttttgacttgtgggcagagtaagccctggcgaggattttgagcagtgttggaaataggaagcatctcatgctatgtcagcaggtggggaatgctgctgctgctgctgctgctaagtcgctttagttgtgtccgactctgtgcgacccgagatggcagcctaccaggctcctctgcccatgggattttccaggcaagagcactgaagtggggtaacattgccttctctgagatatatatatatatatatatatatgtgtgtgtgtgtgtgtatata

SEQ ID NO: 49786 - DNA, 1568 bp, Bovine  19866881090844
  misc_feature (1)..(1): n is a, c, g, or t
ncatgcccccagccccaccaacgagatcaaaggcggggcccagagcggttcacttccacaagcgctgtggtggccatttttaagaagggcaattgcccacaagtgggcggggcttctgtttccagtcccatttgtctcagggttttggacgggttctcgcggcggccatttttttttgagggtagggaggagttaggcatgaagattacgccatgggtggagtctcaccgactgactgtatgccctcctagttccttgtctgcccagaccaaggacgtttggcccaacccagtgtattcccatccaccttatttccgagccccccaaatctcgctcaaatcctgtatcttcccctcgacttctccttgtttttcccgtcttcgcacaaacccgtggctcactggttgattctggtggcccctatactcccagacctggtgttccccaaatcccactgtctctcctcctacgtgtccagtccagattcaagccctgtcacccatcaaaaataatcagcctaaattcattcccatgctgaagagaagcatttgggacagcaaattttgctccctatgtcagcaaataggaggaggtctttgatgttgtcatagggcatgggaactccccattctggtctcccaagtctatttaattaaggcttctgtttatcaatttttatataggccacacgttgcccagataactcttaagtactgacttgcccgccatgcaagtgtgtgcatgtgtttcgggctccttgtgaccccatggactgtagcccccaggctcctgtgtccatggaattttccaggcaaaaatagtggagtgggttgtcatttcctcctccaggggattttccaaacccaaggatcgaacctgcgtctcctgtattggcaggaggattcattaccacaaagccaccagagaagactatatctgcccctatgcattctcttaacagctatgtctccccaagattagggtggctacagggcctaagtttgggtggtttggatgggggaaggggcagcaggtgctctgaggacccacctgagctcagatgcaggatgcctgcaggccagtacctcaatgctccatgttggcagggctcctcatttaggacaggatggctgaaccccagtacccagtaaagccccagcttcctctttctgttcctgctacctcagcttcccggtgctatccaggggggaagtccagagccttcccttcccagaagtccttcaatgtgtcatgatggaaggagttccattcaagaatgagctctcccattcccagtcacgaggctgagcctcttttcaggtctagtccccctgtaaggtgctgggggcccagagattgtcactatgctgaggagctcatggtccaaggtagaaagtcccattctctatttcctaaggacagaagcaatgccataatatggagaaaaagaggatcaccactccctattccagtcctgtccctcacttcaacctcccacctccccaccaggattctctggcctcaaagtgagcaagatgtgggctgactggggaaagaaggagggagca

SEQ ID NO: 49787 - DNA, 1091 bp, Bovine  19866881109507
  misc_feature (1)..(1): n is a, c, g, or t
ngaggcggctagtctgatggggcctgcagatatggggatagaggacagaaggtctgggggaccctgtatagttttgggggtcttctgggcagaagcagcttggcccatgtccaagctgggtggacaagacatgtgcctctcccgatgtgggcctgtattgggcacacggctggcaatggaagggagaactaaagggggctcagctgctgtgcctttagctgcccccatccccagaggacccagggaagggtaggggcctggtgtgtcctcaatctctgctcctacaagtttagagagtccatcccatcacagctgcctcaccctgtcattgatctgaacaatctaattcagagttccttcttttgccttactctgtctctctgttggaactgggagtatcaggccataggttctgtcctgccaaggccttgcagtcagggtggagtgaagcagggagctctataaggaggctgcgcgacagctaccagcctcattgccctcggggagggcaggtggatggtgtctgagtcctatgtccttttctgctttccaaaggccactctagacatcctgtcagacaaccaaaagggcattgcctttgccgaccatggtgcccactggcagctgcatcggaagctggcactgaatgcctttgccctgttcaaggatggcaacctgaagttagagaagatcagtgagtgcctggctggccctgggctgaaggagcctgcagagggttggggagggagagggttctggtacctccattccacattttcttggctaccactgccatctgctggacatctgctctcttcgattcagatggaactggtcgagatggcggtgaagggatgactcaactcccgccctcacacccctctctctccccagttaatcaggaagccaatgtgctctgtgatttcctggccacccagcatggagaggccatagatctgtccgagcctctctctctggcggtgaccaacataatcagctttatctgcttcaacttctccttcaagaatgaggatcctgccctgaaggccatacaaaatgtcaatgaggcatccggaggttcgagcaaggaa

SEQ ID NO: 49788 - DNA, 764 bp, Bovine  19866881243941
  misc_feature (1)..(1): n is a, c, g, or t
ngattcccgtaaaggcctatgttgccacttttgtttctaggatttaagtctcccctaaaaacacttaaatttaaatactgaataaattacaatttacatgcaaaccacttaaattttaggccataagatcatttctgaggagttgactgttttatttcagtggagtagaaacacaatctttcaatcaccaatcttaagatcttggaaaagtgcagagaaaccaggaattgttttgccttatagttgatcagtattactaacagatgaaagggaaaatattttacagatccatagcaaccagaaaagaggataaatcaggctgaggaaaagaaatcgtcaggaaaatcaaaaagagtatgaggaagaaaaatgatattaatataaccaggcagctccatttggcttcagttaacttactagggcaatggaaccaggaaaagcgagaactcgacagctctcattggtaatgatggaacatctcctttcagaaaactttacttgaggcaaagatattaagatcgaatacacttgggatatttagagagaagccagccaggtaagcggctgatgagaaactgaactgcagcctagcaacatctcacacctggggacatgctctaactgcctcactcaatcttcctgacttctttcactcaactgcagagcagggatgaggaagcaaaacccggtccacttctcggatctggaaagaaagccctgtggtgtgctaccgggcacaggatgccaaggctgctgacaatccc

SEQ ID NO: 49789 - DNA, 1654 bp, Bovine  19866881262310
  misc_feature (1)..(1): n is a, c, g, or t
nggcccagattccatcccctggtcagggaactagacccaatgaagacagaagatctcaacaaagatctcaactaagacccagtgcagccaaattatatatctatatctttaaagtaagcggacattggaaactatataaaaaggtaatttcttacatcaaaggcatttgaactaataattttggatgacttttcaactctaatattccaaacttccgtgatcgatgagcaagacctgagtttcccagataaatacctcctttcccttatcctcggaagacttcctgagctcaggtctgaaagtctggccagctgttaaatgttctgtcatttacagaacaagcttcaggtccagacactttcttcccgggaagattgagagtattacggagtctccatgaggctgcagaggggccaccagatggcactctagaacctactgcaagatcaacttccttcctcttcctctaagtcttcccggcagccgggcccgctccgggcgggaccagagggctgaggcatatcagcttccccctggggttccccgacttcagaggtggccgagcattaggcggagcatagaaccgagtagcagcaggggcttccagccggcttggacaggcctgggtgtgaggagaccggagccaggtccctcggctggggaatggcgctcggtcagcggatcccgcagcgggttggcagagctagtgcctgtctgagggtcattctcactctggcttccagagctacacaaatgtttctcctccaaggggcgccccagagtcactcccgattggttgtgtaagtccaggagttaaactttcagccaatgaaaaagggcatggcgagtgacgcacggaaacgtcacgggaattcccccctcccgggggcggtaaaggggctttcccggctgcagtcctggtggtgggagaggtgtcgcgacccgtccgaggtgggtccggccgggagagaatcctgaaccggagccgccgccgcggtgagtggccgggttcagacccctgggtggtgggacaccggcaagggtgggaggagggtccttagctgaccgagccctagagctgaagagcggcatctgcgcattcagagagcgcgtatacgaacatgacacgcggatacacatcgatatccttgtacaaagacacggggcgtacgtccatctacacgtatgcccgcagatgcacaggatcgtccatgcactcagactcgcacacacatgcatacgcaaagcacactcacccgtgcacaagtgcctggacacacaccctccacgcagaaactcaacgacaggttcacctgtgccctcagatacatgctgacatgtgtccacactaataagtttaaggactctcacctgtacacgcatgttcacgtcatgcacacaatgcgcaagcacatgggctgaaacatagacacctgtgatgtacctatgttacatacggccatgggacaggggcgggggaggtgcacccaaagcaggtgcggtgtgggaatcaacgactgttgagattttcgggaagagagaatggaggtgcccatcccaacaccccctctggccccttggcctcagagactgcttctcgggacagaaccccggggccctctactcggaagagcccccacctacaggccttcgg

SEQ ID NO: 49790 - DNA, 532 bp, Bovine  19866881323671
  misc_feature (1)..(1): n is a, c, g, or t
ncgctgggcggctgcgctcgcgctcgctgtgctccgtgcgatacggtcgcacccaccgcggcgcggagaccctgtgctacggctggccgcagcgttcgcgcagtctcaagcccgtgctctacaccgacctggtggtcagccgcctgcagagccgcaagaagaaaaaggcggtgagggctgtggggccgcagctcacgccaggctggggggagaccgagggggttgctgagggcggcgcgccactgagggggcggcttgagggaggcgtcgaaggcggcacgagccgatgagggcctcgctggggggggagcccgacagggacagagcccatgggtagccaggggtgggcatggatggagagggtagggcagaggccctgagatcaagttggggatctcagaccaaagggtccttctaggtgagagcacgatatggggctcacgcgtggagtttaggacttttggaaggaagacgtggttgtggaccaatggaagtgccgagagggggtaggggatgaactgggaggctggat

SEQ ID NO: 49791 - DNA, 731 bp, Bovine  19866881662190
  misc_feature (1)..(1): n is a, c, g, or t
ntgcggtcgtgatatttctgagtctgcaaacagcactgacaatgcccactccttcccctcggtgtgacaatcctcactttgtctggggccttgtttgctcttcgtgttgacacgttgttcttgcttcccaacaagtttggctttctttttccctccctttccttctctcagggaaggaaatgtgttgtttacagggtagggcctgccaaggagctgctctggcacccatgatggcagggaggaggcagggactaggaagccatccagtctgcgtccccccaacaccaacaggccggacaaaagctagacaacggcctggagcacccccccccaaccccaggctcaggggcagaggtgcgggtgcggcaggtaccactgcagcagccacacaatgaggctgcattcatttcctgttctcggtgggtggcgaggggttggctgaggtggccaggagcgggctcagacttctcttgctctggctggcagctggtgagggcacgacaggccctctcagtcctctcctgtacctccccaggcacagtgctgggattgaagccctatggctgtacctgtgacaacgaggaccctcggacagccaagcaaaggtcttctgggattccacattcactagtggaaggagaaatagcagaggaaagcaagaggagctgcgcagggccaaggccagggttcaccaagtgtcttccacacaatgtccaaatgggtgcatggga

SEQ ID NO: 49792 - DNA, 2548 bp, Bovine  19866880234438
  misc_feature (1)..(1): n is a, c, g, or t
natgaggaacacatgtatacctgtggtggattcattttgatatttggcaaaactaatacaattgtgtaaagtttaaaaaaaaaaaaaaacccttctattgagtttttcatctgctatcataactttaattagcaatagctcttcagtgttttttgactctttttttaaaaaacaagctgatcctatttcaaaggtacaacatcctttcttaaatttctgagaaaagaaatggcagaatttttgaaattattcttttctttgcatccttttttggtctttttgtcccttttctcccatttgtgtgatttagtcattgtctttgtgttgaggctttcctcaaatatttggtgattcttggctgcccattctcatttaagagaggataaggttgccagatgagatacagaatagtttaatttgaacttttcataaacaatgaatacattttcagtatatgttaaatatcacattttttatttgctaaatctggccatcttaagagagaagcacagagcagctgaggaaagatctgtgtacatggataaggcttgttgactcctatgtgtcactaagctgatctaaatggatcagctggatacctggccatcagtatctttaaatcttaatgttgggctgggtcagagttcccagaccagagtcattcaacctttagcctaggggattatggcatggctgtcagttccaggaactaagctgagacaagaggctgagattctcatcattcagaatgtgtgcttgtaatgaatcccttgttgtcagttggatattcctagtttcagtcatgcctgtcattctttggtttggaatcttactgataacagccttactggagagtcagtcttcagtcttctgccagagggtgaagggaccacttctcaaacgcagttagcaagtcctatatcagcttcggctgcacacccactttcagaggtatttcttgctgctgctttctgagactttctggtattttgcagtgcaaatcaggttgcttctgggcttccccactgtcaacttaaatttcagcttcatgggtctgctaagcctgttgcccctcaaccatctgctttctatcttccaaaatgttgttgttgttgttttccttcttattctttttgtccttatgggttaatgtctttaaaatcaatccttttattgtcttttttagtgagtttgggagatggagtgtaatgtaaagcatatgttaaatctgccacctctacctagaagcacagctatgaattttcaaagtgactacaggagagtcattcagttgctcttttctcaatgttctttttgtaaaatgagaagactaagagagatgattgttgatgggccccacacaaaattttatgattgtataatctcccacattatcattcttaactgagactgtcaggttacagcttcctaaaccttcaaaataaattctgtgttcagtcttttaaggaatagacaaagacattgtctacattttcaattatattgagcctcccaactctgccacttgctatgatgggaatttctctgaagcctggacttctgtgaaatttatttcccctcaaatgtagacaataatagaaacttcttcataaagctgctgagatgagcaaatgagttaatccataggaaagtgcttcacatatggaaaactgctacacaaatattagttgatgttttgggggaggagtagtgcatcttcttaacataatagttcttggcctttaaagccttctgattgggaaatcatagtatttatctttagttgcctggacttaataggtgatgctactagtccttgaatgttgccagtgagttggttcctatagagcactgagtcctccaagacattaataatactattaatacaggccattcttaatggaaaactattaatatgttaggtaatccacaaagtactttatataaagtcagtcctctgtattcacagtgcaaaactacagttcaggagggtggaatgtaagggacttaggatccagtggattttgttgtccatggatacctggtatcctggaacactggataccaaaggacaactgtatctgcagcatctctaatctttatagcagtcctgcaagataaagtcctattgaactcgttttgcagataagaaaaaatgatgctcacagaagttgtcatctgatcaagttcacttagtaaatagtggagttgggattcaaaccaggtctgtctggcaccaaagtccatgggcactcaaaagaatgctcttaactcttcagaagccactaataaatcttataacattgtgaatgaactttgaataagagctgtaatttggtttcttctagtctcatttctggcatggtctgctttctcatctctattggtctattggtcctgctttctcatctctccccttttgtattcagtgactgtctactcagcctgcaggattccatcaaggtccagcttcttcatgaagtttttctttacttctccaagcaaaaccaactgctcctttgctgctgtgttctctgaccactataat

SEQ ID NO: 49793 - DNA, 1874 bp, Bovine  19866880440577
  misc_feature (1)..(1): n is a, c, g, or t
natggagaaggaaatggtaacccactccaatattcttgcctgggaaatcccatgaccaaaggagcctggccagctacagtccatggggtcacaaagagttggacatgacttagcaactaaaaacaacaaagctttgtaataatgagacttccaaggtgacaagcacaaagtcctctagactctctcccaacacccagttctcttcccctacattctgcctgtaagaggatttaaggaaagacaaataaatgaagtttctgtacctcactatggaaccatcaggagatcccttactggtctttgttttttcatgaccttatacaaccagaagcaaacaaataaaattcagtcaactacctggatattagttctctaaatttaaaaaaatagaatatttggaaaatatccttaataactaacaaaaaagagttggctgttgagtgtaggaactgtgtgtcagtcccttgtttgtttctcccacaagattaaatcctgttcttagcacatagtgcctgaccaatcaattcttgttgattgattatagatggctgaggcgatggcactccactccagtactcttgcctagaaaatcccatggatggaggagcctggtaggctgcagtccatggggtcgcaaagagttggacaccattgagcgacttcactttcacttttcattttcttgcattggagaaggaaatggcaaccactccagtattcttgcctggagaatcccagggatgggggagcccggtgggctgcggtctatggggtcacacagagtcggacatgactgaagcgacttagcagcagtagcagatttacttttaggggactcttttggaaactttccttgatccctcaactcaggtaaaagttgatgacctgtatatctgtatccagttcacgcattggctgagaacgacaaaaaattttgtcaaatggctgttgacaaaattatatctttattaaatggagaaaaatgtggttggctggtaggatccaaatcttttaaaaccatgccttaaaccacatatttgtgtgtgtgtgtgtgtgtgtgtgtgtgttgtttctagatgcatttgtgtgtagttcttttcccctgaccgcacagtggaaacaatagttcgatctcactcttcagcaggtagactcctctagccatcttggaccacttctgtgccacaggcaaagttttcttcttcccaagctctattttgaagcaagttcaaggaaattcaaaacagcagggttgggtgaaaaaaataagaagtcttttgttcagcatgtacagtttgaatcgtgtcaggaaatattgctacttccatttcattacactttactttggaggaaccactttttttttttttttttaacaaagtcaggagaactctaagtcaggaggctgtccacaactgagtctcatggacagatggccggctcaaacacataacaaaggttctgttgtgatgttgccagttctatttcatgaaatcttttttggtataaactggagaaagcactttgttcagttaaagattttttttcctgccagctgtctttgccaaggtcaatgtttctgttacatgggggaagtatacactccctctggcggctgatttaacacatttttctttaccaaaagacccatggatctcagtagctagaatgtcttggtgtgatgtacattcatttaacaaatatttattgaggttatgcatcaggcactgtactaagtggtgtaggaaaacccaagtcttgctctgggtctgcccatgttaactcactgttggacctgttcatgagacagacacttaacctctctctgcttcattttctcagtgccatatatcaacacactgcttatctcaaag

SEQ ID NO: 49794 - DNA, 2095 bp, Bovine  19866880449721
  misc_feature (1)..(1): n is a, c, g, or t
nagcagagttggggagctgggaatccatggatgtcaaagggcactataactgttaactctacttgtggattgcttgagtttttgaaattaatagacacattttgcttttttgacaagtttaattaaaaccagtaaaatattcattcaaataaccattcaaatcctgcaaacaggatcctgcaacaggatctagaaatgtaggtgatatattctaacctaattaacttaaaaattatccttcttaaactatatataaaacatatataattatatatatatatatatataatacataaaatgaaagaaaatcatacatgctggaatgggaattctagatctcaaagacaagatgagaaaatcagaattaaacccagacaaactaaagcagtttctgatcaagtcgcatgagatagataggcgttaaaaggcaggtgaccatggaagcactagacatatgtgcatgtatgctaggtcacttcagtcacgtctgactctttgcgaccctatggaccatagcccaccaggctcctctatccatggaattctccaagcaaaaatactggagtggattattgtgcccttctccaggggcacaaccctggagatcccaaccctgtgggatcgaacccacatctcttgagtctcctgcattagcaggtggattctttactactagcgctacctgagaagctatatatgctttgggaaaccccaaaattcatgtgcaataaaacagacattgccttattgaagtgggctggaaataagcccaccatatctctgtaactggaataaatgtagcctataatgggatttttaaaaagtttcccagataattctattgtacagccaacattgaaagccactgctttgaagtacccatttcttgctgatatcatgtatttattttactttcttctttttctggcactgccatagataacatccatgtttctctaaaaactaacttcaccttatcctctccagctgggaaaaggagacaaacctaggtactttcataaaattaaatctagtggctgagaataattaccaatatatcattaagcttattgtggctagaggtttgccaacaaaaagaaaatttttctaattatcagaagggcatgagaaatcattaaatgtgtaattataacattattaataatgtgcctttcgggaagatttttaaattgcagatggtaggacactgaataaaacagggcatttttcctgagtacctaattggaattattttaatgattacaaaaagtatactgtgaacgtttttgcagagatcaaggcattgacagcatgagaacatttgccaactactgttttttttttttttaagctaacttgtcttcttcatcttcacttaatttcgaatacgtaatgcattaagattttccataacattgacaaattcattgatttcccatagacatccagagtttatttctcaaaagcatttatttatttggctgcatagggtcttagttgtggcacacaggccccagtgcctacagatttcagtcgttgtgacatgcaggtttagttgccctgcagcatgtgggatcttagttccccaagcaggaactgaacctgaatcctctgcgttgcaaggcagattcttcaccactggaccaccagggaagtcccagagtatttaattatgattgatgatatgatagtaaatgataggtagttaagaatgttataatgccagagatcatgatttccataatagataggtgccaccaaaattagatttaagtataatttatattaataaacttccttttaatgttttagaaaaatttaatattaaatgcaattttatggtgaatctttatgtaaagtaaattattacaaatgtatcttttgtatatatttggattcccatatgttagttttttccaaagtagctactaaaatattgcttttcatgtcttaaaaaagatgtttaatcacctaacctaaattgattgccatatatttctactccaaatgttaaggtggcaatatcttgtgagtacacatctgatgcttgctttattgcagatggttagtgggataaaatgacttctcaaaaatt

SEQ ID NO: 49795 - DNA, 881 bp, Bovine  19866880553728
  misc_feature (1)..(1): n is a, c, g, or t
ntagaacttgtaacaaccccatttttaaatgacactgggaacaatcaacctaaaagctctctttagacagggatttgatcacactagagtgtcccacacatactagacatttcatgacaatgcaaattgacatatgccaagttggccctacataattctccaattcttctggtaaacactgattttttcaatatttggtgacaagataagggataaatagaagttgtgacagcttcctctacctcaccattaggcagtaagtatagtgaaagtaaatctcagaccaaattctgccccatagaaatatttattagctagaaaactgcaaaagagtcacacaagactataccaatgggcttgaaaaagttcctgctccctacctttttggcactccaacaagctttacaataataccctaacaatatatctaaaaaatagcaaacctactaattggagcaggtgacagagtcttgattagatagggagaaaaagaacaaaattttagacccagggcatactttgaagatgttaggcttctgggtttgttaggtccttcagttttgttccttcagggacacttttagcctgatgcatatattgcctcccattcacttactccccaaattatgtcaaacattccttacatcaatcagtgaaccctctggtgcaacatatgaagagctctgggtctggatccctgagcagagaactgcaggggtcatagtattgtaggagagcaggtggtactggctgttaacctattgtgcacatccctgaatttcataaccttacactggtagcttgaaactggccatggtgggaatatttacacaagagaaatcaacaaaatgccaaaaatcaggacttcacccctccctagg

SEQ ID NO: 49796 - DNA, 1033 bp, Bovine  19866880675085
  misc_feature (1)..(1): n is a, c, g, or t
ncagcaatacgatatgagtaaaacacacatttctcccctccatgcaattagaaatatttttttaaaggactcttgcttggctgttcttaaaaatgtaactattgaaaaagaaactggcaaagatcttaaggcctggacctcagttcctggccccagtgatgggtttggaaactgcagccacagcaattaggagttccaatttccagttcacagaaggtcaggccgtggggttatgcgtggagcagttctatatttcctctgaggaaaggctccaccaacttcagaggattaggacttgatactgtcgaatcagcatatacattgctaaccatcacaagcaagtttggccccaacaccattcttcaactccttagtgaaagtccagatctgaatattttgtgttctctctcttagacgagagagagagctatcagtcagcaggtatttgctatttcctgtgattcggtagaccagggctcctcaaacccttatgtgcataaaatctcttgggtatttgctaaaatgcaggttttctttcaattagttgagggtagggcccctggttctgaatttctaactagctctcagttggctttgagtagcaagactctagatccagctacactaacctgtagttttactatgtgacactgtaacatttgttacttaaacccaattttcccatcattaataagagattatttcttgtcacaaaacactttccctggccttcagtgaagtctggcttattctaagaaatagactgttttgttcattatgttagctatttttgcagggcagcattgaaatcatttttattgattgaaaccaattacccatggaatgactttaagacactaagtgatcagtgcctacttcagaaccagccagaaataagtccttctgtatctttagccatttttgatggtggttgagagcaacattactgaatccttgtctgatttctctggtaagggagatctccataattgcatgcaaagtactggtaatctgcagaaatgccagccagatt

SEQ ID NO: 49797 - DNA, 720 bp, Bovine  19866880836007
  misc_feature (1)..(1): n is a, c, g, or t
ntgaagctgtgaatctctgcatttcaggagtggatgttctcatgatatgagcacatccttgctattttggtggcacaccattcccatatctaactgtcaggttgttccaggcgggagacgacataatcattcagtaattttagaacaaccctgtatgtttctctccagtagggcctcttgatctgaactcttcctgaggattagatttactaccactttggaccctctggtaataggtgccttcatctctttttctcctaaacaggtgcagactcagtcgttaaagagtcatcacgtgacacatttattgccctttggctttcaggttgactcctggaattagccaagaaaatggtcatttccttaggaatgattgctctgttgctggctcaccctacccagaaatctagaccattctctgcactgaagtgtacaataatcacttcaggaaattgctttccctattggaaactgagagctcacatcggaatgtttccacagtacagctgatgataattacgactcactgaaatttcagttttcttttgattgtgacataaaaactaggacataaattaaaacccaattatcctttaagggtaattggggttataaaaccaagagactgtgagtcagtgtgtcggtagcgcaggagacctgtgtcagatggaatggcgtgtgttctgtctcccgaagcagcctttcccacgaaatggttgg

SEQ ID NO: 49798 - DNA, 993 bp, Bovine  19866880858796
  misc_feature (1)..(1): n is a, c, g, or t
nagtgtaagtggaagactactttggtagcctgtacagtgcagagtgaataattaataatcctcctgtctcctcagcatttggccaagagaagaatgtctctctgaacaacttcagcgctgatcaggtaactagagccctggagaacgtgctaagtagcaaagcctgaagtctccactgaggattaaaaacaacagccccagagtctgggctctgctggactgagaacaatgtggagaaatgtattttgttctgtataaagattgtgctgaaaatgctgtctaaaaatgatctgattcgcatcccaccaactacccattattgtgcaactgtctgagggaaagcagttgaatataaaaataaaacttattttattctgtcccatcaaaaaaaaaagaaagaaaaaactgttgtatattaatacatatgtatggaatctggaaaagtggtaatgctggacctatttcctggactcgtggacacagcaggtgaaggaaagtaggacgaactgagtgagtagcactgacacgtgaacactaccttgtgtaaaaccgagagcgagtgagaagctgcatacaggcacagagagctcagcgcagtatcccgaaaacctagacgggtgggatgcagcagggaagggaggctcaggagggaggggatatatgcacactaacagctgagtcacactgttgtacagaagaaatcagcacaacattgtaaaccaattatcctccagttaaatttttaagattacttgatagaaattaggaaaaacataaaacaaaaatttatgtataaatggaggaacatgtcagtcttctcactggacagttcaacactgtaaaatgttaatattcttcaaagtgatctgtacatttgacaaaatcaaatcaaaatgctacagtttgggctgtgtgtatgtgtatgaactgataagttgattctaaaacttatatggaaaaacatcccaagaatagccaaaacaatcttgaaaa

SEQ ID NO: 49799 - DNA, 1692 bp, Bovine  19866880866930
  misc_feature (1)..(1): n is a, c, g, or t
ntgtttgaaaaatttaaaactacagggaagtgtaaaaatgaaaattgaaatcacttataattctgtcactcacagttaatcactgttgacattttggaatattttctctcaggcattttttcttttttttaaatgcatatatgtggtaagcatgtctctgagtctttcaaaataaaaatttaatagctatataattttggtcaattctgattttttttgaccattttaactaacataggcacctactttttttccatatttctcattatttatttaggaatagattcttataaaatagtttctgttatgtaaatatatttggtaagtattgaaacaaatatactgatttaaatctcgacaagcatgataatactagagttatttcactataaccttgctaccattgaatattattaacttcagtttgataatttagtagacaaaaaatggtatattctaatttatatcccatttataactggtgagttttataacctttgatagaaaagtgattccagaagacttggttcttatttttttgcacttaccattctattgatggttgggttctatttatgttctattgatgttgagttccttgcttttctaagtgagcctctgtgtcttttttttgatccgtaagacatgttaaccctctgtactatatattttgtttttactcaacagtcatgcactcaaaatatttattgactatcatatttcaggcttctgaatccatagagataaatacatgaaaattgaaaatccttgacctccagaatttcaaaatatagagacaacacacagataacaagagaaatagaaaacagtgttctgatgctatgcagtcaataaatatttactgtttgccatctacatttcatggattaggctaagcattaaagatacccaaaatgagtaagttagacatagttcttttctttacaaatattattggctatacagaatagcataaagattaattataatacagtggggtaagttgaaagcagcttaaaatagtggctaaggacatggctctgaagctgactgtctgggtcaaatcctggctcaaccactaattaactatactctgtgattatgggcagataaattagccattctgttcttcagtttcctccttgggaaaagagaggcaataactgaattgtttcatagactcttgcagaacatttagaacaagacctagtatgtagtgtgtgctcagtacccgttttatttcgttgtaagaataagatgtggaaagcacagtctgttattgaaatgtataataaggggctgttaatataaagtcatgagagctacttttggaggaagaaaccccaaacagctgaaaagtgaggagatagtatggctcatttgggagggtgcaatggagtgtgaacatgtgtgagggcatagttttcacaaagagggaaccacatgtgcaaaatcccagaagaaggtgaagggctttcgaagaactaaatgaccttcagtgtggattgtagggtatgagtatctttgtattgctgtgtaacaaaccacccgaaaattcaatgcctttaaaatacaaaggttaagagaacaataggtcaattaacagtgaaattttcatcagaaaccagagtgactagaacagaatggaacaatatctttgcagtgcgaaagaaaagaactatcaacccagga

SEQ ID NO: 49800 - DNA, 776 bp, Bovine  19866880875288
  misc_feature (1)..(1): n is a, c, g, or t
natgggagatgttgagagcaatgtcacatttcaattttgaggactttattccattgcgcaggctctatctgctctgaatttagcagtgacagtgagatttagcaaacagaagagggatttagagaaaatcctcacatttatctacaaaacacagacactgtagacaggaaacagctgggggaacgcttgccttctctctctctccctcttctggcaaagttatcgagtaaggacttttttgggcatggtgacaaataacatcatacctttgcattttaaaactagagcacagaagcatttttttcccttaaaagaatgtgtgttagtgacaagaggagcagacattaaaatactgatgctgtcctctgattaactttctaccgggcgtgaagacacacacatctgctaatacaccttacccgtatgaaaggaatattcgtggaggatgggcgagcaattttatattccagagccaacacaaaatttaaaaaacaagaaatgaaaaaaagaccatctcaagcctactctatgattttaaccctcaaacgactggggtaaactagaatggaagacagcgctgggatgacccctcgtcctggttgccaagtgaggggaatgatctcatttcctagaacctggaaaggggcaggcagctttgtaattggctcccctcaggacactgtctcatgctttttgcccacgacagggcaaagattttgctgagctgtaaagccaactgaaaaaataaaatcaaatctttttcttccttccttcta

SEQ ID NO: 49801 - DNA, 849 bp, Bovine  19866880890078
  misc_feature (1)..(1): n is a, c, g, or t
nccacaatactgttttcggtatcagtgctcctacttaagtagacaatcaagaaataagtatctggcctctggaagttggatctcctgggtcggagagagaaaagtttgtatataaattcttttccataaaaggctttttcaaatgactgaaacatgtaataccaggtaactagctccatattcattttccatcagcattttgtgagcaccaactaggtaccaggtggtttatagaccaggggttcttcaccttgacttcacattagaatcacctagggagtgtttttaaaaacactcctccctggggcgcacccttggagagtctacctcaattagtttgggatggaggctgagcattagtatttttaaaagctccctaaatggcaaaactaatacaatattgttaagtttaaaaataaaataaaatttaaaaaaaataataaattctttaaaaaataaataaataaaagctccctaaagactctaaggtggaggcagcaggaagcaacactgatatatctaattgtgcttattcttcctggcaatctgaccagagtggcaggaatatcatgcataacataagaggactgctcactaaaaagccacccccatcaccgcctcctcgagcttgggtctatttcatgctcaatttcataccacaacagcttaggacaatgggaattttttctttgagttcttaaaatatgtataatgctcagaacatctcagaaaattaaacccaccattctaaaacatgatagatatattttaaactttgtattaaatatctaatgtacaaaaaaggaaaagaacagtataatagcccccatatccatcacccaactaaca

SEQ ID NO: 49802 - DNA, 629 bp, Bovine  19866880922646
  misc_feature (1)..(1): n is a, c, g, or t
ngtgatctaaacccagtaactctcaagaaccgacacaaaacagacaaaacataaacccccaaactcctggcagaatgaaaggaatctgttcagtgggagagaagaaccaagaacagacagtaagtgcagtcaggaataaccagacaatagcaatcatcagcagttagcaccagtgctgataaatctacacttttatgctttataaataacaattccacaggatcttcactgagtcctttgaaaaatttcagcagcaaccatgtcccaaacaggccaaacccagactgtgtgatcctacataagagagaattttctctgtgaaggaagggaagccattcctgaaacacatgactgaaagatacaattcatgagttggggcagtccaactacccatgctaaacctggggtcactttcgaccagaggaaacatcattctcttagaactactaaatcgctgcctgggggagtaagtttacacagctcagtgtcaagcaatttggttaagtccagaaaatgggcaggaaatgccagggctgggctaacatgggtgccctgagctaaagcatgaccttaaatgggtctattatttactttcttaaatacatatcatgtggcaaaatcttgcctta

SEQ ID NO: 49803 - DNA, 1053 bp, Bovine  19866880922787
  misc_feature (1)..(1): n is a, c, g, or t
ncccatgtcttctatgtgtcttgtactggcaggcaagttctttaccactagtccacttgggaagcccattattgttagcactgctcctccagaagtctatcatggtacctggtatatctcaggcgtgatataatctttcctgatatcatccagagaccctatctgttttaccttcatatacacaatcgtcttcttcagaatcctaaaatagccttagagtactgctttaccttggggatcagtgatgaccaccctggcaagttttaactgagtgttcagtacacaccaggcacagtgttagttttttaaggtccattaacacattcagtcattgatacagtcctatggaggagctacctgtctacagctggggctcaggaaagttaaataacatacccagagccacacagtaaattgcagggcttgaggttcctcccaccccccgagtctggctgcctccagcacctactcctcaccacccctgctccactgtgttcttgcattctcctgcctttgaggccccagtaatggcttgcttcctaacaggtccccacagtggaggatagatttgctaggctttggttgggctgttttgtgcagtgaccagggcacacattttgttagacattcggcctgaataaggggctcaggtctttagtctgtggctgtggaacagagaaaagctaactgacccagaaggggattgaacttgtgacctagatttcagaacatcagattctagccactgggctgcaagacagtccctctggagggctgttttctgagagtcctgagctgcatcttaaatctgaggctttttctcccaccagcaccccctcctcattgctggagattaagaaactgaggttcacgcaagagcagagtgagaagaaaataaatcgtgatttaaattcatgcctctggacgcgtagcttagcccactgaacccctctctcttcatctctgccacctccattctgtgatttatttcaggcgatggccctctgtgtatgtataaaaatcccccgaatgcgttccccgagggcagtcaag

SEQ ID NO: 49804 - DNA, 1300 bp, Bovine  19866880933845
  misc_feature (1)..(1): n is a, c, g, or t
ntgatgatgataaatactgcatatagcaaaaatcagaatttaaaattaagaaatttaagagatccacacaagagagaagttaagtatctttttcaggccacacatagataatacacgtggaacctaggattgctgtccagtgcaatatggtagtgtaatatgcttaatacatgacatcttatttggaggtgaatgtagaagctggccatgttgaagaccaactgaaattcctccaaataccatgaaattgaattgctctactgggaaaactctgacagcaggagaatcaagaaatactccattcagtctggggctggcagaatctgtgtacacatgtactccaaaggcaggaacagcttgttaatctggcatttaactaccagaaattactattaatcattattactgggaggagttattgatacataatgatggccctagggtattgcttagtcatgaagtaccttctgaatcatcaaagaaaactgaagttctgttccgctgaagtttagtattaagtctgctttattgtcttcaatttttttaggtgttagtaatcactaaataacatagatacatcgaactctcttaaatattttattaatagtaaccagaaccttcccctaaagagaaagtttgatattatttcacatctgtttattttacttgcaaagatatgtaaatgtctgtgtaatttcagagatgcatatttgtgagaaaatacccaattcgtggcagcttttggttattacaaaattttcaactactgggtataatttgcttatttaatagatatttgccaagcatttaccatgcgggcaggagctgtattgagtactggagttgcagatgtgattaaaatgggtacagtccctgtcctcctataataaggaaatccatgaaagtttttgatgttaaggtaggaattctgattctcaaagatgaatgctatcactagtaagactaagagtcccaggttgaattaaataagtattaaaattgaactataagcacatttctgagcatagaaaagaagtgatctgaattgggaactgagaaataagacagtgtgggtgatctcttgggggtggacagataagcaggaggcatatggtcctgtaatgggaagcattctttggtcagattgttggaacccaaggagtttggactttatcctgtagaataaatggaaaatagactttggtatgtatgcaaattcattggtagtgtctacttgaagcactctttgggggagctttatgaggtcccctctgcctttcagaaaaagtgctatgaatga

SEQ ID NO: 49805 - DNA, 1405 bp, Bovine  19866880949377
  misc_feature (1)..(1): n is a, c, g, or t
natcaaaccccccttaatcactattattaaggacactattgctctatcaaactagtaaccaagttaacaggactaaaaataccctaatttgggttttaacctctttttctgtttacaaggtatgacagcttagaaaaaggattttaaagaatctgaataaagcccattctaaggaaatactccagaatgaaatggttacaagcaacaagaaagcacatgaggtatttaatctccagtcttcttctcaagccaaattaatctcaggtttccagataaaaacttcaggtatcttctatacctctctcttcacattcatgatcgctgtagcaaaaagaactgaggttagtttggccaatcatatagatcttatccctttccccaattcagagattctttcttttctctcaaagcagaagtgtaaggtgtaaagtctgagtggagggatcttctggactctcttctgggactgtctctgcatcacagcaaagtcctgggcagaaactcacttgataaagctgacactgctccaagtagcatggttcccatgcacacaggcgtatgatggaggccattcagaaccagctgggatgtcgtctggtttgcatttggctctcttcccaggctctcacatgtgacttctttgttgcagacaatgacagtgacaaaacaaaagcactcagggatttagtctcagttgcatctgttgctttgctcattgttttaatttaatgacgcgggccacccttgacaatgggtggcaagtggaggcctgctagaagcagccgtcggagctggcaccctccttcagtgcacttcttgaaggggttatgaaactgtcccacattcagtcaagcaaaaacttttcacttcaacagcctgtccaagacaaacaaaccagctaaaactgtgtctactatgcaactagacagatttttgaaaggaaaacagtagtgagtaaatactgtttcctattgacaccagagaaggtaagattatttaccaaaaaaaaaaaagttggtcctcaagctcactggggttgactgaggaaacataccctctgaaggaagggttaactgactcatgagggaataggtttgataggggttaatttgtgatatacattattacacagtgtatgccatacacagatatataggaagctggaaaatgccatgaagggatcattcacattcccccatttttctcttggcgatcctagctcttagttttccaatggaaaactgtccacaaacttaagttccctgagagctaacgacaatggcaataatagttatcttgattaaaatttgcacacattttacagtttacacagtaatctccatgaatcctcccaacaacctcaggagatgacgttgtttgcattggtatcattcacaatctaagg

SEQ ID NO: 49806 - DNA, 1921 bp, Bovine  19866880957380
  misc_feature (1)..(1): n is a, c, g, or t
nctcctacttgcccttgtgtttctccaccatcgctcctccatgaccccgcatggtttgggggtactctcggaaatgactagggaagggaagttgaaatggatgtaaagaccaatatttcagggcttttttctttacttctggctttgcctaaagatatgaaaagatgtcagtaatcatctcaatgaaaagacaagaggaagagaagccagaacaggtctccccactttgactccacaacttttcttatttccttggtccatctttagctccccaaacccctgatctgaataggtcttgctgatgttgatgctgaactattctggagtggacatatgaaaggtccctgttgatttcagtttcacaagacaactcagacttgtgagaatctgaagcagagagcttatttcatttaagagctttcttatatctggtcaaaatgtaggtttgtcctcaaagggtgtctcaaacttctacctcctctgcatttctggcctggatgacagacttctaactggtcttgtcttccccaagcttgctccacctcaactctatctctagccagtaacaagagggatcatcaggaagtaaattcaaatgatgccatcctctgcttcaaagcctcccatggcttctttgcacctagaataaagttaaactctacatgtcgtatatgatctggtctatatatgatcactcatttattatcattcttcccctcgctcacagcagttgagacactagccttcttgtttcttggatagggtattttggttcctagttcactaatggggaaaccaaggtacaaggacattagctaacttcccacaagtgttcaaacacaccaaaggaacttcaacttaagccttctggcttcccagtctgccaggctgcctctcattatctcatttgatgttcacagtatccctgggaggtcagaaggacagggtcataatccctgtgacattccagggaaatcttcacgttacagagatgtgtgccaaccctggctgggaaaccgtgatctgcatggataaaactgggaagcaagatttccacgggttctctcagtgccacacaagtggtaggatgggcctgtctaagttgctggcctgtctgcagcacagacaaaagatggattcgtgctttctctagcaccacattccccagtgtccaagtcaccacctttacctttctgctgctgctgctgctaagtcacttcagtcgtgtccaactctgtgcaaccccataaacggcagcccaccagactcccccgtccctgggattctccaggcaagaacactggagtgggttgccatttccttctccaatacacgaaagtgaaaagtgaaagaagttgctcactcatgtccgactcttagcgaccccatggactgcagcccaccaggctcctctgtccatgggattttccaggcaagagtactggagtggggtgccatctccttaccactgaccccccacttcccactaagtccctgcacaggctcggtgctccctccaaccatcatcctctctcacccctccactcttcagccctgagctgtgagccaggctgccacattcatatccctactctaaaagtactaagtggtgtgggaccttggcaagtttatttaacttctctgtgccccagttttctagtctgtaaaatggaggtcttaagtaaagctgatctcgcaggagcgttacgaagatgaaatctaccagtatctacagcgtactcagcacagggcacagagcaagtgctgtgcacctgtgggctgtactcatcaccattcgtctttctaggtcaacactcctctggattctcttttcagcctcctagtaggcctcctaacttccatcttgcctatgccctccactcaccactgagcttcttaacatataaaatgggccatgtca

SEQ ID NO: 49807 - DNA, 1670 bp, Bovine  19866881109969
  misc_feature (1)..(1): n is a, c, g, or t
naccactgctaatgtgtagaactagcccattatacttgttcacatcaggtatggcctccctcccataacgagccattttgataaagtccaaggctgattcccctcccatagatgccatcttgaatactcagctggaataatctgttcaccgaagaggccagccaagggctctggaggctggggtgtgagagagaagggttaggccatagctgttttttcttctctctttctcatttcccctgagaaagcgaaaatactttaaaagactattatttataagaggtttctaaaaatcactgaatgacagatttaggaactggagggtccttagagttttgtgaccttatataaggccccatcatctctatactgtcctcaggacctaggcaggaataaggctggtctgtctccaagtccccttccacttctatgaagagtctgtgtccttgtggccccatggcatgtgagaacctgcatgaatgaaagtgactccatcataccttacttagtctggtggtctggcgatctaggctgagttatctgcttgggccatgccttctccaacctcgtgtgtctcagaatcacttggagagctagttagaaatggatagtcctgagttgtactccaagactatccctgaatgtgtgatatgagtcagggatttgtatttgtaatgaagccccagtgaattctgacatggagtggggatggggggctatgtgaaccctacttttaggttctgtggcttagccccttgcgagcatctgtggatggtcatgtgaaaaggaaacttaaaagctagtgatttccctggggagaaaactattaactccttccctgagaaatagaatatggaaagatgaagcttaattacattaatagctctttagcacttcctacaacttggaatcatctgtaatggctcagattttatcaccctaactaagctgtcagctccttgaaggttggggtagtacctagtgtatccacacaccccactgattccctagccttttacacactgcagatacttgaagggtgtttgtttacagtataagtggctcctttgtttttctttgtaggtgaagttgagatcctttgcagtgccctccagaaattaaagtgaagtcacggacagaacctaaactgagaatctctcaatggaaatccacctacttcttttatttcatcttaaaaagtgtaacaaacaagtcttgattcaaaatgacagccttaaatcctttcgagagcaagttggcgggtcaacaaataaaatcatatgaaatgacagcatattaataatacccaaaagcataatggtagatcttttgggatcatctgtgatttagagatgataatctcatactctgaattgaattaaaaatcaataacctgtcacatttcatcaaagttaatgaaaattcgggacctgttttattcaaccttcctaaatactttcatttgctgtagagaattcctaaaggggtatatccctcactgtgaaacacaagcctatcagaattgaatttctggatttaatataaattttaacctacaaaagtctttttctgtttcagggaactatgattctacttactgctttgttattttgcctatggtagattttctttaattcagaagcctattaaaatcaatacaaatattaaaa

SEQ ID NO: 49808 - DNA, 731 bp, Bovine  19866881210861
  misc_feature (1)..(1): n is a, c, g, or t
ngaggcctgagcgaggagacggatggggagtagggcccctgagaacacagggcaggtgccaaactgaaaagaaaagagaaatgatagactttagagtgaaactaaaaataaagagaatgtgttttaatacccctttggctgattcaccttcctgtggcacgagaaagaggggcgtcgccctctactcatgaaagccttatgttttgcctgcgaggcctctcttcccacatctgaaagggtaaactgaccataagttgtaagtatgggagataacgtggtggtggcacggctacaatctctaccttggagccagattcatcttacaatttccgtcacagtctttctcaaaaaagtgagataactcaggtccatatatgtgattcctcaacatcccttcttattctttctcttgtttggtctgttttcatctcattcaggcatgggtccaaggtggagtagagattaagtgggactggtgacattgtatgcttgctggctgcttatttccaaagcatggttggcaggaaagggagccttagatttcagtcatttcagagagggaactaaactctaattcttaccctactgtgaactcagaataacatgagctttggctctaaagtgcaccagtgagaaaaagcatgtcagtgattgtcgatagcagaagatgagaagatatagaggaagaagagaaaagaaagaagggaggaatacatacattggttgaaagt

SEQ ID NO: 49809 - DNA, 650 bp, Bovine  19866881254278
  misc_feature (1)..(1): n is a, c, g, or t
ntgatctttttgtcgatagagtttgtaccaatttctcatcagttttgtgaaggaggagataagaaagtggattatgaaataagattgcaaaagcccaggttagacatcccacttttcctggggtctattggggcatggttttctggaatggtgggaatagcctggatgttgtatttctccctcttgattctcaggggacacagtgatcctgacacttcgactaaaaacaaaggtttgcttgaaactcttctctgggtctttatggccatggccaggaagttgtttgcagaggtgggtgcccctcaaaggaaaacctgattggttttgaaagggggttgagtttactcaagccttctctgtgattaaacgtggggcagtgtgtacctttgagaaagacaagttagacatgagaagtgatgccgtttcaatgcactatattcagcattcagtgagtacgttcctactgtgtgcccagttacacacatcacaggggctttcaaccaagtggcagagacagagaggaaaacagcactgtcatgtggtgggatgtgtgcttttaaaaatatgaaaagtgcacactctctctggaaagacagggaagtgaaactactgaggatccaggatgggggaggaggcgtgtgtcatagagg

SEQ ID NO: 49810 - DNA, 749 bp, Bovine  19866881334421
  misc_feature (1)..(1): n is a, c, g, or t
nctttgcctggcttctccagacaggaaccacagcaggtaaaacccaaggtgaagcagggaacaagtacactaacaccagaggaagtttctgcagaggtgtttttggcaagtgagatgcaaatacattgacttgcttaattccgtttgctttctggttaggggtcattaagtcatgtgactgctaattcttctgatatggacctctcttccagctctatgaaccttctctaacagacaaagcccttagatgagagtttaaaggcacaagttgttgctctgccacctactatgagaaaagtgcagtcatttgacatttctgaatctatggcaagattaagatgcttggaagccctaaacattgagcatatcatgacaatatgaccccagatgtaactgtcagcaaatacaacaacattctgattctctccaatctgattacttgatgcctttttcaaaaaaataaatgaccagttgtcaaattcgcttatcttttgttcttttggtgtccctaattgagtctacttgttgggtaaccattgtcttgctctcaaatgtgcttcatccataaaatgaacaaatagatggattgatttgttaaatttctttcagatctaaactttgattctgatttttaaaaaaatcttatttatttatggctgtgctgggtcttcattgctacacagacttttctctagttgtgagcagggctacactttagctgtggtgcgcaggcttctcaggcggggcgt

SEQ ID NO: 49811 - DNA, 1104 bp, Bovine  19866881385076
  misc_feature (1)..(1): n is a, c, g, or t
ntaatattttctaaaaagaatagtttcatgtaattttcacaatagcatgccaacaccaactattctaaaatggcagcctgttattttaccagttatataagtctaatagaggagaaaaagtcctcttaccacctctctttgggaacagtttcttagaattttcctgactaatacgggatcacgtcagtttgctcatttctcatcttctgtagctcatgccacacaaccaatccaaacccactccctttctaaagccaacccaagactcttcaaagtgaactgtatttgtatctgctctgtggtggagaggaaacgcttgggcaagggtcaacagagaattgctcatcaaattctagaatggttgggcagtgagacactctttgaagttggaaggaagcatctgagggtaaataagagagaacggcatcaggtattgaatagtactcatttggaattggtcactcctcatggaaacctggaaccccaatgccaaacccatacacgtttgttgaatgaatgaatggaataaatagggtgaaacagagtttggataaactcacagatgattgatatgtaactgattagaaaaggagattctatttcttttaggctatggaccctctacttctttctcctttccccttcctctgttaattatgtgaatgacaaagaaagagatactcttacccctgaaaacaggagaatctctttcactattatattcttagaagacataaacatattctttgaaatttcttcttctaaaaaatgattgaaagagaactttatacatgatcttgaagatcctttaaccctaaaaagaggtcttttccactgtatgtgtcaaaaagggctggattaagagatcagagcctccctggacttcatggtcctgttgggggacaggacatattcaaaaattgagaaataatgacacaaatgagtttatgctgaattcccaacaactgtcctcaggagacaagacattctttaattaagggagacattggctctgggctcctgctccattccacccctttcttctaggccattattccaccaatttaatcctttctctgtgaacctagaacttacatcctttct

SEQ ID NO: 49812 - DNA, 1754 bp, Bovine  19866881665620
  misc_feature (1)..(1): n is a, c, g, or t
naaatttttaattttagcatgttctttaggtgactcagtatcagagaattttggaaaatgctattaagtgctaaagaaattgcaaaagcaggcagtgaatgagtggtgatggagtgaaggaagacttgatagggaggtaggtaggagatgaagtttgtctttaaaaaatgaaaggccaagccaaaaggaattcttgcacatcggtttagattggtataaccattttggacaattgcttaatgatatcttcccatgttgaactacatctatcctataagccagcactttcactcctagatatagaccaaatagaaattcatgcacaaaggtacctaaagtctgaacaaaaatttcatagcagcgttatttgtaatggccccaaacttgaaataagtcgtatcttcatcaataataaaatggaaagattgtattgtagtcatatggtagaatattacacagcaatgaaatgaattgaccattgcaataagcagacacaaaatatgcataatatggtttctgttatatgaagttcaaaaataggcatttttaaatctatggcattagaaatcgagatgtgactatatgtggggagttggagggccccatgtctggaaagggacttagtagggaaacttaagtactgacagtattctatttcttagcctgggtagtagttatatggatatgttcattgtgtgattatttattcagaggaacacttaacaagtgtgtactcttttctatacaaatatatgaataccatgtttcaagaaaacacacacagtcacacccacagggtttgaaaaagaagaggagagaccacagcccaggtatgctctaggagaggtttgcagggactatatttctcaaggctcatctcagggatatgacattgaactggccttcaaggatttcattctccccaatcttatcatataaaaataatgttagacattggttcctcctaaaccagatatttctgaagaaactagccaagggccacatccatctttctcttggagagacacttaaacatcacttaccctgtggactagttttgttcctgattgaaaggaacagccaagattcattgctgctggaaatttgccgtaatcattgggcattacagagaattatcaataaagtttgataaatcctgtgactagtcaacccagtaatcacatgtttccgctttccatctctccaccccctcccgagacaaacagacatgcctattcttctggcttctgtatccaaccttgcaaaatttaccttccacagctcccaaggcatgagatttgctttttctgattacccagctggcccttagtcctggctttatcttcaagccagaggcctgggtggtctttgagaaacctgacaagaaggtcattaacaaagaatcatattcccaagttgacctttcatgaaacctcaaactaaaatccccttggagccttgtcttctcctggttgaaggtggtaccatgggaacttgggcaagaagttggaaggattctgaaatgatgcaaaagcagagcaatccaaagtgagtaacattttaataagttagtcaatagacaccaaatgggaggcaggcggttactatgcaaataactagagtaaaaggaaatgaattataataaggggccacttgctcagaggtcatttacctaactttcaggcgatctgcctcgggacctcagtttttaaagtaggagctgcaaactgacagctggaggtaacagtggccct

SEQ ID NO: 49813 - DNA, 820 bp, Bovine  19866881783530
  misc_feature (1)..(1): n is a, c, g, or t
ntgtgaacggagggcaatgaactcagcatttcagtttgcattgagcaagagcctgtgtctttgcaaatgtgcctttcagcgactttcaccttctgtctgttcggggtgatttcatgtcacatggagacatctgggatgtgcccctttgccaagtccaccttcctagtttcctccaagtgacctggcacttaaaacatccctacacgttcacatacgttgctatgtgcacccacagatctggaaaaccaaaacctcaaccccccagggccattttgtcctgtcttttccccggaaggaatggaatagtgagggcagagcagaatagttgcgagaaagcctagcgggaagtagttaaaagacaaactgctaaagaggaaaattccatccaaaatctgcaaaacgtgccacggccccgctgaaacactaggctcgcattaaggtgaggaatctcggaggctgaggacggctgccagccacaggcagtcattcagttcttcgcacactcccggcagttgtaaatccacagagcagcgagagggaggctacttactgaaataaaagcccctgtctccgcacacgaactggagagcatccaccaactcagccccgcagagggtctcgggtcccgccgtggcagagctggtgaaggcgagcaagcacagggccagatagaagagatgcgaggaggatgtgatgggcatcttcacctgctgaaaaagcagaaggagggtcatcttcctcctgggtccttgccaggggagtgggggcaagtcaagggtgcctttaccccagctctgcattcctgttattaatcaaaact

SEQ ID NO: 49814 - DNA, 1943 bp, Bovine  19866880116067
  misc_feature (1)..(1): n is a, c, g, or t
ntgtggtcatgtatggatgtgaaagttggactgtgaaggagggtgagcaccgaagaattgatgcttttgaactgtggtgttggagaagactcttgagagtcccttggactgcaaggagatccaactagtccattctgaaggagatcagccctgggatttctttggagggactgatgctaaagctgaaactccagtactttggccacctcatgtgaagagttgactcattggaaaagactctgatgctgggagggattgggggcaagaggagaaggggacgagagaggatgagatggctggatggcatcactgacttgatggatgtgagtctgagtgaactccgggagttggtgatggacagggaggcctggcatgctgcgattcatggggtcgcaaagagtcggacacgactgagtgactgatctgatctgatctgatctaacaaactagttgtagactatgaaaacatcttaaaagtcccctgaggttctactcttaacaaagctggtgaataagaatctttagaaaatggtgagttggccaagtgaaactcttccaagtgatggaggcagaaagtggcagggagaaaaacaatgcacactggcccagtgtcattggtggccaggacctattttcaattacatgaaatcagaagttgatttaccagatgttgtttctttatgaagtgggtataccctatgcttttgctttgaaagttgggtggaattcaggtggatgtgtaggaatcttcaataatccattagaacatagtttatctgtattttcttcctctcaggccatttagggagaagagagctttggttatttctccttaagtgcggaagataaaatgaaaccgacaaaggcaaacaagcatctacaactgagtcactaaaatgacaacttagagtttaacaaatggaacaagcctttgcaatggatttgagaatttggctatggaattaagactgaagtgtaacttcactgttcacgtgaaactatcacaacattgttaattggctatataccccaatacaaaatgttttttagtgttaaaaaataaaactaaaaattaaaaaaaaaatttttttaattcacacacatttaagaaagaactaacaagcattatgcctgatattaatgaattcatttatttatagggtaccaggcacacattatgttaagtgaaaacacaataaatgaaaagcattccttgcaaaaaaaaaaaaaagactgaagggtaagctgaagagttcctctatatatggagcaacacttctcaggctaactttttcatgcccataccccattagcaaagaagttattggcaagctttattttcaaagtttgtattatgaaagtaatatatttcattttctaaatagaacattgtattaaatattgaatgtgctttttcaaaataccattcctcgcccccactcccatattgtcccctctacccattactctgtgcctgagggtcactgaacagcacaattcaactgccctgctcatgatgctatgaatctactgtcaattctggcaaaatgtctcagggtattcttcttaggaagtttaacagcaaactgtgcaatgttaaataaagtaggggaaggtttggtaattctttaaaaataatgcaaatgcagtggtttaagtttctggacgagatacttcttaaaaattgttactttgacacaaattatgttgtttgagatccatgagattcaaatgggccattgatattatgattttgactaaacaaaatctttcatttacctctcccaagccatagaaagaagcttctaattttctgtattatgtctagtggctagaaaaacagagcataggaaaataagggaacaggatacagaggaaaatttttccttagtcaagaaatatgccaaaacaggaattcttctcaattcctgagtgcctcatat

SEQ ID NO: 49815 - DNA, 2648 bp, Bovine  19866880186945
  misc_feature (1)..(1): n is a, c, g, or t
ntggtttttccattggtcatgtatggatgtgagagttggactgtgaagaaggctgagtgccaaagaattgatgcttttgaactgtggtgttggagaagactcttgagagtcccttggactgaaaggaggtccaaccagtccattctgaaggagatcagccctgggatttctttggaagggctgatgctaaagctgaaactccagtactttggccacctcatgtgaagaattgactcattggaaaagactctgatgctgggagggattgggggcaggaggagaatgggacgacagaggatgagatggctggatggcatcactgactcgatggacgtgagtctgggtgaactccgggagttgatgatggacagggaggcctggcgtgctgcggttcatggggtcgcagagtcagacacgactgagtgactgaactgaactgattgtgtgtactaaatcatatgtacaaacctaaattgctgtgtggcttaaatgagatcatgcagtgaaatatttcgcacagattctggaatgtgtaaaatgcataataaattattacattaaagaaagaaagaaatcacctgatcattggaatagccccaccaactttatgtcagctggagaaagctgtaacataccaatcaaagactttttggctgcaagggataaaaatctactcaaagtagcacaaggaaggagggttatttaatggacaatttactcaacaatagagtgccacactccgtcaagacatgagggtatcttatagaattttgtgtaatcaggtcaagaagtccagccaggcctcctggactggagttggaatctgggctttgagaagtagtccttctattttttcaagacctacacagtctttctcgtatcttctcgtgccttcactcctttttttgtgtcttcaccacttttccctgtttctctccctgtgttctttctctgtgtgctcgttttggacatggcccagtgcagctctcttaggcctgatctccatgttctccccactcaagtatttacaccaactagaatcctcctctctgtggttgaaaacatctaaagaaaaggatctcactggcctacccagactatggctccccttggggtcagatcatggtaatcagctgaagccataggactatgaaaatggggactctcaagtgtgcaaacatggggacccagccccactcatttcaggtcctggtggagtagcattttggaaaatggatttactgcatgctatggtctcaaggaagaagggggatgaattgattttgatgtcttgcaaaagtattcccaccatggaaaagaaaactaaaagtcatgcctactcaaaaggtacacgttcctttaattgtttttttaaagggcaacatatgaagtcctggtttcacaatgtgtccaagtctttaggcaaacatgtccaacagtggtttgttcctgtttcatacttgttttattttatttggcagcaaaatgaagatcatgtttcgaataaaagcccagttctgtcccttatacgtttcattaggcattatatgctgatcctgtcgtctctttccaggcgtacccaagcgtgttttacagactccttttgtaggaatattttggttgtaggatttgaggaagataaaagtcactcataactcattatttatattaataaattaataaaattgctttttcttgatgctatttggaaaaaactgctgggaaacctaaaactgaactatgcttgtggagaacaggaagtagagagaatacaggagattgtggagacaggagtctgagtgcaggctctgcctctcccacacgagctgtgtgtccttaggcaaattaacctttctaggcctcagcttcccttcatcagtcatataaaggtgattgatactgccttgagcttgagtttataagtttgaggacacaatgagataaaaatgatatattctcatgaaagtactttgatgatttgaatatgcttcaaaaaatggaagcttctaatttaaagaacaaaaattgcctgagcccagaaaactgagcagagctttccccctcatcctgtgtctcccttcagcagttctcagggccttaaaagcagatggatccagatccttagcactaactcttccctgttcagttccccactagcttgtggcaacatcctgtcttatgtggcttcctgctgattcttggatgagtctctccaaaggtgcatattcacctctgatggtcatttaaaaattcagtcaacatacatcagcccaagtgttcatcatgcatttagataggctgtgattttataacaaaacaaaagtaagaatataccaggtggtcttctaagcactttcatcaataacctcttctgacaggcaccacggaccccagaagtatatactattattatttccctgtttattaaatgaagaactgaggcagagagaggttaagtgatttttcaaaggttaaacactttgttatggaatcaggctgtacatccgaaagataactagaacctcctccctgactccaagggccttctagttcactaggaggtttgtatttcacgtcccactaaccataacatgaatgacatatcccagtctagtgttgtgggcagagggaactcagatgtgggctta

SEQ ID NO: 49816 - DNA, 2010 bp, Bovine  19866880430365
  misc_feature (1)..(1): n is a, c, g, or t
nccagtccatcctaaaggagatcagtcttgaatattcactgaaaggaagctccaatactttggccacctgatgcaaacagctaattcattagaaaagaccctgatgctgggaaagattgaaggtgggaggagaaggggacgacagaggacgagatggttggatgggaggagaaggggacgacagaggacgagatggttggatggcatcactgactcgatggatatgagtttgagtaggcttcgggaaatgatggaggaccaggagacctggtgcgctgtggtccatgaggttggaaaaggcagacacgactgagagactgagcaacaactgtctctaccatcaggactttcctccagcctccaaagggtgtgtttcacatctggatttgccatgatgacctcctaatcattctgtctgcctccattctctttcttcttcttatctactagcttccttttttgtacaaagcttagaatgtcttcacctgcactaaaatataataactagtaagccacggagctaggattcaaatcagttggcaaagtttttttttaaattatgaataggaacagaattttcctgaatgtttcccattatcacttgtaatatgtcaatgtgataaattgtatgattgattttcttatgttaaacaattcttatatgccacatgaaacatattttatatgatatttatataatatatacccactcattttggatttcttgcttatatttatttaatatttttgtacctttgtccttaagtgagattgagtcttattttgtccttgtctggttttgacatcaggattgtaatgactttataaaacacattgacaagttttctctaattttctattccctagaatggctatttgttagaggttattatttcttccttgaaatttttggggaaaaaaatgtttacaaaaccttctggagctagtagtctttgtggtatatttttgattgttgagttaattttttccccttactggtcatagatttattcagtgtcagtttcttctcaagtttatttccataatttatgctttctaaaaattgtatggtgtaccaatatttcaaatatattggtctgcaaatgttcatgtcattcccttatgatttttaaatatttactttttctgcttcagtgtcccttttcatatctagcactgtttagttctgcctcttaaaaaaaaaaaatcagtcatgcaggagtttgtctatttaattacttttttgaaacaaccggcttttcattttgttgatcaggtgaccagccattcatcttgacagcaccacaagagtaattttttggaaactcaaatccactttcgaaaacccatcagtggctcaccaaaccacatccaaggcccggcctcccaactacttcagcagttcatctctccacgcttagcccgtctgctctcccctccagcaatatcagattccttctgggccccaaaatgtcagctcatttcatgctctgtgcccttgtacagactttgcttttttcttccattatccacttagtcaaaatctttaaattccagctcaagttttcctccttgtgaagcttttcctgacccattcgtcctctctttaggtaattacgtacctctcttttttgggcctgatacatgttcgtatttttcacctaccatcctgttttgtttatgcgtctgcctctccttctggaccacaatgataccctgcaggcaggtgcagtccctttgtcatcttgattattactcgcactgttattttaatacccccatgtcttttccttcatcaaaatgaaagataacaaaattgagaaaataggatgctatgtcttttccctctattttaagaaaggtcagcagccacacccttcaaagaagcgaactgaattagctttactcttcctgctttgtcaacatgcactcagcactgaacaccctgtgtgctaatatttttaactttccaacttttcaaaccactattttcctcttataagagccaaa

SEQ ID NO: 49817 - DNA, 1792 bp, Bovine  19866880584972
  misc_feature (1)..(1): n is a, c, g, or t
ntcttttaccttctcctgggcaccttctctctagttaaagtagaaaatatgtcctctttagagatgtagtcactttttcctatgtacctatgtcacatgcaactttagtacgtagtctcctggttttcagctaaaccctcgtaggcaattatatatcagagattcaaaggctgtgggacacccttgcaggcagaatgacctactcagtcttctgttcttgactgtaggtaagtatgtctttgttggttcagtttgttaattattcttgcctttttttttttttttttggcagtggggagaggaggttggacaagacatttttagtaaaatgcaattgactgtatttgaaaagatgtagcaattattcatttgatgaatggttctccatctggtagaaagcaagactcaacccgaacagtatgtgtgacttgcctacatcacataccaatgagaggaactagaaagtggaaagccttctatttctaaatattactcatctacttcaaaatgtaatcgtgggaatgacatgcaaattaccaatggaaaaaaaatcctcttgactctttaaaacactgagcaaaaagatgtagcaggattaaatcatcctcaagtccccttgcttgttacactgggtttgtgggagggaagggatttctgtgccagatacccgctctcctaaaggagccttccccaaagccagaagacttgctccagcattagggttactacactcaaatacacctggagaaagagtactatgaaaagtaaatcctggttctgtaaggtgggactttggatttataaatatccgtgagtggcagagcatccacactcctcaaacttctggactagaacctacctgttcctcttgttgcccttcaagggtagtgtttatgtgtgttataacttctttctcattcaattctcataacgacttcataggtagggatattctcattcccattttatagataaagagcccaaggcacagagaagttaagaaacttgcccaaggtcacacagtggcaaggtctgtatttgaacctgacaactgagcatcagaggtcgtctgtgaatccctgtgtggtgctgctttctatggctaagtggcgttttttcactttcccctaaatacagcatgttttcttacatgaatagtcaataatctaaactagagaatagattgaaagttttcagggcacttggctggctggtgagtccattgcaaatgtaatagaaagaccggtgactttgaggttaaacagttaaactcatttttatttccccaaactttaaacttttattttgtatttgggtatagctgataaaaaatgttgtggtaatttcaggtgaatagcaaagggactcagccatgcatgtatatgtatcctttctccccccaaaccctctcccattcaggctggcacataacattgtgaactcacctattttttgcagccattttctaatagtgttaacttgtctacttggttaactttaaaagcctcaactttctcctttgtacactagtgataataattcaatgacatgtcccatgaagaagtcatggtaggatgaaggatgtaggtaaagtttcaggaagaggatggcgtgcagcacactctacatggaacacaagtgtacacccgtttccccctcaccctcactccttcccactttaccctttctgtcactcaaatgcttagataagcttggttagtcctccattgaaatgaatggccccgcatcacctgtagcttaatagaaggagggcaagggtaaatcccacgag

SEQ ID NO: 49818 - DNA, 2189 bp, Bovine  19866880643318
  misc_feature (1)..(1): n is a, c, g, or t
nacaaagtctgccaggatttcctctatgtcccaccatttacatatttttaaaaatcttgtctattaggaaatgtgaggaatgtggggttctcatagatgttcatctatccaccatttattgagtgcctattatctaccagctgctgtgagaggaacacatttactgacacaaattcaaataaatagccctggcagatgagggctttctttaaagcacaggaaacataactgaaacctaatttctttaagtctgatttgagaaaatataattccactcattgctcctaattttcccatttcttgtagccttttatacttgtattttttttttacattgagatataattcatataacataaaagtcaactgttttaaattgtgcactttggtggtttttagtatagtcattatgttgtataattatcaaaactatctaattctagaatattttcatcaccctaaaaggaaaccccatacatactagcagatttgaaccccaccccttcatcccttgtcaaccaccgatctattttttgtctttatggattagtccattctggacgtttcatattatgaagtcatactgtgtgtggtctgttgtgtccggcttttttcacttagcataatgttttcaaggttcatccatattgtagctaatagcagcacttcatttttcattgccaaatgacatttcattatatgttatatggatatgccatattatcttcatccattaaccatctgatggactttggggtcatttatactttttggtgggacttccctggtggctcagaggttaaagcatctgcctggaatgcaggagacctgggttcgatccctgggttgggaagatcccctggagaaggaaatggcgacccactccagtactcttgcctggagaatcccatggaaggaggagcctggtaggctacagtccatggggtctcaaagagtcggacgcgactgagcaactttactcactcactcatactttttggttattatgaataatgttgatatgaacattggtttataacttgtatgaatgaatattttcacttctcttgggtatatatctaggagtggatctattgggttatatggtaattctactttttaattttgcaagaacctaccaagggtgtttttccaaagtggctataccattttacattcccatcagtaatatatatatatattttttttttttttggttgtctttaatagaaaatatttgtaaccaccccaggagttagcttagtagttttcttcccagtttattggtgagggcagtagagcaataaactgaaaaatgccttcctggggccagatccttgtttcttcatttattcagcatccaccgattcactgttctgttcccggcattgttcccagttctgtggatgcagagatgagtaaaatatgctgtctgtgaagtgttgaatcgagtctgtgaaacttctgttgaaatatttaaaatggtaaaagctctcattcatgtgacttggtttagatggaatctgctcagagtcttaaggatggacctaaacaaatatcccttgattggatgatttttggacgatgttcctagtacccatggtaagctatcagttcacgttttcttttcttagtggagaaaatgtgttagcgtctggcatttgctgtgtctctgaaatgaacaattttatagtggaatcatctaatcccaggaatttgggaataagtatataacttacgttgaaaaaagtaacaatcctgaacacgtgtgtagtttttcaccatttccagggctgttttgtatgtgttaccatgtcttctttgaccgcagtcctgtgaagtaggccaggcaaacacacgttatttctatttcatgggtcactgaacctcagggaagcagagtagtttgccctggctcacacgaatgagccagaagacccttcgctagagcagtcattcccaaatactatttcttggactggtgccaggaagggatagagttcactgattcatgagcaagtgagaaaagtaaggcaaagtcgtgaggttttcacatcactaaatgtatttgattttaagaaatgtcttttagtctaaaattaagtattggcttacagaaaaacccaaatgaaccctttggccaacccaatacctcttatttctatattagttagtaaaatgtctgtttt

SEQ ID NO: 49819 - DNA, 841 bp, Bovine  19866880930424
  misc_feature (1)..(1): n is a, c, g, or t
nagacagcgaacggacggatgatgtgcatgtagctgtcgagggtgattggagaaacaaaataactggtaattaccgagcagttcaggtggacatatagagtgcagaaaaggttttctttccagcagtaaaatgaagtgtcagtgtaagggcggctggccttgtggaaaggctgtaactttaaagggatactggccaaggctttccactggacgttcaggcttggttacttgcctttcccccacagttcaaagagggatagagatattccatgaattgaattttcttgtgaattaaaacatcgatgtcctgatttggggtaacaagcattgccaagctagtgctgagcaggcagaaaggagggataggacgaatgtgttgccttcggggcaaggcagaaaaattgttcacaaaagagcatcattccactgattgttcaaggtcaccagactgtgcatgctcaaaatgggactcaagactcccaaatcccagtgtctgattaattgtcctttgactaaaacaatgaaagtaaaatggattaacaaaaaacgattgctccaggccaaaaagttcagaaagcaaacagagcctcaagcgaagtaggattttctttaattaggttgaatgccttggtaataatgctgtaaatatgaaattgtcttgtgaacagtaagtatactggtgattctgttttatcatgccagttaaaaaatggtgagtgttgatgtgctgtggtgctggcactgaggaaggcattttccctatgctgtgtgatttaaccctcacaagtacctggtaagtatgatggccactatattactgacggggctaatgcgattaaag

SEQ ID NO: 49820 - DNA, 1105 bp, Bovine  19866881155408
  misc_feature (1)..(1): n is a, c, g, or t
ngggaaaaaaaagccttggtatgcatgctcaatccaattgtataaattaatttctttattggaaccatcttctttagtcaatgtgacagcaattcaccctgatgaaagacttacaaatgggtctctctttctcaccaaaacctgtcaacacggccagtatctgctttaattagagtgaccaaacagtcgggtttccctgactgtcgtggggcataatgcctcttgtctcaaccagtaaattttcatagacccccccttcattctcaaaagtgtcccagttaggacaatacattatatgggctttcccaacatgaatgaaatcgaggaggagccgtccaacagacaggtctgcttcccttttcatagtgttgctttgcttagaaaaattcccaatgcctcagcctaaaagcctcttggccctggggtcacagtttgacttctttcattctccagtaatattccttcccaagctttttttttcagcagcagaatctactttttcagatgagaagttagacagagactccagtgtttaacacagaaaaagtagggcctttgctgattgcagtgagggtagcaagctcagatacccccatatttggcccctctctctttccttctggtgtgggtctctgatgaatctcaaggctttgtgaagcatagattaaatctcctgccagagcaaaatgttaccatcaatttaaagtgctgtcgctgcatggattgaatactgtgctctggttcccgagtcaagttacattagcaatactgtatgtgtttaaagcttggcacaagttgatgatcatcaggctctttaaaaatattatcttagggttcagcctcaattctaggttaggctactcctgtggccttaattcttctaaccaatcaaattttgactatcaactttgttgttctgtcatggatcatggctgaggaacgaccacaccaaccattgatcctggtaattctctgtctcacctgtccccttttggggccctttaagttaactctggctttatggctcttcccctgtaacctcatcctttgtttgtgatttgaaatgctattctagtagactaattttctcttcatccttgcaaat

SEQ ID NO: 49821 - DNA, 1470 bp, Bovine  19866881639463
  misc_feature (1)..(1): n is a, c, g, or t
naattatcgctttatccaagttgagagccggagaactgtcttaggccacaatgatctttagtaattgaaaatgttatctattaccatgtcacaaacaactccaaaatgttgtggcttaaagcaactgttttattttgttcccactttcgttgggaatttaggaagagttcactctggtggtttatctctgatcccagctggggctggaggatctatttctgagattctagaagtgcttctcactcagctaatagatgccacagtgctttctcactctctctttctgtctctttccttccttccctccatctctctcatctccctctcactccttttgtggcaactcacctgccaggaccctcacacgcctcctgcttcccacagcctggcaaccgccgtgagggcggacttcccacatgaggccttgatcttccaaaagaccaaatcggaagctgctgatcctcttaaacacgaggcccagagccagcccagcatcacctccacacactctgttggtcaaaacatcacaagccaactcagatttaaatggagagctagaaccctctgctctatgggagaagaatcagaaaataccaaactatcttcaatcttccacagtcagcattaaatagaagtcgattcccaacatgattaaatctaccccatggcaatgactcccccccaaaagaaaagtttgttctttcacaaaactgctaagattcagatttcttaaaagaagagggctgttttggatatccattgattgttctttggcctcttcatacccagtcaagaagccaagtgtgtggaagttcaggttcatgaagacactatttccagaccaaaaagttgtactaaaatagatactgatatctgtcttttaaaaagtgttttaaggattcattttagcataactgacttttatctttgataatgctgaatccttggctgtttcagaaagagcagcagaggaagggctaagaaggatgcagaaactctatctatgagacattgttactgaggaccactcccatgggcccaaggagaagctcatttctcagtgctctgcttatgctgttcagtgtgacactgttgctgcccttgcagtctacacacaagcagatctttgttgctctgggtgcagcaaattctttactatgaataatctatgataacaaatgctccctttagttccttctcagtcttgagagtattggagctcccaagaggaaaaaaaatcagcgctcaattggaattagatgctagaaatgctctctttaagcattgctagggagagaaatggaatggcaccatttgacctatgaatatggtacggggaatgaatggatgaatttgggacatagacacaaaatgccagggcaataacaaggcagagtgttggagtctgggggcatctgggctctggaatcaccttgtctgggaacctcatcacttcccagtcaaaacacc

SEQ ID NO: 49822 - DNA, 933 bp, Bovine  19866882263133
  misc_feature (1)..(1): n is a, c, g, or t
ngagttaaaagagtgtagtggttcttattcatacctgacccactaagttcattgctattataagaatactagagatgtgcctcacaggatgaaaagaaaatgtgcaaatgatggctggactgtgctgactcttggtagagtgcagaaaaatgatagaaagagtagattacagacccagatttcacactgagcctaggcagccaacaagagaaaggtgtgaggtatgattcacaacacaatgcttcctgccacaacactgagaacccattttcaacagactctgtgggcatagcatccacaaagtccccttctaaacccaaaactagactctcagatgctgcgtgaggccgtaagaggtccttggtcaattcttcctcttagcactggtctcttaaatactcgatattacacgtcatgtaaagcgccttccctcagaagctgtgaaatagaaactttcaaaagataagctcatgttgaactgcacaatttgtctcatttcataattctaaactttcataacctgcctttcctgggtgtaactggcatgacgaaagccccatgtgatttgctcaacacagtgctaggaaggactcaacaagattcttaggtgaattgaatccatctttgaagaatacacagagcttgatttgggataagtttcagaattcagggttttcctttcacatcctcaaattttcccttgactctccatctcctccaccttccccactccaggctgcccgtaacccacctgcctcagaggaccccagcttattttctacagctggggacccttagctatctcttatcttccatctctcttgtatcttcaatcagattatctcccctatgacctggaaaaagagctcagatctcctctattctaaaaataaaattaaagggaaacaaaactaccaagaaaacttcctcagc

SEQ ID NO: 49823 - DNA, 2006 bp, Bovine  19866880271105
  misc_feature (1)..(1): n is a, c, g, or t
ntaacataggttaaaatactttagatgtggcagaaagggaaccatcatgaatgaattgccctcctctgaggcctggaaaacagcaaacaacaaaaggtattactctgataaagttgatattctatggagatgtgtgtctctgatttgaagttctatgctgctgctgctgctaagtcccttcagtcgtgtccgactctgtgcgaccccatagacggcagcccaccaggctcccccgtccctgggattctccaggcaagaacactggagtgggttgccatttccttctccaatgcatgaaagtgaaaagtgaaagtgaagtcgctcagtcgtgcccgactcttagcgaccccatggactgcagcctaccaggctcctctatccatgggattttccaggcaagagtactggagtggggtgccattgccttctccgtctatccttctagatgcatagaatttttttggttctggcctgggggctcagtcttcaggcctactttcagttaactctcagataagaatatagttttattacaatttgttatgtgccaaggtcatactgatatgtatgacatctacttacattcctatacaaaaagtgaatccataaattcttttaatcagttattaactatgtaggaacaattatatgcaaagcattgtgtaactatatgaatatgtgtgcttacatacaagtacttggcccattgggatttaagaaaaaaaatagaaacaaaaaataaaatttacccctgaaaatataatcaacagtgagttataatctattgattaactcttttgtatcacctttggtttctaaaagaaagtaaaatttctgaacgtaatatagaattttccgaaaagatctcagtagttctcaaaggaatcaaactatatcctaacaacatggctgaaaaataaaatcaaaattccttagtaatataagaaaggaaatacctttatagaagaatttcatcaagtaaaggttttctttccttattgaatcagagctgtatttaatcaaggcctgagtggactgccaacttccctttttatgttttacaagagaaaaggcatccaaaaatagatttctgtatcttagtacactctaagtcactgatgtttcaaatctcaactaaaattgtagtttcatagattaattcaagtggagggatgaagaaatattccttataactgaaacaaaataacagtgaattatcagcttgggttctatgtatggtaaaaaaaaaaatagagagatgataatagatctggttttattagcttaactgctgtataattgatatacaaatactgcaaatattttaatgtgtacagtgtaatgaatctgaacatatacaagcaccacagtcaaggtcatgaatagatttaacacttcccagattttccttgtgtcctgtttttattgttgtgtttgtttttgatgtgtgttgtgttaagaacagttaccatgctacttgccctcttgacacattttgaagtgaaataggtctattctttaacctgtatttgtaaagatagaagacccctctagatgatccaaaatcctccccagagtgtgacaaactgttggactatctcttgattacccatcaatgacaagcaaaactttacttgccatcacccttctgaagtttactgaaatgaaatttcaaggctgctcctaaatgaacatatggctaaataagttctacaacagcaatagattagatattgaactttgcacaacaataaattacaggtttaactgcctcaaacaactgtatgtatgaccctattttatggcagttatatttatgaaaccaattcaaatgggaaatccaggatatctttttgaatgaagaaattgagcatcttcaaacctggtttaatcttgcagaagtgtacttggctgttcatagatttttttttccacatgagagaaacatatgtggttaaaccggtgttaaattcaacaagcaaaaagccttgccatggcttttcaca

SEQ ID NO: 49824 - DNA, 1854 bp, Bovine  19866880351884
  misc_feature (1)..(1): n is a, c, g, or t
ngaaaggctacctactccagtattctggcctggagaattccatagaatgtacagcccatggggttgcaatgagtccgatacgactgagcaactttcactcactctctcccctggaaatttgattcttgccataatttcaatcattgtccagctactgctgactccaagattggtatttcagtccttgagctgcccttaagtataggtctatctattcagctgtcttctggacatttctccttagacttcccgtgtgtgtgtatgtgtgtgtgctcagtcatgtcagactctttgtgaccctttggactgtagcccaccagcctcctctgtctgtgggattctccaggtaagaatactggagtgggttgccatttcctctaggggatcttcctgacccagggatcgaacctgcatctcctgagtctcttgcattacaggcttattctttaccactgagccatcagggaagccgctctgcttctactagatttcccacaggaatatagaattcaatatacaccaggaaaaactcattttttttcactcctccttgccaaccttgccagtacttttctcctcaaggaaccactgtcttcctgtattggttggtgatacctctgtctgcccatctaagtaggaccccagagcagcatcctcaacccctctttctttcgtaactatgcatacaatcagttctcaagtcaaaccgcattttgacttataaataactttcctatcacccttgctttttgtccttattgccaaggccccagctttggactgtttcaggagacttcaacaggttcctttgaatcccagctcagttcactcccaattgtgctcaaccttctttaaaaacattctttctaaaactcaaatgttcctattttgtactccccctatgacgcccataaaaccttctattacctgcaacctaaaatgtaaatctactttcttactgtggatctttgtcactgaagctctgcctactttcagccttcttcctgtctaccatgcttttgggtatatacaaatagggaaatcaaataaaagcatggatacacattaatagaagtgtgtaccactgtggtttcctttatacatctaaacaaaggttttcaaaactaattacatacttcctttgttttcaggttgcagacaaatactcattgataatgaaagtacaagatatggatggccagttttttggattgatgagtacagcgacttgcatcataacagtaaaagattcaaatgacaatttgcccactttcagacagaatgccgtaagtagataatatcaaaattgatctctattgctgtttttaatttaattggaattaaagtatttatcatccttcgaagtatctatgcttatttgatcaataaaatgaaacatatggcatataaatctatttattcatattggtatttatattatctttcttttgttaaaggctatggtattagtcttcatttgtatcaaagttctacgttcatgtaaaagtaactcttaataaaacaatgctttcatgattcatgttttgaaataatctaggcaaaagctttaagaacaagtacttttggagtgaaagacgtgttttactttctttgtagaagtttcccttataagataaggttttaatgagttctctctgtttcagtatgaagcatcagtcgaggaaaacacggtcaatgtggaaattctaagaatacccgtagaagataaggatttgattaacactgccaattggagagccaattttactattttaaagggcaatgaaaatggacatttcaaaatcactacagacaaagcaactaatgaaggtgtttgtctgtgtaaaggtacag

SEQ ID NO: 49825 - DNA, 608 bp, Bovine  19866880468662
  misc_feature (1)..(1): n is a, c, g, or t
nctccaggaggtggtgaaggacagggaagcctggcgttggcatgctgcactccatgggatcgcagagttgaacacgactaagtgactgaacaataacaaatcaggttttatttgttaatatttgttacctctctgtctagcttagatgacgatgtggtgatcacgcctgtagttggatgcatagaaaagagggtgggtaatgctggaaactgctcaatgatggagtacttcagacgcgtgtggagtgtgtcaggctcatcttggtctgttgcacaaacctgtcccacggtagtacctacatacacaaaaatcctctttactttccaaaacctttacagtttcaactttccctttgactcctatctatcacaaaaaagtttcacacgacaaaattaataataagaatagcgtttgtacattttcaggattccatataaagtatcacttctttttaaatatcccaatgttccaacattttgaaatttggtgaccatatccatatttactacgtttactgtataattttataaatgttgataatatccccccatggccttagtatttcttaactaaagaattccaattattctttaagctttttctattta

SEQ ID NO: 49826 - DNA, 2045 bp, Bovine  19866880468955
  misc_feature (1)..(1): n is a, c, g, or t
nccaaggtgatggctattaagagagggagcctttgggaggaaattagatcatgctcctcattgagatttatgcgtttactaagtagaccccagatagctagctcatatgatccaccatgtgaaaacacagcgagaaggtagcaatctgcagcccggaagaggagtgtcaccagagcccgaccatgctggcacctgtcgtccattcttattctaccttggtggttgtaacttagccttgtatacaatttcattttctcttctttcttagcatatcaattgcacttctttttttactttttttagtggttgactttgcaatagacattttagtggttgactttgcaatatacatttataactaatccaagtccatttcatggtccatttataataaaataatcctaattcttgccttccctccctcatatcactgctgtcattcatttcacttgtacataagcatacatagttggatatattgctggtattattattttggataaatgtgtctcttagatctggtattattattttggataaatgtgtctcttagatcagttaagaataagaaatataaaagttttattttaccttcacttattccttcaccacagcttttcctttcttttttaatgtacatctgagtttctgacctatatcatttcccttctctctagagaacttcttttaacatttccctgcaaaacaggtctattggcaacacattccctcaatttttgtttgtctgagaaagtctttatttccactacactttaaaggataatttcacagggcatacaattctagattggtggctttttatctcgacactataaatatttcagtctactcttcttgcttgcaagatttctgaaagattagatgtaattattatctttgttcctctgtagatatttttttccatctaggttctttctttctctttgatttttttctttctctttgattttctgtagtttaaacatgatatgcctctatggaggtttgtttcttttttgttttgcatttagtatcctattcagtgttctctgaacttcctggatctgtggtttggtatctgacattactttggggaaattctcggtcattactatttcagatatttcttctgtttttttttcttcttctggttttatcactgtatatatgttatattccttatagttgtcccatggttcttggatatcctattctgttttcttcagtcttttttcattttgcttttcaattttggaggtttctattgagatacccttaagctcagagattctttcctctgctgtgtcgtctactaataagcccatcaaaagtgcccttcctttctggtaatattttctgacctctagcattcttttagactccttctcagactcttttccattataggatattataagatactgagtctcatttcctgtgctatatactatgcccttgttatttacctattttatatatagtactgtatatatgttaatcccaaactgcccatctgttcttacatgctgtctactttatccattagagcccttagaatattagtcatagttgttttaactcctggtctgatgagtccaacatccctgccgtatctgagtctggttctgatacttgctctgtctcttcaagctgtgttttctgcctttaagaatgttttgtaatttttttcttgatagccagacatgatgggctgagtaaaaggaactgtcttaaataggcctttagtagtgggatggtaaggaatggtggcagggggaagtgttctagagtcccatgattttagtgagcctttgctgctggactttgaacttgacatgttcttctcagccccatattcccactccttttagatgggaccggatggtcagagctgtctagagttgtgtgtttcccttcttccagattagttaggctccaataaatccctaacaggtttggttctggttaaataatttctcctgagggcagatcatgttaagaagaacagaatgctctagcatattttgaaaatggctccttctcac

SEQ ID NO: 49827 - DNA, 1577 bp, Bovine  19866880648273
  misc_feature (1)..(1): n is a, c, g, or t
ncttgaaaaatgggtcgtttaagctgcaagagcttcaaatgattcgccttttgagacagcaggtgttagattcagcagggtcctaatgccaggaacacatttacattcaaattaaactgaatataattcgaagctatttcttcaaagtaggaacccctttgtgtaagaaaataattgcacatatgcaaaatttgaaataaattttttatacttaaaacacccatcttggacatactaaaaacgaactgaaaatcgattcagtatttcccccttttgatactaaatggtgctgcatacttatccttccattaactttcccatcatttactttgaattctaacttgaaaaatcaaaagtgtatgcccatattcaaaataaacatgactgaaaagcaaatttccattataattgcctaagttatttaaaacactttaaatgaagagacagatttctataactaaagcaaaccccctttgcccaacctacctccctgacatgtgctgctctcagtgtctctactgaaacaggtaaacgttccttcatgtaaagtctgattgtggtttatctgatctgatccccttacaacaatgacaccatgaccatgccttagaaaacattttctccttcagtgaatatcaatgatgctacagaaatatcaagaggataccaggaaaaaaagggtttctcagtgacattatgagactttgagtgaaaaaaggcacatctcccaagctcatctgcaatgacttcaggaagaaggaaaaatatactggcttctggtttttattgtcgttacaaggtaagcacaagttgagggatcccacgtgtaggtaggagcttgtgtggtttgaatattccaccaaaagagggagaatccaggctttcttagcttgcacaaatgtagagaggaaaagggagggatggatcttaaaagctgtcatcagccaagcatccaaagcatggagtcagattatttattgcaaagggatttgtacgatttgaggaagtttaccaatgtgtgatgcaaggaatttgcatagattattgtaaagacctatatctgaattattacatgcaccatatctaggtttgcattatccactcaactcccaagagcacccagaaacacaaataactgtggatttaatgtccctatttattagcactagactttgaataacctgaggacaagaaatatattttataggcttggtatttccagattctactatgtcatctggcacatagtgaatgatcaataaatgtttattgaataaatgaatccattaactctactatactataaaattcattttaaaatacttgagcataaatgatgcagtagctggcataatagtttgccctaggggcagttagataaaatgtgcaatactttcatcaggattataccctccaaagtggttggttaacattttaaagactcttatcagaagttctcattctagaggaagcttctacaaaagctctaattatctttatgtatcataaacatttatagggtataaattaacaaaaaggatcagaaagtggtatttagctgatagaatatgttttgt

SEQ ID NO: 49828 - DNA, 1644 bp, Bovine  19866880650046
  misc_feature (1)..(1): n is a, c, g, or t
ngacttatttgtttagatttatttatttctcacacagagaaagatttaagtctaaagggccacctgacctctgcaattctttagtttttagtttaagaggtgtcaagaatatatgcctttctgtgaatttcaaagaatgtgtcttatagaagcacagtgacagttttcataaaaaatatttattcacagctgacttgcagaaagtactgcttatgaataaaatctaggcctcaaaatagcctcttgcttataaaatattatctatgtcaggctacccagtttattctgaaagactctggactggtaggaatgctttacatgttaatgaagccctcacaaagcatatttaggttaagtgtataggactgaagaaaacagaaactacaggaataaaacagagcgtgtgggcttaatgtggaagattagaaatgtataaaggagttaaaaagaagttaactgtagaaagccatctgggtctcagagattcagtgtgccatggaaagtccctacaattccagtgaactcatggacttttatctgggtaaagtgttactaaaaattagaagtaactcatagctattgacaattactaaggaacaatttcttaaggctgtttgcatagagtactgactaattttatgaaaaatgaccacttcccattatcatcaaaattgttggcaaacttatgaaaagaaacatcagcataaatatctgtataatttggaactctctctattcagcacacacacccaacttaaattggcttaagagaagcaaaacaaaacaaaattattgaggataaaggcatttgttaggtcatgtaattgggaagtccagggatgtcctggattcaaacatagttcaagtcaagcgatcaaatgatgtcaccaagatactggctgtctcggacttccctggaggcccaggggttaagaatctgcctgccaaggcaggggacaccagtgtgacccctggtccaggaagatttcacatgcttcacagcatctaagcccttgtgtcacgactaccgaacctgagcccacacatcacaactactgaagccctgggcctgaagtctgtgctcttcaacaagagaagccaccacagagaaaagcctgtgcaccacagtaagaagcagtgcagccaaaaacaagtgaataagtaaagctatcggttctctccatctcttagctctgactttctgttggtttcactatcattcagtgtgttctcagtacagagccaaagatggcaaccagaaactctcagactgcagtcagttgttcagtaatccatagttggaagagcatgtctcatttttactaattggagtaaacacaatcccactggagagtcttgccccaaaggctaacctcaagggaaggccagagcacatgggcaagaagtggtgaggaaggtcttgctccaagacagttgtcagctattgacagaaaaaggtgtctggaaaaacagattatatgatgcccagtaaactgaccttttctttattctcatttcaacagtgtcagtggattatccatcaatcatttattaacaccttctgtttcctaagcactactcatggtgctgctgaatggaagctggaaaaaacaccatctctgccctcatgaagcttacagtcta

SEQ ID NO: 49829 - DNA, 952 bp, Bovine  19866880732469
  misc_feature (1)..(1): n is a, c, g, or t
nttacttactgttggcagttccatgtatggaatgttatcattgacatcgaggattttaatgttgcattcacactctgctgacataccatctgccccaccatctcggtctgagcctcttacagctagagagtactggccatattgctaaaaagacacaacaaacaatatcacagttgatgcagacagttcttattttgtcctgtacaaagatcttttaaaatgttggctcaacatttgcataaatctatgatgaagatagaggtaacacagaatgttgaaaattcacaaatctcacatcaatttatatgaagttgccacttctattcccaacaatgtctatacagcattatttaaaagaagataaaatatttaaaagccctcattccttattatatgctgaaaaataatataaaggacgaagcagaccaaaattgtcaggaggggagagattgtttaccaggaatttatagaatgaaaattctgtacctaaattattagcccctgaatgtgcaagtagaataaagagatagcaaatgtttgcatttctggggagtgccaggatgtggcagtacagttactgatgatctgttttcttgattctatttgatggtgcttaaatttttagaagctgataaaagccatgaagccttttctagatatatgtatgtgtgcatcctcactcaaagttcatatacttttagaggattcatagttagagatgtcttgagggctctccacaaatcccaggttaagaatatctgctctgaaaaaaagggagaggcctcaaattaataagattagatatgaaaaaaagtgaagtaacaatggataccacagaaatcatgagaaagtactacaagcaactgtacaccaaaaaatggacaacctggaataaatggacaagttcttagaaaggtacaatctcccaagactgaaccagaaaggaacagaa

SEQ ID NO: 49830 - DNA, 1030 bp, Bovine  19866880758983
  misc_feature (1)..(1): n is a, c, g, or t
ntttgaacctcaaagtagcatagacccagtgtcaaattctcctcttatcttgctttaaaaaccacattgaaataaatcaccatattcacttcatctgaaggaagacaagtacaatcccgaatgaacccaaatcaactataaactgtgtcttttaaacaaatcaaaaaaacacacaattctggcatactttaggttctgtgtttgtaagtatgtccttctaacttggttgcaaaacaatttatgtgattcttttcatgattttgtgtccaaagtgcaccaacatgaaaaagtccatctaaataaatatcaaaatatattatcaaaattacagttaatttctaaccaaactctttcaagtaattacataataacttctaaagagtctgtggagaaggaaatggcagcccactccagtatccttgcctggaaaatcccatggagagaggaacctggtgggctacagtccatggggttgcaaagagtcagaaacgactcagcaactaaacaacaagagtgtctggaagacgttagaattttgctttatgtgtagttttctggtaaagccctggaagaagaaataatgataaagacctctattactgttaaaaaatgtattcatcattccattttctctttcgcctacaaattcagaaagcatatgcttatgcggatgaagacgaaggacgcccatccaatgactgtctgctaatctacgatattgagggtgcaggctcccctgcgggctctgtgggctgttgtagcttcattggagaagacttggatgacagcttcttggatacactggggccgaagtttaagaagttggcagacatcagcctgggaaaagacgttgaaccatttccagactctgatccctcttggccacctgagagcactgagccggtctgccctccacagggaacagagcccactggtggtggacacccacccatctccccacgtttcggcaccaccaccgtcatctctgagaacacctacccctcgggacctggggtacagcaccctacgc

SEQ ID NO: 49831 - DNA, 1158 bp, Bovine  19866880796233
  misc_feature (1)..(1): n is a, c, g, or t
ntgttgtttacttatcggaccacccccgctaagacccctcctctgaggcagggctcacagcttcccagttcagcactgtgtcccctcatcctaactccaggcccagcaaacagctgttcaggctctccataaatatttgttgaaagggcaaaagtatgctcagaagtataattctacagtttgcgaaggcaatttctcaggggaaaaaaatggcatttatgagcagagctttccagcaaattatattcagccataatactacaagcatgcgtataattatctctgtatttcttgtttttgcgtgatactagttatttctgcaagatctgagtgtttgcaccaatgtgcaaaaatgagcactcttaaacatgacagtagatggctcctgtttaaaagttctgacagttacattctagaatttaaggacttgatttgggatcttctgttttagaaacaatatattgtggaaagtgaaaggaaatattttacttcaaaaaaggagaagacgagcattttctaagcataaattcaatgaacactgtgtttggtctatacatgataacatttacaaataatttcaagacatgttaagaaactgatttaaaaaggaaacaggtaggtaaacttaggggcgaagtgcctttcctggttatagaatatacatttccctaaaatattcataatttgtcactgtagatgattttactttagaaaagtatatttttaagacagtgtgtctggaatattacatctagtgtgtcaacactggtttctcttgctgtgtattctgtacttttatgataccatacgttctcacgtggggaagcaataaaggcatttttctctgccaagctataggtcaaggctaatataaacaaactgtcaacttttatataagaggcttcctaaagtttgcagagtgtaaagttccaagacaaaccccatggtatctaggtgaggccttttgatacggatagaaatctctaggaaggcattatggaatccctcaattataatgattgaaccaccaccactgcccagctgagaagttacaaaacacaataaagttattccagattatctcagccagcaatcaggactttcgcctgcatttagtgcgacctcggaagactagtggggcaggtctcaacatggagg

SEQ ID NO: 49832 - DNA, 665 bp, Bovine  19866880892036
  misc_feature (1)..(1): n is a, c, g, or t
nggaaaaccagaaatttttacttctttgaggttctgtttcggtgccttgggaagggtaattgattagcgtgctcatcagaaacaggatatttatagttttcttagacatcctctcttcaaggtgttgaagtgctgccagaatacataggaatagttgttgagtacagtattaattttagaggaatttcatagagaaatggtgatttagacatgactttgggcagaatgatcactgaaatatcctgtaagtataatagtgcagagtaactttaaatatataatttctgaaaatgcagttacccatgggaaaaagtgcaaagtagaacttctgtatatgttgctgcttctgctggaagaaggtagcaattacatagatctatggtctgtataaattgtttcttacttgcctacctggttttatttaagcgaccccatttttttactcatctaaccctaaatatttagagccgaaccttgtaatgcatcatattcatgggttcagttcagttcagtcgctcagtcatgttcgactctttgcgaccccataaatcgcagtacgccaggcctccctgtccatcaccaactcccggagttcactcagactcatgtccattgagtcagtgatgccatccagccatctcatcctctgttgtccccttctcctc

SEQ ID NO: 49833 - DNA, 1290 bp, Bovine  19866880959157
  misc_feature (1)..(1): n is a, c, g, or t
nttttttttttttttttttgagttcagaatagcaggaaaaaatgtatatatcttatgcattcttgaaaggaaaaagatgaatactttaattcaaacaacagatatttcccccatttaatctttgctgttattttttgatttacaataaatggctccaataaaagtgaaatatgattttcgccatcatgctgtggttttcttctgatgttcaggaagccttgtgttgcatacaagttatttaactgtccccctaaggtctattggcattaggtagatatcttgattgataactgtttctatgcaacactaagccttcttgtgttttgcttatttctagtaaatgaaagcaagtccctccagaccttgaggcaaaatttaaatcagtattttacctcatgctgtactatctctcctctcatggatgaatctaatcctgtgacagcaaatgctctttttctttcacagtccaagtgatcaagcaagtttaattgcttcaaaataatgcaattgaatttatacttttattgtctaatttcctttttggcagtggatggacagaactggtagttgaagcacttgttatatatgtcaccttcatctgagggcttatatgtggttttatagttttcttctttaaactacaatacaccagcatgtctgtcacagtgccattaaataaaagatgtaagaatgggcattctttaaaggctctttcatttattctgattatattctagcctccgtgtttttcattttagacccgttaggggcagtagaacacaattcacaagactgcattataaaaatactgcctttttcatagaaccatttagttcaacatgatttgtctgaaagatgaatatttcagaaagagatttcaatagaaatcaatgtgtgtcaaatgtaatgtgtaggaaagaaaatagcatttgtcaaaaagaatacttacaaagcagaatgtaaagaattaatggcttccctggcagctcagatggtaaagaatctgccttcaatgcaggagacccaagtttgatccctgggtcaggaagatcccctgaagaaggaaatggcaaccactccagtattcttgcctgaagaaccccagaattaatatgtttacttactagtaatatgatactctatttttaaaattaatagtactgacttttattttcattttgtcaactggtctttcttttgagtgtcatatagagtttccactataactttagtatgacattattacttgatttctgtaagagaatgtacttgacttgctggttcaaactg

SEQ ID NO: 49834 - DNA, 1357 bp, Bovine  19866880964985
  misc_feature (1)..(1): n is a, c, g, or t
ntagacagagttcttagaaattactttaaagattgtttctatttatcttaaccataaaacaaggtgaaactgcttggtggcatgaaaccatgccttctttatctttatgtccctagtatggcaacatcttacaagcttatagatctctgtgtcagagggcaagatgaaactcaagtctaggactagatgaaatggtctcaccagactcttctagatctctttatgtctttttaaattaaatcattaaatagctcagctgactatagagttaaaatgattttttctttacattctgttccttaaggaaacccagaatttctcaaccctggctaactatgaaaataattggcgatgtttaaaagtaatttcaaggtatagacactatctgagaccaactgaattaagaatccctgatctaggagcctggacatcatatatatatatatatatatatatatatatatatatatatatattttttaaatctgcctagatggttaaaatatgtaccaggattagaaaagtttttctatggtcactttactctttctgacatctgtaccaaaaggaacccaaggaactagagagtttgaaattcagacatttatttttattttttggtaaaaattctggttaaaggtttatgggcagttatatctgatactatcaacagcacagtagtcattttagatgctctacaggtttcatttatccatctaccttcttctttgccattttctctaattatcagtttatttatttaaaaaaacccaggagcttccctggtggctcagtgttttaaaaaaaaaaaaaaaaaatctgcctgccaatgcagggtactggtctgggaagatcccacatgctgtgggacaactaggtctgtgtgccacaactattgagcccatgtaccccagagtctgtgctctgcagccagagaatccattgcaatgagaagcccgtgcagtgcaattagagggtgatcttggcttgccacaactagtgaaagcccacgtgcaagcaatgaagacctggcacagccaaaaataaataaataaaattaaaaaaattaaaaagtccatgcatatttagaatctagctgatttttttttcccttaaaaaactgtgaactacactcaactttttttctttcttcctagatggtagatcatgtactggaaccctcgcagttagcattgaagatgtgaatgataacccaccagaaatacttcaagattatctagttatttgcaaaggaaacatggactatgttgacatttcggctattgatcatgacagttccatcaacggtgctccattttacttcagcttggcaaacacttctccagaaatcaacaga

SEQ ID NO: 49835 - DNA, 2197 bp, Bovine  19866880975305
  misc_feature (1)..(1): n is a, c, g, or t
nccctcctccccaaaatccccaaaaaactttcctgccactttggagatggcttttccatggttggctgtttgccacatcacaaaccattgtttccagaactcttacaaagctggtgtagataacttctggttgttttcttgatgtttttaggtaggaaggagagtttggatcttcttagtctgtctctgatgttagagtctacggagtttgtaagtacccaaatgatgccaattttccccatgtttctccccactttctggcatttcatttgccagacaggctaaggaatgaaaaaaaattaaagaacacattgtttattgtctgaaagttgagttttatcccccattgtgttataagtaacatactaaatcctaatagttcaggctcaatgagagaacttgcacataaaaatatttataaaatttttctgacttgggtaatgcttatatagaatatcttatggtgctatgtttgatttccctgtacagtgggtaaatatctttaaatttttatatacttcaagtatcacatttgatctcgtcataaaattgtttgctatcaatttaaaacaaggaatagtggtttctgctttttaaagtgcaatttaaaatatctagtatcattgccttcatttttaaaatcctattttggagatttcttatggttttcattgtcaaagaatgatctttctcttctgataaaatgtaatatgtggacataggaattgtctttgtgaagataattttcaacattgtgttgatttaatcaacccaattaatgttgtaattatgagatatcctcacaagtaggtttcaaagttggtttttactttcaattaccttttcaattaactaagaagtgcttcatggctgaaaatttgttcaaataagacctttgagaataaaggggtcattttgagagaatgaccaaccaaggacttttaacgaagaaagagtaaacgttacagagataaggtgttttaagtttttgacagcgtgtaagaacatgccaagaactatatttaaaatagatagtcaacaagggcctacagtatagcacagggaacttggcttaatattctgcaataacctaaataagaaaataatttgaaaaagaaatggatactggtatggggataacagtatccctctgctatacacctgtaaccaacacaccattgttaatcaactacactccaatataaaataaaaatgaagaaaaaatcatgccaaaatagtaaaggccacatgagatgataactgctaatatcatgataaaccttctagtgcttgtgttttgtgaatatttttgattattccattatactttttatgtttctggcttcttaaaaaaataagtattgcataataaaaatgatgcaaactcattattcaagaatataaacattgacatgaaagtacaaataacaaaatacatattcatccccaaattatatcagtctgaactatcacagttaaatgtcggttctgttcttatgatagcaaaatttcatcatccacacagcttcgtgtcccaaaagataaaagctgcgtttgatctttctatcaaagctgaggtttcaaggtgacccccaagaacttctactcacagtggcttttcatttataatttccaggtctgctcactcaaattatcagtccccttatatcagaactgaaggcttttaatgagaatatttgggtttccccaatagctcagcaggtaaaagatgtgcctgcagtgccggagacacaagagatgtggattcaatccttgggtcgggaagatttcctggagaaggaaatggcaacccactccagtaatcttacacggagaatcccatggacagaggagcttggcaggctatagtccacagggtcacaaatagttggacacgactgaagggacttagcacacatgcattttcccccctctcgtttgatatttgatgcatctatttccccaggtacttttgaacttctttccaagtgagccagctgtaaaaactctactttctctttctctctccactccctactactactggctgcaatgaaggaagatactcagtctatctttgaagggagggtaacactcttggatacaataaataaagtcatccatactgggtcagcatcattttgagtgttaccactgtcactcagccctttggtatttgtgtggggagactcccagg

SEQ ID NO: 49836 - DNA, 1096 bp, Bovine  19866881078042
  misc_feature (1)..(1): n is a, c, g, or t
ntttttatgctggaatgtacattagaattacttttataaatacagatgcttgggtctcctcccaggccatttaaatcagaatctctgaggtctgatcagagtccctccatgtgattcttctgtgcaaccggggttgagaagtactgctttgtagacactggaacttttatttcttcctcaccatgtgaagaaaaccaagatacctgttttaacaggtatattttttatatttatataaatatatatatatttatattatatatatatattatatatattatataaataatatatatttatatatatattatatatatatttatatataaaaaatatatatattttaacaggaatattaagtatattcatgtgtatctggatgaacatattgatcttgggaatgttatttctataatatcacaaaaacctattgaaaggagaaagaatgatcataggcagaaatttaggactgagataattcctggaaaggaagtgggaattaagataggagacagaaatggagaaggatctagaaatatcgtttgaagatctaaaaggctgaacagcagcttgaaaagatattagaatcaaaccagaaatacctggaagagtgataatgaaacttacctaggccaagaccacagggaaagataacttcatcagattgtgtatttataatgaagggaaagaacactagcagcctggagtgtcaggtggcttttaggaaaacagtctctacttgaaatgtgaagttacatctgaattacagacaaagataaccttgttttatcaagaactcaagacacagcttaaccaggctggagctaaaacattttaagcaatgagaaagcaaagtttactgaacttttataacctggctcttttctagtaacttgccaacaacagctcctcatttcagaaaataatgattcatgttaattctgcatttggggtatagtgtaagtggaattatacttaaattcctctgtctgtgcctgtgaccactggttaatttgaagagatatttctgctatgagaatagatgacccatcagtcagttgctacatgattatggcaatttagaccttggcattca

SEQ ID NO: 49837 - DNA, 1314 bp, Bovine  19866881108199
  misc_feature (1)..(1): n is a, c, g, or t
nccctagtctgttccgttgacctggaatgccttcctatttctttacttggctatttcctgtggtcttgctacactcagcccaaaggtcatttcttaggagaagcctttctcgactattcagctgggcgacccttctctttctccttaatcctcacattcataccccttatgaaacacttgtcatactgttttatttttttttctttaaattttttttttttggatgtgaaccatttttaaagtctttattgaattttttactatattgcttctgttttacgttgtggtcttttgcccgtgaggcatgtgggatcttcagctcctcaacaagaattgaaactgcaccccttgcattggaagtcagtcttaatcactggatggccaaggaagtcctatgtcatactgtattttaactcttactacttcctgcatctgactgtgagggccttaatggcaaagaccctaattcaacctctttattcctagcactgagcccataggccctggtggctcagctggtaaagaatctgcctgcaatgtagaagacccgggttatagttagaactaaagggataaatacaaaagtaacacagcatttatttcctctaaaggattgagtagggcttccctggtggctcagatggtaaagaatctgcctgcaatgcaggagacctgggttcagtccctggatcgggaagatcctctggagaaggaaatggcaacccacttcactattcttgcctgggaaatcccgtggatagaggagcctggcggactacagtccatgggggtcgcaaagagtcgaacatgactgagcaactaacaaaaagacatttttaataaatggatgaatgagcattggaaatagatcacaagtgactcccgtatcatttttctttttctcacttttcctcgtcttgaaaaggaagatcatagagtagattaaatgagaagatttttgaaaagtaactaccatgatgcttggtgcataataataataaatacttgttctttcactcttctttctgtacagctcttatctacgagttgtaaaggtttcggatttcccacacctggtggttatgcctcactggtaccaaagtttccaccctgtcagtacctccttgttaaatacttaaggaagacttcccagtcaaccagtgtttatgctgatcacatgtaaacactgtgacttttgtactaacacctcatcatcactcaccacacacactcactgcctctattaaacacacattcagcatgtctcttacctttaactcagtcatcttattaatcacagggaaactcagctcg

SEQ ID NO: 49838 - DNA, 971 bp, Bovine  19866881110495
  misc_feature (1)..(1): n is a, c, g, or t
nttaaattgtgacttggatcacatttttttaaaatattcctttccagaaacaaaaggcataatcaggcaatttgtagtcagctttctattatagataccaaatcatagtcttggaaagcttgaaggtaattgactttttattcatttttaaatacctgaagtcataactttaacctaccttataaaacaaatgtggctttttattttcacatcaggatatttttaaaaggttagtgtgaagtgcctataaatatgcaaagatttcaacagctaagacaaacatctcagtaaataacttaattgagctgtgaatatttagtgattgaaatccgattactttgtggcttaatttgtgtactgcttgactgctctgcagtttcaggcaatttaacaatgtagacagtatatgaagatggaatgttaaatagtgagtgagacattcaaggcaaaaatgtcttgagttgtgttcattttttaaagcatctcgctgagtgagatgcaggctcgatgtaaagactccaagtaggcagattatataaaagtcagggaaggcacaggttctttccccccacatctctggataattagttttaccctcttgttgaattttggtgcctattatgctcataaagattaataacatggcgcacaaaatcaccttccctcctgtaaactgcatttctctctatgactgcaaataagaagaatcagtgagtttttgtgatgatctaatgctatcagaagacacatagagtacaggcccttctgagagatcccttgtcatcctaaaacccaactaaatgggattctgatatttcatagagctctattcccataaacaatgaattttaagagattgataagttgggtcaataaagaaaacaaatttagatattgtgtgccaaacactggagtttctcttccatatgtcttttaacaagcacattccagaatactgctcctgttatctg

SEQ ID NO: 49839 - DNA, 1035 bp, Bovine  19866881239825
  misc_feature (1)..(1): n is a, c, g, or t
nggaagtattttcagaagaatggtgcaagtgtctgcatttttcaagatatgtacttttctttcttcatattcttcttgaatcactgctcacagaaaggatgtgtttgcagaaagagccagcactgatctccttgattacttattttcagagagttgatgtaatggtgttaccacagtgcgtttctgacactgtgagactgtgttggggattccaggctgacgttttacagacatcatcctggggactaactgtactgttttttatttctttttcttcttttagagttggcttcagggcctacttgctatggaatttatcttaaaaagagaaaattgttccaattgcttatcatcctctgagaatcacagatttctaagatctcatgtctagtctagggttaggtgtgacagatatttatggttgagtcagtataaaaaaacacacaatatacttaacctttattcagtctgcatgtctgcattataaatgtggagcccaggctttttaccaaggtagggtcaagaatcagagctgccaactaccatttaagtatttaaaacaacctcccttcctctgtgaagtgttaatggactcagtccagcacctggcatatatctgtctatatcacacataaaataaatttaaattggcagtgccagcagagaaaatgagatttcatgggtgttgaaacaagccaaacattcaggtgagaagtgacctcagtactagagaaagatactcttctcttgatgcgttctgagaagccaaacattttaaacacgtccctcactgttttctaacccataaagagcaggtacaagaaacaatgccctcagacctcccacgatgagaaacacatccaattccacaagcatgtgtagctattgtgtaagagtagtgattacacacttacaggtttatttctacttctgttttactcatttaaaacgcatttactctcataacagtaggtaagtgggagtgcataggtgtcaactattgttatgctttttccacttttcaaacagagatat

SEQ ID NO: 49840 - DNA, 1206 bp, Bovine  19866881333514
  misc_feature (1)..(1): n is a, c, g, or t
naaaaatttcaatattttcctactgcacgcagagatttattgctagaattgaaaaggtaactgtatataacttagtctacccctgtcatttcacaaatgagaaaactaagagaattcagcaagtacactgaaagctctctgaccctatgaagtacttgatttcattattttgcctttgaaagtccaagaatggctatttcagagttttttgggtttttttctggactctgagcaaatcacagtaagattatgttaacaaaacataattttaagcagacttggcagttttttaattactaatccagttgagagcctgactctgtggtgaaacttgcttggtcttctgcctgagttgctattcatgggaaaaagaatgacccagcttcataaagttggaaggtttcttagtcatctggcatagttctccaaagcaaacagcaagcactgacacttcggtgtggtaagggaagcgcaagacaaataacagatgcatacacaattctgtaactacgaagaaatggctcccagacaaataagatacccccacaccccagttccacacctacaaattagaggaaaaagtgttcatgcgttcacaggtagcaagaaatacatacctgcattaacattatttcaatttggtgcccaagagggactctacaataacaattcagttacttgtccaaagtaacttggaccatttgggtcatttatttttctttctcttcccaccccacgcatagcattactgttattgctgttattattgtatataagtactcctattaataattcacaaggatattatgagattagattaaaatcagaattattttgaattctcaaagttgtaataatgtcaattcttcatagtatattttacttcgaaatttacttggaataagccatcttatattacacataccacaaacacaaatttaggctgaattgttttggattgtgagtgtgtgctcgatcactcagtcatatccaactctttgtgacccagccaggctcctctctccatgggatcttccaggcaagaatattggactgggttgccatttcctcctccaggggattttcccaacccagggatcaaacccctgtctcctgactctcctgcattggcaggcagatgcttttatatttagccctaaattaatatccaaacctcaatttcttcatctgtaaaaggaaagaatt

SEQ ID NO: 49841 - DNA, 749 bp, Bovine  19866881386756
  misc_feature (1)..(1): n is a, c, g, or t
ntctcttgaaaagaagttgcttatatccttttaccaactcaaatttcagcaaagtcacaattaaactcctccctcaagagcagcatcgactcctaatataggaaatctgtgtggcagattttagaaagttaactacagctcagcaagaatattgacacctcatttctacataacttttgagataggtgtaagaaaaaacatattacaagatgttaaacataaataggcatttacatctatgctgaaagggttcatttcataaagttgtcatatagagatttattatctacttatttgtattttctttgtaagtagttgacagtttctgcttgatcctgacatcatagaaattcccttgtctaaatcatatcactaaaagaagaacactgaccacaaggcaatctttactagtccattttatttcccttcttaaatctctaggttagtaaaactttgagggagaagtttggcatgaaaattgcaagccgctctgaagataaaatgttatatagtaccatgaagggagaacaagaaaaagatttgatgggatatatcagaaatctgagacataaagcacacacacattccctttttcagattttattggcattctggacctaagagatccataatgctatactggagtccttcatggattatggagtattaagggccaattcttcagagaaagagttatgagtggacttcattacaacaactgaggagatcatattttatcagcaacaacc

SEQ ID NO: 49842 - DNA, 1321 bp, Bovine  19866881394603
  misc_feature (1)..(1): n is a, c, g, or t
nctggatctctgaatcagttctcaaaaagagagccataataagaagcacccattacataccttagtagctgaggaataagtttttgtcttgtttcagacactggaatgtttatagtttatatagcttcctcatgtcatcaaatctgcattcattctcccctaccccacaaatctaacacccctgaagacaggatgcataatacaatcaaaggtgttttaagattgtctactagcactttttccttcatcaaaaagtaatgtacgtttttacaattaagtgtcagatttaatgaaatatagtaatccacaggtcatcttgatttcaaaatccatcatcttaatctctacctacatgtgtacccccttaaattatggacggcattgggtatggtatctatttggttcatggtattattgtttgttaccagatttcattttgttgtttcttccttcctgctcagtaattcatgtggaaaagaacatgaaagtttttatagacatatttttaaactgtatcccaggtgtgtaggcaaaaaattgatttttaaacgtgttttctgctctttagaaaatccaaagcctgtgatataaattgaagatattgcacatattttccagagaagaagctgccatgtggtcacacgtgaaataaggtttggcacaaattaaaatgatttgtatcataaattaaagtacactttatggtaaagatcacaaagggatgaaataaacctagcaataaagatcaagtgaccatttgttacaatggacttattctatgattgggcagcagaagcatggttagcatgataagaatataaatcttgactcttggctctgtaatgtcctagctttgtgaaacggggtggtatttaagcctacaaaacctacttttactcatctgtaaaattttaataatatttattttataagtttattgtgaagattaaaacagatacattaataatagtttcctaggaaatgctagattcttctctcttttatcttacaggattttcagttgacttttacatctatctgatttatgacttaactagatgaaagtgaatgcaaaattagctgcaatctcacattgcttgcttcaataaaaaagtgaaagcaaatctaaacttttccctgtgtgcctcattagctcagtaaaatctaattttcactaatttctttctcttcctatgggaaagaccaagtgattattggaattcatggtcacatttcggaattttttcatacctctctggacttttactttgtaacagagaaccgaattgatttgattttaggctgcaggggtaagggaaag

SEQ ID NO: 49843 - DNA, 2023 bp, Bovine  19866881720817
  misc_feature (1)..(1): n is a, c, g, or t
ntgtagatggttaaagttttttaaattataattacagaccccaggattctgaatttaatggactgttactctaggttcattaaagtaggactaattttcactctgttataatctatgtctctaatttcaaaataatggaaactcctggaaattgctatcaaactttgaaagcattatctgctactgaaatatgtacttccaaagaagactctgtgtctgttgaaccagccagcctcaccgtattaccattaaccctcacacattgattaaatactagtgtgaccccaaggcaatttcaactaaagtttttttttttttattcctttctataagcctcatgcttccaaagctattaagctactctattcttctgctaattatctgaaatgttattaatctgaagcctaaaactcatagaacttcttcaaagctattctacaatgacaatggagttgaagttaaaaatataattaacagattgaagaaagagattctagtggttaatttccaaacttttagaccttaacacacatgctattatcttcttttgtctgatttttttcttccccactacaaatcatttttaaatggtgaatttgcagtcttttgaattttgcaaaaagatcaggaaatagtcaccaatgaaaaacaaatgaattattttcagatgctagctaatattttaatacttcgattcgaaaatctgggtaatctataacctactttatcaccttcccagtggaaccctcaccccgactcggcttgcactcctcaagttaacagtgtcctctggagagatgaaattctagtagccccaaaattctatagaattttatttatagaattctattactcttctatatagggcttgagccctaaggaatgcaaagataaaacaaacatgtattgtgtctacttgtaaggggcttctctggtggttcagatggttagctcagaaagagatataaagaactgttaaactgtgtattcctataagttgtgtgtgtgtgtgtgtgtgtgtgtgtatgtgctcatgtgcgaccatgctcagtctcctagtcgtgtcccactctttgtgacagcatgggctcctctgtccatgggattttcatggcaagaatactggagtgggttgccatttccttctccaggggatctgggtttgaactagatcccacatgccccagctaagagcctacatgccacaactaaaacccagagcagcaaatacataaattatttaaaaaaaaaaaaagttaaagttacagaaagaagattacaattcaaatgtattaaaagattttgctagattttatgaacacaaatctggaaaacaggtgtgggaatgtatttttatgatgttaaagcagaaaaggaaacaatttcaaaaatactgttgtgagtcaagataaccccaggctcacgacctatctagatcctaagataaagtctatgggaacatctcttcaccatgattttcagaaatattctgatgcaagtagaaatagaacctttggtaagcgttgtaatgactgatttccatagtccaaggggtaacgaaagatattgctaatggaatggatatttattttcattatcaatcctggaagcaatcaagaagttcctctaagttctaggatgaagatatagatactctactcaactagataaaccattagtagttccttattgatcatggagtccttagcaatacatttagtggctactcagaaagttcctacataaatctggtactggaaatattttatgtgcaccaatcaaagatctgatttgagccattacaacaaccatatcctggtacccgattcacaaagctgtatcaaatcacagaattcacgacttctgaagtcctctgggtgcacttgtgtaaggaaactcgtgataatatcataaaaatatattttaaactttcttaactttttcttacagctacttttcaggcttattatgtgctgagtaaaggaaaatatccatactgcttgagggtgattgaatattgatt

SEQ ID NO: 49844 - DNA, 1001 bp, Bovine  19866881911226
  misc_feature (1)..(1): n is a, c, g, or t
nctttatttatttttaattgaaggataattgttttatgatattgtgttggtttctgccatacatcaaacatgaactgttggtactatacatatgtcccctcccttttgagcctccctttgagcctcccttttgaggctcaaaaattctttaactgtaaaattcttaaatatcctccgacaatagcaacataagactacaaaaagaaaaacatatagcaagcagagatacaaacagacaactctaagaagccatctagacatccatgggattactgcaggtaccatcaactcagctaaaatatccctctaatcctgcactaatctatttggatgcttagccagggcagtgtccttatcaagagaggagaaaaaaaatcccttcccactcttagctgagcatactcaccagcacaaagctcttttctcaggggatatactcacatggaacactgcagtttttacactccggagaccaggaaacctggtcacagcagagtgaagggtgaggtgggcaggactcctaacctggcgaggacaggttgaggaaagaaaagccacacctgttacccattagaacatactatacgctctatacacagctaagaaaatttgtttcactagaatcctatagttagaaagagagaattccaagggaagttgctaagtcaaggtgaccaggctatgtccatccagagttgtaaaatagttaatactttctttgtttctcaaattcaatactgttgcttcctctgggtgcaccttacagtgttgaataaatgtccttactgagtaaaactgctctaacactgtgcaaaatgggaatgttttttgcttaaggtgaaggaattggacgcggaaaatggcaccgcaaaatggcaaacggtcagaagacagaagcgggagtggatcaagtttgctgcagcctgtcgagaaggagaagataactccaagaggaatccgattgccagagtaagtgatgaaacaaacaggaggaggctgtg

SEQ ID NO: 49845 - DNA, 1141 bp, Bovine  19866881958731
  misc_feature (1)..(1): n is a, c, g, or t
nccatgaccacaaagcttgagggtaagagttgtgggtagtggtaacatttgatggtaggtgaaagattagatcatgaacaaggacatttatttactgtaaggcaaaaatggagataatccttcggagaccaacaatttcaggaaccaggcaagggcatcagatgtcccaagatactggctggcattaagggcaacttcaggctctgactaccttggatgtgcacatgaggtagataggaagggtgaggggaagccgacagaggcatgagaaaatattgagcagtaggaactgactagagaagtcagagaggaacacccccccaccacaaaaggagaaaggataagacgtttattatgtggtgctctaaacaaacttaagaggttgtttataaaacactaagaaattgctccatgtccatacaggacatttctagacctaggatcgcatgagagcatatttactgttatgccacgaaggactgacacagtaagtgaccgtgatatgtgtaagagatactgggacaaagcaaggatctaaatcaattcatttattcattttataaagaagcattaagcacctactagatgctggaaattgttctaggtactggggataaaagaatgcaaaattaacaaaccaatgatgaaaaataaatgttcctcccttttgaagcttaccttctggtgaggaagacagacaacaaatacacggaactagtaaacacataacatgtcagctgtaagtgctttgaaatgcaatttaaaaattccagtgacatgtctccctggtataattctgagcccaaatgcacatgtaaggaaggaaggacagaagagagtatatgattcctgactgtttggcaccaaggctgaatggaaggaaaggtctttaaaggttccagagcaacccacattgtcaccaagtcacttgcggagcaggaagtgaattatttgcttctcagcatgccacctctctgtcatttctaagcagtaaatgtactgatgcaagactgtgagaataaatccaactccccctcctcaggagcagcccagcacagttgctttgtcactttaaataagagcattgttttattttttgagtgaaaccagcatttatgttattaaacatgtagatggttaa

SEQ ID NO: 49846 - DNA, 1220 bp, Bovine  19866880547452
  misc_feature (1)..(1): n is a, c, g, or t
natccttgggttgggaagatccccaggaggagggcatggcaacccactccagtattcttgcctggagaatcctgtggacagaggagcctggtgggctacagtccatggggttgcaaagagttggacacgactgaagcaacttagtataccatgcaaaccataagctcactgttacaattccccagctctgctgtcgtagacaatagctaagtgagtaggtgtacctgtgttctaataaaacttccttcacacacatacacacaaaaaaaacaggtggcaggaggctctggcctttgtgccacaatttgctggccgctgttttcgagacagagctcaggggccttctgctcactgagcactccgatggggactcccagcagagctgagtctttggagaggcagaggggtggctccccgtgtgtgggtgcctctgagtgtggctcgctctctctgtcctggagaggctgttaaaaggctcctctttccagcagcggagcctcattactcatgggctggaaagcgatgttaatttcccccaagcgggaagcagctgcacttgtgagccggggctcattttgctgcatgaatatttatggcatgtcccttaattaagcccagaaatcaaatttaccctgttcacgggggccacagaggactataaggccatatcaggaaccagcctcttgcacttgtgaagtaaggttgctaacgaaacatttatgtccagaagcgtgtggtggccagggccagtgtccacaggcctggcgcaattgggcgctctctggcaggtcaggcacccttgctatggtcacatgcaggggtagagggatacctcagccaccttgctgagccctgctgcgtgcctactgtccccagtctttgtgggtgacatagaggtggccccaggccagagcccccaaaatgctttttgttttctgactccaggatttacgattggcctcaaaggtcactctagtggcaacagctcggggagggagagcccctggctgggagctgggtgtgcttttcccctgacacttgatcctgtacaacgtgggcaggctcatcagcaatctagcctcagttgccccatcgtcacaatgatgaaggaaatcatgggatcaccagcatcgtggagtcttcactgagcctcaaggcaggcaaggaagagaaaatatttaggggaaggttccccaaaattctgggtttcctttgcctcc

SEQ ID NO: 49847 - DNA, 1797 bp, Bovine  19866880574096
  misc_feature (1)..(1): n is a, c, g, or t
ngcccccaaggacatgtaatcctctggagcttttctttccgaagcttcagagatgagttaattagcccatttcacagatgagaatactgaggcctgcagagagaaagaccaagccacagcccaggtcttccccctccccatgtgatcctctgtgtggctctcagctagaagccagcttcctgcaactccacactggagttgcactccacggtgcgctctcccagagtccacctctgggagaatcacgatcctgttccttcagtggacagagagacagcctaagaccacaggagtcacagaagggcactgctatacatggaatcgttcattcatttgctcacaaatcctggacacaccctgctctgagctccggctgggcactagagacacaggagaggatcaaacagtccctgactcctagcagctcagaatctaggtgaacgagctacacacccactattctaaacccagtacagtgcaagctgcaataggtcctctaagacccagaggacacatcgaaggagcaccccaccaccacccccagactgccagcaggagtcaggggaggcttcacaagagaaagaagcacttgagttgagctgaaggatgagttgactttggtcaggtggccaagctggggaaaggttgcccagacccagggcacagcatatgctgcagcccagaggtgggagcggtgatgtggactgctaggcagactgtggtgtccagagcatcgagtgaaagcctgggcccaaaatggaaccaaaatctagggaccatctcctcacccaattgtccatagcgagtcatggccacaaggaccctcaggaggggcaggttttgagaatgactgttaactttttaagatgttacgagcatcttaagtaaatggccgcaccaaggagaagacccttctctgccctgaaatccgggcagccccagtggcttcggaccagccagtgacgacttcttttggtcattaatcgtagcatgtgctaatgtttgataaattgcccaacagttgcattagctaataactccccgaacaaaaccagagagttcatctgtttttataagaggcccaagagcatcctgggaacaggcacggtggtcgtgaataaaagagaaacattcatttatggtaattggtttcagctcctcacttggctgcttgtcctgacctaaatgtatccagttgttccctctgcctcactctggtttgggggtcactcctaatggtttaattcaacaaaaaatgtctgccatttcctgtaacctctgtcttttttcaccctccctcccaaacggttttcttgcaagcagcatctctgcaagtccctcccggagctgtttccttctcagggaacaaagtcaagattgttgacagagaaaaaaggtcttaactccacgccaagaaaagaaagtgggggaggggatacatgaaggtaataagcatttgtttgtcttccacccggacttcacaaagcaggttttgtccgaggccggtggtcagggactctgacacagtacatggccctggtgaccaggggcaatttatgggagggaatgaacacaagtcctcattcatggagccaccgcggaggaagtgactgaggaggcacattctcgcgggcagccgggccctcccctgtccctcccgcgggtctgaggctgtggagggctagggagaggctcgaggggtgctgtgagttttggccaaacttcaaaacccttggggtagccctgccttcctccggacagcttatttccacacccccggttatgagcacagatcat

SEQ ID NO: 49848 - DNA, 1335 bp, Bovine  19866880743946
  misc_feature (1)..(1): n is a, c, g, or t
nctttgtcactcagaatctctgcattcttccctactcccaaccttctcctggttaactcctatcctgcaaaactcagctcagatggtaccgcctcctcaggctgggtggaagggagtttcttgttattggagatgtctgagccaaggatggaagatcagggcagggaggcaaatcacttaacctctatgggcctcagtttttttctggaaaatgggcccaaaaataagcctaactataggaggataaaggccttgttagagggggaagcacacagcctgtgggggctaagagaaggaataaaaacagcctgtggggtcagaaaagcttcctggaggactcaaacaaggggaagactcagatggggatatttttatttgtagcgaatacgcacgtggtgtgtttttatgcagagagctgctctaggcccttcctatgtgtaacgtcattgaatccttgtgatggcaatatgaggtggccactgtcattatccccattctacacgttaagaaactgaggcactgggagattaggcaaaatgtttgggggcatccagctaagaggggcaaagcctgaattctaatccaagcatgtggctccagtgttcactctcaaatcaccttgtcattacaaggagagcaacaggagtggaggatgggggtccacttaaactctggggcaagcatcactgtacttggtaacacagagtagcgtgaatgtctttgtcctccaggaaacaggcatgccctctggaccctcacaggccagggaactcttgctttgactccactcacccaagggaagggaaggcctctcagtaaggtgttcacccaggtgtctcctgctctgcctggataatgaggcttcatctggggggcagtggctggactggcactgcctcctggtaataaccacccaacacaggcagaagaaacatttttctcctcatttcacaggtgaagaaactgaggcccagcgagacaggaaaggatggggaagtctctaaaaaggcaactcgaagctgagattctggcctcggaggccagaggatctccttagcaacggtggtacccaacatcgccatttctgggggattgctacgtggtgtgcatcagatgggaaaacctttgtcagacgtctagtgctacacctgcccatgacgcctgctcagtccctggacattccccttccttccctcaggaaatgagtgaatagatgagtgaatgattgtagaagtcacctagaaactggcaggaggtgggggaagctttcttgcttctgtgaactcttctggcttctgccccacttgctgacctgggcagctagagctggtggca

SEQ ID NO: 49849 - DNA, 3159 bp, Bovine  19866880918810
  misc_feature (1)..(1): n is a, c, g, or t
ngccatagtccatagggttgcaaacagtcagacacaaccaaagagactaacaccggcagtagcagtattgatacttagtaagtcagcgtctgtgagatccacacacacatgttcttctcgtttaattctctccatgtccctatggagttggaagtatcactctgcttatggttgagcatgatcacctaaggtcacgcacctggcaagtcacagagaagggctccaccagaagtctctgactctagaaaactatctggcatttcttcagcttacatgtcactcaaaagaagacttacatttcttactgagtgtaatgtcaaaaagcaacttctccccttctctctctttacttcccttcctgtcccttccctccagtctgtgactctcaagtctgagcagaccctgagtgaaggatttgagtacaagtcatgtttttgagattggacccagggcgttggggaagtgagcttggcagaggaagcccaatctgctgggataccctgagaatcacattaacacttcacaatggcaatgcacctcacaattatacacccacaaggcaggggagttgaggtattaataccctggctcttgtccatcactggtccagaggatagcattctttcccctgcactggctggctcagggtggggtagacctgagtggtcagagaaagcctcaggcaaaaacacgcaggggcttggaagttggaagttggccaggagtggagatatggtgggacgtgggcagggaacccaacccacggaagtgtcttggacgtgtgccactgcacacatgattctggactataatcgtccacttccctctctcccaccagctccttagggcagagtctcatatgtcacagtgcatggcttcagcactggatgaatgttcatcgaacggatgaatctagattcctggactcctactctctccaggcccggaagaggtcttttggggtcatttgccaacatactgtgtgatgtttggcaaactcagcacggccaggggcagcctgctctgtgataagatagctcagactgcaagacagtccttcgtcactgtcttctgtgtccactgactgtgtccaggcctttgctccgtgccccagcaaaaggcctggactagctctggagcaaagcttgcagcatcctctgatgacttgcaatggcagaagtttccctaagaagccgtccctcctctgccatggcccaatgacacatttgtgtgtgtgtccagccgcctccctgctgagggtgggaagtaggttttcttctgtataaacaagtagctcagagacccaaggccagggaatttgatctggggtgaacgcctgggttttgcaattctcctgtgagtctgtgggccagcgttggccgggtctgcatctccttctggaaggaacaggcctatgaaccctacattgtgccaaatgtcccatcaggggattccactttcagctgcaagcggatggggactgagtgagaaggcagttgtgtaactccgggtgtcaaccgcaactgtaacaaaggcaaaacaccaggcagggaccaagttagccttgaggggccaagtgtgccctgtccttcctcccctcctccagttccaagagcagccccatccatctcctcatccagcaaacaaaccttacaggctcacggttcaacaaagcagcagagactcacgaagcccccacttcgtgatggtctgccagatgatggatatagcgaagcaaagacgcatcttctcttgtctaagaactcacgttctagctgcttggggcatcaagaggtgcctgcttggtcagtagggaagaatcagaactaagagtcagaagacttgggttcgggtctaggcaaatctcaggtaaacctctctcagtcagtgtgggctgccgtaacagatatcgcagactgaggacttcagcagatggctgctttcccatggagtcagggatcacagggtgctggcggggttggcatcctctgaagcccctctcctgcacttgcaggcagccaccctcttcctgcctctgcacagggctatccctcgatacacacgtgtttgccatgttgcacgcacgtgtgcagcctctcatgtgtcctcatctcttcttactagggcactagtcagtctgaactaggacccaccttgaagaccccattttaactagctactgttgttgttcagttactcagtcatgtccgactctttgcgatcccatggactgcagcacaccaggcttccctgtccatcaacaactcccggagcttgctcaaactcgtgtccatccagttggtgatgccatccaaccatctcatcctctattgttcccttctcctccttccttcactctttcccatcatcagggccttttccaatgagtcagttcttcgcatcaggtagccaaagttttgaagcttcaacttcagtaccagttcttccaataactattcaggggttgatttcctatagaactgactggtttgatctccagcaccataatttgaaagcatcagttcttcggtactcagccttcttcatggtccaactctcacaacggtacacgactactggaaaaaccgtatttttgtctatatggatctctgttggcgaacttatatctttacttttcaatactccatctccgagtacagtctctttctgaggtcctggggtcagcttcaacatgaagttgggaacagggatacagttcagcccatagcagccacccaactactctgcttctcagacttcctgcctctaacccaggtcaaagactaggcaacctgtgagcaccacatctgtgtgtgaaggttgctgattgtggacccaaagggacagaggcagccggggcgtttcagaaagccatggccctaggggagacatttggggacgtgtgatggattatccgggaagacagacaagctctccctttccttctgtcccagggacacagggtcaagaagagccggagccaggaccgtgggccaggctgtgactgcacatttaccctcatcctctgttgcaaagggagtgtgggtggtggagaaaccacaatgggtgggggcaggtgggctttggctcactctccctgcatccagggatattggtgagcccttcatttcctcatttgtatcatgagcaaggagataa

SEQ ID NO: 49850 - DNA, 803 bp, Bovine  19866881020298
  misc_feature (1)..(1): n is a, c, g, or t
ncttgcagcagctccaggagcccaggctcttttgctgaggaggaaagaccagcggccctggcacactacaagccgaaacgggacgtctgtgctggtcacttgattcagtttcaacttaattcatgtactttgtagatgaagtgactttataataatgaaatcatcagttcagttcagttgctcagtaatgtccgactctttgctaccccatgaaaaatattggaattatgagtatacaatattaaaatcatggaactaagaatcgtgtaattatagattcttaaactatagaatttggaattaaaaatatctttgcattgtaggatcttagaaacctagactattagagtatattcagaaatatagactgttagagttcttttttttagaattcttaaagtaatttatagagttgcagaaatgatttagatccttagtagcataaagctttagaattatgcaattttaggattatggacacagcattctacaatactagagcactgtagagattggaaatatggaagataaatttatggaaagctagaatcatggtcttttagaatcatagaaggcaggaatggtggaatgttagaatattaaattaaggaaacactgaatgataagatcttagaatcacagaatattgacatcatagaatggtgaaattagaaagccatagacttttacagtcatagcagtttataattacagacttattggattatagactcttagaatcacagagaattagactcagagtgtctgttttgttagagaagtataggatctgtgaattacag

SEQ ID NO: 49851 - DNA, 787 bp, Bovine  19866881037410
  misc_feature (1)..(1): n is a, c, g, or t
nagggatctggggaacctgcctgtggtcaggggcctggacagaatgacctgtaaagttccttctaagaacctgggattgggctgcttgttgcctcttgacgacgaactactctaggccaagaaaggcagctagatttggccctggcgcagagcctggcactgtgcgtgtttgataatcacacactgcgttaatttacctctttggccccacgcctggcacagatctgggcatgcggtcaggtgcttggactatttaccaaatgcttcatctttaattaacctcgggctccatctcaatacatctcatgccacactctgccctgaacagagggaaatctggcctctgtgtttctaattcctttacacttatctcatccaaatagcactccgcgccatctatttgatgtcctacaggccttctgagcctgcttaaaagtcagctaagccccttccggctcagaaataggaagtcacatttctgccaaggataaatggactccagccttggcccggggtcaagttcagtttacaggtgtggtacccacggggctggctggaccctgtggaagcagagctcagggctcctgccaggtctcaagttcaaacatattcattttgggtcagaactgaaaagaattcagctgtctgccaagacgcccctgggacttctgaccatccaatgagttgcccagaattctactgtttcagacaggaagcagctgccaagctgggcacaatggcactgatgctaatcaggcctgctagggaagcccatggtgtggcgttg

SEQ ID NO: 49852 - DNA, 1015 bp, Bovine  19866881191094
  misc_feature (1)..(1): n is a, c, g, or t
nagactggagaggggaaggaggggagcagcattcggtgaagctggggaggcagacaggagccagttacacaggggccaggctggactctggttttgttctcgtgtgtgatgagaggcttaacccagttacaagcagagtgagaagagaagactatagacaagcaggcaggggcctgagggcaccggcggaggctgccttggtcaccctcagcctctactgacccacccggagcagcagaaaggcaccccctcctccaaatctcagtcaataagacctcgacgtgtgcacttggcaggttggctaccctcttagagcctccattttcccatctgtgaactggcagaggtgcggggccaccagggctcatccgagacctgaaccttggatctcaatccagcagggagaagggcttcacttctgtgggtacagtgcctggcacagagcatgccctcaacacacaccaagggactagggctccagagagaccggaggaccacaggggcatggtggcccctgagagcctgctaggctgggctgggctgatcagctagggccccaggcgtctccttcccttccttcccagcagccaagtcaagcgggcagcagcaggcccactggaccaagggcagacaggcgggcgggcaggcgggggcgagctgtcgggcacagggagaaaggagggcattgtctgctgaaacccaactaaggggccagggccacaatgtgagggattctttcaggagaaacagacatgcctttctttctaccaactgcagctaaaacagcccgctggatttgattctctcccatttcgccccaaacaaatgataaataaataaacctccgtgagctcagagccaggaccctgggcccagagcaggctggccgctgtcctcccagggcgaacatctctggtgccaggtggcccgcctgtgctcccgctgccaggcacgtggaccagtctgtaggggcaggctccaggcagcggcctgaggaagtccctccggacgtacg

SEQ ID NO: 49853 - DNA, 1807 bp, Bovine  19866881475316
  misc_feature (1)..(1): n is a, c, g, or t
nattctgggcccccgttcctttgaactgcaagagcagctgtggagaaatgccgctttccctgcagggtggttgacagctggctgacagcccccagccaggctgctaccaagtggggttgcaacaaagcgagtccagacttgggcaatcggtcctgtccccacagggaggttggatggagccctgtcgcactcagaccccatcacggggcaatagagctgagaactggaggagaagggcagcacaaggccttgatcagagaggtactagcaaggacttccctggtggtctgctgctgctgctgctgctgctaagtcgcttcagccgtgtccaactccgtgcgaccccacagacggcagcccaccaggctcccccatccctgggattctccaggcaagaacactggagtgggttgccattgccttctccgccctggtggtctagtggttaagaattcaccttgcaaagcaggagacacaggttcgatccctgattggggagctaagatcccatatgctgtggagtaactgagcccgcacatcccaactagagagtgtataggccacaacaaaagatctcacatgaagcaacaaagatcccatatgctgcagtaagacctgatgcagccaaataaataagtaaaaatattgttttataaaaagaaaggtgttagcacaccatgaccaaggacatggagcttgggctaggtggcccatgctaggtccagctccaccacccaccacgtacttgccgttgaccttaccaagttccttcaccttgctgagcctgaggttcatcctctgtgagatgagggagatactgatacagtatccacctcctagggtcattttcaagatgaactgagtcacaatcttctttgatgcaaagcagtgagtccagggcctggtccatggcaaccgaactccactcagatgtttccttcatgggggtcttagtgccgtaggtggggcccttggggggaaggagtactcagagctgggagtcaggacacctggtttctgatcctggctctgccaccatccctggtatgacctcaggcaagtccaagccactttctgagcccttgttaactttctcctggtgatagaaaattgagagatggtggtagtgctgtgatgacctctaggcccaggagtaactgggagtgcctgggtctaagaatggcaggtgcaggggttggggctggcagaattccaggtaggattggacctcccagtagggaagccatcctcagaattaaagcttttccttacacctgctcttgacccctaaaaatggctcagtgttgaagacatgtgaggtatgcctcccagtatgactgtctgatgctttctctctctctctcacacacacacacgcacacacacacacacacacacacacacacacacacacacacatagcagagagagccacgggaggcccggggaaccatgtagatgcagggcactgattcatttctgccgggaatggggaggtgatggcacttactccccaggaaactctgaccaggaacaggctcgaagagggaggctgagctggggggatcttcagacatcttccggtttgtggggctagtgccgcttttcatgcccagctgctacttggccaggcctgctcctctgggaagctggttctcattgctcctcccaccatattcccccaagccttggactctttgagaaatgaaagagtacagtttcaacacagcaaccggaaacttccctggcagttcaatggttaagactccaagcttccactgcgggggacaaggggttcaatctctgg

SEQ ID NO: 49854 - DNA, 2541 bp, Bovine  19866881606056
  misc_feature (1)..(1): n is a, c, g, or t
ncctagatgtccatcagcagacaaatggataaaaaagctgtggtacatatacacaatggaatattactcagcttttaaacaacacatttgaatcagttctaatgaggtggatgaaactaaagcctattatacagagtgaagtaagtcagaaagaaaaacaccaaaatagtatattaacacatacgtatggaatttagaaagacggtaatgatgaccctatatgtgagacagaaaaagagagagatataaagaacagatttttggattccatgggagaaggtaagggtgggacgatttgagagaatcgcattgaacatgtatattaccatatgtgaagtagatcaccagtccaagttagatgcatgaaacaaggcactcaaagatggtgccttcaggacaaccctgaaggatggaatggggagggaggtgagaagggggttcagcatgggggacatatatacccatggctgattcatgtcaatgtatggcaaaaccactacaatattgtaaagtaattagcctccaattaaaataaattaattttaaaaagcagttttagtccaacacagagccatttcactaatactttgtttccccacttcccttgtacttgggtattgtcaggagactaaatgaactatttctcagttttacttgaaagttcaattaaaaatagggtttgcattttcttcattgaatagcagtttaggagagtagaaaagtcacatgatgagaagttatgaggtctagaaccagattcaccaacttttagccagttgtgagatttttttttccctagactagcatcagtttactcaattgtaaatttacaataatgatatttactcttaattctccttaaggttatgagtggttaagtggtgtggttagatattttgtaagtattaagaattacagatctaagaccattttttatggtttttataaagtactcagtgctgtcatttcacacactagggaaaaaaaatgaactgaaaccaaaccaaaataatctctgagtcctgtggagttgaatgatttgctcaaggtcataagaccagttggactatagagaaagctgagcactgaagaattgatgcttttgaattgtggtgttggagaagacacttgagagtcccttggactgcaaagacatccaaccagtccatcctaaaggaaataagtcctgaatattcattggaaggactgatgctgaagctgaaactctaatactttggcaacctgatgcgaagaaccgactcattggaaaagaccctgatgctgggaaagattgaaggtgggaggagaaggggacgacagaggataagatagttggatgtcatcactgacgtgatggacatgagtttgagtaggctcgggagttggtgatggacagggaagcctggcgtgctgcagtccatggggtcgcaaagagtcagacacgactgagcaactgaactgaactgaactgaactaagcaccagctactttaaatgcttcaagcctagtattttgctcattgctaatcacagcaactctatgaggtatgtgttcctttccccatgttcacagtgaggaattaagattcagaaaggccggtaccctgttcagaggtcagtcaatgctattagactccacagactcatgagtgacaggggacaggaggtatcagcataacacagttaacatgcagatgtacagagccactgcggcaagtactagggtagaggcatgaatggagggggagaaacagggaggggtgatcctgatttgggctctcatgaaaaacgcattggaaagcaggaagacagtgaaaccaggcgagaggggtgggggaattggagagtggattgagttaaaattctgaataaacagcagggtagacacggcccacggagtaaatggaagccaagacaagcagggcacgtagctggattttccagtgtcacgatgctgacgctgagcagggctgacaggcactgaaaccggaatagctcacatctgcgaagcactttccattccaacacgttatcttccaagccctggccagcgtcctctgaggctgtttgttcctcagattttgaaggtgaggaaaccgagccttatccaggtgaacagcttgttggtgacgaagccctgctgaccataagccccgggaccagacctgatcttggtccaggattctgtcagggccaggatgacagggacggggcagactagacaatagggatgtgaagtcaaggaggcacctgaaaggctcccagactagtgatatgggccctgaaaaccaaagcacccaaagttatggaatttgagggctgtggactttggaatcttgaggtcaaaacttctgaaattctaatgaaataggctctacggtcaaagacgatgaatgtcgggagtgggctctgagattgtggggacaaggatgcaggcaccctgtgtgcatgctgagtcgctcagtcctgtctgcctctttttaaacctatggactatagcccaccaggttcctctgtccatgggatattccaggcaagaata

SEQ ID NO: 49855 - DNA, 758 bp, Bovine  19866881891048
  misc_feature (1)..(1): n is a, c, g, or t
naaatgaggcaatagaaatatattgacaggggagccagaaatttcgttaattggacatgcacttcaaaatagttaagattaatgtgtctaaggaactaaaaatcaggatggagaatttcaaaagggaggataaagcaatggaaaagaattaattggaaattgaagaactgaaaattaaaatatctgaaattaagaaacttcagatgtggctcagcttcatggcacattagatgtagctgaagatagcattaatgatctagaagacaagttagaaggaaatacacagaatgacatacagagagatgaaagggtataaaaaacaaaaagaatgcaagacaagccttatacagctctaatcacagtcccagatagagagaagagagataataggacaggaacaagccacagaatcaataaactttgcaaaaccatagcaggactagctgaaagtgaacaacaccatcttagagttaagctgctgaaaaaataaaaacagaaagaaaacctaaagcaaccagataaaaaagacatattagcttctaaggagcaacaattagactaaaagtttacttctcaatagaaacagtggaaacataaaacagtgaaatgataacatcaaatagctgagaaaaaaaaggtctaatctagaattcaattccaattaacacggtcttcaaaaacagagataaaataaagacatttttagacaaattttttaaagtaaaagagtttatcaccaggaaactgaactacaaaaa

SEQ ID NO: 49856 - DNA, 1604 bp, Bovine  19866880154481
  misc_feature (1)..(1): n is a, c, g, or t
nccaacaaaggttcatctagtcaaggctatggtttttcctgtggtcatgtatggatgtgagagttggactgtgaagaaggctgagcgccgaagaattgatgcttttgaactgtggtgttggagaaggctcttgagagtcccttggactgcaaggagatccaaccagtccattctgaaggagatcagccctgggatttctttggaaggactgatgctaaagctgaaactccagtactttggccacctcatgcgaagagttgactcattggaaaagactctgatgctgggagggattgggggcaggaggagaaggggacgacagaggatgagatggccggatggcatcactgactcgatggatgtgagtctgggtgaactccgggagttggtgatggacagggaggcctggcgtgctgtgattcatggggtcgcaaagagtcagacacgactgagcgactgatctgatctgatctgattgacttcaaaacatttctcttgaaaaactgtcactgctatacaaaataaccctggaaccatctgaataatctcagtataatacgaaataatgtgcaaatgaaatggtacagtttcagagacagcatgagctgttttttttaaagtaagtgataaaaggactgcagatatgagagagagcctactgaaatggcaaattttaatgtacactcagtgattttgtagaaaaaaaaaaaaagacaagtattttaaagtaagtggcagagttgaaattctgctaactttccctcatctattttcacttttcccagaacatatgtttcacaatagttttattagcaagtggagaagatgctactgtccaaaatatgtggtgtgattagcgttattgagtggcaggttttgtgttactcatgtttattttatgcctttccaaaccatctgcttccttgtgctatgtcttactaagataatgagaaacagtgactgtagaggtgtacagtgctactacagttctaacattttctgacattttgggtttaggtttctcttctgagagtcctaaggaaaactgagtcatgtggtcacttcttgagaaacaaagcctagacataattcactcattcatttgactcaaatctgagtatttactcagtgtcaggtagtagacaaggacctgtggttactgagatgcatgagatgctatttctaaaacagtctagtcagggaaataggaggcaaacattgtagtgtgagaaggactatgatagagttaacagtattaaggcatcgggaagagaaagtgaaaacatttatcccaagtatgcactggaatcttgagcatttaattaccaatataagaagaaaaaaagctaccagaaagtattacggaccaaagcacctacactggccatggtatccataaaactgtgagaaagattgttgttgataaattttagttactttggtttcactggaatgcagagtatgcatatgataccaagagagaatcatactttgcaacctgataataatctctggtacctattgattccttagtacctggcaactattgtacacttttttttttaacaatttaatctttccaataagtcattagattaaacaat

SEQ ID NO: 49857 - DNA, 1198 bp, Bovine  19866880344737
  misc_feature (1)..(1): n is a, c, g, or t
ntttacttacaagattttacatcagattttaaacctttaaaagacccaggtctgggaaagccatatttggccatgtgccagcagatgccaaaaaaatcagaggtaattgattgtggagagagatgaaaaaaaggggaagatgtaatccaactgtacatgcatgatgcttagaaatctctttaattcgattgcttttcagggtttttttacccttaaattcataaaattgcactgataacacatatatcattgtatttactgtggatgatgctatgtgtgtacaatatgagaagatgaaagttctgtaccatgaaagcaaaaatgctaatgtaaagtttcattttcattctcattattaatattatgaaagttcattgcaaataagaaattgttcacattatttatactggtttattcttacgtcccttatttcaggtatgctgggtatgtgtatatatatatatgtgtgtgtgtatatatatatatataagagtttcatgacctttaaactgttacaagggatttccattgcctttctcctcctcctcttcctcctcatcatagtaggagtgtgataataaattttatatcatgacttctcaaggaaattataaatgtagaaaagattgagttgtttggtaatggggaaagctagaattttgccttatctacacctgcataccattgccaaagacccctatcactttagactctgtttttgagtagtgtgatactgattgccatgttgcagaagccagcccagcagcctgcatcctctggagaactgctgtattgtggaggcaccggatggatgactgacaggccagcacctagttcttttttctgacaatgctctcacttgtcattaattctccatcttccctcccattagcggctgccggtttccaacctaatgcccagctgccaatcagctaccagttatttttaattaagaccactcacaaatttccctcacgtaatgtgcatggaaagaaggggaatcctttcattagtaatcgaatttcccgtgtaaattgccttaatcacacttgtctggcagtcctgtaatgtgctacaggaaagcagcactttttcttgttcagtcatgcatgaactccacaccttacctctcagattcacagccacaattatctgtttttatttttgtctcattaaacctgcaatttcttttcagaaa

SEQ ID NO: 49858 - DNA, 1453 bp, Bovine  19866880412486
  misc_feature (1)..(1): n is a, c, g, or t
ntacatacccacatatggaaccttacatggaacaactgactgattcaaaattgggaaaggagtacaataatgctgtatattgtcacactgtttatataacatctatgcagagtacatcatgaaaaatgctaggctggaataatcacaagctggaatcaagattgccatgagaaatatcaatgacctcaatgtcagatatgcagatgatacaagtggtaaagaatactcttgccaatgcaggagacttaaaagacaagggttcagtccctgggttgggaagatcccctgaagaagggtttggtaaccctatccagtatttttgcctggagaatcccaaagacagaggagcccggtgggctccaagtccacagggtagcaaagacgtggcttagcgactgaacaacaccaacaatctaacagtattatggaatgtatcttggttggaactgcaagagtcatttttctgctgatgataacaagagggtcattcgacttatcacatcagatttctatcacctctctcaactcctagagacacagcaaagtctctatttatatttattctagttttatcatcttatgaaacatgttttttttttttttccttttccttctcaaacagggtgagaggaaaataaaatagaactaataaaaaacagggaggaagtcttttctcctacatgaatacacatactgaagagattcatattctctatagtcatttgcaattatcaagttacctgagcattttcacattctttgtatccctcagaattttaagaaccaaattgatgatatcagtggggggttaatacaaatacactttttgaagagatggggacattcggttcagtgatttcagttgctcagtcatgtccaactctgcaaactcatggactccagaacattaggccagagttctacagaacaccatcacaaattccaggagtttactcaaactcatgtccattgagttgatgatgccatccaaccatctcatcctctgttgtcccttctcctcctgcctttaatctttcccagcatcagagtcttctcaaatgagtcagttcttcacatcagatgaccaaatttttggagtttcagcttcaggatcagtccttccaatgaatattcaggaatgatttcctttatgatggactggttggatctccttgctgtccaagggactctcaggagtcttctccaacaccacagttcaaaagcatcaattctttggcactcagctttctttatagttcaactcttaaatccatacaagactactggaaaaacaacagctttgactagacagacctttgttggcaaagtaatgtctctgcttttttttttttttaattttattttatttttaaactttacataattgtattagttttgccaaatatcaaaatgattcatttttgatgtctctgctttttaatatgctatctag

SEQ ID NO: 49859 - DNA, 1648 bp, Bovine  19866880481075
  misc_feature (1)..(1): n is a, c, g, or t
ntgttctttctctaggaacttggaatccgtctaccttgtttagtcggctctgttttgaaatcgaagaaaagagtagccaagtatgggaaagctttatttggacattagtttgcagaagcagaaaaaaacacaggtaattgattgtgaagacagatgagagagagaaagagagacagaattagagataggaggttatggtgtcctgagaacagcttgctgctgcggctgctgctaagtcgcttcagtcgtgtccgactctaggcgatcccatagatggcagcccaccaggctcccctgtccctgggattctcaaggcaagaacactggagtgggttgccatttccttctccaatgcatgaaagtgaaaagtgaaagtgaagtcactcagtcgtgtctgactcttagctaccccatggactgcagcccaccaggctcctccatccatgggattttccaggcaagagtactggattggggtgctactgccttctccagagaagagcatagttaccttcaattcaacagcattttgcttctaggctcctggctcaagggaggcctaactgacttgccttacttgggcctgatcccattataaacctttgtgttttgtttaaactcttctgtaaggattatgtaccttatttcaagcaatttctgaaagaaatgacattagacatggagatgacaaagctataggtttggttcacataaatttctatccctgaagaatcatgttagaaaaacatgttaccatttcatcaaaggctgctttgatgcatcagcagaatgctttgtgaaatatttagactcatatgtcagcaattctcaaactaaaactaaattggactcctcagtagttcagtaactagagttggatatctctatctataaaatgacaaaattggataaataggccagaatttgagaggggagggaatattttttaaggtgtgatttgtttggacacagaccaagccagatacaagatccaggtctcaatgaaatttggggcaagttgtttaatgatcataagtcatggtttcctttccataaaacttacataacagtgttcattttttaggtgaggattataaagggaaaaaggcagagaagaagcaaaaagagagtaaagagaaaataaaaagagcacaggaaaaagtttgaagtggaaaccagatatgagaaaagctccatttgagctgttatgcaccacctcagtctaaagcacttacagactgatgtgtatacataagaacatttaatccatacacttgaaggaataggtatgattcatggctttcaccattcattctttccacatggctctttctaagcacaattttcattcctgccctagttattttattttgctcatatattttctttttagtgtttgatggtatagacagatcattcacactcatagttgttcaaatcttactgaccctatctgagtgtttggatactctgggatttatttcagaggaaataaacatctagttcactgatatattctagacagactgtataaattcagctacttagttattcagcaaccttgttaaatagctaactggtttgcaatttcatttcctatttaatatatttcctccagcatttctaggtaacagaagtcccctagaaa

SEQ ID NO: 49860 - DNA, 1376 bp, Bovine  19866880546654
  misc_feature (1)..(1): n is a, c, g, or t
nactgataactaacacttttacttcactttctatcaccttggtagactgacctaagaaaacattggtgcaatttatgtcaaagaatgttttgcctatgttcccttctaggagatttacagtgtcatgtcttacattaaagtctgtgagccattttgaatttattattgtgtatggtgtgagggtgtgttctaacttctgatttacaggaggctgtccagctttcccaatgccacttgctgaagagactttcatctattgtataagcttgccttctttgttgaagattaattaaccataggtgtgtggatttatttctaggctctctattctgttccattgaactgcatgtctgcttttgtgccaataccatgttcttttcattattgtacctttgtagtactgtctgaagtcagagagggctatccctcctgctttgttcttttttctcaagatcacacagctcaccttacagagtatttacaaaggccaacataaaccttacgtgatagcaacactcctagaaaaatcatattcttggtcagaaaagtcctcgtgcctagcctgtcatttctagataggaatgtccagaatgattatttttatagatgattctagtaatgacttatccatccttaaaatcactgaatgtcttaactaaataaaagtaacaaaatttaatgtccctcacacaatatagaaaacgtttaaggactcaatcatgcctttcatccgccccccacccccacatcgttagttcctcccaacttctgtgggcctccaggcctgagttcatgatcaatcttctatctggaatgattttacgcttccttctccactgggtaatttcacctgacatctttcaaggccaaactaatatacctccctctctgagaaagtgtattaattgttcttatctctgtgttctcagaactctttattcatatctttaaaaagcattcattcctttgtaacatcattaattatgcatgttttgttccttacttcatgacaaagctatgatccttagaggctagggaccataaatatatcagttctctcattagagaacataaaatatactaggtattaagtaaaaatataaggaatctaatctataacacttaaaaaagtctaatttggattttgcagtgtgaagggatcttttctttaatctcaattatttaaaaagaaaaaaaaaaaaaccactcctttaaaatacggatcatcaaaccctttgttttgccttggtttccttgtgtccctttgcatttatgatgttgttaattagtttcttctccctccaggtttataactagctattgggtagttatgtttataaaccaaataatgctgattttatgtcatcaaattatgt

SEQ ID NO: 49861 - DNA, 2012 bp, Bovine  19866880569205
  misc_feature (1)..(1): n is a, c, g, or t
ngagagtaaatgctcttttcaacatagattctgaacaacttgaaaatagagcaggatatacatatagagaccaaaatatcttttttggctatcattaacaatgggtaagatcagaggattgacattagattaattagttagatgaacttgatacttctatattccagaatttgatgtggaatcactcagtcccaaatgggtctggaccagggcagcaatattaatcacttggagtgggtctgcccaggtaagataacttgaagggtccctggacatatgtaggcttgagccccaagaggaacaaaaacaatgcagagttgaacatttcagttctctcagatttgtgtgtgtgattgtcattccaaattctctaagatgaagagtataaataaatgtaatatacccacaagggtcacaacagtggagttccctatgcctaaaagaaaataagatgcaaagggatgaagtattttcctcactcaagcagtatttgaaccccgatggtcactgtggaccccatgatgttttctttatactgactaaacttaactctgggtcattgattctcattttttcccctccctgaatcaccaacagggccttgagataaaaaggaagccaaagtcttctgactagaggacagctgagttttggaaagacagcagttagtttatgactctctgcacttaagactcctggaatgctgttccaatataggcattggctaaacacagctgcgtagagaaaaataatctatggtctttgtgcaaaagctctttctgagtgaaagctgccagtgagccattagtggtatccaagcgagagctaccatgcagcctgctgtgccttcagagaggaagattttaatgattctactaaaaaaaaaacaaaaaaaaaacagactttccctcatcattgactttgtattgttgaaattttaagtctgatattatgtatttatgtggactttgccattttgatgggccaggagagtcaaattatatcattggtgatatcttcattacatcaactggggagttaatcaaatgaagacctactcttcttcctaaataattatacctctctgcatatcctgtgctgcctttgctgagaaaatgatgttcttttttaacttagccgcacaatgaacttggtaaaatgtgcacaataaaagtggttcctattttgagctgctttttaactaagaatattttatactactgcacctctataatctttaacacactgacattatgtaaattaaatatgttaatccccaactctatgcagtcttattccatttaaacttttttctccttttgttaccagagagaagaaacaaaaagaaaaaatagtatgtaagaaaagactcctgccaaaaataatagctatgttcaatgttttccctggttttttattgtttaaaatgtgcttttcctgccaaggtcccattaaagtgcattacctccacatgctaatagactaattaaaatatgaataaattaaaaaaaaaaacatttcctataaactttattttttaaaccttttctggtgaacttggagttagagcttttctgaacttggagtgatcaaaaatatatcttttttactttattgttttctagctaaggaaacttcaactcccgttgttgtcttctgtataaacctaggagtggatggtactctatagaattagaagaaaggtgttatttaggatcaataagtctacattggaagcttggctgtgtaatcttgtttttagtgtcttttaacttctctttgccattcttttcttatatatgaaatgggtatcaattcactccatttcaagaggaaattataaagaagagatggtggctttgacaaggccttccttgaatctgtctagccctggtatacagaattacatctgctttatcttttatcctaatcattcagcccaggtatagagcaaaataggacttgagaacatgttcgtcactagtatatagttttgaggattatgctgtagg

SEQ ID NO: 49862 - DNA, 1592 bp, Bovine  19866880675456
  misc_feature (1)..(1): n is a, c, g, or t
ntgactcaggaattaagcccacatctccctgtagctcctacactggcttgtgttttctttatcgctggaccataaagaagcctgaacatcaaagattttatgctttcttaaaatgcaagatgcagaaaactaagatcatgttatctggtcccatcacttcatggcaaatagatgggcaaacaatggaaacagtgagagaatttattttcttggtctccaaaatcactgaagatggtgacttcagctatgatagtaaagatgctttcttcttggcagaaactatgaccaagctagacaacatgttaaaaagcagagacattgtcaacaacggtccatctagctgaagctatggattttccagtagtcatgtatggatgagaaagaaagctgagcacagaggaattgatgcttttgaactgtggtgttggagaagcctcttgagagtcccttggattgcaaggtgatccaaccagtccatcctaaaggaaatcagtccttaatattcattggaaagactgatgctgaagctgaaactccaatactttggccacctgatgcaaagaactgactcattagaaaagaccctgatgctgggcaagattgaaggcaggaggagaaggggatgacaggatgagatggttggatggcctcatcaactcggacaggtgtttgaacaagctctgagagttggtgatggacacggaagcctagagtgttgtagttcatggggtggcaaagagttggacacaactgaacaactggactgaactataacctggcatgaccctaaattaaacaataatggtctctcattttaaggtaaattgacaaatttttctcaatattttttttcaaccataagttggtaccatggatgtaaggtgttcctctgatagtagaaaacttattttgctttaccatgaatgttataaggtttttgattctacagggccctttgtggtatgtgataatttttgtaagacattggtctgtttgtgattcagttaataagaaaagtataagatctggataagcacttatcagggtttcaaatcattttcccagtgtagagcctcccagttggtgtgctcttgattgagacatgtaatcattttcagctccaccattaactgaagctagttttgattcagtaataaagaagcattctccaatatttcacctgatgaaaatggaatcttcagctcctgattgcccagaatcaagatactggagttctggagttttatgaaaatatttcacaagttttggcatttatcattatgttttatgaggtgaaatttttactagtaggtagttagagcaaaaggatgaaataggtcaaaaaaaagcaaagctctgtgagtgacaataaatggattttaaattagaatttgataatttcattaattttggaaatgggaaagtaagtgcaatgtcttaatacattcagtcaaaattatctactgctaccccttgctgctgcagttagtgatggagtctcccttttgtgggtaagcataacagccattaattttaatgagagtaatgtttttattttaatgtgggggatttgtttggagtgagcatgccaa

SEQ ID NO: 49863 - DNA, 3772 bp, Bovine  19866880717980
  misc_feature (1)..(1): n is a, c, g, or t
ntttcaatacagtatttcctgatggcatgtcccatatacatatatacagataggcatattatgttaaaaatagtaataggtacaacttgacaaaaatggaatacagagtaaggcagaaatctttgacaggtaattattgtgaatggcagtaatgccgtatacatttaaaaataatcaaccatgtaaccaaaggcagaatgctgttcccattcaaaattaattttgcaaaggaactctgttccgctttctgaaattgttttcagagttgaataataaaaatggcaagtgctccaattcctctcctttgcctgtctatactttaaaaaaatccatttggctaagacccacagaacttaacagtaaatgttgcatattatcattgtaattggaaataaataaattagaaatctgctaatagaagatgtgtttatgaatagagttagttggccagaaaataattagtttttttaaaaggctaaaaatataattactaattttcttattacctaatgaaacccatgttattttttaagatactttttctagataaaaattgtcaacatgaatttcagtttgcaacctggaagcaactagataaatttaatgtgcaggaatctctagattatccaatctgcagtaatatatggacaaatagtatttattttatgaggttttttaaatgttgaatgaacttttacacataaatcacctaagatattatgttgtgtattattagtgctcaataggtattagctgttaattatcactgttgttattaatattccaggtctgccttgtgaggtaatggtgtcatgctttctagtctggtttacagagcatgcagtattatgatctgtttttagttttgccaccgagtaatgtctggccttgagcaagttagcaggtcactctggaggtattttacttttcttttttaatggagaatcttagtgtagataaagatcatatccgttttcagatactataactaagtcagcgcctgattggcatcaaaatgttcccagaaccaaaaatacatttctgcttctaatagtactcgtgatgatcttatacaaaaggtatctgagtatttcttttatttcaaatgttataaatgaacaatgcctttgatgtttggtgttcccatgtcctccaagtcacatgctgcatccctcgtcagcagatggccaacctcattatttattctcgccatgtgaaactaagcccaatagatagtgagtgccacctgcatgccaggcaaatgttagttcgatttggaatatgtgtaaacagaggcttatagagatcaagtgagttacctgagcactaacagtcaagtatcagtatcaatagtaccgttctctttgtaaatgttactttaactcattttaaaaaatatgcattataagtgtaaacaaagttaaagttcaaaccttcacacccctaccttctctctttaaattctactctcccagtcttccattttatttaaaaacaataacaaatatagatatgtgaaagataaatttagatctagatctatataatctttatctacctatacgtctttgttgttattgtttttaaataagcataaagggtgaaagagggataaagcaggctaagtggtcctcctggcctcctatttgtcgaatgtatttccaagtatacataatgctatttattatactatcagtcttgtttatgttcacaacagtcaatagtacctgtaagctccacagagcaactgtatcctcatgactagcatagttccagaacaaagaaattcttagagatggcttgggaaattacaaggagatagtccctattgaagactccctgtttgactcatttagtgcagtggactgactgtaagtaacataaaatgttaggcattatcaaatttaccaaaatttaatttataaaacacatcaattttgttttttataactacataattcataattaagcttattttcattataaaccatacaattttggtcacactaaagttagcaaagtgttttctttgactccattagctatagctcttgtcttgacattaagacaagggcagacaaagaccctgactcgagtctttgccttgttttcagcaaacagtgtagctgaattccagttgggatcccaatacactgggattggaaccagtccattaagcagtcagttgattaaccagtatttttaatcaatcgtagattatcccgatagtactttaattcaaccactaaatcacaacaattttttaaaagcctataacaggaggtactgctgaaaggaagatctatctactatgctgccagttatacaaactaacttgtttttggcagtattttggcatagttaagtaatttggcataattaactcctagtgattgagggtgtgatcatttgggatggaatgaaagacaggcttggtgtcaggcagacctgaattcggctctcataactttgacttttcaggctagttcacatactctgccagtctttcttactttaatcatcaaaagggacaataggatttacctttcctgctttccttaacaaatacagatatttatattaaagcattgcacagtaatatatgtattaggtgtttaatacttaatggctgctatattttattgctgttactgttaaatataaacaatattaaataatacacaggttgttactagatattccatctgatatttaaattgtaattgaatcaagaaatatgtagtctatagctgctttaatgagacatataggggaagagttttgcgattgtgagatgaaattacaactcctctggaataaataaaaccttgatgtagttaatgagtgaaccactgtgagagagaaacactgggagagagtgggtgggtgtgactgggagaaagtactggggaaggaaccaaccaagagaaagataaaaaatgtattaactacagtttctgaatagttgcatttaaagaatatagtgctaaacataattaaatgttttgtctcaaggtatgagaccttcaatccatatatttctcctaagtccctgcttttgtgttattttaaaagtaatattaataataataattttcaaaaacactgtcaccacattattctcaaattagtgctcagtggattgtgacagtcaatgaactaaagtaattagacctcctatgtgatcttaaatatcttagaggtgtgcaaaaccatggaccatggggaagccatctgtaaacactgagaagaaaaaggcagattggggagagatactcatatctctttggtactttcttctgactttttatgttttgtttcattaccttctcaaaactatgcaaaggttatttattaccacgggtatatacatgtgaaaatgaaagtaaagttgctcagtcatgtccgactctttgcgaccccatggactgtagcctaccatgggattttccaggcaatagtactggagtggattgccatttccttctccagggggtctttccaacccagggattgaacccaggtctccctcattgtagacagacgctttactgtctgagccaccagggaagtcctaatattaaaccctaagaattgaagaggtaggaaatggcagtgccatgacaaatacaagtctctgggactccctttcttttttcctctattgtcttcactctatcatagctgttgagtgagaacatcaatatgatgaataaaacagaaaacagagtatcttgtgtgctgagttggggaaaacttcctaaaaagaaca

SEQ ID NO: 49864 - DNA, 1380 bp, Bovine  19866880789670
  misc_feature (1)..(1): n is a, c, g, or t
nctgcagtttcagaaaacagaaagacagtttctcaaaaaaattaaacattgaattatcatatgtttcagcaattgcatttctgggtatataccccaaaagaactgaaagcagggacttcagggaaatacttgaaccacccaatgtcttgcattattattcacattagtcaaaagaaaggaaacaaataaccacctatagatgagtggataaacaaaaagtggtatatgcataaaatattttatattattgatttctaaaattttatattttagattatttaaccataaaaggaatgccattctgatacatgctacagtgaacactgtggaatttgaaataagccagtcaaaaaaggacagttactaaatgattccactatctggaagagtcaaattcatagaaatagaaagtagaatggtttttgtcagagtcagaggagagagaagaatggggagttattatttaataggcacagagtttcagttctgcaatatgaaaagtgctggagatggatggtggtaatggctgcacatctatgtgtgattaaagccactaaactgttcacctaaatatcactagaacaataaattttaccaaaatttcaaaaaactttaaaataattatatagtattccctttacttatgaattaaatttaaaccaaaaatctctgtcatatagcatgtataatggtattaagactccatgatataatcagccataatgaatgctatcaataatatatcagaaggtcaaattttcttgcaaagtatttatgtgatatgcatatgttaaaaacaatattatgaaataaatgttaactttttagcacagatggagaattataaaccctgggatgttctctgtccccactaacagaagcataacaattagatgctgagattagaacttactaagacttgaatgcaaaaaaaaaagaaaggaataaaataaaagtaaatttataagcaatattggtatgtctataatttatataaatatttcagaggatatttagaaaaagcctcatggtaatgagtttcaatatatcaaagcagaaataaacacatatgttcacagtgtcttggagaataatacaaataaattattacaaaatgagaaaaagattgattggactgagactctttggagctgctgtttctttttggctaatatcatttattatatgaagttgcttgaaacttcttaaaagtctgtttaatattagcttgttaaatattgtcataaatgttttagagtttggttattgctttcttcagatccataaccttgctttaataacccacatatattcacatccacttagtaagcacattacattgtgtcattaagttacacaatgagtataattgctttactt

SEQ ID NO: 49865 - DNA, 1108 bp, Bovine  19866880937556
  misc_feature (1)..(1): n is a, c, g, or t
nagcagatgcctgtataacaggaaaataagacaactgacccccaagatgatgaacaggatgagaagttaatggttggttagatagattcactttggatctggtacacatctctctttctgggaaaggtagaatgttgttgaaaattattcctttcctccattcccagacttacatgattactgaaccaactgtgacatgaaatcatctgcaaagttggttaaatggtgaaattccatagttctaagtatcaacctctttggaggagggatggaatcatagcaggaaatattcatttctgtagtgagaattttttaaagataggcaaaatgcttgagggccacaaacatgtattagaattctggatagatctctgctatagagaagaaccatcaccttggtcatggagacttaaatagaatcccggtcctatggaatgagccagacatgtccgagatgaggctccacaccataaccatattccccatttagctgtttactcttggagggagagtgccaaagacatttttctgatgggtgcctaacccagggcaaagtgcagagctcaccaaaagaaattggagttaggaataaaatataacaccaagacttcaagtccaacttgaaacaaatgacacattggattgttctctatgaactctgaacatcccataactgaacaaggaattcagtgttttaaatgcaagaagtgtttactctttataatagacttgagccagatgattttggacttaaacatgtaaagctgcatattggtttgaaatattgtagcttgtattcttttaaacagaagcactatattaaaatattccatacttctggtctttaacagagaaagcttagaattctgcctctgtcagtagctgattctgggcccatgggcaaatttcataacatttctgagtgtcacttttatcatttgtaaaacagggatactagtgatggaaatctcacagggatttttttgagattaaatgatataaagtgaataaaaagggcttgggaatacatttgtagaaaacagaataggtttttgattaaggtgaagtgagatgactcccatgattccaaaattcccttgggaagatg

SEQ ID NO: 49866 - DNA, 1822 bp, Bovine  19866880950573
  misc_feature (1)..(1): n is a, c, g, or t
naaaaaatagtgatggtttttgtatgtaatgatatctgatggaaaagttatttagaaaacccagagaataagatgtttgcttctccaactatttaataattatgtgacctgaagcaagcactctaccttctctattcttcagatgtttcacggtaagatgatagagttgaacaaaatgaactctaaatttaagccagatctaagatccatattttaactgaaatgaccatttttattttatcttggagaattcaatttattggatgattactcattatttgagatccttatatgagcataaagttcatttcatacactattacagaagcagattttaattaaacctgagaactgagaaacattgtattaagttcgatttatgacagcaacagctaggaatgactattttacaatagagtaataaatagattactgcatagttagtatcttatgatctcttatccttgatttcccttcctgctagggccccagggcccttagtttgtactagtgaggcctgaatcctgtggctctagtagactgggctgatcaggaccattgttttagtactctgagggctcactgtacagtaaaccatcctgataatctgggcctaattgtagaaacttaatatctcctttatatttgaggaaaaagtctagtcctgtgagtgtaagatagtatctcagtcaagttctctgtgcctgaatctgattcaccattatgtacacagcaccaagcagaatgcctaggacagggtagaagctcagagtttcattatcagatgaattaatgctatctttgcattgattacttgtccagggagcaaacaatattttaaatgtgcttaacgatattgcccggagaaggcagtggcaacccactccagtactcttgcctggaaaatcccatagacggaggagcctggaaggctgcagtccatggggttgctgagggttggacccaactgagcgaattcactttcacttttcactttcatgcattggagaaggaaatggcaacccactccagtgttcttgcctggagaatcccagggacaggggagcctggtgggctgctgtctatggggtcccacagagttggacacgactgaagtgacttagcagcagcagcaggaacgatattgccactgctttaattctcttcactgaattccttgatcagcatcaacttactttgtagcactctccacagtgagtgttctaacgtcctatatagggccatggatgttaatagccatatacacttctatcttgacttttctcctttagcatagtctgtcctaacttgtggttttgagggcattctgtacttgccattttaattgtatgctttagtttatttgtttagtttcttcccaaaagtacttcaaggcaaaactcaaattagtttgatttgtgcaatctgctctttgctctgcttctaagcacttttttttttttgtctaatgtgccgaatccttggaatggaaactaggtaagtcccagttcttacaggactagaaattcttaacacattcacacctcactcagattgtaaatgaaataatcagcaggctagtatagtgaaatctatgttgttcagaaaaagagcaaattgactagcttttaatcagttttgaaacttttgctttcgttccgtttggttttccctcaattctaaaattaagagacgtgcttagatatttctagattccttttcacttttaatttatatacctaaaagatactgcttgatacattttccaagtgatattggagcatatgtttttactttgtttcatttttattgagaggctcaa

SEQ ID NO: 49867 - DNA, 1519 bp, Bovine  19866881049956
  misc_feature (1)..(1): n is a, c, g, or t
ngcctggccaagtttgatgttcaaaatgcttccttctctattatgctagctgtgtacctccctaatcaaaaataagaaaatacaactgggggacaagataggatatttgaaactggatctgtcccagaaaacctagggtgtttagttgccataatgatacggcaaaacctgatttccactcattcaatctctttgaaaggcaccaaaaaccatttattgatttttctaaaaggagaattgagtaaaaaaaaaaatcttccaattgaaaatgaagtcaggtcatgcaatttcagttacaaatttgggcactgggcctgccataccctctcattggactcagctatactgaatataaaaaattataaaaataaacataaataaaacagagcaaaaacacccacaattgagaagtcccttaacaaggggaaggctaaagagcagcattaaggtcacatgagagatggtcattgcaggccctcatgttgaactctgctgagatagacagcctcatgctagggttaaccttatgtgcattcctgtatgtcccatagctttagcctacagaacctagaacctaggaagagaagggtaatgaaagtcacaaagcccagtcaggactgtttaaagattttagtggccagaactgagaataaaattctatgaggagaacaaattggtggcgaagtaggtggacgtggagtagtacatctctctccctggatacatcaggaatacaccttcagacacagaagtgcatgcagaagaccagctgaaagcggagaggagtacctgaccagcagaaaataatatatagaccaatgcaaaacttggtgggatgaaggaactagggggaaaaacaggagtgttagtaggactggacctgccctcggtggatgggggagctgaagcaggaatccaatccccacatcagggcagttgtctgagtcagaggagaaacatttaaggctcagagtgaaacagctgatctgtggaagcctaaatggaatgagaatcagacagtccttgccgtagccatacatacctcagacagggctgtggatcccctggaaggcacagtgggggaattggagtttagggattgtggagaagtcccctggcgagggctgctattaactatagagagacagatcctagggatgtgagggaggagattgtggtgggaaattcctgtggagaaaagccaggcagccatggaagcaaggcgatacagatgagtcctgtgcaggggggtggatccatcaccataacctctttctctccacacacccagcatcggcagctgaacatagagagtctggcccatcaaaggctaaaacactgaactacagagtagggcccctctatatgcctgatgcactgaacaacagagaaggatcccaggcaagggagcccccaagttacctgaatgggtggagctacagataaagactggccaatgaggccttctgattgccagctataagaggctcaaaaaaagactctgatagggccatcactc

SEQ ID NO: 49868 - DNA, 874 bp, Bovine  19866881087953
  misc_feature (1)..(1): n is a, c, g, or t
nttttctaatattgttttatattctgtttccttaaaataggaaaaaaatacttctagcatatcactaccccaaaatatgttgatatttctccaaacatatttagtttttaaaagaatattctacttctaaataaaatgtatgctataaatccagtatgtactaggatggcacaacttaaaagtagtataaatattctcacaatatgaaagtgcatcatattgtctgataaatacctcaataggtttcacccactatttccttgtaggaaatgtagaagtaaaactggaaaaaaaatacgtcactaagcctttgatgaatgtttgttattttgagatttacagtagaggattcttgattcagaagaggtctggcccacccactgaactgcagtttctgtctggattctggcaccaagctttaactcaacaataacattcaccagatgggggataaaaaagaaaagtcatcaaaatcaatatgagcctatttttatagaaaactgtacttcataaatagcactcccttaatcttacaaattcagaaatcagaagtttcttcattctagagtttgtcaaatcttcccttgtcaaatctcctacattttttttctcctctttccacaaatttaaaattcaatttgttaaagatttgtgaagatcagtacaactatttaaggatagtggaccaaaactcatgttttaaaagtccagtacatcaagagataagacatatttctatatcctttcttcggtcacatatgaaccattaggtataaaattctatctaggcataaaattacaaccattaagtataaaataacacttagtgaatggtgctcactctatacaagaccctgatttgtagccttaatct

SEQ ID NO: 49869 - DNA, 2029 bp, Bovine  19866881110929
  misc_feature (1)..(1): n is a, c, g, or t
ngaggaagaaggcaatagaaatttacagaagttggcagttgaagaccttggtaaagaaatgaattactttgctttgtaacaacaaaaacaaaataaaacaaacaaacaacaacaaaaatgggaattcagacttgaaacatgatgctctccctaagtttgtttcactgcctgtggagagtaaaatcatctcttgcttataccttctacttaacatagagcagaccgagagtctccgaatttcaagcctttttcagagaaacaacatctaaaatatgtcagccacttgaagtggggataatacctcatctgagctcagatacttgacatcctttactcttggaagaattagataggggcatgaaaggcctcaggtgaagactttggttttgattactgaaatactctaccttgtaacaatatgtgttactcaattatggaaaacacattacaaaactataggtcaatcaataatacgtgcttcccagtttgtgctctagggattactagatgccagggtttatctgatgtgccctaatgaaagtgtaataaaagactttgaaatggaaaagctagggtgccaagacctaacacgggacagtgattcataatcactgttaatccataaaataatccagtgattatggaccactattatttatagctcagtgcattcaacatcagctttatatctaactgtgcatcaaaaacaatatccatgatatatttatatgttttctcattcacaacatattctatgcagtttgccatgtaaatatgcatctatattattattttaattttaactgatatatccttcacactcagtatagattcttggtacttattgaatacacaataatattttttgtgaatagaaagcattgatattcttttttattccattgctagaatttgctgcaatttatttaataaaatacatttttaagcacaacagcagtggatgaatgtgaacctatatttatctgattattttctaaaattcctacacttctaagggcatatacgctagactttgattacagggaaaaatattttaagggccaagaacttttttccttcccaatactgcacagtattgcaatccagtcaaacttaataaaacataattaaagcacaaacattctcattactattaaagtaggaaaactccatttataaattccattggattctgtatgatatgcaaattttatttcttcactatcctcaagtaataatttctccttatactttgtctgaaacattgcccatagcacatacacgtttagaaatattaaaattcatggttccagaaaaccagaaaatgtgcagaacttgatactgagaatgcctaatacacagtaggtacttaacaagcagaatgtcttgctatttattttggttgggtgactttttttggttattattcttaattatcttaacattattacttatgtcataattcttacataaatgtaaggtcacaataaacagtcagcagatgatgaagaatgctcaatgataagtattcatttatcttaacccagctaataaatgtcaattcttagatctcagcctaggggttagttctggtaattctacccttataccatctgttttgtggtattctttttctctgggtcagtactctgcctaagatcacttccttcctactacttatatgctcttctctccaagagaatgcttaccaaactttccacttggatgtgcaatctaagagagaagtcgctcactgtatttatatatatatatatttttagagggtttgtaccactgatcattgtctgagttgctcatggtagtatacaccagcagataacgctcaggttaatttattttaaccacctgaataagtttcaaatataagtcattctctcatacacgacctttcccaatgcactattaatctttcaataattgagctttattagtacacatgtgtcaagccaactttttaagaaatgtcagacatctccaaataaacaggcaccctcccaatggtgtggca

SEQ ID NO: 49870 - DNA, 2194 bp, Bovine  19866881122690
  misc_feature (1)..(1): n is a, c, g, or t
ncttctatactcttattccaatgattctcttcaaatgatgaagagaacttttttaatgaacttttagcccagcaaggcagtaaaccaatgccttcattacaaataggctttgtatcatttcaatggaatgcgataaaactggaacatatagggagtttccctatgtttcaccagcactttgcatgcatgcatgctgtcacttcagtcatgtcctgactctttgcagacctatggactctcgcccacctggctcctctgtccatgggattctccaggcaagaatactggagtgatctgccatgccctcctccaggggatccccccacccagggatggacccacatctcttacatctcctgcattggcaggtgggttctttatcactagtgtcacctgggaagccctcaccagcacagacttacgttcaaacttagcattacagttaggctctttccgttattttactaacggaaagtaagaaaactatgtatgaagtgaaatcattactcaagtggtaatgcttaaaagtcaagattttgaatgctgtgtgtgctgtgtgtgtgtgtgtgcgcgtgtgtgtgtgtgacttacaaccactgctgatccagcatttgttctgccatttgactactcagagacccaagattgatactacatgaagcacttgacaattcaagtaaaaaataatgtgatatttttccaaaactggtcaataataaatgagttttagaatttaaatcaaaacaatggatttctcacagtacattattgataaggcacactttttctaacaatattttcaaaggataatgtattatatactgccactactaataaaaactccaatataaatgaaagtattaaactaaaaaacaaaataaaataggtttgcacatggtaaacattctgcagggtagtttatttggaatttgggtagagataatgtgtaacatgatttgtttcacaaattcccaattctattttttttttaccctggtgagtaaaacataagtttcttataatggcttaagtgctatagccaaacactaaaatgtcatataactattccatatcatttctggtacatattgctgatctgaataaagcaatatgagaaagtgacaagtaactcttcacagtaataaagtatatgagtagagaatactactttaaagatttatttcataattagatattttactatgatttttagttaggagtgttttcagtttttcactttaaatactgtgtctaaagaaatgcaagattcataaaattatgctaactggacttgtttgttgaatgaataaattaatgcatgcacagctattgaaagaagaaaaacaacagaggaagagagagagatttcaatgatatacaatcattaaacatacaaatttagcataaagtgatgctgattctctcacacagctaaaaattaactctgtaaactctcactttatactatatcccatactactgaccattagctcctggcaatcactaactggttctccatttccaaaaatgtatcatttcacacaagctttataaatgaaattctttggggattgtttttttcatacagcataattccttacagatgcatgtcaagtgtagtgtttattaagtagttcattgtttttttcattggtgagtattattccatggtatgtatataccacagtttatttaaccattcatttactgaagggcattaactgattccagtattggctgtcacaaataaatctgctattaccatccatgcacagtgatttttgtgtgtgattgtatgtaaataaacttccattttaaaaggataaatacaaaggagtgatggaatgttatgacaactgaatgtttagtttcatattacaaaaatgtgttccagagttctgtattttacattcccacaagtaacatataaacaactcagtttcttcatattcacatcagcatttaatgatgtcactatttttattttaaacacggatatatagtagatgtcattatgatgttactttgtattgttctgatgactaaggatgttgaacaacttttcatgttattatctgttttctatatattcttttcagggaaaagtctgttcaaaggggaaaaaaagtaatttgttaaggtttgagacgtttaaaaacatatattttagatactaatcctttgtcagatatgg

SEQ ID NO: 49871 - DNA, 1476 bp, Bovine  19866881233912
  misc_feature (1)..(1): n is a, c, g, or t
ntgacctttctcaaatgcacatttcaggaagaagcctccatcaacatttccttcctctttcatggaatctcttctgcaaacactgcttctctgccctcttaaccaaggcagctcccgggctgatgtaggtccctggaagtccagacatcaatatacttttctttacttaaccattcttattctccatgtgaatctattccaaattccattccctttcctgattcaagaaatcataaatctaatatggcactccctccaaagtttaaatttatataatggagctactgtcaccttacttgttacatgtgtgatatattcatggggattttgatattcacctatctcaatcttgtcagtgaattatgctatttaaagaacagaacaaagtctaagattgaaaggcatggcgttgttaaaaaaaaaaaaaaaagatggaatttgttgtatcagaagaaaattccacttcacccaaaatatcctaaagtgttcagatgatccttgaccagagataatgccataattattccaaaaaagattacatgccagcagagtctacagtaaactttgctgatccaatgaactttaggtaactcaagaagggaatggaacctagaagtctttagagaaagggcaacagagtacaatttagaataatttacaaaacctaaagaaaataaattaggtaatataaaatatatagaaagctaattggaggggtcttaaaaattcagtcaccatagaagagaaatgcatttttactgagttctatgcttagtaattcagatatttcacatactagaaatgtggaaacatatataatgttcttagcatagggggttgcatgtagtgaatgtttaacagaggctgaatactattatctcagtcaatttcagaaacatttctgttttgcagaggaagaaaattggtatctgaatatttgggcagccaggcaaacttcacaaagagagaatgtggtgaaatccggattctaagtgaatcttccagacattaaattttttatctcttttttcctgtggtgctacatgacttgccatttgagctaagaaagaggatttttctttcaaataatgtcctaatactcatccacatcctatcttagcagatacaaacataattctatcacaggtaggggatactttaaatctgcttccaagttgtacttaagcccactgtgagaattttagtgtacttcaaatgtattcactcattcaacaaatatataatgaacaccctactctgtgtcaggaactattctaggtatggggagtaccatgggagagaaaatatttactctgtatatggaatgagctggactatccattgctattcaaaacttatgactcagagtaacagttcctttactagtcattggttatactcatttttggtataatacagactgtaaaagatcccatgcatactgaaatccaatataacaaaaacaaaattcctgca

SEQ ID NO: 49872 - DNA, 1258 bp, Bovine  19866881256370
  misc_feature (1)..(1): n is a, c, g, or t
nctttccccatatcattggcaggcacctttgaaaagaacaaatggctcttggatttaatgtctagggaaatgtttctagtttaactttatttcaaaaagataacttgccaacaactcactaaaatctttgagtcactttctttggtgtgtggctaagcaatgttcatttgggagaagaaaaagaaaaacttcataacaatgtgtttggaactgtttaaagcaaacatatgcaaaacccgggtgactaaagatactttttttttttttattggattgaaacaatgcaaactacacactgtgtctaaatgtttaatataaacatttacactgaatatatttgcagatcaacagctgctcaaacaaaagcagcgaatctaatggatttcatagttgaagcccccaatcaaaatggagtttacgttcacatagcttattcaattgcacttgtgtatgggcctttgtttcaaaattattatctacttttaatcttcttccaagaaacaatccaaagaaagttacttagttcacgtttctagaccaaatgaggtacagggcaattaattttattcctcaaacaaaatccagctagtattattgatatgcaatactactttgctatcataatgcaattatgctatgtatgctcatttcaactgaacatatacgaagacattccaaatgcatctgaattctctatcgctgttctatgtgcaattcaaagcatgtcagttaagggcacttgcaaatgcttagggaccatgcactgaacacttccctttgtaatcaataaggaactccatgaagtaaattggtttataattttgcaggaatttgaatcttactggaggaggctgatgtgtaggagtcagtcacttagaatatgtacagattctgaaatatgtataccatttcagctatattatactttattgtttattgtgcacataataatctctggaaaagtgatggaaatggagtttgtttctaaaaatgagtaacgagtgacaactgttaatgttagcaataaaattcagaagaaaataaagatgtctttatgagtaatggtactctaagaagaaaaaacagcactccacccatacaactactgcaagaagggggattatagactatgttggtagtcattaagttggttattcttaaatgtagtagagtgtattcttcataaatgaaaattataaaatcacataataaatgtgattaaatgaaggtataactatttagttttatataacatttc

SEQ ID NO: 49873 - DNA, 1687 bp, Bovine  19866881275811
  misc_feature (1)..(1): n is a, c, g, or t
ngaagagtattactaactttgctaagtccgtggaataggaagtgactttaggaacttaggacaactctcataccacaatatcaattttgatgacacagcttttggtaagcaaaacagggtgcccagatggttcccagatcctacatatgttgtagtaactcaatgctccatagaaagatagaaagggtaggagtgcgttaaagcatttaaaagcatcccacctttgccaggattgtctcaaggaccaaggtctgagcctgcagggagaggtggaacaaagcccacagcagagaactaactgtgaaagccagaggaagtaaatcaagatggcctggatctctagctggattaaggtgttttctcttccaaaactagtcaaaactttaccaattttataaggcacttaaaaaaaaatctctctctctttctttttcacttcaacaaagatcaagagtcaaagaaatatcaaacaagcatacagcagacaacccaaataaataagctcttctttttggagaacagcatcttttgttgtttgtcagagagcagtgctcaagccagggtgtacaaattagcctctggaaactcagagctctccctggagctcacctttatttctgaatgtttagtctagcatttgtggcaagctgtgtcttgcaaggggaatctagatttcattctaccctgaaaatgggaaagaggaactgttgatattataaactcttttcaagataggcctaaaaacatgcaattgcctttttcatttctagcacaagacaccgaagatctttttatagaatccacacaaagcatgattcagaaccctgtgctattttactgaactaatgtccagcagggaaagacaatttggcctcattattcaaaaagccagaccctattcacatacaatttagtaaagttactctttccttcttgacctcttccatattaaatatataaatacttatttcaaattattactatctatatttaatattttgtaaatacatgactaataataataataataactggtccactgttaaccacattgacagaaacctgagcatttgtgtttgtgtgtgtttcacactgaattggtgctccgtgtcagtgtcccttattctatctaaagtctgagaaggatgaaactctggtaaatgtgtgcctagtcaaaaccataattctaaccaaactgattcaactttgatctactcagaatacagctagaagcagtgtctcagaaacctgaccatggtcaaattcagcaacattctggctcttctaggtaagaaactttgggtaagatccttaaatcttactgtactctagtttcctggtagtgtttcatgtgtcagtatttgcaactatttagcacatttcctgacattgttttgtcttatatatattataagcaagttttacatgataaagttagttattattattggctaaaaggaaaagaagtaaacaacatttgtgtatttcaatcttgctcccactatgctcatttttttagtactaacctgaatcacacctttcagaaattcagaaaataagtccagttctgtgcaacaaattttactggggagacataccaagcaatgagaccactaaactggatgttgaagttgtatatatatatacagacacacacacacacacacacacatatatgcctttgtgg

SEQ ID NO: 49874 - DNA, 2507 bp, Bovine  19866881297721
  misc_feature (1)..(1): n is a, c, g, or t
nagtgacagtatatacgccttgacatactcctttcccaattttgaaccagtcatttgttccatgtccttccctgtaaagaagaacaaacagaggaaactctgtggtcatccacatggattctcctcttccaaaataccctttaaatctaaaatgtttgtccctgattgaacagtgaggctttttagaaacagcagctccattagtacttgttctggacactgcctttgtgaaactgtctggcattaaattgtctaatctcagtcccttctgtccctacccaaccatgttgacttgtgattttttttttttccccagtcacagattagttcagctaggatgaatctgattttcacttaagtctgtgcagatttcctcctgtgagccactgctgggtctgctgggatcctgccaaggacacttcctcacctggaatcttgtttagagtttcagacagagagttggcagctcaggtgtttgtagtcatagtaacgccaggggaaaattagggatgtacacagttgaatgtctgaccctgtgaatatgaggctgtctttctctattcatccttctatccattcattcactgattcatccccaaaacattcatcaagaatctgctatatgtcctacattgtgtttgatcccagaaatgccaagctgaaaattatttagctactgcttttgaagaggtcattcatcattcgttcaatgagtaaatgttactgagacttttacacatctcctcactgagcaggtccttgaaatgcagagaaatgatagataggaatttgtgcccatctttatagtatgtgtcatctataaaatccagaaaaaaagatgagtacccactaggcagtgctcagtgacatatagattatttctaatgtgttcatataaatagaaaaacaaaaaacttcaatacagtgaaatatgtgccacataactgtgtgacagtgctgctggagctattttgacctaccaggcgaaatatccagcaatgtctgtagacgtttctgactgtcacagatggagagtgctactagcatctaatgggtagatgacagggatgctgctaaacacgctgcaatccacaggcgcccccctacaacagagaattatccaacccaaacgtcagcagcacccaggttgagaagctctgtgtgcagataaacataaacatacaaaactatgagtgcgaaagaaagtttgattttatcttgagggctagaaaagtctgtccaaagaagaaatcatttcagtttggttgttgactccatcacaaattactatgagtgccatgaccctgaagtattatagactaaacattgaataacagaaaattcttttttgtttatttattttcacccaaaactactggagaatatttttccatgtaattttgttagatattcccaacaaccctatgaagtatatagaacagatacaattctcctgtggaacttaaaactcacaaagattgtgttttgtttatttatatcccaatttcctctaagtcacaacctatagtaaatggcatttctcataaagtctaatgatattttaaaacatatttggttactccaacagcaaagagagggggaattctcagaaattcttcacaaagtaaaatgatcatatgttattggacagaaagttgcattttgtggaattaaatgttagatgctttgtgcatttttcaattttactagagtccttctacactccaggtatatacctgattaagtaatatgtccaaccccatcattttgaatagggagggcaatcagtgatacctattcatgtttttgataagggtgttcactccccagaaatggccaagaaaaacaacatatgtcaagaatgtacatacagagagactgtggtttctcaaataagcttcttgcctgcaggcaacacccgcattaatcaggtagttacctcttcagatactctgaaccaactagagatttggctgaggctcagaatcacttgaccactgaccatttgaagctcttccctgactaaacaagtctctaacttctacttatcttctcttctaaatgtttctctaatctgttacttaatctctgctgtcagtgcatacctacttttggacattgattatcaccttgttgatgttttctgtactcaggtaacacagtaaactattacctaacacatttatctaaatatacagacttaagtgcatttgtttaaaaaaaaaaaacatatatttcaatcatgaatgttaaaaaaaaaaaacacaacagttcaggaaagaaaagaagataaccttaaagtaattacaattaaaaaaaaaatgaattgtttaaactctacctgaaagccactaccctagaggtcagctctgactgttgagatgggggattagcaagttttaaagagatgtgaactgctatcaccaaactgagaccatctactttctgtaatcaccaggactgaaatagcactagaaaaggaaactcattatgcaaataccattgtt

SEQ ID NO: 49875 - DNA, 1816 bp, Bovine  19866881448372
  misc_feature (1)..(1): n is a, c, g, or t
ncttatataaggtgtatctctgaagtcttcaagacatcctgctttttccgcctctagttttcactcacactattgcctatttcaggatgaccctttgccctcatctatttatgggtgacttcttcccatccttcatacctctgctaaatatcacctactttaaaaggtcattcactcctggaactctctctgagatggtctactctccattgttttgaatctatacttgtttcattcaaagaaggggttggtaaatgtttttctgtgttaaaccagatagtaaataaaacagggcactggcaggattcagctgcccagtataatctcctgaccccctgcttcatggtatcaatcacaaggtttcagttgaaacatttattttgttttatggttgtttatgatcaacatggccattatgggcttcccttgtggctcagacaataaagaatccacctgcaaagtggaagacctaggtttgatctctgggttgggaaaatccacgtgaggagggcatggcaacccactccagtattcttgcctggagaatcccgtggacagagaagcctgatgggctacagtccaaagggttgcaaagagttggacatgactgagtgactaaacacaacacatgcctgttataataaaagcttcataaggacaggagtcatagtggacttgtttattattgtattaacactgaacatagtagatgctcaacaaatatctcttggaagaaataattaattaattaaaagttgagtttggtttaaatatttagccttaatgattctctatagcctgcaagattaaccctaatttattacaaaacatattcccatagattcttgacccaatgacatttttagtgttaacacttgctaccatctttactgtcctaagacaagagttgcagttcactcatccatttactctttcatttagtgtcatgcacaataaataaggtggcttatggtaaagaatccacctgtcgatgcaggtgacacaggttttatccctgggtcagaaagatcccctagagaagggaatagcaacccacagtagtatctttgctgggaaattccatagacagtggagcctggtgggctacagtccatggggccacaaaaaagtcagaaaccactttatgactaaacaacagcaacaacaaagtgaaatgatattcaaaatctagcactttgggttcaaaagtggagactttaccaagatggaaaacttattaaagataaaattatatagtgatgcttttcaatgaattagtgaatctgacctggtgtcttgttctctggtacagaaacagtcatgctgttttcatttcaaatacattatattataggagtttttgcacaggattaaaagtttcactgatttatttgatgtatctgtttgaagatttaagtactaaacacacaaaactataaaattttacaagtcaaaatgaccctttagaaaagtcacaaagcaatgtttatttgtcaggaagcaacagttagaactggacatggaacaacagactggttccaaataggaaaaggagtacgtcaagccttgtatattgtcaccctgcttatttaacttatatgcagagtacatcatgagaaacgctggactggaagaaacacaagctggaatgaagattgccaggagaaatatcaataacctcagatatgcagatgacaccacccttatggcagaaagtgaagaggaactcaaaagcctcttgatgaaagtgaaagtggagagtgaaaaagttggcttaaagctcaacattcagaaaacaaagatcaggcttccggtc

SEQ ID NO: 49876 - DNA, 992 bp, Bovine  19866881632460
  misc_feature (1)..(1): n is a, c, g, or t
ncagttcagttcagttcagtcgctcagtcgtgtccgactctttgagaccccatgaatcgcagcatgccaggcctccctgtccatcaccaactcccagaactcactcagactcatgtccatcgagtcatcatatatagcgatacttgtgcagtgtccgctacatgccaaactctatgctaggtctttccaggcgttattccatttactaatcagagcagcccctgaattaggcattgcaaacccagatgaagcaattgaggctaaggaaggtaaagtggaagaaatgagagaaaaacatgtataaaaactttcctcatctggaacacaaatgagaatgaggcatcagttttaaaaaaagtactaagctttctctctccaccctctcccagttttttttaatgtcctcaaaaggctgggattaggaatcctcccacagctcatctctcttgagagctttcctagtgctgcttctgattaaactaacagattagacccaatggcataaggcgcagcttctctcctttgagaaagaacaaataagaatgaagtgttagattgcaaagctaattatatattctgttcaagtgtcaaccatctgctgcaattgttaaaaaagcaggcataagtcaactgttgtggtgagatgtttaccattgtgaacagacagaaagtttatgacactggtggagattcattgttctagcatgtgcctggaggctgcggtgggattccactgttaccttgggaagcccacctaccagtgagggttcaaggtggtagctgatgatcaagtactagtcataactatttcagaactggaaagccttcttaaagtaccaacactctgtttacaaatggaaaaactgagatcccgtgagggcaaggtacttcttatactacacttaaaatttcagcacttgtctttctgtggaaattttatgtctgcatgtagggtcctccctcaggtgtagtaagtcccgaaagaagggaca

SEQ ID NO: 49877 - DNA, 926 bp, Bovine  19866881938702
  misc_feature (1)..(1): n is a, c, g, or t
ntgtagtgatggggcaatcatgcttctcaagcagtgtgtacctatttgtttagtaagagagaggtcaatttttatcagcttctccatgaagagaagagggaattttgaaacatgcctgatgtcttacttcctttctacttttcccccacaaaccctaaggctagagactccatctggctgggttatttcagaggagacatgaatgagaagagttgtatgagttggttggtagaaggggaaagcctctctgggaatcccattgtgagtgggaaaagacagatgtgttaacagctgctcagctagataatgagtcagctcccattgcaggtagataatctccaagacagctaatccatttgcagataatcaagaattgaccatatgccacagctggattgtgtgtaaagggaacacatgaggaaagaggaaaaacaggaatttgatggttatcttaaaaaaaaaaaccccataatatcatatggataataataatggtccattcacttaagtaacatttttatttatcaaagcattatcacagtctccctttaatttactttcttgtgaaataggccaggtaggtctatttccatcttttagtggagtgcttaaaaagaatgcaaagcaaaaagaggaaatgagcatttactgctcactaactctgtgttagggaccaagacctgctcagaaccacagaaataattagttatatgacagatagaatattggaagtttagctagtagtccagttctcaccgagtgcaatgttaattatgtattgcaaatccaatacaaatgccttttagttataaatatttttcactctatgcatttgtaaatcagaaaaatatgtgctaacctcgtaaaatcattatcttcactctgcttcagaattgaggtttatttgtgcttatctcacagcatat

SEQ ID NO: 49878 - DNA, 1549 bp, Bovine  19866880439218
  misc_feature (1)..(1): n is a, c, g, or t
ncagagctgcttcaggggagccaggccatcgtgctccgctcggcggacctgacggggctggagcagcgcgtggaacagattcggaaccacatcaacggggcgcgtgctctactacgccacctgcaagtgaggcggggcctcgcccgcccgcccccctttgtctgccctctcggctcccggggccctggctggctggcagttctttcctgctccaggagactcttacgcagcctaaagcacagccggaactacccccaggatgcagctgagcctgggccggtggggcagctacagctgggtgacggcgaccgtggaggcgggcccgtgtcaccatgtccagcggctctcgagtgcagggcgcttggctgggcagggtccttgcccttcattctccactgaggctgaagtcctgggcccacacagaactgtaactcaaaacgttgcacaagggaaaagtccaataaaaatcttgggaaaggagcctggaggtccaaagaggggaaatattctgtctccctgttacataaacctttctcgcctgtttctgtctctggtctggggtccctgggtgctcccctgctcaagcccaaggcctggtggcatatgaagcataggctgacactctctgcccagtctagctggcgcaccacccagactgagggagacggggcccatttgctccaggaactgactgaattccttccttaagaggccagaggagctgttttcatctttgaacaactatccagtttctcatttgtagatggagaaatagaaacccagacatggggaggaagttgttcgaaatcacacagctccgagaggcagaactaagactagactttgtgtctcttgggattttaaaaagaagctataaacgtgtgtgtgtgtgtgcgtgtcggcagatatgcaagcggcacgaatatttgtgtgttaactgtggttcaggcgccatgctggtgttctgtctacatggagcgtgtgcattttatttcatgatatgggtggcagtgttgttcccatttgataggcgaggagaccaaggccccagaggctcacagatgtggcaggcagggctgagctgagcctcaaacccacgttcatctgttacaggcattaggatggatgctgggccgggctgtctgggttccaacggcgcctacttccaaggggctgttggagaggaaaatgagtcgatgtgtatagctcacgacactgggtgcctggcccaccccacagagctcctgccctcgccagatcctgcctgacctccagctctccatgcgtcttccactccgcaaagcccagaagcccctgagctgcttctgacttagagaaggaccaaaagaagtctcatagagaaaaatatgtccattttattcagcacaacacagagcaggaagccggagggggcggaggacaagaaaacaggggtgggacaagaacaatgagcctgattttcagggagagaaaggagcagaagcaggatttgaatgacaggctgaaaggacaacagtcgacttccaatttttacttaattgagtgtgtg

SEQ ID NO: 49879 - DNA, 1718 bp, Bovine  19866880533988
  misc_feature (1)..(1): n is a, c, g, or t
nctttggatctccttgcagtccaaggactctcaagagtcttctccaacaccacagttcaaaagcatcaattcttcggcactcaactttctttatagtccaactctcacattcatacatgactactgtaaaaatcatagctttgactagacggacctttgtcagcaaagtaatgtctttgcttcttaatatgctgtctaggggttggtcatagcttttcttccaaggagcaagcatcttttaatttcttggctgcagtcaccatctgcagtgattttggagcccaggaaaataaagtctgtcactatttccattgtttctccatgtatttaccatgcaagtgatgggaccgaatgccatgatcttaattttctgaaagttgagctttaagccaactttttcactctcctctttcactttcatcaagaggctctttcgttcttcactttctgccatgagggtggtgtcatctgcatatctggggttaatgatatttctcctggcaatcttgattccagcttgtgcttcatccagcctggaatttcacatgatgtactctgcatataagttaaataagcagggtgaccaatatacagccttgacgtactcctttcccaatttggaaccagtctgttgttccatgtctggttctaactgttgcttcttgacctgcaactattggaagacaaaagtgaggaataaaagagaaaatgtcctgtgtgaccagcaacacctccctttagttcaaggacagaaactgaaggtcacagtagtttcttgcgaatggtgagcaaagtccatgcggcaggctctgaggagttcgaaaggctcccctctgtggctgagactgaatgtgaagcctttcccagatccagtggatttttcttggatagggatgacaatatctaactgggcagagcacacagatccacaaggacataggatgcctgtttctggatctaaggagcatagaaaattggataagagtgagctgcaacaagattaatggctgctacaggattatcgaatccatccctagagagtcggcgggacatgaagaaagaacatgagctttccttgctaatatcagtacttcccttctgcaggtccacagcttagaatcatatcttctctaccatgtctgggtaccacttgttccttcgcaattcatcttgcaaaacagcttaattctttttactcaccttttcactaattcaaaacttgtttgcctactgcctgctggtttctagggaaacacaggtgagcggaactggaacttacattctgcctactgttgtcactgttctcagtcactttgttcttctatttcttgtgattgtttcaggaagcttcggtgaggagaagagatcgatgtgtcatcatgccaccatgcttactccaaagtcctacggccaggctaagggtttactttcctgacctagatataaaaatatctctgaaaggactttgaggtcacataataaaacacagccccaaactaatggactacaagcaagaacattaaacttagtgtcatggtttataaaaacccttttcaatagagacaggatatgatgatttcattctccttttaatttataagaaaattccccaactttgcccaagattttctcctactttgatatttgaggggctgctgatagattctctctcctttggaaagaatatccctctagcctgcaaagtccaaactccctcg

SEQ ID NO: 49880 - DNA, 2572 bp, Bovine  19866880558594
  misc_feature (1)..(1): n is a, c, g, or t
nttttggtttcagacgttttgcggatgctacttggatgagctctccaagcaagagttccaggtcctcagaacaaggcccgagccctggtgcaagtgcaagaaaggggtctgctcacagccacgtatgctcgactgccccttgaggccgtagactgacttctttcacaaaagcctggactccgtacaggcagtttcgggggaaggagtggagctggttgctggtgttttctcttcggagtatttagccttttccatatggagtccccaaaggccacgtagggcttccactggtgacccgcagtggagaagtgccaaatgcctacctccagactcaacatcactggctcaccttggctctcaccggctctccctttaagtcttaaagggagagcagaaggaagaactgtctagcaggtgtccttcactaacaggaagcagactgcttcacacagtggcagcttcctttctagataggtagttattgagggagagtctgaaaaggcactgaccgggagtgctgtaaagatgacttccactccagatggagctcagttctatcgacaaagacttggccaactctcaatcacgtgaccccatgatcattctctagaggctgagtctgaggggcttatagtaaaatgcagccatggataatcgatgggggaacagggtcttaactagtgtgatcaaagataaaattcaagagcttatagaataaagtaatggggatttccaaccactggcagtccagtagttaagatttagctctcccaatgtagggggcccaggttcaatccttggtcgaggaactaagatcctgaatgctgagcagccaaaacagaaaaacaaaacaaaatagaatcagtcatggaagtgggtaaaaaagacatgatttcacaaaataaaaacccctgtgtcccaaatccacagaaatcttaaatccacaaacatgtgagattcagtacatacggtagtcaaaatagattggcttcagttctgctagagagcagagggtcagattaaatgctgcctccagcctttcccattttgaacatatcacttctcttcctggtccagtttgccattgtttacacaaagctggtcatttgtgcctcccccggtctcacccctgcatttccacttgtcggtcatgagcaaggccaggcgggagaagcagggaattcgatttggatgttgtttctctgctgctggaaaatctcgagggactttctttcatgtagttaaaagtcacaactcaggagggatccaggtcctcggggagtgtgaaaactccgtgcgggcagcttgcctgttggcagctaaacccgtcgctgtgagagggcagggggccttctggaaaactgcactagacattagacctgaccgaggggttttgttgttgttgttattttaatcatgaaatcttagcactaaagtctagtaagatggtgctgatgaacctgttcgcagggcagccgatggagactcagacagaggaaacagacttgtggatgtggggggcagggggaaggagagggtgggatgaacggagagagtggcatggaaatgtataacgatcatatgtgaaatagacagccagtgggaatttgctgtatgcctcaaggaactcaagccagggctctgtgataacctagagggccgagtagggtcgggggtgggagagaggttccggagggagggcacacatgtatacctgtggctggttcatgttggtgtatggcagaaaccaacacaatgtcgtaaaacaattacctttcagttaaaaacaaataaataaaacaaataagatctagtagatcctggacatggtttgtctgtggttcttctatgcactcagcagactgaggccgctgctttacacaagtacaatgaaagggcttgtacttgaagcgtacgttcagaggtggccggatccaatattcctcacgttttctcttcttccatggttttcctgttttcatgcccacgctgtagcaggtactaaaggcataaagaccagggagtttttcaaacactctgtcttagggtaatgtctaagagctcttccttctccccagggccaccccactgaatccatatctcaaaaaagaaaattgcaaaatcagaataaatgtttaaatctctgcaaaacaaaacatgtgcaccaaactcaaaaattactgaagtcttagatggttacacatcaatttctagtacgcgctgtaggtacattttaatatctttgatgtgatgtaggatgtgacctctaaataagcttacctggggcctgcagaagctttacagcatccttttctgtagcttcaggacggctccagtgcctacagagcctgcgacgtgtgcgcagccttcagtggcttcttctggacttgctctctgaacactgggtggcagcacggatcttcctaagctttctccagagtctaaatgcaaacctgagcaattccaccttaagacgggccatgcgaagaagcatgcaaaaagtgcagtgattctggggacgtggctaatctctataattcacctgattgcagatacaagtgacagctgcaat

SEQ ID NO: 49881 - DNA, 1462 bp, Bovine  19866880568794
  misc_feature (1)..(1): n is a, c, g, or t
ngcctggtgtgctgcaattcatggggttgcaaagagttggacacgactgagtgactgaactgaactgaactgaatgtcttccttgtagtagcatcactgggcagattttggatagtcatctgtttcttagccaaaaaggaacattggttcttctgaagacccgtctactccttcaatatctacacgtatcattatctatgggctcccaattcttaaaggatgaggacattttagtcttatttttctttcaggagccagttgttttatccggagaaccattaagttctattgatttctagcttgctgctgctgctgctaagtcacttcagtcgtgtccgactctgtgtgaccccacagacgacagcccaccaggcccccccgtccctgggattctccaggcaagaacactggagtgggttgccatttccttccccagatttctagctcacttacattctaaggctctctgaaactgtctggtcacatacttgggtattttctcaacctgccaggtttggatttcaattattttttttctcattaaaattcctaattcatatttgatctcataaaaaaaaaacaaactatgaaaaagacaagtctccttttatttcaactgttgggtctactccagaatgctctttgaaaatttcctgaagtctgttttcatttttaatttattatttttaattttttgtccactatatctttaaaagaaaggcttttagaattgttttttttgtgctatgttttctatttttttcttgccttcttaaggcactttcttttttcattttacacagttgagttatttaaatttttcctttcttggccctgctatttttaaatatttttctccagctgaaggattaacaatttactgaactagttggtaaagatctagtccagaacaacaagtacccaataaaatcctaagttatgtaaaaaatttttatgtgactttctaagatttaggaaaatccttaattttaactcttaatatggctccaggcctggattttaaattttaagttctttaagactgccttttggcttagcaaatttacaatgtaattatttctttttcaaataaaactctgaaaaaagggctcctatagaaggtcagggaaaggtgagtggaagagacagaaatgaaataaggttgctttcagaaaatattagagtctttgaaagagaccatgctggattggaattttgtttttttgtcctcagcatactaatcaaagtaaactattgattctttaaattcctggagttcctcttaaatgtactaatttatttaggtgttcctctaaaatgaattaatttatttattttgatatgtcaaaagtaccatgctgactattgttattctatactcaaactttttgccctttatcaaagtaaatacaagagtagggattataatgcaacaagaaagcgggaattcttccaagagaag

SEQ ID NO: 49882 - DNA, 1570 bp, Bovine  19866880620265
  misc_feature (1)..(1): n is a, c, g, or t
ncttctccccactaggctcctgaacttcgctttctctgccgctctttagccgttgcgtttctgcggccccgtctgtctcgctctcctcgcggctccgtccttggctctgtctcctgccgtccatgcttctagtctcctgctttgctccctctccctttgtcttccctcctcgtcctctttgccacttcactgcatcctctgccttgtttgcctcctttcctttcatgctctcatttttgatgctcctctttacctttctctctctctctgattctgattcataacatcttgaaagagcgtttgataacgcttgcctgaccctgcctgacatcgggtgagtgattctcctcaggcagcttttgatgtggtctgtgtgagattgatgaaagctgctcaatttgctcttcaaagctctgcttatggaaagcccggatgcatctcctcgggatgccactctttcgctttccagaaacaaggccaaaggatcggaggaacccatgctacttcccacgtgatcatcatcctcacagaagccttaatgctcgcaagagatggagcacattgcataatccaccttttaattttttctttaactgttgttactcccatagtcctcgtatctgagatttttacccacaaagaagattccttgggcaacctttaatttgaatacgactctcagcccagaaaagaacttaggtttggacactgagtactaaaatagaagaaaaatgtcatctattacttccagagtctaaggacattaggtatcctggctaattaggatagtcagcctaaaatgagaggagccataatcaaaagaattgtctgcagcttctggttctagaaagaacagtgggtcaggttctttctagcactaatcacactggatcccaaaagcatatgagaaaatgaggtgtgtttttcatctggttcaggttttctgaagcactgtttctgtttttcatcctaagaagaggattcttgcacctgcatgagaaggcttacatgttcagctgcttgaagaaagagggatagacaaacaatcaggaggagatctttctagctctgagatgctctgattctgagaatctaatactttagatatgataaatatagtgtattgaaaagattgctgagttttgtgggataatacttgagtttaaatgcagatttggacaattatttattgatgaatgatcatcaatacatttttagtttttttcagttttttaaaacagttttactgaggaataatttacctaccatgaaagtcagccattgtaagtgtgtggttcagtgagttttattaaatgcatagacttgtgcaaccactgccacaatgcagcttaatgacatattttataaatcttttaacctccctccattttccccttcatcttattaataaaattgagctcatgtggtggattgattacaaaaattaccacagtcctaatccttccatccattgcaacatgactttgttgctccttccattgagaggtgggattgatttccccagcccttgaatctggggctggtcttgtgacttactttgatgaataaa

SEQ ID NO: 49883 - DNA, 1116 bp, Bovine  19866880723578
  misc_feature (1)..(1): n is a, c, g, or t
nttgacgcagtacttgttgaacacggagttgatctgggcatcctgcagggccccgaacagcagggtctggcgatagtacttggaccaattgttgaggctccacatccgcactcgagaaaagtccaccccatgtgaatccaagggcagcaggttcatgtggttcatcaaatgctgcgagcaggaatactactccattagtgcttactgagcacttacctggagggcattgctaagcgctgcataagccttttgtcttacttaaccctgagaaacgcacactatcatctcccaagttacagcaagaaaactacggctcaggcgggagagtgacttgtccatagtcaggtaaacattcccaacacgaaaataaagctcaaactggctacctcctggatctttcaaaaaggactgagatagtatctatacagtgtatttctgaaatgccaccctggttactttataagcaacctggctccagacttggacaagaaggaaaatgacacagaaaacagaactgctgtccttccatgacctggttctcaaaaaagctaggagattcccggagtgactacatgtcaacaaattaaatatgactcaaccattagcttccctcgtaactcagtcggtaaagaacctgcctgcaatgcagaagacctgggttcagttcctgggtcgggaagatcccctggagaaggaaatggcaacccacccactccagtatttttgtctggagaatcccatggacagagaagcctggtgggctaaagtccatgggatctcaagaactggacacaacttagcaactaaaccaccaccacaactatcaacatgccttttctatgttaatcatattttttaccttgtatactgaagggtaacaaatactataaattgattccttactttataagtactcccctttatttgctgcaaacttactctaagtcctggagttgtagaaaaggtaagttctcacttgccttatactgtcaaaatgaacctatggttccatgatggggactgttccaaagcacaatcctaaactcaaagacactgcagagtatgggagagggagaaaaaaatcacagcactaattaggtaggaggacaaaaacac

SEQ ID NO: 49884 - DNA, 1739 bp, Bovine  19866880780877
  misc_feature (1)..(1): n is a, c, g, or t
nctgtggagcgatggactgaaattccgactctgcaatttactgtgcgaccctaggaagttcagttaacctattatgcctgtttgctataaactggggctaatagtacctattatctgtcttcaagggtaattgggaggattaaatgacagcaagtacttaaaactgtacctagcacatggacacaccactcaagttgaaagtaaatgaatgttatttgttttaacttcttttactaatgtaactattttcagagattataaattaaaattattttaactagaattaaaccctagttataactgacgtgtaaagcatggactacttagataaaatttttagaacctgaaaattttaaatctgagatctcctttcctaacagaacactaagcctttgctgtgacctgtgtcagtcagggctcagtgaaggaaaaagaaatgacttcaggtattttaagagagagatttaattcagttaagttaggtgcttacagaacagtagggagagctggaggagcagagtccaggccggtcctgcaggaatgactccttagaacacagaaaaactgactcaccaaaggatctattacatttaccaaaaaggtggggggagatatagtatgagttgaaaaacataactattttagcttcattaagggatcaggaagtcatcactgccattacaattactccttagcatccacgaagctgaaaactagctattagaatgttgctagaggggaaaaaaaaacatcttcccttgaacttgccggcccgcagcagcaggaagatggcttctgtctcacttccaccttgcatgaatgcatctaattgggagaatctgattagcatcagaactctagggaatctgagaggcacatcctctgaagcacaggaaagtagaaaagattgggatacttgcagattgactctggggtagtcaaagtccctgaagtacctttttctcattggtaaaatggggataaataatgatactcatagtgggcttatgatgaggatttaagaaagcaataaaaatgattcttttgcaattttgaaaccttaagcttccagcatctagcattgcagctgagaagtctgacgtcattctgatcatcattcatttttctatgttacctgggcccttttaggatcttcccttgatgttctgaaatttcactatgatgtgtctaagtctggatgttttcattgcttgttcaggctctttatttggacactcaagtccttcagttctggcaaattttcttgtattttaatacagcttcctctcctctgttttttttttttttttaaatgatccaccttttagtcatatgttaaatcctcttacatattgtctctcattttttttctttttttggtatttatgtctattttttctatgctttttttttcttctctatttctggaaatttcttatttctatcttctgaccaatggatcaacaacatttttctgtaaagagccagacagtaaataactttttcttcacaagccatatgacctcagtcgcaaccaggcaatccaccgttgcagtcccaaagtggccatgggcagtatgtaaacaacaggagtagctaagaattctcatcacaaggaaaaaataaattttctatttctttcattttgtatatatacaagatgatatgcactacacctattgagataatcattttatgatgtgtttatgggagtcaactcaaaacgctgtacatcttaa

SEQ ID NO: 49885 - DNA, 785 bp, Bovine  19866880794957
  misc_feature (1)..(1): n is a, c, g, or t
naataatatcatattagtctctgattgaaaacagtgttgttgaaagatcatggtttgcacagcatagtaaacagtttctgttttaatccatacaagtttctatgtttttttttaataattattctaagaagtataagatttaccttataaatttttttttaccttataaatttactgctcacaaatgtaatccatttttcccacttttgactgcttttcattcagttttttgttgttgttgttgttaattacggttttgactctttgaagctcattaatatcataaaaccttgaataggtatacttcccaagaaggtttctacttaatttaattttctatttaatggagaatacctttttttccactactgcaccagatcacttttttaaagctacaaatactcgttattgcattagtaagttcagaatattgaagataatttaatatttcattaaaatcctctatcttttgatgactcatactattactgtgaatatcaattctaaaatcagccctaaaatgtgagaatatgaaactgaactgaatacacatatggatcataggagtttgtttttaaataaattcctaataacagcttgctgtgttgtcactatctcttctaaaaaatggaaaatccagtgttccaatttttaggtttctattaaaattttactatatatacaaacaaaatatgcaaatattcatttattcaaagcttggaatgttttttatttatagtagttttgatcagccttttgctattcctaaatataagttcatatta

SEQ ID NO: 49886 - DNA, 1030 bp, Bovine  19866880853350
  misc_feature (1)..(1): n is a, c, g, or t
nctgcagttatttgtgcatcagattgaagatggaaggggagggacagcaaggaccacacgcttcaaatcatatgccatcttcctttttattcttgttatataagcaactcatgtcaaaaaaaattaagtaaaacaaattatctgcattcctgctttcaaagttaccattagtatcttagtgtatatttgtttcagatgtttctttattttcagcccttcattatggccattgtagtcaccaactggcaccaatgcttgagataaggctcctctttgcacaagattatatttgcatctggtttaatctcactccggccctccctcgcctggtccgtcaaggtggtgcttcctgctgcagcctctgtacactggggttggtcctccaaggtggtgctccctgctgcagcctctgtacactggggttgggccaggcaggcccacgtgtgtccgtgcctgcatgcgggagggtgggcacactttgcagcgtgtctgggcaacagcaggcattcactgcagtttcctgttcttcaggcctgggctgtggagacagggaagtaccaggaaggggtagatgaccccgacccagctaaatggaaggcccagctccgctgtgctctcaacaagagtagagaattcaacctgatgtatgatggcaccaaggaggtgcccatgaacccagtgaagatatatcaagtgtgtgacatcccccagccccagggctcgatcattaacccaggtgaggccccagctgctggggagaaggtggacagtgtgctgggttcctggctagacccttcaagagatagtcgacttgaaaattgccttgcttagaatgtttatgactgctgaacaagaaattctgtcgctggaaaggctcagagaacaaaagatataaactcaccaaggtgttcctgctcacttagtggaacactgaagccttagaaaatggagggagcatagagttctgtaaaaatagcttctctctgggctcaacactgagaagagaggccaggtagtttagaaggaggag

SEQ ID NO: 49887 - DNA, 1516 bp, Bovine  19866880859443
  misc_feature (1)..(1): n is a, c, g, or t
nttggacacgagctggttatctccccgcatcctccacacttccttccgtagtgaatgcactctctttcatttcttggtttgggacgtgacccattgctcagctctagggttaaaactaatccatgcagcccatcactgtagccatagtgattggttctgaatgggcatgtagcctagggagacacatgaagagagctgctatagaaaactgattatgaagttgacatatggagcacacactgggtagggaagtagaaagggaaagaaactagacccttagtgatcctggtgaaactgagtcactggatgaagccatgcccgaagacacacccgccatctgaatgttcccttactgctcaagccattttgagtttgttgcattctcttgcaactgacagaatcttaactgatgcaaacatttactcaatgtaatcactggctcctcatgggtaatttcagttaatgaaatcaaagtgtgggattttccaaaaaggcatcttctcttcatatttttactatcacttcactgatattttgttataattctactcctccaaattattttttgaatgcccaaagaacatacattggtaaatatttgaaaaggaaaccaaagacaataaaagataaagagatctgatgaaatacaacaacaaaaaaatgtatcctttgaactgaccctaaagtaaacaccttatgtattttattattaacattttctatataagtggtctttaaattttaatgtagttaatgaccacttggggaatttgattaaagattactaggctgcttcccagtgattctggtttggtggacctggtgttgagcccccaacttgatgtgaatgactattagagctcactctgagaaattttgcttttaatctacaggactaattgagaagagggttaggtatttgatttgcttcataataaatattttagattttaattttgcattttaaacattcatttttttggagtggcatttataatatgtatataaaaatatgaaacaaacccaaaggttaaaaagtctaagttcttattaagagaagatgaaaacaattagggtgaagggaagaagaaatgcttcatatgagggataaactttttcttgctttaagagtataagacagctgcttactatacagactacatttatacatccactttgaaaataattagtggctatatacatgatctgatcatcagattttaaatatgcaatactgcatacttggaaagagagggaaaatttaaaggagaaaagtttcattttacacatattcttccaaaatgaactcatgaacatacaaacttgaagtcagctaccaaaactcctggtagtaaaccacagtgaatactgtcaactgtccattcaacagtcactccccatctttttatttcttgcttggagagctcacctctcactatgaagactaaaatgccagacacttgcacttctagtctctcttgctgaggctaacacaatttagtaaactgttaaactg

SEQ ID NO: 49888 - DNA, 3098 bp, Bovine  19866880918640
  misc_feature (1)..(1): n is a, c, g, or t
nggaatggcaacccactccagtattcttgcctggacaattccatggacagaggagcttggcagactacagtcagtggggctgcaaagaatcagacacgactgagcaactaacactttcactttcacaccgtagtaggaagggtaactaacaacactctaactattgagtatagcttaagaaatgagtatagcaagtaaatactataccatatggctacttcaaggtttccagtcagggttcttatttgaaatcactggaagctaactctaagtgatacagcaatttattaaagggactggggtgacgagagaaccagacttgtggttaagcttctcaagagcaaaatctaaaatcatactgtggaactgagctggggaggaaatttgctactgctcttactgcgcacttgaatgccaaggtcttttcttttctgcaattattacttaacattgttcagcaccaatacaatttctgcaagagcaaaactatttcagaattactactgactcgttatcagattcctccaccatcagcctcatgagaacatgaattgagtgcagcatctgcttctctgttcagtctgtgccgaggtttcctggaggtgagtgtgagtggagtgtctagttaacatgactcccgccctagctaccagtgagactgggaaagtgaattaaacagcttaactgagggaggtgggagtattagttgggacttcctcagacataagaaggttgctgaaaaattatgaaaaagtgagaaaacataataaatgtccacaattaacgcttagtcacatactaagcatacaaaactcacctaaaaatcattaacttccccccctaatatatattagtagaatcagagaacaaagtgataggtagaaccttagagataatttcttttaattctctcgttttactaaaaagaaacctgatgccaaaaattattaaataatttatccaaatgcactcaattagttagtaggaagaacacatgctttttaaccctttgtatattttctactgttcactgatcaaattatacgcttatcttaatgttaaacttaaatcttaccctcaaggaaactcagggcttacttctcagaaagttagtttggtgatactggtcatttttctctcaatgtattgtttggatcagtttctgaaaaattagctataaaactaaattatttatgcagaattctaattttctatcattactcatggaaatgaaccataattaagcttcaaatatgctttaaccaaagtttgtaaattttttgactagattagaaatttcccttgccaaaaggctaataatattctttcaacaagaagaaattattcagaagctctaagaataaatgtttaattatgaaagtacctctcactcatatattattacatcttacaaaagtggagctaaaatcacctaggtgatctacaatcacatgatttctttacacagttaatatccaaacttcagcaaagagaacattaactagagaacagccagaatatatgcattcttttagtcttttatttttatgacaagaaaactgatcgaatttggagtcttaacctcgcaattgtcaaacgctagctgtttttggcacagaagccaaaaacaagcaatgagatttcgagcaggcggagaaaaaagaagacagagagcgtaacaattcaacacaggcacagacttaaagaagcagcagagactttgagaagcatggcaatgcagagaaaaaattctctatgagcagaagataagttttgttcagattaaaacgttacgtcttagatgctatctacttagcacttttttctttttgtgaacactccacagaaattaattgtactggttgtcagaaatatagaaatacagaattaagtttaggccaatacatgtaatggaggtgtgtacagaaatcatttagtttggtcagaggaaaaaaaaacatgttaaaaacatattattttgtatggcttcattttctttgtgaaaagtatataattaatacagaattgggaacagaaaagtcaaagcaaataaaggaacacaaaatacatacctcttgatggtacaggcattctcttctaatataaatcaggtatttctatatataagaatgcattttccacagattaactagtaaccgctcagaccagataatgagaaagtttaaaaaatcacagtaagaattacagaatatttagttttattaaaaagttatcttttcccctgtgaaatagcacttgcattattttttttcctgctcccttctgataaactgctggcatctacagtaattctaaaatttaaagtgaaaaaaagctatcaatttatccaataaaggataaatattatcttaagaacccagagagatacactaaattatgaccttttggtttttaaagatgctgaaatcatctagttgaaaaggtatggttctactggggatgaaggtcccatgagatcaaatgctgccggtagaagtccaattaaactaatcttggacttaacgcttgacatttaaaagcttagaaacaactctaaaatagtatagtttcattttaatacacagatttattccaaacctgtgtatttatgggtaaaaatacttcttattcaattgtaagaggactaaatataattcaaaatttctatttatagcatatcatggattttctcataatctaaatagctatgtggcatagtatatcttcttggtttaaataagttgtacagctctcctgtgactttcaatgccttgtggcaatttagtttaaaatacaaagagagacagacagacagacagggtatgtgatcagaacctggaggaaaaaagagaaaacggagaagagcttatagtactaaacacaaatattctcccagaaacaccgtaaaatctttgttttaaaaaaaaagtagaaagtataacaagggcaaggttttttgaacccttaaagataatttcacagccgttctggaaagacaatcagttatgaccgaggcagcagcatatactctgtaagaataaataatttctatagtatatcaaataagatatggggctagatagttgttaacatatcaa

SEQ ID NO: 49889 - DNA, 1470 bp, Bovine  19866880921267
  misc_feature (1)..(1): n is a, c, g, or t
ngcccgagtcagggttgtggggggtcttttctgttgtaggagggttggggaagatgggtagtgagaccagagttcctttccttattgtcctgccctaggagactctgtgtctaaattctgttttttttttttttttccttttccccccatacctgccccctccctccttgctgttcgttctccgcagagctgggggagatcaccaacttgagggtcaacttcaccaagctggcgcctgtgccccagaggggctaccaccctcccagtgcctactacgctgtgtcccagttgcgtctgcatgggagctgcctctgccatggccatgcggaccgctgcgcccccagttccagaactcctgccagcccctccagcgccgtgcaggtggcagcccagggcaggaagggagaggggagcgggcggggcagactgcgggcatccttgggacccctggagaggggtggggcacttgattgaagacttgagtactgactgttttagcgatggcgaagatgagtgtaaatggttatcgttttcaaggtcccatttggtagcacttctttggatctgctttattatttgagatgatttttattcagtaacatagatgtaagtataagtatacgtgtaagtagaagtacatgcatgggtattgcagggagctcaaggcattgattcttagccctggtcatatatcataatttcctggggagctaaaaagatcaccgggatccctacctcagacactctaattgtattattattatttaaagctcctggtgattctaacagcttgccaggattgagagtccctggtttgggggactttgaattccctttagaggtgagatatgggacaggaggagagaacagaggctaacacggatgctgagttcaccccagagcagctgagtcagatgcgtcagggatagaaagggaagctccagcttaacaagtgacccaggggcgtttgctgggaagccaggcttgagagccatcagcagaggagagagacccttggaccaagaagcagagggagctgtcatttcactttcctgcttctacaatattaacaaccgggagcaggatacttgttctagtgataaaggcacacgatgaaatcctatcaggtggcctgctagggaaaataaggggacaggaacattgcgcagccttttcctttccactttctgggccagtgcttcccccaggctgcagaggaggccagagggagactggtgccagggatgtgacagccgttagggccccaaaacacaagaccagaacacaggctgagtgtgatcactggcgtataaggatgtagaggagggcgagggcctgcccagccccggtggttcttaactctggctactccatggaaacaccagtttataaagtactgatgtctgggccttgtccctgagattggatggaattcggcctgagcatttatatatataaagctcctcaaat

SEQ ID NO: 49890 - DNA, 2881 bp, Bovine  19866880927493
  misc_feature (1)..(1): n is a, c, g, or t
ngatgcgtccataccgaggaatgtccatttattagcttctgtaagaacacacacattaagaaaagtcacattttgcatggctctggagctgagggaatggcttgttaaaaatttccactcaagcaacctcgagctaaggatttgtattccaaagagctggacctatttcaccaaaagtatttacttgagaagtagaaaaatcccacaagctcaatgagcaaaaatgactttgccttatataaaaatctctgtgggaaagttagccttagtggaggagaaacgctggaggtctacagagaaggcaaatggctgacatactctgtcttccaacataatgtcaattgttgttttttttttttattggcaacaggagattgacttaatggcctctgaggttactctgggagcaagaactgtcttctgtcattggaagaagtagctacttacttgatttcagggactgggggaggtgtccctggtccttctcagaagcccctcttctgctcaagagatgactaagatcccacatttcagatttgttccttggctggagatttgcctttgcctagtgcaaggtatcaccaggaagtgtcacccattaagcctcttagaattgcacagtgccagtctgcaaggttgtatatggcagctctgttaagcgcttatcagcataagagatttgagactttctcacaaatgagtttggatggaggccctgggacccagtgaaaatagaatatagatgtggtagagttaggatgactgtggttccagaaagtaaaaaaagtgggtttgaagacgatattgccagttcatagtctgacaaaggaaaatttagtaagtagaagttccagtccttgtcattaaggagcttccaaacctgcacactccgaatggtacatctcacacagcccagacagttggtctccacaagaccgagttaacagccttcagggtgtcttcatggtagattttcttctatttgagaaggaaaaagaaaaagcatacacgaaggtgaagattctgaggtgagataaacccacctcttctttctcagcacagaggacccgaagtgatcttgttgaatgactgcccattcctctgtgggcctttcaagccatgtctaccagagaacaaagtccctttggcaccaacttggcatttatagcagtcagcttctcgtgatctggcgacattatccatgttgcctggaagacgataagtccgttcagctcagaccaccaggtcagaaaacacggaggtctcctgccaggcaagcactctctcagcccagctccaggggccttacatccccttccttcatctcccagaagcccctccacgctttaccagctgtccttcatacctagtcttcgcaggcctcttttctcctcaggactgatttcttaggaggttatttcctcattaactacactcttccttgctatcctcaaaggcaaacagaagggctcttttgtttgtttttatcctgttgccgccaggaagaaacaaccagggtaccaagacgttcccaacatggcgttagcagagaggttccagagttgtatgagctcttccacacactgtcccacacactgtcctccctaagtgctcaatccttgtaccctttttgcctcagatctggataatcacacaatctcacttgtgccatctttaggctgaaaccttccaagtctttgtctctggtctcagctcttgttctgagcaagaaatattcacctccaatggcaggttcaacagtcttagttcagtgttctccactcaagacctacttagcatgtgcaaatcaaaatttagtaagactcttctgttcttccacctgaattatttatattggctccagcatccacccaatcactttaaacgccaaacctggaaaccttctcagacagtttcttctgcttcatccccataccccccacctccgtgtgggtgtgtgtgtgtatcctgtctgactctttacgaccccatggactatagcctgccaggctcccctgtccatggaattttccagccaagaaaactggagcaaattgccatttcctactccaggggatcttcctgaaccagggtttgaacccgtatctcctgcatctcctgcattggcaggcggattcttttaccactagtgctacctgggaagcccgggtaaaggaataaacacaagtaaagatatttgatcttagaacagtgcctggtggagaggaagtgttcagtaaatgttagctattgatgttgttagtggtagtaatagtggaattccatgctgctgctgctgctgctaagtcgcttcagtcctgtctgactctgtgtgaccctatggacagcagcccaccaggctcctccgtccactggattctctaggcaagaatactggagtgggtcgccatttccttctctgtggaattccatatgccctatcaaatcgtcagagggatttttacccttataactactgcagagatgaggggaatggctgtgtgactcagccatcatgtctatgttttcattcatggcaggaactgatcaacagatacagcagtacaaatgaaaacaccaacccatccctcctcactcaccctgctttataacataccaaggaattcttagcccagtagatctggtgtggggtacaagtactttgtgcctctatttaaacttaccgcaccagagcctcccacaattcagccagaggccaggtactccaaatcatttcatggtcctccatctccaggggctagattttataaagcgtatccacctctacaaccccctgtgacttctaccgtgacccccctgaggttttaacttccccacgcacagacaggatctgtcacatgcctcggaaatgcattcgtcg

SEQ ID NO: 49891 - DNA, 1334 bp, Bovine  19866880976773
  misc_feature (1)..(1): n is a, c, g, or t
nagcagagaggctgggctattgggaaaaaattgtatttgtcatttttcacaggaaaaatatttgtttagtccaagaactagcaaagaaatgttgaaaatttcttttgcagggactttttgacatcattctttttttttttccctacaattctatcccctctgccttagagatacattcagcatgaatatgtaaacattccacattttttttaaaaaagattatttttttaataaagaaaagtccacaatgtcacaattgtgcatgagaatgcacaattcccattaagcactgtacatgtccaaatatggtggaaaattcagagggaaacaaattcaaactccagtttaatttctgttttcctgtttagttccaagctcagtgtgtgctcttataagttgacaaggagtaacattgcacctattagcactcgtcaacagaaagtagattgttcgggtttcaataaatgttttttgaattggattcaggttggtgagaaaataaattaagtcggaaagtctttgaggcaaattacatattgaaatgaacagtttgatgcataacccctccatcacccccagagtggggggcggtggaaagaaagaaagggaaaaaagcagaagtcttgcttttctgagctgtgagaatttcttctgctcttgcatctgtgaacactttacaaggcgatgtctacagttggatttttacagcctatgtttgaatgggagcttgcgtgacatctggggctatatttctggagaaatttcaaagctagtgatttccagtttttaatcaccagagtatttattttctcccaaagcataattatccatggctccacacttattttctatgggagcagagcaaaatgagaatcaggctgaattagtaacttgatcttgcatctgtcaaggctcaatggttcttacctgctccagaggttaaaagccagtgtgctgacctcacctcaccgtgttggaaaaattgaacacatggccgttgtcaaggacaagacactctcagtcataagaacaaagggaacggcaaaagctaatgagggaagagaccgcaccacccagacaagtacagagcatcctgccccctccgctcagaccctggtcatgtttgtggctacaggtgccacggagagaggtaggctgtgcagacgtcattttcaacgttctctcctgagaaaggaaaacctcacaatgcagcaggctgctcccctgtcagggaatgaataagagcttgcttttcactgaggtttaatccaacagcctggtgtgcatgaaactaagaacaagaacagaggctgttcacccaccaactcaccagg

SEQ ID NO: 49892 - DNA, 1242 bp, Bovine  19866881007048
  misc_feature (1)..(1): n is a, c, g, or t
nagacatctcttggggctgatttaggtcagtgggtccaaccttttttagtatggagagcatattttaatctctaaagaactgcagataaagatacactttaagaacacgttggtagaacaaatacttaataacagaacctattacctttaagggagtttgaatgctattaattactgccttatctatgtcatgcatgctaagtcacttcactcatgtccaactctttgtgaccctatgaattgtaacctgccaggctcctctgtccatgggatttttcaggcaagaagactggagtgggttgccatgcactcctccaggggatcttcttgacccagggattgaatccacttttcttaagtctcctgcattggtaggcaggttctttaccgcgagcgccatctatatatgatcccaaatctgagttattgctttctttctgtgtttctgtaactctgtcttcaccactggcctgaacatgccaaaggccatacttgaattgccccttgttcactatctactgtatactcagcacctagcacggttcctgacacaaagtatgcgcgttatgtatatttgtagaatgaataaatgaataataatatcaggatcttttgactaaatagcatgattcatgtacaactataggtgctgattcacacaaaaacagtgtccccatggggtcctaggctcacagattggaaatcatggatttaaatttccatccttgggtccagtatgttctccattttcccctgagggagcttagtgttcagtaggccacagtgattggtctgtgggtttagagacacacgataactaaaagtgggagcagttgacattccaaaggccacacgaaaagtccatgaagaagacagaacacagagcttaatcaaggctgggacttcccaacacccacggaaaccaggaggctgatgagagctgccttcaagagcctgtttctaacatttgtaggaagaaaaagtaagctgatctctgggaacctctaggctgtgtagttgttattttagacccaaacaggcttgcaaaggtatcttgcctgtttcctctgtcaacctatttgtgtggagtgctgatcactgaaatgacgcgcagtaaatgctctttgtcctgtaagaccttggctgggagtggaggtgcactatggagttaaaagaaagaaagattgatttaaaagatgggaatgtgtccctcctgcatgcagggtgtgtattaatatttaa

SEQ ID NO: 49893 - DNA, 3935 bp, Bovine  19866881023423
  misc_feature (1)..(1): n is a, c, g, or t
nagcctcttgatgaaagtgaaagaggggagtgaaaaatttggcttaaaactcaacattcaaaaaatgaagatgatggtatatggtcccatcacttcatggcaaatagatggggaaacaatggaaacagtgacagattttattttcttgggctccaaaatcactacagatagtgactgcagtcttaaaattaaaagatgcatgcttcttggaagaaaaactatgaccaacctagacagcatattaaagagcagagacattactttgccaacaaaggtctatctagtcaaagctatggtttttccagtagttatgtatggatgtgagttggactctaaagaaagctgaatgctgaagaattgatgctttggaattgtggtgctggagaagactcttgagagtcccttgtactgcaaggagatcaaaccagtcaatcttaaaggaaatcagtcctgaatattcattggaaggactgatgttgaagctgaatctccaatactctggccacctgatgcaaagaactgactcattggaaaagaccctgatgctgggtaagattgagggcaggaggagaaggggacgacagaggaggagatagttggatggcatcactgaccggatagacatgagtttgtgcaagctctgggagttggtgatggacagggaagcctggcgtgctgcagtccatgggggttgaaaagagtcggacatgactgagtgactggactgaatggaaggaagaactgattgatttaaagttaaagcaggaagctctgggagagtgtactcaaggcttcagagccaagggcagaagcaaggggatgagggctgcctgtctcgggcccaccctgcacccaggccttctcggaacagctgaggcccggtgctgaacacagggctgtgggaagactctgccccggtcctctcctccatggacaggaacaagaagtgctcatttcattcctttcaaacatctctttattttcattttagaaaagttaaagaattgaaatagcaaacgattcataagtttagcagccaattagcttagtgtagcccaggtctcccaccacccctctctctttctctcagcacacctacacacacacacacttttattcagctacatttcgcttttctcatttggcaatacaatcaaacatctccctttgtttataaatacagattgatattgaccgaagactgcaggactccaagatggcggcagccactccagtgaaaagaaagaaactcacagatgtcaaaataggggagctgccaagcaggatatggatgtgggatttcaccccagagacactgttggagcgtctcaaagcagttactaccggttctacaacaggtatgtctagtgaggaaaaaaaggtgtaactgggtttttctggtctggcggcttacatggtttccaactatcgcctttctcacaaaggagctcaaacgtgagcagccacgcaaatgcctctgaggcttggagggtgccctgtgaatcccttactgtgaccttcattgcctggcgcccctgaatcctttcatagcctaactgagaattaacacccgacaaaagatgactggtaaaaaaatatatatcaacatgctcatttttaatggcttcataataattttattgtgtgaaagaagcataaattacttaacaattccctattgtttgaagtttaaatttcttaccttttttattctactgttataaacaatgctttaatgaacacggtgttctgcatagatcttggcacacctacctaattatttcctcgaatataatgatttcacagcttctgatgtatattaccatgttactctctggaaaatttgttcctacttattccctataggagcatatagatgtcattcccccctacttgctgactccaggcattattctttttaatttttgccatctgaaaagtgaaaagggcatatcattgttttaagtcgcatttcttttattaccgttgaggttgaacattgtttatattttaaaaccgtatttgcatttctttcatgatttactttttcaatatcactttgccattttacgcccatggtgtgtatattagtttcctagcaccgccgtaacaaatcaccacaaagtaggtggcttaaaacaacagaaacttattttctcagagttctggagggtggggagtctgaaattaaagtgtcatcagggccaggctttttctgaagactctaaggaagagtcctttcttgcttcttttggcggggagaccactgcgctgtgcttttctcccctattaatttgtagcagctctctacttcaccctttagctcttctgactcacactcggccctcagctcagccagagagagacagagatcggattagatttgaggaagggaggttttgatacctagacaccacgtgagtcatgagtcctgagggtctcaggagttctgtattaacgagaagctaagagatggagttagagaggttatcccctcggccccgctgtgagggactcttggcagcgccctcactagaagctcttgaagctagttgtttagaggcatggtgatcaggctgggagagactgagcgctcagtgacagtctttgaatcataagtaagtaaatgaatgacctctggggctgggaagaaagtcatccggctttgctggggcttccaagcttgtacgaggccgtttgactaacactggtttattaagaggatcatctggctgttttcctatttctcaagcatttaagcatttcaagtgtcagcttgaccctgaacttatagtttccttgcccctgaaaggatcctgttcatcctaagaagaaaaactgttaccaaattagaagactctccgctctccatggcctttgcaatgtccttctctagatggataggaaggtggagaagaattggctccactttccagatgaattaagttggagccatagtagtctagtggaaacttccacagggctcaaacccagatccttcctttctgcaacgtcacctccaaggagcagctctgcagagtcaagagaaagacaggactctggagaggttctggggtctctgagagtgggaagtgccttgtcccaaggtggtgcgggggcagtgtggcaggtcaaccttccctctaatgggcctgggggcaagaaccactgtggctggaaaaacctttatctttcagtgggacatcaggtactgttggggccagaagtgagtgaggatgaagaaaagtgtgtcatgcccaccactgcctgttcctgctcaggaaacaatacaaacatcaagacaagtgtcttccagaaggcaaaggccaaccatgggaagtgtgctgaagtagaatactcctgaatttagggaaagtataggtgcaggtttgaatcttagctctgcaatttactagctgagtagcgtggcttaattatcttaaatctttccatttcagttttctttttgtaaaagtaagacaatcttttggtaagttgtttacaggataagataaaatactatatgaagaagagtccttcgcgaccccatggactgtagcccaccaggctcctccgtccatgggattttccaggcaagaatactggagtgggttgccattaccttctctaggagatcttcccggcccagaaattgaacctgggtctcccacgttgtaggcagacgctttaccgtctaagccaccagggaagtccatggcacatagtaggtatcaaataaatgttactttacttcttctctgtagcaagccaccccagtagacttgcttgggaaattccacagacagggggaagcctggcgggctatagtccatggggtcccaaagagttgggacatgactgagcgagcagcagggcatttttgagaagccagagcagttccaggaaagctgaggtgcttgccaaaggccccacag

SEQ ID NO: 49894 - DNA, 782 bp, Bovine  19866881103628
  misc_feature (1)..(1): n is a, c, g, or t
ncggaagctgcacatgaaccttcagagcccgggggtccggcctgaggcggagaacaggccgcccgtccctgcagcctcgagacccacctccccggagatcaccatcaccgagacagccgccgccccgggcccgagcgcggcggcccccacgctgacccggctgccctgccggcacggcccccagcccacggcccccgggggcaggtccctcaactgcctggtcaatggctccctccgcatcagcagcagcttggtgcccatgcagcaggggcccctggccatcgggccctgcggctgctgctccagctgcacgaacgtcgggaccaaagcaaacgcctcctactgctccgagcccacgctcctcaaaaaggccaacaaaaaacagtacgtatttccagccccaggcttagtcctgctcaacctggggctgaaagaactcaggacaatgcagctaaaaaaaaatagacctgggagcctctcccacttggaagcagctccgtggtgtagaaaagctctggaaagggtcgggggcgtcaatggagatgcctccagcccagtccccacccctcaccagctgtgtggcccccgacatgtccatctgtgtctctatttccccgtctgtaaaatggtttgattggatcacacctgctcagtctgccccacaggaaaagtgaaagttgctcagtcgtgtctgactctttgcgaccctgtggactatagcccaatgggctcctctgtccatggggattctccaggccagaataccagactaggtacccatt

SEQ ID NO: 49895 - DNA, 1122 bp, Bovine  19866881111702
  misc_feature (1)..(1): n is a, c, g, or t
naagtctaatacagaggcagaagcaagggcaggacctggcagggaactaaaagcaagctgggcactgctccgacagcctcccctccacgtctccttcctctcctgccacccaccatcctgccccagagcccccaccctcagctccccagagccttggcttattagaaccaatgctcaggaaaggggttctccttgaccccctgttcctctcgtactcacgtctgtccatccagcaattctgttagctcccccttccaaaggcagaggcagctgacagaattaatctggtgactcaggcggtaaagaattatccacctgcagtgcaggagacacgggtttgtcccctgggtcgggaagatcccctgacgaaggaaatggcaacccactccagtattcttgcctggaaaatcccatggacggaggagcctggagggctgcagtccatggggtcgcagagagtcagatgtcactgagagactaacgcacacacgcccccaggttacagaaacgacaccgtgtcagggcaggcaagtctccccctctgcctgcttgtccgccatccctcacgacatctcaggggtggcctgagaagctgccatctccatcacccatctgacaggctcaagccgtccatgttgccagggcgatcagccagggtctgatgagtgagagagaaaggccaacgaagcaaagaatggagggaaggagggagaagagaagagaagaggttgagaaggtaagagaacctggtccaggccgtgaatgccaaatcccaggtgtaagaggaagggacaccgggtgactcacggctcgggcaccacctggacccagtgagtcatggctgagtcctcgtctgtggggctgggtgagctccaggaagggccctgtggatccgccatgtgactaaagctggcgtgtctacactccggccacagctgctcagccgcccagacagtcggtcactcctcacgcagagagaagaggtagggctttctgaactcaggctggagcccagcctcgggcggggacccggagaaggcagaacggggccctgggctgccatcgtggggtgactctcttccacagagtctgtcttcctcctaactcagggtttcagaaagt

SEQ ID NO: 49896 - DNA, 1455 bp, Bovine  19866881119144
  misc_feature (1)..(1): n is a, c, g, or t
nttgcaatgcaggacatgcagattcaatccctggttggggaactaagatcccacatgctgtggagtaactaagcccaggcaaccaaactactgagccctcgagctctggagcccacccaccacaattgaagagtccgtaggcctcagcgaaagatcccccatgaagcaatgaagaaagaccctgtgtgccgcagctgacacctgacgcagccaaataaataaacattgttttaaaaaaaagaaatagaggagcataacagaagcatcggcttccctggatgcccccagatccaagagacaccctaggatctgcacactggtctaggtgtctgtggtctcggcagtaggtatcagcagaggcgccgagagtcagcggataccacctggaatccaagggatgtgggcgatcacgtggggacagagacgcagggatgctgttctaagacagacaatggagtccgagaaacacagcttactttgatttttattctccctctgcactcaggtcagagaaacctgacattatcccagcgggtagaaggagggagaaactttcaaataggtgtcagctgcaccacggaaagttttgaagaagtttggcaagaacccccgttggcagttacatttgcgttcccgacgtcgggtctgtaatatttggattctgggcccgggcagatggaccatttgccacgtgtctgcttttcctggcttctgttttccgacagcccttgctcacttggatcaggctgttaacagatctgactcctatgcactcggcactttatacgtagatgacatgtgtccttacacacgtggttttctggttctcagcgtaaggacgtgaagaagtagagggatgagttgcttcgtctctagccccatgtggggtccttctgcccctctcaagtagaccttgctctgcgtcggagcggctggcacaattcgtctgaggctcttaacgctatgcggccacggagcagtgcattctgtggtagtttaaggagccagaacatccatcagagatccataccctgacctttaggagctggtgggaactggtggaggggagagaggatggtccccgaaaggccttgagttcatctccaaagctgccgggcagcaaatccaactacagttggtgcatactggctggtaggtagacctcgcatgcattttgttccaaagagttaatggcatgtttcagaggaagaataaagacacacatgtataagtcaaatcttgatgggaacctctggaacagacagccccgatagtaggcgccacggctacccagacaaacccggtttcaaaaggccacggtctcatcagaccacgtgcacagccaatatgcccccactgggataatgaaggcggctgcactcacatggccccaggcaggtacccagttgccctgtgctatatttccatatgaaggaacagcaccacatggaaaga

SEQ ID NO: 49897 - DNA, 2070 bp, Bovine  19866881128796
  misc_feature (1)..(1): n is a, c, g, or t
naatactggagtgggttgccatgccctcctccaggggatcttcccccccccaggaatccaacctgggtctcctgcattgcaggcagattctttaccaactgagctataagggaaggtttcagatcctctcctaggacttttaaaagttcaacaaaagcccactccatgctaatctaaggcataaagatagaaatggggagaaaataatctgctacaattaataagcctgagtttctgcatacaaaaaatttgtgtcttttcttattgaaaagattttgggtgtcttttcatatgaagtagcaggaataaaaaaagaagaatagggggtaaacaggcttctacctcagattcttactcagtctcttaagttggaatttgtccccagcactctgtctcttggttcctgccagaccactggctaggcagcctctttatccatgcacccaaggggcctccttggttcagcagtccaagctctaacctgtatggaagagaggacacctccttcacagcagttttatttttttaagagctataatctgagatcctagaggctggatagtgcagagaagctaggaatagtccccagaacactaactgccactatttagctgagtgacctctggcaagttatttaacctttcaatttcctcacctataaaataagagacattaacagtgtgagcctattggggaattaagtgtcttagggtatgtaagggtatgtaaacacttggagtagtcgctggcacagaggaagggacatgaagtgattgccagctttgttgttgttcagtcactaagtcgtgtctgactctttgcaaccccgtgggctgcagcatgccaggcttccctgtccttcgccgtctcccagagtttgctcaaactcgtgatcattgagtcagtgatgctatccaaccatctcatcctctgccacccccttctcctcctgccttcaatctttcccagcatcagggtcttttccagtgaactggctcttcacatcaggtgcccaagtattggaacttcagcctcagcatcagtctttccagtgaatattcaggacggattttctttagtatggactggtttgctctccttgctgtccaagcgactctcaagagtcttctccagcactgtagttcgaaagcatcagttctttggtgctcaaattttctatggttcaattctcacatccatacgtgactactggaaaaaccacggcttcgactagatggacctttgtcagcagcattatggtttagtaaatttcagtacagaaaccaacagaatactataatctcatcacaatcactttatgaacctttctaataacatggaaatgctcaggcttaattgctaaatttgaaagccagaattaaaatgtttatatactgttttgaacgatgtttaaaaataacagcaactagaatgaattctaacaaaatgttaattggctatctttggtcatcagattacaaaaaaatattttattttttctttctgctttcccacgtgaacgttctacaacagaatgtattcatttaaaaactgttaattttgattatttaaataattctggcatcaggggcagatatagcaggcaagccatgtctaacaaaatgttgctcttctgtctggataaaccacacattagagtgacaataaattctattttcgatggaagcaagacattcctttgtcagtagtaaatcactctgttgctaccccaccccaccagcattataaatgcctctctccttggtaggtgtttctcctggggctgcattccacaaccccatggcaggtatcaagttctgccattcctttgaggatccatccatcctgaagacagttgttgcttgaagcaagaagccttgtcagccccacctgctccatcaccccacccctcacatcatatttaccaacgtattaagtatttgatgacgggatgtgcttaaggccaaagatgacagctaggcccactcttctactgctgttccattacccttccacctagaaggtagaacatttttgttgaataatacaactcaaataattccagcccca

SEQ ID NO: 49898 - DNA, 1865 bp, Bovine  19866881171424
  misc_feature (1)..(1): n is a, c, g, or t
ntgaattgctgctgcctctcaaaggctcataaagtgggcgacaaatacaggcgtctgtgggaaatgtccacgttgggcatggctctgagaagtgcagactggagcctacatgcttgctgcccctgagggggctaccagggatggggtgccttctggctgagggtcgctaactcctgcagcatgtgtgcggtgaccgaagccctgtgattcccagatcacacctccctgtggctgggaaatgttgctcgctccccacttggcctttgactttgtggatagtgttagtcgctcagtagtgtctctctgtgaccctgtggactgcagcctgccaggctcctctgtccatgggattctccaggcaaggatactggagtgggttgccatccccttctccagggatcttcccgacccaggaatcgaacccaggtctctggcattgaaggtggatgattttgtggaggtgaccttgtaattatttgaggacttggatgtctgtgtgccgttagagtctttgcttcctattaaagtgaaaacatttatctggccaaatgaagccaccctagactattctaaaagcaaatgtcctttagctattttgtgtctgatgtttgtcttcctgtgttttctctcttatctggggactttgtggatttcctaaaaatcaatataagaggctgaaggaagtcagcactagctactcagaagagccacattaaaagagaaaaaaagagagagagagagaagtaaaggcaaacagctgcacatttcgtgaacctctatgtgcctggccctgtgttagtgccatgaaaagacagaaaataaaggcgggcacaactttcacggttctcacaggtatctgagagggcaaccagcgaggcaaccagaaggatggattctgatagaaggacctgggtttaaacttcggctctaccatctgaccagttaagtatccaccctgagcctcgttttcctcttctggaaactggtgataagaaaggcatcttcttgagagtaagatgaagttatatgaaatctctttacatctgaaaggataagctcggataagcagtataataaagtgattatgaataaggactcttaatttgacttgaaaatgaaaatttgtgtatataataaacttacaaaaaagtaaaaaaaaacaaaaaacacctcataaattgttttcaattcagatcataaaacacttgtttcccgagtatatcaagaatgcctacaatttaataataaaatcacagtttatttttaaatagttcatctcagtagagaaccacacagaggatatgaccagaaaattcacacacacagatgcacacacatgtgcaagcacacacacagggagaaaggaaggaaataagaaagcaaatggtttccttgaaaaacaggaaaagatgcccagctttattcataataagagaaattcaagttaaaactaagctgacacttatttccaatagcagttagtaaaggttctaaaggttttgcatacagagtccataagagtggggcaaggtatccagcagacagtgttgataaggaatttggcaaaaaacatcaaaattataaacataaacatgtgtatccttgactctgcaattctgttctaggaatgtattctgaagctgcagtcacacaatgataagtctataaggcaaggctgttcacatcaagaggtgggaaacaatctgaatatccttcagtgcatgactcattaagtacattgcggtgtatctatacagcataatacagtgtatccacaaatagattgtcaaggatcttagagctgccttcaagattgaaaaattaagtaaaaaaaatcaaggtgtatatttacattcacacattta

SEQ ID NO: 49899 - DNA, 1542 bp, Bovine  19866881215167
  misc_feature (1)..(1): n is a, c, g, or t
ncttgccttctcacctttgttatgtcctggactctgttgagcagggccacttcaaggacttatttcatacaacccatgcagttaaaccaggcccagtgctcagaagcttcctgcattcggtttaatcctctgctgctgctgtcttaaaattatgaataatttctaaacaaggactcctgcattttcactttgcagtcagccccctgcataaaatggccagtcctccaatggagaagtatcgtcagaggtagattttttcctaaacctgaactccattctctcttagcctccttcagcagatggcttagcttagaattgggaatgcacacagcatgacttttgatcagatatactggagtgctggtgtggagcccacctcttcacgcccaggtgaccgggaacatatttgctaacctctggaagggttcctcagctgttagaaaggtctaactgtgcttacatcattcacaggatgtggtgagtatcaagtgttagggtctgtgtgaaatggcctggcacagtacagacactcagtaaacattgcttgtccctttggccccttcactcctggaagtctacactgattctttcttgtcatcttctctccccagaacagcgcactccagctggagttaaggcttggttttgtttttgatggaacaggtctaaggcaagagttctgtccataacctgattccttgtgacttgaaagtcatttctcatcctgttcagagctctgttctgaagaagagatgcatgaccaaatagtggttatgatttctgcatcacaggaaaagctggctttacagaactacctactgtttggggagcctctaaagacagcttctgatggaaatatgtctccaaggagtttgcccggtaataattagcgtaatatgttgcacttttgcaatgcctttttctccaaggatctgcagacatttggcaaacaaccattaatcacatcccgctgccttgatgtcaattaactgtcgggctggtctacttgtctccccacctggatgtagatctggaaggtcctgggtcctaggcctgcttctgctccagacttttgtctggtattgaacaacttttctggacctcgggttacttaagatgtaaattgaggttaataatttctatttgatctcagaaatcctattaagacaaaatgcctccccgaatggaaacacactttaaaaagtagaaataacttcccaatgcaagggatggcaatattacatttggacagttgagttcaagtttaagatccagcgctgtaccaaacaatagatttttgtaggcactgaaatttcctgttgctgaaactggggtcaatatgtccaagaggcagctgggaaattgcttagaacactgagagcataattggctttataataatattctgcaagcagcccacttgccctaggctcacaaaatactgagcaggtaccagaggctcaaagaattctcaaagaatttttagaacttccttaatcatccccatgtcagagagatttttccctcttctgaatttgtata

SEQ ID NO: 49900 - DNA, 721 bp, Bovine  19866881272691
  misc_feature (1)..(1): n is a, c, g, or t
ntgaatgatgttttaatacaattatgaaaacagttgtgacctttcaaacttccaagagggtctcagggacccatggggaccacccttggatccattacttggatccactgtgtgtttgcagttacacggctggtcctctcgttagcttgggaactcctggaggccgtggattatgtctttttcgtctttgtctctcttcattgccttctaactttgctccaaaataggcattcagtgaaattttgctcttttagtgtttgcaaggcactgcagcaaagagaacattgctatctttctggagcctgatttaatctagggaagtcactgagatttagcattttgtccagaactgatcaaccccctgccccctaatcctcttctgtggtgctcaacaatttgaaaactaacaaataataaaaatgaaaaagacaaaaggagatatgaatgtttcacctagcacttgtttggactagattttcacaaatcaagtaaagtttctttcactgccatagcaacgaacctgaactgttcattccttcatgctgctcctccttcgtaaggcactgaccacctacacttcagagtaggctttcagtgaaatgccctcggcaagacccacgcatggtcaaaaacccacatagaatgagtcgctttcagcggaaggtgcatggctgagcccagccaggaattctctctgacttgattacccccatcttaaatg

SEQ ID NO: 49901 - DNA, 757 bp, Bovine  19866881300201
  misc_feature (1)..(1): n is a, c, g, or t
ngagtataaatacccagacacatacttcataatctttgaggacttggcagctggggtggaggtagggtccttcttaaaattttaaaaagttgttgattaaattttaggccattctggatttgatccttagagtagctaaacccctaaggatatatccaagcacacacacacaattctgggcacagtctgaagaaagacagatttaacaagtaacatctagttagttctttacttgctgaaggagaaagcaccaagctggtctcataatgtgtttgactaggctttgttacagctacaaatgagactgagaactcttttaattattaggccaatcctggtgttagcagtgcacttagttgtttcaaagccaaaaaagttacaaatgcctaaatccaatttctcagtaaaacctacagccccccttctaatctctttccatatctgttgctaaaaatactttcatgagatattttgcctttgattcacgttttaactttataacctaactgagccacaaaaccctggacaatgctcattaatataataagagaatgggttcttcgttaatgcgtctctgtaacgtacattcttaaaccccatgtcacctgatacaccatatgttttgtatcatataactcatgtatatgaatgcagagagctgccatttttttaaactaaaaaatattaggagttcactgtcttttggatttcttttaaggcctttcagtacagccaagctgaagtaataatatctatg

SEQ ID NO: 49902 - DNA, 1413 bp, Bovine  19866881306859
  misc_feature (1)..(1): n is a, c, g, or t
nttagaatatgatgagaagcacattcactccagagaactccagaaaggctcatgtactatggaagggagtgggtgaagtgtttgcccaaatcaagaaaagacagacaaaaactgcatgataagcaattaacacccctgatcccaaactgcatccttcatactaagcatccatgcatccattaaggaatgccaatataggcacaggaagaagagggtcatcatactgagaatagagtcaatgaaaatctgtatgatggtcagcaagacactcagctgcctattgttactcagttccaagaaggctggcaatcaagccactaccacaagcctaccgaaagaagggtgatgactccatcttctgaaaaactgaatggcctccgaaactctgcttataataacgtagtgcccgaggtgcatcattacaaaattgcacactataagaggacagtgtcctaaaatttccagaggaaaatatgtcaccgaaaaatgactgagaatcaaaatggagtaagacttacagcaacagtgtaaaatgaagacaacagagcaatgtcttcaaatttctaaaggaaaatgacttctaaactagcattaaatatcaagccaaaccatcaatcaattaggaagttagaataaagatattttctaagtgcaacatttcaaaaaagctcacatcaaatacatttctctggaagccaaaaagttaattcaggttctcctgtaacaccttagggaaaaacgtgagtgaatgttttggccaactcaatatattctacaccaaaatgtaaaaataaaccagagaagaaaatggttgattttttatggacttatctacatgaattagtttcataaaaactaaaaggtgctctgatgacaagaccagggttagaataatggctaatggcttttaggttttaatgagattggtaccagaagttgaacacttaagcactcattctacaaacataatatacagaaccgcctaaagaatgctaggaactgttagctttggctacttggcaagattcctgttactgttgaggtaaaccataaaaatttcttgcctgaacagttaccttatcttcctacctttaatttctcacatctctaacccattcttcatagactctgcagtgctatcttcctagaacaaatgtcaggtcatgtaatgatcctatttaaaaattttataatggctcttcattgctgaaaataaagtctaaattgcttagcccaacagctaagacctaaaagacccataccaataactgttcagtcgcatatttcactgctgctactctagccacatatgaccacttgttgctattcagacacaagcaaaagaagttgattttctctttaaaaaaaaaaaaaaaagctattttctatacgtagcatagggcataaatcagt

SEQ ID NO: 49903 - DNA, 1096 bp, Bovine  19866881324542
  misc_feature (1)..(1): n is a, c, g, or t
nggtgtgctgatagagtgtgatgcccagatgaagaaagtttattctcactctttatttttggcatttcaagagaaaaaatgataggtgggagtatgctcaatcacaggaggttaaatagattgttgaaaagactgagggcaatgccacaaaagagattggtgctggttgcatttataatcatgaatcacacaatgcactcacacatgcaagccttatccatgaagaaagaatccaatagttgtcttccaatattgcagggattataaagcataagagtaatgggacttattctgcataacttcagagggcagaaccaagaacaaagtttagaagttataggaaagaaaattccattcaatataagaaattctaagcatctcttaaatttatgtaatcttgcataatccacatatattctcatgcgcatcatctcactttaggaagaactcctgaacaactggtgataaaatgaggtgccaggtatgtttaggcagagactaaggcatcacattagactagatgaactcgaggattgttttcaactcacactgtgaatcaacccagagatgcttccaaggcagtttctaaactgagaaaaaacaggctacaagagcagtagcaccaccatcaattcatccttgtctgtctcagcttagacttttcaaagtaaaaagaaaagaaaatgaaaagataaaagtctgtgttcatcatatgagaatgtgttgagttaataccttggttctttagggtattcaagaggatattggctgcttctcttctggggatttctgtgttgagtaggaagatgaaccacatgacctctgagttcccttccaaaacctaggttctatgaaaatcatgcttcacccttcactttgttactttttaatctggctttgagaaagtcattttcactttctgagcctcaactgacttttctattaaatgagatgattgaagtctgatcttttcagggaactcatattctacaataagattttatgaaggatttgtggaagcttcatccttccacattctatcaaacaataattgatcttgagtttcggtcctgatgagatcgtgatggcagtgcag

SEQ ID NO: 49904 - DNA, 1278 bp, Bovine  19866881415398
  misc_feature (1)..(1): n is a, c, g, or t
ntgttttcacgtcttattcaagattctgttctgtggccttatgttacgggccaccttgggtccgttatggaaacatgtgaacatatattaaaaacgaaagtaaaatgggcacatagatttaaccagacttgtacacaaaggatcaaagaaacattaacctctgtgatgtcagagctgttgggcagagaaagaagagttgttgaagaatagatgcataaaaggtgaggttaggaggagaaatctgaaaactttggagtgagccaactttgacaatagcagggaaataggatgggtttttcattctctcaagttcttttcactttgctactatgggacttaaaatcaagtcatttgaccttttgagcctcagtttctttaattggatactttggaataaataatactcttacatggtttaaattcataatgttacaaaaaggaaatcagctgaaagattttccttccatcctttctctaaacagttcctttcctggaggagacagatcttaccagtttcttgagtatccttttagaagtttcatgcatataaagtatttgtttgtttttaaatgaatttctatgtattaacactcaaagttaatcaatcagtttagttgagtttattttacagaagacaaccaacttctatttaattgctgggcccaaattttgcaacagggaacctcacattcatacccattctaatttaatcccagagaaaactcacttgtctgttagtcatcagcaaatgtacattgtcagaattatgagtcgatgcaagaactcacaagcagttatagaagcaggagaaccttgtttctttttggtgtttgttgggggcattattgatgggctgctacactgagttgtggtccagtgttagacctttaaggttttagagcctccaacccaggtggtatgtgagtggtaccccgccagctcacccacagctttccgttttaggttctcccatagcaccagccagtgtgggcaactgcagtgtgggcaactgcagccctgaagcagtgtggcccaaaacggagcctctggagatggaagtgcctcaggcgcctatacagcctttctatagctctccagagctgtggatcagctcactcccaagtaagtaagccctcggtttcctaactggatcttcagctcctattatagtccatttcctgccccaccttctgcctccatttctttgccttgtatagaatagtcccccaggcagcctctgtgtctggttcctggctggctgatgagtcactggggaag

SEQ ID NO: 49905 - DNA, 1227 bp, Bovine  19866881463683
  misc_feature (1)..(1): n is a, c, g, or t
ntgttggcctggcaaaaaaaaaaaaaaaaagtgtttcctgctgcaaaacgctttcaataaaagattgaaatttctctcctagctgacaagaggcatctcccgatcataaggataggagtctgaggcctgcggtttctttagacagagaacttgggcaagggctctgaggatggagagtgtcaaggagtttctcagtacatacttgctctagcgtgagtccacgttcaacatgtgatgccccatccatgacccaactcttgctagtggcctcaagaaccgtttgctagtcaccgcctattttcccattgactcccttgggcgtattttagatttcccaccctagaggaggggaaattgaggttaccaaagttgtgacttaaaaataactctttgtatgtacagcgttctaccttctcaattaccatgatatccattaacactttgagatttaccataatgctgctaggtagggggtaaactcagcagggaagctatacccagtttatatctgtgtgcccagagatcagaaaactgcacattttataaaactgagtcagaggaatggagagatgtatcatacctggagaggtggggaagtgaatgaattctcatcttagagctgagaggctcggagagtctaaatggcttgcccaagactgaactatacagcgtgggagttgtaaccaagcatccacactttcaaaaactcaaccctgggctctttcaacacaacacgttgtctctcttcaaggtcacgcagtaaactagatcagagcctggactcacagaagcagaaaaaggacacgtttttctctgttggggctgtctttctgatggtggagtagactgctgttgggtatttgaaggaccttgagggtctctctatctgaaggaagcttccagaatcctttggcagaagagccacacagaagccaggccactacacagtaaggctctccctttccttgtttccagggatgtttgctcgagtgttggcagaaacacttgctgccattcaatttctcagacatgctcaggccccaagccccagtgggagaagtgtgtgcatcaacacgccaggggaataaagtcatggcagagtagatttgtttggacaggcaggcttagcagtctaacagggtgtgcaagacagccatgctaccctgcattttaaaaatgagctacttggcaaacatgtcaggcagccaggggataagtctatccagg

SEQ ID NO: 49906 - DNA, 1783 bp, Bovine  19866881749188
  misc_feature (1)..(1): n is a, c, g, or t
nattgttggagagcagtgttcctggcctcggcccatgaggtgccaggatcacacccttccgtggatgacacacaaaaatgtcttcagtcattgccaggagtcccctgagaggaaaacgtccccagttgagaaccactgttagagaagaaaaagaatattagtattagtcccttatatttttgtagcttttcagtttaaaaagacttctgcatgttttaactcagttgagaaaaagagggaaaggattaaaaagattagaagaggaaatgagaggggaaataaaaaaaaaaaacagaaaggagggagggagaaaggggaaggagtgaatgcaaagagtctgaagagacaaagaaagggagacgttcaactaacgaaggagttaggaacaggtgtgaaccttttcattggcatgtaattgcttcacgacgctgtgttagtttctgctgtctaatgaaatgcctcagctctaagtataacacgtatccccgcctcttggatctccttcccaccgcacacccacccacacatccaggcagtcaaggagcgctgagctgagctccctgcgctgtgcagcagcttcccacctgccatctcttttccacgtggccatgtctacagcgaaactgttagtcactcagctgtgtctgactctttgccaccctatggactgtagcccaccaggctcctctgtctatgggattctcaacgcaagaatactagagtggactgtcgttcccttctctaggggatcttcctgacccagggatcgaacctgggtctcctacattgcaggcagattctttacagtctgagcctccagggaagccctgtataaatgtcaatcctaatttcccaattcgtctcaccctcctcttccccgcttgtgtccacatgcccattctctacgtctaggcctctgttcctgccctgccaacagtacagatgagcccgtttgcaggtatgtgctcttatgcaatctcccactagtgcacgcacgtctgcatgtcccgctagcactccatattcaacatgttcaaatctgaagacgcagcaggtcccccgcagacatgagccttctttgttgctgaagtttctgttactgacctcaccattccccgagtcacccaggtctggaaatatgtgtcttcttaaaggggtacttccttccaaccctccctgctctaacgcctaattagttctaaggcttgctgattctacgtgttacctccctcgggtcaggggcttcccttgtagctcagtcagtaaagaatctgcctaccatgcaggagacccgggttcgatccctgggtcaggaagatcccctggagaaggaggtggcaacccactccagtattcttgcttggagaatcacatggacagagaagtctggtgggctacagtccacggagtcccaagagttggacaggattgagcaacgaaaccaccaccctcagggtcagagccatacttccacctgatgtgagagcagaaagaatcttccacctagcccatcactcatttatttcatggatgaggaaactgaagcccccggaggtctaggccatgaccttggggaggtctagggcatgacctcggacagattgctctgagtctggtttccttgagtgtaaaccagggataataccatgcacctcatggggatgctgtgtccagacctatcactgggtataccttgtctcatgtcagttacaggttggaacccggcgctcttcctcctcagtctacccccagattacggtcctgtccacttgaccccatcatc

SEQ ID NO: 49907 - DNA, 1110 bp, Bovine  19866881889656
  misc_feature (1)..(1): n is a, c, g, or t
nctcgaaactttgagagcacagtcgccaaggtggagacaaatgaacgctgagtggcagagactgctttggggaagatgagatattagaatagagggctatctttagccaggtactattctgcagattcttagccccaaatctagcagcttccacttatcacagttattggcagctggacttggaccaaatgcatcttactgtctagatacacaacagctgagaagtcttgaaggctgtaggggatgagggtcaaggcttggatcttacaaggagcaacagcattagtttgtgcgactccctctgtgtctccccctccatagaacaacaggccttcagacgccccttttccaagtaaggagccaacccagagccttctttccagtgcacgtccatccatccacggggcgcgcgtcactcccctttctggaaccccttggattgatggtctcactctccaggaggcatcaccgcctcattagcagctctgtactcactgttccttctttcccattgctcttaaatagcttaaaaacacagtattcttagcctaagctcagctatacgaaaacatctttcccgcccacccctactcccatacactccatcctaacgattcagttccatcttccaagccacgtggaaagctcagggcccccgtctgaaaccccactgaagttccacttcattccctccttgatcgtggagaaatctcaggacctcgctgcccctgtgcactgggggcctgactggacactgagctggggcggggcaggggcagcctgctattgctgcctcttgcttctttgcctggaaatcttccccctcctctctcgacttctgtaattgaggccctttcagtggaggaaaaaaaaaaaaaaaaaacaaattctgaggaggttgaaacttcagtattgttttcacttgcttctaaagtgattcctgcagaacaatgcctggcttttagttcctgctctgtggtgtggtcttccacaagactgatggccttcctgatctcttgggagaaaatttcatagcttgggggagtgggggagcagggcgggaagaccacggatggaaaagttcttcctaaaggctgcacaaccttctgg

SEQ ID NO: 49908 - DNA, 933 bp, Bovine  19866881965020
  misc_feature (1)..(1): n is a, c, g, or t
ncattaaaaccctttccaggaaaacaaagagaaggacagcacaggcaaagctgaatacatacctcctccctcaggctaggttgccctgtccagcttaaaccaagtctatttgaggaacttctcattttagtgaaagggggccaagaagatgaatgcaacagcattcctaatgcaggactcaatctaaggcccattcaattatgaagagatactctaacttttataataaatgtaaatgcaaaatctcaggagtgttcttacctctgattgaggaggaagagaggcaggtggcatcacagagagggggaggagccatttttaacttaactttcagaatataatgatacacttttaattttaaatgctattcttgctccttctgaaacctttaaagaccacagaatgacaaaacataaagtgaaagtctgtcccatgcttccagcccctggaagagacaaatgttaacagttggatgtgtatctgtccaacactccagtgtctttaaaatgcgttattatatacgtgttagtcagggttctccagagaagtagaaccaatggtgtgtatgtgtgtccagatatctgtatctttatctgtatcacctatccatataatacaaatgagagtgagacggggagagagagtaaggaactggctcacatcattataaaatgtccttagatctgcagttggcaagccggagacccaggagagctgatgatatagttccagtccaagtccaaaggattgagacccaggagagctgatggtgtaagttccaatccagaagctggcaggctggagacccaaggagacttgatgtttcagtttaagtccaaaggtaagaaaagacccatgtcccagctccaaggctgcaggcaaaatgagtttcctcttgcttagcctttttgttctatttaggtcttcaagtga

SEQ ID NO: 49909 - DNA, 516 bp, Bovine  19866880381013
  misc_feature (1)..(1): n is a, c, g, or t
nactgaaagactttgttacagagagaaaggctatcaaatattctgaacagataatatcattttatgttagctaaaatttgtcagcaggtttaaacttcagctcttgcccaagttgtctggacttaaagttatgaaggctgaagggtccattagataatgactagtcatgtcggagctgatggtatcacttttgacccactcctcacagctcttggataaagcgaccctgtaatcataggcttagccttcttcaaggcagcacacagagccactaccagaaagatggaggaaaaccagaagctggggctgaggtgggggttagttcatcctgctagttctcaaggaaacttttccaaatcaaaaactgcaaaggtcacacatcagccaacaccagagaagatccacagcaattcaggaagtgaagatgaaaactataatcaaattctgccacctgagtggcacattgcctaatgcacagataacaaaatagaaacccctaatcaagaagtcagcatg

SEQ ID NO: 49910 - DNA, 1104 bp, Bovine  19866880403016
  misc_feature (1)..(1): n is a, c, g, or t
ncgactctgtgcgaccccatagacggcaggcccactaggctccgccgtccctgggattctccaggcaagaacactggagtgggttgccatttccttctccaatgcatgacagtgaaaagtgaaagtgaagtcgctcagtcgagtccgactcttagcgaccccatggactgcagcctaccaggctcctccgtccatgggattttccaggcaagagtactggagtggggtgccagggccttctccaaaaatgtctaataggtaaattccaatagccaaaactcttctctggctaaatgaacaaactcttttaatttagtcttcataaaattaaacactacaattgtttttcacttttaagattcagttcagttcagttgctcagtcgtgtccgactccgtgaccccataaaccgcagcaagccaggcctccctgtccatcaccaactccgggagttcactcaaacccatgtccattgagtcggtgatgccatccagccatctcatcctctgtcatccccttctcctcccgccctcaatctttcaaagcatcagggtcttttcaaacgagtcagctcttcgcatccatcaggtggccttttaatattaaattttagaattttattaaaccaaaattactggatcaatatttttaattacttatacagtactatttcaaaatttcctttttaaaactggctcatggctttaaacttgttaatgtatttgctgtaagtactttttacaccactcagtttcttcctttaaagtgaacagtgcaaattgccatggataggcgataatgaaaaagcaacaccaattattaattttgtgtaagttaccctccactcctgagattccttggaggagaagagcatgtctgcatttccccatgcagtgccacaggcacaaagtgagaggaactaaacaaatgcatcctgagggaaagaaaacgcctgaagcagcaaatgacccactacatacctcgctatgcaggctttgatgttataatttgttaatttccaggaaaaaaaattaccaatagttttaaggttgttctgatagacacatttaacttctgtaagtttttgatcacaaacaacataca

SEQ ID NO: 49911 - DNA, 1679 bp, Bovine  19866880434056
  misc_feature (1)..(1): n is a, c, g, or t
ncccaagcatccaaatctgccgcatacttttggttatgaataataaccaatgaatagagatatgaaactagaaacatataggcttatccaggtataaagcaccccttcttgaacagaccatttagaaatcattatgcaggccaattttcatgtagtttagtggcataagcccttagtatacttttcactgattattaattataaatctaccttaccatttttataataaaagttgttttaaaatatatattagtatataagataaaatgcaaattgtttcttaattttacttttgttctctgtgaatctctaattcctaacttttaaattataaaaactgtttattttctaaatgacaaagtattagtttatttcatctataattatgatctcagctagttagaattgaaagaatattttccagggtgctgtttataatatttttctaatttaactttattgatgaaactaacttgaccaataataaaatacaggtgtgtcttgattacctgaaatcctcatttaactgggtttatttatttttttttttctattgcaatttcatattctaagaacaaagtctcgttgtgaaaatgtgctaaaatttaggacggtgttatttttttcaaagctacaagtatgacttctttccaaccaatatgttctaaatttcaaggaggaaattgacagaactttcataaaaccaaagactggcagaaacaaagtaaataatgatgaaactgagcaatagatcacccagacggagtgtcccctgccagaaagaatgtggcatttcaccctctgagaaacaaatggacactgtcccccagaaagccagggctcgcatgtcagcatcactcacttctttatcctttcgccaaaggaagccacttcatctaggatgttctggacactgatacatacctcctggatggcataaattttatttataaatccctttttttcactgtcctaaaacacaataaaaaagagattctatgtgagtaaaggtatctatatccttcagggcttgaattcttttcattgtcaacacttacattcttaaacataaatgaacttcatttttccatggatataagtggatgcatgcagcccctgaaaattttagacaagaagggaggtggagcaggaagagcactcagcattggagacctgtgtcagtgtacaggtggctgcaaagcacaagactcaaattctgtggctcttgccctgatgaacagaaacatttcagcagggggacaggaagcgtgaagttgtaagagggaagtcaggtctcagaatgaccaaatctggaatctctgctgaccctgggcccaccatgacatgatacttagcagacccagttttctggcctaccacccacagacctaagttcggtcttggctccagattattttaatagcagggaatgctgggtgcaaataagccctgtaagcaatgaaaactgcacacaaaaaaaatttttttttaattaaaaataataaaatcaactgaaatccagtaagtggacacttctagacagcaccttagggacagcaaaatacatagcctgggccctgtcttaagaatagagctacatacttcatgctctattagtcagggttctaactaaacattttccccctattgtatttattcttccttttaaaacgtgtgct

SEQ ID NO: 49912 - DNA, 2119 bp, Bovine  19866880459690
  misc_feature (1)..(1): n is a, c, g, or t
nttacagcagcaatagaaactaaacactttaaacttcattttctatacttctccaaaaaaaaaaaaaaagaaagaaagaaagaaaaatactgcatttcaaagccctaaatctgagctcctaatttttccttattatcttagtcctactgtgctatataaatatggctatatgatttttcatttaatgtggaaactaaaagcagaatctaacaaaacaaatatttttattcaaattgccttaattttgtttcagaaagcttgtgcaaatcgagtgtgagttagaacccatctctagtgcagtgggttactttcctatttaggaaagtattattattattattcattggtgagtagagcaccaaagcatagttaacttcatttttcaacagatgaaatccacttcctcacagcattcattctatttcttaaaatgtttcattctacaaagcatggggacacagggtactagccttatttaggtcacaaaccctttcagaatctgaagacagctgtggattttctccccagaagaaaacacataaacacatatataaataactttttgtgccatttttttttgcaacggaaattgcattattttccagagactataaattatctttcataaagtcttatctctgttgctctcaccacatttctcttgacattaatgcctattttcctcaaacacctgagatatatgtaaatttttcaagtaaaaataaagtttaattcagctcagaagtaaaattctacgagaatgctgatgtttggctttgatattgaaattatggagtggttttttttgacacagcaataggcttgttatttttgacatctgtttgactatgacttttcagtttcatggcaataagtgcttgaaatactcacttggcagaagaaaacagtaacaaataaaatgggagctgccgtggctttattagatgagggttagacacagtgaaattcctagagttctccaaaattcttgttgagttcatgctttgaaaagtctgcatcattaatgctttgtcatttttttttttaaggatcaaatattcatggttgcatgttaagttcatccgaggcaggattagctttgaaagggttatctaaggactccagctgcctgtcggtttctacctgtaaacaaattggaaagctttgttactcattccagcttgcggaagcccttctccagccttgaactccttgggtagctgtctcccacattgcagtgttaaagaatccacctgccaatgcaggagacgcaagagacacaggtttgatccctgggttgggaagatcctctgaagaaggaagtgggaacctactcaagtatccttgcctaggaaatcccatggacagaggagccttggagggctacagtctgcgaggttgccaagtcagactcacctgagcgacctagcaagtagacacacacatattgcctcccacatgcccttccagagtggcaactgagctgaaaaaaatttaaatgaaaagattgacctaggtaacttggcaagaatatccatcaagtacgacagaggatgagatagttagatggcatcactgactcgatggacatttggagtttgtccattggactcagtggagtttgagtaaactctaggagttggtaatggacagggaagcctggcatgctgcagtccatggggtcgcagagagtcagacacgactgagcaactgaaccgaactgaaagtgaactatgactggactctttcctgttgtgctattctaatagttggatttccgtggcctcaaaaaaaaaaaaaaatgtggaacttgcatttgaaggtcaaccaaacatttgaagacaggtcctctggaaagctagttaacttctgttttgcagcactgaactgactcttctactctcatttcttgacaaaacttcttaaaatagcagtgtgtcagccctggctctcaggaggttgataacgttcatagaaatagacacagttttttcgtgatcgctggcagagccgttgacatgggctgacaccactgcatgttgagatgaggagcgtgtttcttcaccaaagcagcagaaccagatgtgttgccaagcgtcacagatgctccatctgagcg

SEQ ID NO: 49913 - DNA, 1252 bp, Bovine  19866880479141
  misc_feature (1)..(1): n is a, c, g, or t
natttatgttgctttaaaagagatacatctgtaatccttgcctcacagtggcttttcagtaagcctgtgtcttctggcataatgaaaaataatgtgataatacagtgacatgttgctgtgactccgggctatttccatacaggcagagcagtctcatgggtcctgtggtggaatgagattcaggagacagagattctaatctgagaaatgcccctgatattgtatgtgacctcaaaacaagtgactcaacctctcagtttaagttctgtcatctgtaaagtaagcttaattaaacttgccatcatagagacattatgaagtctagctaattaaagcccattaaatgttttgaagatataaagtgcttgcttcacagtcataaaaataagccaaaagtagagtgtccttttattaaaatactaatttttgtacagtcatcacacacaatgatactgatgccctccagagcctagttgtagcggtaggtttgccctgattgactcttcctctctcatttggttagtgactagttgtacttaagacagctgagtaagatgaggtatctgcctgtgactatcaaacccagtaaaactaagtggctactctggaattgaaccaatgatctaggtctcattagcaccatcagctagtcaactgagctaattggattccacattgataataatgtaacagtacatggtttgacttatttttttttccaaagctttccgtagattgaatttcaataaccgtaaaaaattagtatgagtaattagaggcaaagacaataaactggactttattagatgtcactaacatccaagggattaactcttgctgtccctggcaggcctgagtccttaataggctcatgactgccccccaagaaagtgaggtttccagatgaggagactaataaagccaagaccctcctgatgaggtggggaagggtccttgtgcatctcttgcttggtgagagtctactggcaaggattagaaattgttcgagtgtgtctgtcctttggaggctaataaagtgacgatgaagatgccttgtgctacagaaaacagtcctaagtactaaataaaaaatgcctcgacactgagctcataactttgcctcttgggattgattatatctttcggcagagaacatgaggcaagccttaatgaggaactgatattaggtgggaccgtttctgtaattcttagttctttgaactttcaggcaaggttaatgtacatgctattt

SEQ ID NO: 49914 - DNA, 2898 bp, Bovine  19866880500680
  misc_feature (1)..(1): n is a, c, g, or t
ntgctagtgtgtgagatgagtgcaattgtgcagtagtttgaacattctttggcattgcctttcttagggattagaatgaaaactgactttttccagtcttgtagccactgctgagtttttgaaatttgctggcatattgagtgcagcactttcacagcatcatcttttaggatttgaaagagctcaactggaattccatcacctcccctagctttgttcatagtgatgcttcctaaggcccacttgacttcacattccaggatgtctgaccctaggtgagtgatcacaccatcatggttatctgggtcatgaagatcatttttgtatagtgcgtctatgtacacaatcctgtattcctgccttgataattccatggacagaggagtctggcagtagtcacggactacagtccatggagttgcaaagagtagaaaatgactgagcaatcaacattttccttcattttaagttaaccaaccctttgtagtggtagcagtgatttatatagaattttctgtagatctgtttcttgattacccttaggcactgtgttacatggttgaaaagtacagaatgtactaccaacattatccacgacagagactcctgatagctttcatgaattgagcctctctgtaattttgtgagctttctgtggctctgctgcaatgccctgcggtgtggtgggtgaaggcacagtctctgaacaccagttttgccttaaatcctgctttgccaattatgaggcatgtaacgtggacaaatgacttgatttctctgtcttaccttatgcctctataaaatggagatgataattgtacctgccacacagagttgttttgaggattcagtgagtgaacatatttaaagtacttagaggcagtatctggaacatgttaaaaattgatgtattttctagtttgctgtggttgttatattacaactgaaaatcaccagaagccaagaaattttactgaggatcattcttggggcaatgggcaaaggaaagagggttagtcacacttcattcaaatgtcactagcaggaaaaggccaactgctaacaactgggaaattgccagaaatttgttcctttgatgtcacaagtcagacactggttaaggccacgtggcctcagtgaggtaatgccaaaacaactgccttgggtttttaacatcaataatccaaaataatgtcttatacatttaaaatctgaggtttcttccttcaaatttagaataccccatcttaaaaataaaaccaacaaacattaccttctcaagtccactgaaccttagccaaacttcctagaagcttgcagcctatgaagcacatactataaattaaaagtttactatatatttatttattaaattttgctattttctgacactcagtgagttgtatctcatattacaaaaaagttgtttctgtatatactctgctgattctttttaaaataaatagaaattctggtaaatcattttcatagttcagttcagtggttccgccatgtttgactctttgtgaccccactgactgtggcacgccacgctcccctgtgcatcactaactcccagggcttgctcaaactcaagtccatagagttggcgatgccattcaaccatctcatccactgtcatcccccttctcctcctgccttcaatctttcccagcatcagggtcttttcaacaagtcagctcttcccatcaggtggccaaagtattggactttcagcttcagcatcagtcttcccaatgaatattcaaaactgatttcctttaggatggactggtttgatctccttgctgtccaagggactctcaagagtcttctctaacaccacagtacaaaagcatcaattcttcggtgctcagccctctttatagtccaactctcacatccatacgtaactactggaaaaatcatagctttgactatacagacctttgttgcaaagtaatgactctgctttttaatatgctgtctaggtaagtcatagcttatcttctaaggagcaaacatctttaagtttcatggctgcagctaccatctgcagtgattttggaacccaagaaaataaagtacgtcactgcttccattgtttccccatcaatttgccgtggagtgatgggacagatgccatgattttagctttctgaaagttgaattttaagtcaactttttcacactcttctttcacattcatcaagaggctttttagttcctcttcactttcttccattagggtggtgtcatctgcatatatgaggttattgatatttctctttggaatcttgattccagcttgtttttcatccagccaggcctttcagatgctgtactctgcatataagttaaacaagcagggtgacaatatacagcctgatgtactcctttcccaatttggaaccagtctgtagttccatgtccagttctaactgttgcctcttgacctgcatatagatttctcagaaggaaggtcaggaggtctactatttccatatcttgaaggaattttccagtttgttgtgatccacacagaaaaaggctttagcatagtcaataaagccgaagtagatatttttctggaactctcttgcttttttctatgatccagtagatgttggcaatttgatctctggttcctctgcctttactaaatccagcttgatcagctgaaagttcttggttcatatactgctgaagcctagcttggagaattttgagcattactttactagcgtgtgagatgagtgcaattgtgtggtagtttgaacatttttggcattgtctttctttgggattggaatgaaaactgacctttccagtcctgtgaccactgctgagttttccaaatttgctggcatattgagtgcagcactttcacagcatcat

SEQ ID NO: 49915 - DNA, 1625 bp, Bovine  19866880521624
  misc_feature (1)..(1): n is a, c, g, or t
ngcattttacccatggtatatattcataattttatattaatataagttaatataaaattatgtaattttatactaataattttgagataaaaatttattgagtaattaatgaaacatttatcaaatgtctgctatgtctccagtactattctaagccagtactggggaaagagtggtaaacaaagcaaggtctctgccttcatagatctcagagtccagtgtaagcttaaaactttattgacagaagcagacacactttttgtttgggccactgctttccaatttgatttttagcagtacatttttaatatctatatcacattaaaatatcacatactttgatcattgagacttttttggcatccagtgtaagcgcctcattcaggtcaccatagtcccagccctggtgagaaatatctttgaaaagttgacaaaagaaagaaagaaaaagaaattgaaatcactcagtcgtgtccgactctttgcgaccccatggactgcagcccaccaggctcctccatccataggattttccaggcaagagtgctggagtggggtgccattgccttctccgcagattggggctagcagttcataataagtgttcaagaaatatttgttgatagactgaacagagaaatacataatctatgcttcatatctttgtacaactggtagaaggcctgtcattaatttgacagaactcaactagctcacctgcaaagacattgaatcaatgatgcagattaataaaagcaaatattcaaagtgttttcaaagatttgccaggcaagagaaaacatggatatctaactatcatttcaagatttggagttctccaatatcttcaagttaattttccaaaattaaaaatattattgaaccaggaaacaaaccaagaacttaatttacacatttcacaagtcagctgcagaccttatgttcaagaacacctcaaaagaggtctacagaatcagacccttcattcgcaaaacccaaacagttcccaccctgcacaagtcggtaattggctacgcacaattgctccacaaatgtgcggccagaaccacccaacacaaccatttgctttacatttggcagcaaagtgctgtgttcaagagaggctgttgtgttgtattgcagccctcgagtgacggcttttcccctcctccagtgatattttaatgttactacataaacatctacaagtgaggatgtataatacagatggttcctagggatgcctttaagcagcttcagaatgtataccacgggttacattttgctcagatgatgcttacttaaggtgccttggaaaatggagacgatcatagcacctaccccacagcgttgattaggtatccaatgagataatgtattaatatttaaagtgctcagcacaatacctgtaccaaagtacttaaaaaatgtgtatgactaataaaattagaaaagacatccagttaataatatttaaacattaatttttggaacttaaatgatgcatttattttcctggacaaaaatattcagggttctgaatgacacatacaattctgattcatatttcattgaaactaagaattacataaaggggcacaggtagagctgcggataaagattcc

SEQ ID NO: 49916 - DNA, 1457 bp, Bovine  19866880547554
  misc_feature (1)..(1): n is a, c, g, or t
ntgtgactctgcagtgagtttaccggtataaaaatgattctcagactgcagatacctgcttcagtcacagtgaaacttggtctaaattgttcctaaaaattaaaggacagaaacctttttgataaaactcctctccatggttagattaggagacttacctggtctttaacagtcagtaagctctgagttaagaagcagcttcccacacctgaccattaccaccttaggaagacaacaagtctacagatctctgaattataatactcggtctaacatttccactcttaaaccctcaatttacaggaatttaaatggagagagaagtgcatttttattaaaccctgtcatctgggtagcttaaaaagagtttgggtgataaacagctgtttaaaaacaataaaagattaggagttaatccttgtgctaaacactgttttttttaacaaagttaggctatgagattacacatctatctgtgtttcctcctctcagtgtaccaaggtcagagcttcagtctaaacaatgactagtcatacagggctgataaagttaatattgtggtaagcttgtgcttctcagtattctcacattctcaacacaaagatgggaatgatctttagtaacattttaatagataactttattatgagaaactgtgttatgctttccagttttaaagcatattaaagattacgataaagcagtgcctttgatttactgaataaaaatactgattttgtcatgagaaaattgcactgaagtgcaaataaacaaatgtgtgtgtgtcctgtcattcaatcacgtccagctgtctgtgaccctgtgaactgtagcccgccaggctgctttatccatggacttttacaggcaagaatactggagcgggttgccatttccttctccagaacaaatgtgcatcatgaactattggttgattttactctctgtttaagttcatgagagttgtgaattattttcttggtatcccttcttttaattcctttaggtattacacttattcatactctaccattattaattcatgaaattaaattggttttagcatttgagtctgattcttctatcaaaatttctatacttttatacctacgacaatgacataaatttacaaatttaagaaaagattatccatcacttttgaatttatttttagtaatcatcttgatttattttaaaagattatatattacctgaaaggtgtgtggtgttttctaatatttaaaccttttgaattaaatattaaaacatagtctttaaccctcatctagcacctatagtttccaaagctcaccaaggagaaaatatagtagaaaaataattaatttaatgttgtcttactcccaaagccttaagtgtgtgtgttacttaaccaacaatctaagattcctattaagaattactagtctccagatcatcatgcctatagataaaagatt

SEQ ID NO: 49917 - DNA, 1245 bp, Bovine  19866880558484
  misc_feature (1)..(1): n is a, c, g, or t
naagaaacaggctctcacccggatcagtcagctccatattagaatgtagcacgatttcccatctctaagcacccaaacagtttgatgtcatttattaccaaagatacttgtcactacttgaagactaaataaggaagcttccggagtgggtactaaataggaaaaattaaaataaaatagggaatcctataggagttttactcagatagctctaatttttgcaacacaggttctgatgtgtttgaaataattaccactgagtaatatttccgtttcctatacctattaataactagctccaaaagttattaagtcatatttcacaaaaagaaaatctaacttaataagagctggaattttcaaaacaagctaaacccctttcaccagaagagaagcaaagggctaaagccacaaataaggcacgttccccacctagcggcacttccaggaaacagcaggtacgttacacttggtgtgttctgatttaactcatggaacacatcagaggtgttaagagataacttccatcttctgataatttctcttggtttagcccctagcaattcaacagaataacctctctttttatccctcctcaaatctctactgcaatgtccacactcaattgcccttacctctcctggcattgggggtactagacaaccctgactggaccgtccagtgcctctcaaacactgccatttagatcattcctccacttaagaaacagaaaataattttttttttttttttttgcaacacatcccgtcgaagcacttggggctgttaggaagtgctttttaccgaatttgctcggcaagctgaactctagcaggaggttcagctgtgatcactctgggcgtgcatcacccttcccagtctgtccccagactgaactccccactggaactcccctcgccccaactccacctggggaacagctacccactccctaagacacagttcaaagcccactgcttgtaagaagacttccctgacaactgcagttcatttctctctttctgtgatgaatcttaagaataatgatggtctgcagcccgagattcacccttgacttgtttttttctgccctttcatcattgggtctgtagattcatagatggtttctctgctaatgagggcaacaccctactggcagcaattcttcgtgtgtatttttaaatattccctctccactggacccagccaagtgaaaaactgagactcaataaatactggagggct

SEQ ID NO: 49918 - DNA, 1675 bp, Bovine  19866880565547
  misc_feature (1)..(1): n is a, c, g, or t
ntgagatactgcttcacacccactagaatggctgtaatcaaggcagaaagtagtaaattgtgaagatacagaggaactggaacactcacacattgctggtgaggatgtaaaatggtacagtcactttggaaaatagtttggtagtttcttaaaagggtaaatgcacataaacttaacatacaaaccaacaattccactcctaattatttacctaacagaaatgaaagcatgtgcccacataaagtcttatatatgagtgctcatctacagcagcattattcatgctatccccaactgcaaacaacccaactgtttgtcaatgggtgaacgggtagtcaaaatgtactatctccacacaacggtgtactacgtcaataaaaagaaggcactcctgacacactctgtcatggactcagaatcacctgctaaatgaaagaagtcagacataaaggactacatttaagtgatttcactcatgtgtactgtctaggcaagtcactagagacaggaaaccggccagtggttgctaagggctgatggtgcggatgactgtacttgacgtgtgtatgtgtgttagttgctcagtcgtgtctgactctgcgaccccacgaattgcagcccgccaggcttctctggccatgggattctccagacaagaatactggagtgagttgccattctcttctccaggggatctttctgacccagggatcgaaccctggtctcctgcattgtaggcagattctttattgtttgagctacagtagcgacttagcagcagcagcagcagcagggaagtccttgtagttgacacgaggggttgtacaactgtaaatttactgataatcagggaattgtacacttaaaacgggtaaattttacggtttataaactatacttcagtaaagttgtttaaaataaaaagacataattttggtggcggtaattctaatccaaagaacagaaagaaactaggccaaggcaatgaatgatcatagattttggatgtagtttgccaatccactcaaaatatttaaaatgctagctgatgacaccatctacgtgatggttcttctaacagttgctgctcctttgagttcagagaagttccacaaaggctattaagaaacagctaaagcgactatcaacatcaatcatggctaattataatcggaaaagcaacatcctagaggtaggtgatgaaatgcttgcaatactaatgtgagacttattacaatgagttttaaattcccaggataaaatatgatccattttgaaaagaacatgttgaattccttaccctatgaataaagaatggcacaaagtatgaacaaaaaaatgctaaggaaaactcagtccgagaagatagggaaaaaaggaaggaaggaaggactgcttagagcaacaggttggaaggaaaaaagaagagtcagagcaaaacagaattaaacctttgtattggaaaatgaaggagaaggcaatagcatctcactccagtactcttgcctggaaaatcccatggatggaggagcctggtaggctgcagtccatgaggtcgctaagagtcggacatgactaagcgacttcactttgacttttcactttcatgcattggagaaggaaatggcaacacactccagtattcttgcctggagaatcccagggacaggggaac

SEQ ID NO: 49919 - DNA, 1430 bp, Bovine  19866880656662
  misc_feature (1)..(1): n is a, c, g, or t
ntactcagtagctcccatgtgggctggtgcgtaatacggtgtgttcattcccatgattatttaaagtaaaatgctaaattgttaatgtaaattcaactgccccttttttgttaagtaagcagatttacttttccccagttggtcaaccccagggagtaactttaaatttctttaggtagctaaaagctaagtgattttcatttggagtatatgtgaatagttttaaaaaggaattcctgcagattcaaaattgatacttggagtttcttctaaattttatgtgccgacttatgtaaattattaagattgaactagcttttgatctcagaccatcattttataatcattttatctatagcagaagcttgactttactatttcttcacaataattttgttaggctccaaattcaagatttatacttctagtgactctgaagtgattatcgtctcaattaattatttgtaagcctccaggcttatcagtatggtgaattttagaatgcctccagtaagaatgtaaaaatcagtcatgtaacacacactgtattttataacaccactgttaaaccatcacctaagtttcagggtgactaaaatgttttctaggggtttctatgttgatttcaggtagtatcccgatttacggatatattagcaaactagtgacttagactgatgacatgatgttttcaaagtttctgttatataataaactattttaaacataactttgggagtagttcatttatttaaatgactcctaaatcttggaaagattaagaataaaattttgtcagtttcattttttaatagttttcaggtgcctttctttgatggtaatctaatataaattatcttttaaatgtaccatataaatatattttcatgcatatttattctaagtagtagcattactattatttttatatttacacatatttattcaaatcactcagagtgctattaatggcccatgtagtgaaatatcctaatttgttcttatgacttataattggtttaaataaaagttaaatataaagtgttttgaagtttataaaaattattttttggtgtgttacatccatgtccagagatataaaactcaaaagattttctttctttcataatatactataatatggttacaagtgcattgaaattcatcttgttagaatggtagtaatatatcccaccaggactactgttcctagtagcaatttaaaataattattgtgagacttgatgctagacatcaggtttgcaatagaattacaatgagggaagtgtattagagacaaaacattgctggaagaaaacttcataatggcgcaatttggaactaagcctcaattttacagtaatagattctctttatgatggcacaaaggagtgaatgcacttagcaaatttaaatctattatagtcaca

SEQ ID NO: 49920 - DNA, 1503 bp, Bovine  19866880667305
  misc_feature (1)..(1): n is a, c, g, or t
ncatatattttggtattgattactttatattaagtttttccagctataaagggcctttgctatatccaggtcaaatctttcttcaggaaagttttcttacatattagatcactttttgttccatttgtctgctcttttcttcagaaacagtaatattttgattgttggatatcctttgtctgccacatctataatcttctttataataatttttagatcttttttcccccctaatttggcttgtgcgatttattctccatgtttttatttcccagttctgacccacatgactttgttctcacgagcatctattctgacttttattgcctttaatagggcacttatgtccataatgatttctgatttctttctcgttttattcctgagttttctagctcaaattttgtcttctgttattttattgtatcaatttttctgaaatttcttttgatagtttgttttcaagaggtcatttatgtgtaatttctttgagactctggagaattgtctttgacactttctgtgtttctctgtaacagtcctcttcaaatgtacattcttcatccatctttacattatgttctttttttacccccaggttttatgcatagatcatagttagtttctttgtgttgacagggcaggtaagataccttctgaagaacaggctctcttttgtttatttgtactctgtggattcttcaaagaagtctctctgaaatataatatcttcttcaagagttcttttaattctttcatcaaactcacaccgtgggctggcagattctcatcatgttcccttttccaatgcttctctgaaacactctttcagactcctctgtaaagcctcactactgttcatcaaccattgtggactaacctctcactccttctttccccagctgatgtctgatgtttgtgaaatacacctctggaatggaggaattaacaacggatcaaattagctctgttttagaaaataccggattgctgttccttttttggctggagaagtatagggcatctttcaaaggtagtaaccttttgagttatttattttgaaaggattttatgttttatatcagggattattatgtttcttttactctccaattcagaaattgagtcagcaatgttcttttctcctaattaggttttagttatagctaggggctccctaggtgcccgtggccaagaactctaatataaataaaaatgcggtatcattctctgttctattataattatcaactgagttaaagcaaaacccttggagatgactgttaagctgcagtagaaactttatgaaacatgtggttccccaaagcactttttacatcagtcctttctgatacgaggtgtcagaaaaaggtaatcttacatatcaccttccctttaaaagcatactaacacagaccttcagaacttttccaagcagcactgccctgattctcgtctgccctaattatcttggcacgaagaaaaatagagacatgtcctcag

SEQ ID NO: 49921 - DNA, 3253 bp, Bovine  19866880716673
  misc_feature (1)..(1): n is a, c, g, or t
nacttgtattgtctttatagcgcttgaacagttggctatcccattatttagattaagcatatgcaaatttatacaagctctatgtttattgataagtaataatctcatgttttgcattgtttctgtgacatatagacaacaaaatataaatcctttttatttctatgaaaggcactcatagggatttgggttacaaaaaaatgcatactttcttgacatttatgattatatttaaaaacagtattactaaatactaaatttggtgacgatcactcagttatgcaccaatgtgagtttgtttttcagtttttgttaaattttaatcatgtgccaagttttctgaggcacgaaaaggaaaccagagattagaggggagggttaaaaacattaaatacactgataaggtttgcatccttgtggttttttttttcctgctgttctgatagttctttaaggggtctgtcattttcaatcaacagagagtacatgtgatcagtatatctgataaacttgtcaatgcctctttaaagcaggattccccaacctattcaattcagatccccctgcttcatttcaagtatcatcttgataagacagagctatgtcacaagcatctgtgtgtagccagctcagtctacaactaatttgtgcaggaaaaaattaaatcaggaggtaaaatattccatgattgctcattcccaacagagttgggcatcattctgaagaaaatatcaaataattggtttcaggccgtgtcagacacatgcaattcccttctctaatggctgtgtgtggtagcaccaggcctcaggggtcagcaaagaactggaaatagcttagtgccaggcacggcaatagagagtcagagcacataggaaatgaagtggcaataagtgcaatccataggggaaatgtgcttcacttggagtttaatatatcggttcagaatctggcaggaagccatgcaacaattgtttacctttttgtcagcatctgcatctgttctgttttgtaaacagcacttaactctcagtcggtaaatgctggaatcaataacaactgttaagggatttcctccccccccctttttttatattctataacaaatgcacactacaaacaatgtttgccttagattaacaaggaacagacattaacagggtcaaagggatttggttgggaacattttatagcttcttgggtttacagtaattatatctgtgtgatttgaatgtattttgtaacctatccaaattaaactgttaaaaaaaatgctagcaagcagtaatgaagatgattttttataattatcttaagtactgtgtatagaaaactgctggcactgtttgtaataatttagttctgtgcaatattgtgtattacagctgctatgcagaaatattaagttgccttttgcagttttaggaaattagtgattatatccagcagtactaattattttaagcatacagttattaaaaaaaaaattacacaccacagtgagacataaaaaaggtttgatctgtgactagtgcctataaaactaaatatgtcattagtaaatgcaaaaaaaaaaaaaaggaaaacactgctttgaagttcactgtcttcagggactgaatagatgaatgctgtcataaatgcaggattgttataacagttatagcatcactgaaaagtgaatagcaccaggatcagaggaacacattattgctgatgggtttatgcctgcatctttccactcactacttaaaaattttactccttaaaatttccctatatgcaattgcttagttgcctcattttcattttatttgattacttcatatctgattttaaccaaatctgggtttgttttcttctgcttttacttatataataagcattaaatcttaggctgtcctagtaatttttgtcaaatggatgatttctttgaacctttcgctggataaccataaaccacaaataaaatttgggaattatttggtcagatcaccttatcaagatttctattttcttgtcttttcagaattttatgtctaagggtttggtgtgaattctttaacttcctcaacagttattttgctatttgacttagctaaattattttgaccaacattttttgaaagtttattgtattttttattaaaatcttattttgaaaacttgaacagtaatctcttttgtacctttatcaatcctgaaaagtactttgacttccttttcttcactgtgtattatttgcttctttgacattctgtgactgtgtacaaaatcaattaatatatggtaatatgcataccaccacaggttatatgtgattgtataatataaattcctttttatcacctagaatgtctagaattttatttttcattatcctcagaatcacaatccagattttgtaaatttccatttaaaatgtttatttgaatgacgtgtaacttgtttttaggctcagaaactagaaaagagttgtcttttgtaatgtacattctatccaatgatagagaacataccttattaatccattccattatgaaattatataattctgtaaaaaataaactaatccttaatactgctgcatgttctgatctataaatagaaagagaaaaaatcttgatagaaagttttatttccaaattagaatctgtctttgaaaaccgtagtcgatgtttagatgtgatttaagaggtaaactaacaccttttgtaattacttcctttaccacgggaaaatggttacatggctccaaatatctctctagaaatttaaagaatataaaaatgaaactttagtttccattgtttgtactttgtatctttaacatctacttgataggtgaagaatccacctgcaatgtgggagacctgggttcgatccctgggctgggaagatcccctggagaagggaaaggctacccactctagtattctagcttgcagaattccatggactatacagtccatggggtggcaaagagtcggacacaaaggaacaactttcactgttactgacaggaattagttccctgatagctcagttggtaaagaatccacctgcgatgcaggagactcctgttcgactcctgggttgggaagatctgctgatgaagggataggttacccgctctagtattcatgggcttcccttgtggctcagctggtaaagaatcctcctgcaatgctggagacctgggttcgatccctgggttgggaagatccccggagtaagggaaaggctacccact

SEQ ID NO: 49922 - DNA, 1021 bp, Bovine  19866880726723
  misc_feature (1)..(1): n is a, c, g, or t
ncctatattttagtgtttcagagtgttacctttttattagatagattataaagtgaatgaatactgtatgatgtctgaaatatcacttgttttggagaaacatataaaagagtttatttggggaattatccgtaagatttctggtgagaactttgtgtgtttttatttttttaaggtcaggttaaacctaagaatttgagttggcactggttgtggtaggaaagtaagtggatggcccccactcttgcatgaaacaaccctgagaaggctctcccttgctgtcattcagtggttcattgtgaagcattgaagacccacaaattaaagacattactgtgtgagccgttatttgatcaccacgttctgaaaagatggctaattccatttttatttttttttcccctcctttttggagggaggaaagcagggaaggtcaatagggggcagatagtaatgggtagtagaccaagagcgattgtatgaccttttcagaacggggatgctgaacccttgctcccccttgtcacagtttaaaaaccagaggagctagtttaagagaagaagttgttagcattccatttttattatgacatttcacagtcatctgatttaatgtcccttgaccggattgtccaccgtgagacgatgggcttgaaatgttatttagagcattgataaaaaggtgagcggttctaagatgacagcgagtcataaggctggtggtgtgacattaattttctccataacagagatggaataagacgtcacggggacaagctgtcaatcagcgctggcccctcagagcatcccgatgccataggatggggtgttgcctctcctgtaatagagctgaactgagatgctctcctgacagctgctgcagccatagagaaaatatattatacagcctttcattaaaaaaataaagaggactcctctccagagcatttcaatcttttcccatctattgagggctgaaaggattcacagcaaatcatagattcctctgctatggaaattt

SEQ ID NO: 49923 - DNA, 1712 bp, Bovine  19866880738502
  misc_feature (1)..(1): n is a, c, g, or t
ntacataattagcttccataatcataaaacgccgtcctcaattttataatgcatcatcttatttgtttttctatatgatgttcatatgaaaatgtcatgcttttttcaaccatacatcagatactccttacttccaacaatatcactatgtttttattggtaaaaataaaatatattaagactatattctaaccaaataatactttatcattttttgttgttgttgcttttaactttgaaaagttgatctgagatttcgtctttactgtgttacaatcctgtgagaaggatcctattaattataaataaatgagtaaataggcacaaaaagacttggtcaagtcagagagttagggactagctaagtatctgtggtgccatgtctggggcatacatctcctgtgtcccacatccagactctttcagctaaaaaatgtgatttgagtggactgtactctctcgtgagcttggtcctgctgacagtcttcatagaaactgaatgcagctggaatcctctctctctctgtgttaccttttctcaaccgtttgccacatgttctgtccctacaagcccctctgaaaagacaggagccacacatgcaactctgtcatgtcaatcatgtgacaaacattctccaagtgaaattaacatgcaagactccacgtacattttgtaagcttccctacagtgtacaaatatgctgagactgtcgaagatagttctgatccagaatgtattgtcacaggaacaagtaaaactatattttcttttttaggaatcattaaagacttcttctttaattattacacaaaatatcctctaaccgacaacatagcaactcatgatagttttctaatgggaggcatttgaaatgccttagctaaagattgatttaaagaaaagctttctgttggattcatctcaacatctatcaggtagtattatttttccaatagtcttttgctccgtcctttgccttctaaagagctatgcccaagctataattattttctgctaattagagtaatccatgattaattattcaaaatgattcctttccaaaatcaaatccatttcctgtcatgacactaaaaaaaaaaaagatataaataaagtattatcagaatcagatttgtcagaaaggaatactttttaaagttttctttagttagcattaaaatcttttctgctgaaggtgctgtgattcccttcatcagttaatgtggattagagaagggcaactggaccatgaagtgataacaacgaatggttgtgataattactaaggattagttatactgatgacataggagtaagcaatttacaatattctgaaagaaaagcttcaaagcagtaagacctagcaatgactaaggggaagtgataaacgtgttcacttgggaaaccgggggtccaaagatgtacttctacatggctcatgcctttttgtcgacactcatttgagtcctaagcgaagctaagccacttcagttgtgtccaactctgtgcgaccccatagacagcagtccaccaggctcccccgtccctgggattctccaggcaagaacactggagtgggttgccatttccttctccaatgcatgaaagtgaaaagtgaaagtgaagtcgctcagtcgtgtccgactcttagcgaccccatggactgcagcccaccaggctcctctgcccatggactccccaggcaagagta

SEQ ID NO: 49924 - DNA, 853 bp, Bovine  19866880755201
  misc_feature (1)..(1): n is a, c, g, or t
ntcatttaaaatatgatgaaaagcatttcttacctaattttgtttcagaagattctaagaatgagctggtcttctaatcctaacgtaggtggtaacttatttccttctgaagtgtcagtagaagagctgccttttcgtcagtgtcttcagcagcttttttcccaaatatacaaagcacatctataaaataattagatatagctttatcacccacgtggaggaggcacagttacaacattactgatttcattggcagtgacagcactactgttaaggtatgatatacagactcgatccaagagatgctagaaacatataaagacatcctgaagtcggggcaccttaaagaagcttattaacaagacgactcatagagtattggcacatggataacagacgcaccttaaaaatatgcacaaagtagcccttttattatcactgagttttcaaatgttcctaaagaaacgtagatcacagacagtaagggatggctgcaccatatgaatcaagcaatacctttcagtacaattagagctttcttgtttaattaccagttgcccagaactgtttcttaaagccatatttgggacatccctggaggtccattggttaagattccaagtttccaatataggggactatggttcggttcccggtcagggaactaagattccacatgccgcatgatgaggccaaaatattacaaagtaaattttaaaatttaaataaaaaaaaaaatcatttccccactcttctaggttatcttgataaagcagattccgactcagctgatctggggtcaggacctgagattctgtgtttctaataacctcccaagtaaagtcaccaaaga

SEQ ID NO: 49925 - DNA, 1695 bp, Bovine  19866880822983
  misc_feature (1)..(1): n is a, c, g, or t
ngtattgaactttgcccctgtgccttcaagggtaccacattcaaatagggagatgagttggtcttaataaaatggataatccagggagtagatatccagcccatgcaaacctccattttaaccctgtggttataagcatataacaagatcttaatgctctttaatttggaataaggtttaagacagttttaaatacatttttataaggctcaaatctcttcattacatgaagtgctacagccattacttgccagacacaatattttcttgaatcatacatatattgaatatatatatatatacattgcaaaaataaaattcatgttgacttatcattcctaaaataactttctctactcatatccatttatctctagacaaacagtcattgcaaatatgatttgccaaggatttgaatttgtgtatctacagcctgcatattctgacaataaaaaagtagaaaaatcgacttacacgccttcagttatctttttgaatttgattttttagatataaataaccaaactctctcggtgaaagcctgacactgataatgaatatgtttcagatggcaacaggaaaacagactactgctgcaattaaatgcaaatgtttggagtgcatgctgtattaaagtcgagtttaagacactgaatgagaaaattcagaagttaagtgactcaaaagaaataacttaaaccggctgagtcaggttttcccagtaaactagctgccccttgggattaaatctgctgcagtttttagtggcagaaaatctgtctgtaggatttcataattttaatacaaatggagacattactcctgatgccttagccattcttatgtaaaatacacaggcttccgtgagaggcccagcctttgttatcttgtcagtcagtccttatttcctgagcacccactgtgtgcagggcgtcctgaatcaggcatttgaagatacagtggacttttgtacccttgaggagctaaagagtccctataagaaaatgcttccaaatactagagaatcctcagtgtacccatcctggggggagtgattatgaagaaggttggatgaatctaagaagacttcctagagaaggtggggacgcaggatgcagaaacacacaagttactgtttgaggataagacaatgtgaaggattaaagccaaggatctacatcaaggagaactgaggttactagaagctggtgggaagttgcccagagcttcagtgatcaagggctcctgttcagccaccttggtaccatctctttcccccttaagtataacccgttaattacccatcctcagcctacgcatttagtggcagaactctgagaagcaaattaattagtcttatacaactctgttgccaaaacttatgatttcaggtattcacagaaaatacttggcttccattatgtactcccaggagtgattcttgtaaatcaaaatcttaaaagatccttcaccatagaaatataaggtgaaacgctggtttatgcatttctaattgtactttgcttcctaaacaaaagtatgagagaaaacataaagagacacactggttttaagcattcaaatatttgtatctgcttttggtaaaaaaaaaaaaaaaaagaaagaaagaaagaaaagactgtatttctgtgagagttggactataaagaaagttgagcgccaaagaattgatgc

SEQ ID NO: 49926 - DNA, 996 bp, Bovine  19866880823105
  misc_feature (1)..(1): n is a, c, g, or t
naatttttcttccttctgcataccctcccccctccagcttgtcacccctggccccaaaattcaaataaaaaagtctggagtgttggcaaattttgaaaaggaaatgctttgggataaaattttttattttaaaatctttcatcaaattctatattcctccactgaggtctccaaccaatgaagtaattactctttatatacagtatatgaccccaaactgcaatgggtaatggaattgctctgtgttgctttccaatatttcacacttttttcattaatgttcaatactttattagtagagaataaattggtacatttcttttattgtcatttttactttcctttataaaccagcctggatggaaaaaaatatcatagggtagtgaatcattgaaaagcttggaaatgacactattgtttccttttttttttttaatgcattattaaggtttcttttcaagatgtaaaaagaaacttacccataaaatagaactataactataaatctgaaaacatgtgagatgtatattatacaagttttttttttaataattccatatgatttttaaaatctagttattttcagtagtccacaaaatatccataactgcacacctgaaatatagtgactctttcatagtcacctattttactatcatgtatcccattagaaaatgcactggattttccgaaagaactctctggtccctagctgtgagatatttaggaaactctcaagacctaaggaatcaatatgtgctcccattcacagattctgttccaaaagagaacaagaagccaaggtgataggtgtcagaggatgtgtgttctgtggggttgggctccttgtgcacccagctgcatcctgccagtcactcacaccaacgaggtcactgtcggtcctgttcacatcagagaaaatgaatctgttggacacctgtgctgtgttcaacacagcaggcgtgtagaacatgttgctcaaaatattgatgttat

SEQ ID NO: 49927 - DNA, 1085 bp, Bovine  19866880826212
  misc_feature (1)..(1): n is a, c, g, or t
nactagagagcattttataatcatttaaaaaatcttttttattagagagaatcatttatatcaaattaccagacatttttagaggagcataaaggcattgggatatgatttattttttcacagacaaatcaatccatgaataaaatttgagaatttaaacaactcaaataatgatgctcaaaacattcctgcttgtattagagccttatcaactgaacaggatcaatcgatagagaaatatcacattattaggatcaaataacttctagaatgaagaaatccctgttggttagagttagttttgtaaaatggttcaattcacaatatcacaactgcacttcaataaatttctacttgctacttcacacaattcagtaagctgcataaaattacattattttccatatcatagtagctaaaaagaaaatacatttgatacttactggtgtaattctgttaatggtgaagtcaacataactaatgttgtgaagagattattacagtgggtatgaattttaaaaattttatcatctacatatgcatgaggattcaaaagcttctgtacagatgtgcaaactgaccataacatgttctcagtgcaaattaaaattgttgtgacatcaagtctgttggaaagaaaaagaagaaaatcatgttaaaattgttttctctgctgggtatgcacactatcatttatatctattatattaaacatatgtaagaatagaaatatttgcttagatatcagagattcagagatcaaaaatagacaaagcatcaaagatagattttgagtttccaagtgttagctgacccataataccatgcattgggcttccccgatggctcagcagaaagaaactgtcttcaatgcaggagacaggagatgcaagttcgatccctgggtcaggaagatcccctggaggaggaaatggcaacccactctagtattctggtttggaaaatcccacagacggagaagtctaacgagctacagtccaaagggttgcaaagagtcggacacgactgagcacgacaccattcattatctttagagatgatgacgtccatagcagtgaagtgtt

SEQ ID NO: 49928 - DNA, 1612 bp, Bovine  19866880869406
  misc_feature (1)..(1): n is a, c, g, or t
ncataaataatggtttagtaacccaagaaatgaattttggacagaattacatggtaactatagattcaagttcctgaataagaaaaatctcaaatatgttaatgcatgaaacatgagccatatcttctctttcaccagggaagtataaagatttccagaaaaggaaaatatttccatttaatttttgaaatatatgtaatatatttaaagatgacacaaattataactgatggctatgattattctattaaaatgcatcttaaaaatgtactttattcaggaagtgatttaaggcaaatttgacagacatcaacacatataaaagagagaattatttttggctaggattcgtattaattctttgcatatttattagtaaaatttagacaatcactaaaatataagctctttaaagatagggaattttccttttagctcacattctatccccagagcctagaatggtgccttccatttatttgtatcttcaatttctttcatcagtgtcttgtagtttttagtgataggtatttcaccttaattaaatttattactaagtattttattctttttgatgcagctgtaatgggattgttttcttaatttctgtctctgatagtacattgttagtgcattgaactgtaatatatttttatatgttgactttgtgtcatgcaactttactgaattcatttaacaatttttttttttttgaggactctgtagggttttctatatgtaaaaccatgtcatccacaaatagtgacagttttacttatttcttccaatatggatgacttttctttttcttgcttaattactcttggtaggacttgcaacactttgtaaaataaacccagcaaagtaggcatcctagtcttgttcctgatcttagaggaaaaagatttcagcttttcactattgagtatgttagctgtgggcttatcatatatggcctttattatgttgaggtatgttgcatctacactcactttgttgagagttctttttatcatatatggatactgaattttgtcagatgctttttttgcatctattgagatgatcatatgcattttagcctttattaacattttatatcctattggttgatgatttatggataccgaagcagccttgcacccctggaataaatcctactcaatcatagtacatgatctttttaatgtattgctggattcagtttgctaatgttttgttgagaatttttgcatctgtgttcatcaaggaaactggcctgtaattttctcttcttttgggaaaggaaagttccttcagtaaatgttgttgggaaagctgaacagccacaggcaaaagaataaaatcagactatcttacaccagatgcaaaaatcaactcaaaacaaattaaaaacttggatgttaagctctataaccgtaaaaatgcctagaagaaaacacaggcagtaagctccttgacactgatcttcagtatgatttttttgggtctgatttctaaaacagaggcaacaaaagcaaaaataaacatgcaggactatatcaaactaagaagctcagcaaggaaacaccaaatcatcaacaaaatgaaaagccaatcgactgactgggag

SEQ ID NO: 49929 - DNA, 1367 bp, Bovine  19866880870906
  misc_feature (1)..(1): n is a, c, g, or t
nagataaaataagtttttctcatttaacttttgatatagtaacgtaatcggatagttttagaagaacacattcttcaaacttcaaataatgtatttcaagtaatcttttaatctggtctgaagaaaatgagcaaactcctagcacacctccctgagagcctgttaactaattattggttgtaattcacttgaggtgaccttctcatttctgcctgtttccccttagctttggctgctgttgggtctcactctgtgatgagggaaaatttgacacagaaaagaggtctgtcaagaggtagaaaggaatgagaacctggccctttggaagtataaagtactgtaaaaaatactaagaaatgatgataccatctgcctgggctttacgaaatcctgcaaaatcagacgattttaggatgtgtttctagtactgttgttgaaactccatgaaatttcatgagtacttcatgatgaagtagcctaatataatcatctttggtgactcagacgcatgttgataagtacacactctgcaagtttatgtttgctcctgtcatttcattgtaatgtgaaatctaaaccatttttaagatgatgtcaatgatgttaataagcccagaagaatatacatgtttgatttgaatgattactctttaattttagaagaatcagcccactatcttagactatgcaagactttgtttagcagctacaaagatgatcattttaaagtaaattttaaactccagaccacgaggtaggtaaatcaaggctaccctaggttaaatgcttgtggtctggatttgcactagaatatctggtctcgtaattgaaataaaacatatgttcctttgtcaataagaatgttttacatcttgtcaaaaatctttcttggtcatcgagtgcgtcaaactctccagctatttcctttcagcctgaactaattaagttcataggaagcaaactgacatttggtaagatgcgatcctcttgtttaatgtatggtggttttgccagggggaaagatgctccttctcgctccagatgtggcattatttcttctgggcgcttcatcacgatctctggaccatcctgccccctaaattagcccaggagatactagcagaagtgctggagaagtctttgggtctcctggcctccagatatgcccaggcccatcccagttataagagaaccctacagataaggtaattgaagttgtgaaaaccattacttttcaagaaaatgtttgtcaggtgtataaagtagaatgtgcttctgaatctcatgatgtaactccttgtatatttaatgtttctaacatcgaaaggaaatcatattcaattctcctagatacttaagtgcaaatg

SEQ ID NO: 49930 - DNA, 1313 bp, Bovine  19866880893820
  misc_feature (1)..(1): n is a, c, g, or t
nttacggacagtgaagtaatttcaaataactaaagaaataaacaagctaaccttaaaactcccagcaaccagtttgaaaccaaactacagaacgagcactgaaataccttggaatttagtgactcaaaagtcatgtgaatgacatcaagtgaaccccaaagataggtctgccgttccctggctcagtgatcaacattctggcctatttctgatgacccagcctttgcctagcatgttggtacttgcactgaaattcattctcccatgttattaaatgaggtaacactggagacaatcaactttcaaaaagtttccacttttaatttttataggacgcatcaaaacattttgaaatatatataatgttcaattttaacattaaaaatcttatcagactttcctataacacttgagggtgaatatttcaacttgctccctgatgtgacacctgtgtttaatcctggtgcttaatcatagggcctagggaggcaagagtatttaatgagttgaaactgaattgtatttacctaaaattctaaaaattaactttaatttgctagatagaaactaaaactaacattctgtgcaagcaaatgtaacacatgaaaccactatttcgtatgtgtgtgaacgtgcatggagtgcatgtctgaaagagcagcgtgactgcctttatgaaagaagataagcataaccacaagtgataagcatttcggaaaatatacggtgaatattttatgtttcagcaggtctctttccctggaggacaaacctaaagtactccttttacaacatcctaacagaaatctacaaaggggagttaaaaaaggacacacgtattcgcaaacacatttcattctttctgaaaagatttaaaaatcatatttctgccctgggatttagtagtcctatgctaagctcggagaggaaaatacattcagtttatctgtcagaactacttggaataaaagcagtcaccttcaagaaaggcatatcacatagagtgacaaatgtcaggcatagtttataaaaatccaatgctatcaacatctgattgctacttttaaccaattcctcaaagcatataacctaatttttaaatgtgagatagatatacaatttttttttctcgaaatgctaacaatatgacaacttcatatcctggctgtgaaaagaagctaaataaatcaatagagttcttgcagcacacacactttttttttttttcctattaggtgtggaacatgttgccctgtaaatttcctttgtcaatagaaagcaaaatatattttaaaaattagatttatactcta

SEQ ID NO: 49931 - DNA, 1120 bp, Bovine  19866880942180
  misc_feature (1)..(1): n is a, c, g, or t
ntattatacccatactaacttaatttgtgtattatctttaaacagaaaaaagttaatctacaattgtggattacactattttggaatgaattttatcaactcaaatcattttttaaaatactgtgaaaagataaaatatatttgtggtgaaaaacgaggattttacattcatttatgttttcaaataacatttaaatgtgataccttaaaagtctttctagtttccatctaccaaaaaaggaaattagataaaagtgatctgtaaggacccttctagttttaaaattctattattttaatcatgtgatctacgtctttaatatttaattttctgttatactgcctttgcagtacactttctaattctacagttcaatagacggataatgtgttgttggttataaacaaattcgcatgaaatgacctgaaaatctatttaaaatgcaatcagtgaaagtaaatattgcatttcttcatgttaaatctgagaagccatcactatacttgctttttactttatttgctgcttaacatatctcaacagtgaatctatcatatcaacatagtcatcatgatccaagctgcaaataatagagagtgtcagtgtcaattttgctttctcacacttgcttcccttcacttcatctgattttaataatccctgtcaaaccacaaacagtccaaattaccttcatgacacagaagctttcaaggagcagacagaatctcaactttcatttagcaactacaaaagaaagctgtccagctggacaaatattatttccacacttgacaatctctacagttgagcatgcattttaattttaactaaacctgccaggagtttgatatgcgcttcttgtttcgtgtagattgactcataggattatcagaccaatgactgtaattgtgatgaaagaacctggtatttttctactaaaagacgaattatacaccaaaacagagggaccaaaacgagcatataggaggcaatgtgggaggtggtggattgcagaaagaactctacttaaattaggtaatttaattactaaataaagtctaaagataacagaacacattctttgaaaagtaagaactaatagtaaaaataaaatgcaaa

SEQ ID NO: 49932 - DNA, 1321 bp, Bovine  19866881086161
  misc_feature (1)..(1): n is a, c, g, or t
nttatctctctggggtcctttaactattactggttcttatctgctgctgctgctgctgctaagtcgcttcagtagtgtctgaccctgtgcgaccccacagatggcagcccaccaggctcctccgtccctgggattctccaggcaagaacactggagtgggttgctatttccttctccaatgcatgaaagtgagaagtgaaagtgaagtcgctcagtcgtgtccgactcgtagtgatcccatgactgcagcctaccaggctcttccacccatgggattttccaggcaagagtactggagtggggtgccactgccttctctggtccttgtctaccacataataataccttattagaggagttcaagaaaggtctcttctgacatcacacttctgatataagaccccacgagaaagtagttcaataatctttccactttatcacacttcgagttggctttttaacatgtttggataactgataagatctgccactttctgaaacatagttctttcctaacacagcagcattgaatgactgttaagtaagcacttacgtggtgggtgccgtgtaggcatctagctaattaaatccgcatgactctgtcatgggaatatctcagaagctaagaaaagatgttacaagaccatgagaagtagaccatggtatcgcaccctgttttcaggtggagagatatgatcatattgtatttatatctcaatttcctcacaaagatacaagctatttaactttccaaaattacaaaactatacaagtctgcaaacctgtctgactaatctgaaaacctatagttgtcttttatcttctcattgctggctccattgctatattcttttttatataatacattcaagccataatagaaaaggaaagatatgaagaaatatctagcttcatcaagtatccagctcacctgacactttcacttcttttaataactgctccccaaacatggctttttctctgaaaatcttttcaaagatccagctgcttgtccatccacactctggaacagccatgtaagagctttggtgttcaaaaatctctcattacttctcccctgactgttggctctatgtcaaagcttggcatctcatcagagtacaagttctctaagcctttttcttcagtgctgtggaacagcctgacagcagctgctgggagaccaaagttctcttttgtcctcctccccagatgttcagccctaggttactagaagacacctcctcagtagaccatttttcccatcactgagctttaccactcagatcaaatgtttaaaagagttaaatgtaccatttaa

SEQ ID NO: 49933 - DNA, 3322 bp, Bovine  19866881112225
  misc_feature (1)..(1): n is a, c, g, or t
nttccatcacctccactagctttgttcacagtgatgcttcttaaggcccattttacttagcattccagcatgtctggctctagtgagtaatcacaccatcgtggttatctgggtcatgaagatcttttttgtatagttcttctatgtattcttgccaccttttcttaatattttctccttttgttaggtccacagcatttttgtcctttattgtgcccatctttgcatgaaatgtttgcttggtatctctaaatatcttcaagagatctctagtctttcccattctattattttcctctatttctttgcactgatcagttaggaaggctttcttatttctccttgctatgctttggaactctgtattcagatgcttatatttttccttttctcctttaccttttgcttctcttcttttctcagctctttgtaaggcttcatcagacaaccattttgccttttgcatttcttcttcttgttgatggttttgatcactgcttcctgtacaatgttatgaacctcggtccattgttcttcaggcactctgtctatcagatctaatcccttgaatctatttgtcatttccactgtataatcataagggatttgatttgggtcatacctgaattgtgtagtggttttccctactttcttcaatttcagtctcaattttgccataaggagttcatgatctgagtcacagtgagctcctggtcatgtttttgttgactgtatggagcttctccatctttggctgcaaataatgtaatcaatatgatttcggtatcaaccatctggtgatgtccatgtgtagagtcttctcctgtgttgttggaagagggtgtttggtatgatcagtgtgctgtcttggcaaaactgtgagcctttgccctgcctcattttctactccaaggccaaactctcctgttacctaggtatctcttgatttcctacttttgcatttaggtcacctctgattaaatggacatcttttttgggtgttagttctagaaggtcttataggtcttcacagaactgttcaacttcagcttttcagcattagtggtttgggcatgggcttgaattactgtcatatgaatggtttgcattagaaacgaacagagatcattctgtcatttttggtattatccccaagtactgtgttttggactcctttgttgactgtgagggctattccatttcttctaagggattcttgcacacagtagaagatacaatggtcatctgaattaaatttgcccattccagtccattgtagttcactgatttctagaatgtcgatgttcactcttgccatctcctgtttgaccacttccaatttaccttgattcatggacctcacattccaggttcctaggcaatattgttctttacagcatcggactttacttccatcacctgtcacatccaccacttgctcattttcagagagcaagacctaaagctacagacacaaaccccttatattttaatgtttataatatatggttgtctatccaaaaaaagaactttacctaacagaatttaataattgcttattgggtgaagaggactttgtttttaaaatacattcaataaaaatgtgtatttataatctccattcttattcctgagccaatttaacaaaagttaaattttatcaatttagactaaaaagagactattcataaagaaaagtctcccataaacaggccaatagttatgttgtttgaaacacctaatcagaacattttactctaaaattttgctttcctaaagatatgatcaaacttctaaattaccaaatgatattgaatgaagagaaaatctctgaaaaaatattacatatgtatttttaggtgcataataattttgaccttagtctagttaataagattccctgagcatattgtttctaacttaaagtgacaaggtttctaatggagtttaataagtcagtcaatcaattgatcagtaaattctgtcacttcatccttacgctaatgaagtagctaacaaaattaatacaagacaataccaaagcagctaagatcaaacataataacctttgcaaaaactggtaagatattttagcaggctgggtaaatgcacttctgtattccatgagaaccagaactgaagaagctacagtatggtaccattgataacttttaagtccctcaaaaacaacatcatgttatatatacaaaaggtagatgtaatataaatgtagaattcttttgcaagaaaacctggttattcatttaaccacaatcactatccctgtacttagtggctatattagaatagcccagtgttttatcacaattgcttttctaggctgaactatataactctattaaaaggagactatttctcttctaggcccatgttcatgagcttcaatgaccatattaacattagagtaactctccagccatgtcagatactatccatgttgagtagtcaccttacctgaaagttcagattataaagtttaagtgaaactccatattttatatcccaactgatcgctgagcaatccctgcactttttctgtaaaaagcaccatgctatcttgaggaaaatataaaaataaaaatctgtgatcaccactgactacctggctggcaagagcagttacatgcatgtgcattggggtgtctggattgattcaaccagagactggacagattacagttcttccagatacccgtggcccactctaggacttaatctgcaagaatatttgtatagaattgtaagggaaagaacgtgccaggttgggttcagaattccaggttacccaccatttctcagctacatgtgtctcttggcaaatcacagtatcttaaactctaatgctatttttaacatgatgaaaataattatacttactttataggttttaagagtcaaattagatagtaaatgtgaagtgccttgcagagtgcctaagagttaacaagtgaacaatctatgttggctatttgaccaattaattcccctagcacctgtttccctttaagagagtggagttcaagatattgaagctgaagatcctgctttcagttgaactttgtgagatttaaggctcgggggctcagagaataaagtccgattcagggttggaggagaggtaatctccaaacctctgcttggaacatggtgaggctggaggattcacagtgccctttggcaccacaagatttctggatttgggagcgccaggagagaagcagagggctcagagtagggtacctcctctatgtggtttttgggaaacaaacctcaaggcatgcagaagaaaaaactatgggga

SEQ ID NO: 49934 - DNA, 1169 bp, Bovine  19866881176634
  misc_feature (1)..(1): n is a, c, g, or t
nttattctttatcattaaagttaataatatgcacattaccctcttatgtagtctaaatcaatattgtcgtttaaaagagatgacctctggacagctttgtctaaatattgatttcattgtcatttgtataaggtatcaaacaaattacatgctgcactaatatcattaatactgcccccacagagcctctgactttacaggttcttataatataggacatgacattacaaaaatattgaggacatcacaaggtataattactgaatagatgaggtttgactatggttgcgcagagtggctgtaaacatgtgataacttccaaatcctttactctccgtggacaggaaaaatacatctctttagcatgcagattggtttgttgaggttaagtttcaaatggcagaatttttttctgcctcagagggtctaatttacctttttgtgatgccatagatatttcaaaagagaatctaaagtctgattaaaatattgtagttctgcaatatagcagttttcccaaaataaacttgtttaggaatttctattacaagttcctagtgactcagatgagttggaaaatacatgcaactttatgcatgtaacgtgaaggggctgaacctttcaaatgatcattaaattaaataaaagctgatttagggatgggcacatatcacatttgccctcataattggcagttacagtattatttttgtaaaaacaaaatatgcaaattaaaatagccatataaattagcgcgttaaaacttttttcaagttctaaattgctctgaatcacaactgttaacctcaccctgttacatctaactctatattaatgtttgttcgttttttcaatttttaaaattgtactttactttctgttttctataaaactttttagaaaagagatgtggtcgtggtcatgatactgatagctatgggtgctatttacactaaaactgttcccccccatatttcttgtaggtaaaagtgacccattttgtgtggttgagctgaacaacgataggctgctaacacatactgtctacaaaaatctgaaccctgagtggaacaaagtcttcacattgtaagtagctgttaccttgagcttgcttcaagaatgatgctaaacgatatttattttcgagatttttgtgtgttttttcttaa

SEQ ID NO: 49935 - DNA, 1046 bp, Bovine  19866881313406
  misc_feature (1)..(1): n is a, c, g, or t
nactgtgttgaataagagcgttaaaaatttaaatcttcgacctattcccaatcttagggagaaggcattcagtcttttactattaagtataatgttagctataagtttttatgtatactttttatcaaattgactaatgtaactgaataatgtgattgcatttcagtttcaaaaaggaagtatttattttgcttttgaactgattattttttggcttttctgtcatggtgccagcagttggcatttatgtataattattaactgcccttacaacattgtttaaattgtccaatttggaataaggattccttaaacttactgttgatactaaggacactgtggaaaatgttgctttatgtgtgtgggtttgcctccctcccaatattggtgcctgatgctgtagataccttcctttggccttcctactgtagttggggatgcctaatcttctcatctaaccatgttataaatgtgtatttaagattaatgatatgctgggccagatcctgctgtgtatttctttgaaagtatattagctttctgattgcctataaatcaaaatttcacaagttatttcttttagtcactagatggaattttatgattttaaagagttgacatagatttttttaaaaaaggaacattttctgggcagcttaagggcttctttctgtgaaatggtttgaatattttagatataataaactctgttatttaataaagttacagtaaaatttcttgatcagtagatcaatgcattgctcattagagtactaaagaaccagtgccctctgaatggattcactcaattcagacatttgatctgccctttctaacccttgatagcactccaaggttttgctgctatgtgtgagaacccaagataagcctcaaacttggattctttctgaaggtataatgagctaccaccccagccatttggcacatcacccatgttattttagaaaaaaaaaaaaagcttttcagtggaatgggattattttactttagcagttttctatgttataaagtttaattgcaagttt

SEQ ID NO: 49936 - DNA, 3281 bp, Bovine  19866881420490
  misc_feature (1)..(1): n is a, c, g, or t
naacttggatggtgttgaccattgcctctgggtaacatggtgtaaacactggagtgggtgctcctgggacgtgttcacatgcagagagagagttttcccatctcaattgtcattattagccccttcatcctttcaattagcctgaggggcaggtggaaatgtagtgtgtagcatctgtattggccccttcctgaacttgtggccatcttgcattgctctacagctccagtaagcctttgtaacagcttgcacctgttgtggggcttccctgatagctcagttggtaaagaatctggctgcagtgcaggagaccccagttcgattcctgggtggggaagatcagctggagaagggataggctacccactccagcattcttgggcttcccttgtggctcagctggtgaaaaatccgcctgcaatgtgggtgacctgggttcgatccctgggttgggaagatcctggagaaggcaaaggctacccactccagtattctggcctggagaattccaaggactgtacagtccatggggttgcacctgttgtaacacattgtagactacacgtagctattattatgcagtatcattgctcttcccacttccatagctaggagcagaagcccaagggtatttttgcagttgccatgggccccaaacccttctggttaactggccacctccaactcatgagcctgcccctgagataacactcctaaagcctgtgtctgtagccgtttagggctggtggttgggggtatgcttgtcttacctgaccagctaacatcctagataatccatgtccttacactttgtctgtattctttagccatccccacatagtcacaagagccaggagcatgggacagctacctttaaacttgtaagaggctctgaggttagcaggagatcattagtttaacggaagagaaagacatctctcatctctcgtggcggtcagcagggtcatacatgctggtggactgcctcctccgatcacttcctcaacttttcacacccatccttgttttctgatatcttggggctcacaggagttttttggcctcttggctgcctcaccagtgattgctgtcgttcgttgagccactcagtcgtgtctgactctttgtgactccatggactggactgtagcacaccaggcttccctgagcctcagtatttcccatagtttgctcacactcatatccattgatttgatgaggccatctaaccatctcatcccctgtcatccccttctcctcctgccttcaacctttctcagcatcaaggccttttctaatgagccggctgttcacatcaggtggccaaagtattggagcttcagcatcagtccttccaatgaatattcagggttgatttcctttaggattgacagagggctgcactttgtaggtctacaagccttgtagttgcccagccttgggacccatgaggtataggagatggcaacagagactcaggtgtttactgatgtgggctctggagtgataccgcctgccaggagctggcaggcagtcagggtggggcagcggggtggggaaagctgcgacccttcaaaggggaatgacgtcatgttgtttcagtcaccatgttggtttggttaccagagaaaccagcagctggggaagagggcaatcatgtggacagttactaattaggtcctatcattaaggggactggatattcatgtgagagaagtaggctctggtcaagcaggggatgtacagaaagcaagaaaataaccattctgagaagcctgaccatacaatgctcaatatacttgtcccgccccgaagtaaagtatattcaatttacatattagtgtgccaggaaactcaggatgtaaactgtaattttcaagtatcatacactgatcatgatgcattgtttttgattgacttcaaagcccactagtaaattaaaagcatacatatatgtatcagggcttccctggtggctcagtggtaaagaattcacctgaatatgaaaagtcctatgatttcacccctgagagaagcaggatgtatgtatttaagtcaaactttaaaatatttaggtagaattcaatggcatacaagcattaaaacagtctataaatacccacaggaatttaaaactgtaggtttatgattttagtcttcctatacatgttattcggagaaggcgatggcaccccactccagtactcttgcctggaaaatccatggacggaggagcctggtaggctgcagtccatggggtcacgaagagtcagacacgactgagcgacttcactttgacttttcactttcatgcattggagaaggaaatggcaacccactccagtgttcttgcctggagaatcccagtgacggcggagcctggtgggctgccgtctatggggtctcgcagagtcagacatgactgaagcgacttagcagcagcagcagcagcagcaaggggttgttgtctgtcaagagcagggattctgtctatggataccaatatgatggttgcctgaccaaggtcacttctattaaggctgccaactcctcaggattttctgtgaccatgacatcatcattaacattcttagcagagtctgatttgcctccaggctgtcttactttaaacctcttgctctttccttactatagttcttccatctggattataggaagaaagaatgaaagaataaacccatcggtacatctgctttatgtcactgagagttgcccaagcttcatagagtaggacctggtcctcaaaggcttactatccagctggggagagaagatacacacacagaactgatttaataaagaaaacatgatatcatgctgtgaagcagcagaatgaacagtaaagacagaaagcacttgaggagttgaggggttttcattgctgttcattcctccagtctcctgtgattttctggttaccatggctgttggagtcaactcagattctttataaagacactcagggttgagacttaatgctggaaggtttatactatgaaattccttttccctggtgattttatgatcttgccgtctaagcctttgtctttggagcagatttaaaagaccccctgaattgctcatggtttggtcctaagtggcaagcttagttgcttatgtaacatacactggagctgataaaatctaatttcccatttattatatctttgcgcctcttgaacaaaaggacaaggtattattggatcctgccgtatgctttaaaaatcatggacttataaatgagggtcatttgcatccca

SEQ ID NO: 49937 - DNA, 1131 bp, Bovine  19866881553076
  misc_feature (1)..(1): n is a, c, g, or t
ncttgggcaactgagtagatgcttcactaagatgaacagcacctggggaaaaattacatttgggttcatcaagaaagtagatgccaaattgaatttgcagcaccttaagtttgagatgcatatggaatgtctgtggatagatggatgctccataggtagatggatgctccataggtagatggatgcatgggtctgaaactcagtaaagagacacatttgagtcattggcaaatgctagcggaagccgtgggcatggatgagactgcccagtatgtagcaggaaaggcaagatgtgatgccaaagtatataccacagactgagaactgggaggaaaactggcagagggtgatgtctttgatgtgaaggaatgaaaatatattttttagggattaactgaatgttggcaggtatgaggctacgtgtatacaaactactaactggaagcctgatcaaagtgtactcaaattattagacagaggcaactacagttacagagcaaaacagaatcataggaaagcaatcttatgtgttaatatggcagcaaatgtgaataatttataagaaagtgctttttagtaatacctttggactatttaattttatttatatctgccctgtttaggtcgtgtagaactttattttatgggtgcccattcttttttttttgtccttgctttcttatcccatcaatctacctatattacttttttgtgagtatggttaacctttccccagtcaactggctgagtctacactttttcacagataaatatttatgcgaaacatctcagacaagaattttgtctcacacttcttaaggattacagcctccttcctaatacataatacagtcaacagcatgatggaaatattatgttatcttaaaactaaattgtgctgttgtcaaatattctactcagtattattttaagatgaaatacaaaaaatggatcataattaaaacaaagctataatgtcttacttaacttgaaaatggaagcttggatttttagtgttttgattttatactaaaaatacttcctgaattcttactgttggtttcctttgcaaaattgcctgctgaaactcctttacatagatgggtgccaaatcataccagcttaacgccg

SEQ ID NO: 49938 - DNA, 1052 bp, Bovine  19866881568571
  misc_feature (1)..(1): n is a, c, g, or t
nctttccgtgaataatgaaataagttatagcacatagtaggcactcatgtatttgtcaaatgaacaaataaatgtgttcaaagatgcataaattatttttattttgctccatgaaactaaaacatagttctgtgaaatgtaggcatggttattttgtatcagttttaaaattggcaggctaccaaatgttaatttgcttttagctagtagagattaaatgtaattccttccctgagcaaccctgaagtaagcaagcatgaaagcattttcacagtaatctgggaggaattgacatttaaaggagttagcattacatctgtactttaaagctattaatttcatagataaattaacttcattactccatctttatcttgcattttgaaaggactccatcagctggacgactgacagccgagggtcaactgaaactgctcttatcccagccaggttgtaattggaacctgcttctggaaaccctactgcatcacgatggtcttttactaagaatcttgctaaagagctcaagtgagtatttgtagttttgagaatgtcctgaaaaaactcagtcattgttcaagtcgaatggaatgttttttcctacttgaatgttggtagggcacgtgataccaactgtgttataccaataggcagtggggttagcagcagcaaaaatattgaatcactttataaacctatcagaaaggtcttctttcagggatagtctgaatgagggaaaatgatatttttatatgatactgttctatcgtaactgtcataatataagagatgtgtcaatatttggggtttgaaatgcctaagaacatattatgggaacacagttatatgtccaaaacaagtctcagttagacctgagagagagagattacgattgtttttgacccacattaagcacttcagtggatcatgaaaaatgcttatgtaacttatgaacaagcaagtgtggcttgcctccgcgtccactggggcatggagaagtagtcgcgagaaaattatgaatggaaattgaggagtaatggaagcccatactt

SEQ ID NO: 49939 - DNA, 790 bp, Bovine  19866881727413
  misc_feature (1)..(1): n is a, c, g, or t
ncataattattaaaatagtttcttaaaaatataatttgacatctcataaattgcttattatctccatttgctacataacatgcctgcttttttaaaagtgcttcaataacttaaacctttctaaggcagatgtactgttttccaaattactaaggttttactgtacttgaaaattcataagttaatcataacccataatttgtgacattatttagttctaatcgcaaaatatataattttatgacttttaaatcatgtgaaatatgaattctaagctacaaaaattgcttaaattaaattcattttcaattatcttgattttactgtagtattaaagcaagagatgcttaggattgcatgttgaaaattataaagagttcttaaaatgaaaatattttctggaaagagaggtgcactaaaaaataaagcaatgtcaatttggtgagtaaagcatatgacaattaattctgtttgcttgtcaagttacaatagtgtattctgactgatcctgtcaatttctacttcatacatacacatacataaattactaatagaggagttacaatgaagtattttatatattttatcaaaggggattttaatagctgtaatatgttaatatgagtacttactggatgtatatcaatattctagctcatataattatgataatcagaacttccacaataattagtagaaagcacagcagtctggggaaaagctatatatagctgagagttgcaaaaataaattgaagaagataacaagttcattttttcctgttataaga

SEQ ID NO: 49940 - DNA, 679 bp, Bovine  19866881748186
  misc_feature (1)..(1): n is a, c, g, or t
ntgtattatcctaccgcaattccttttaacctacaaagtgaattttttgacagcataatttgatttccaagaaacagttaactattcaatgtcttcagttttgatatcaccaggcacagtgtaattccaataatgccaccactgactcaatccacatttgctataaaaacaattatcattctgaagtttgcaagctccacatcagcaagaggtgcgactggtgtggaagctacgtgataagcgcctgagggaaagagtgcctcacgtcactcaaagatgaccccttcctactgattaaggagcaccagtgacaggctctcatcaagttcatcacttaactgggaaggtgtgtaaatgcatatggattacacattccaccagtaattttttcatgcaaagttattaactttctataaaagaataaagaaaagtggcaaacatttcttagtgtttaaataaagtatcctagcattaatgcatttgcatttagctaggggaatgagtactgggtttcactaatactgcaaaagcaaacatgccacattctattcactctaaaatggtaaagtcataatacttcatcaaaggattaatcagacccttgtaatgttcacatttaaaaatgaaaagaataccaattactgcaaatttaagaagttaattttcttcaaaaggctat

SEQ ID NO: 49941 - DNA, 741 bp, Bovine  19866881748242
  misc_feature (1)..(1): n is a, c, g, or t
ntgcgcatggtatcttgaaaatggaaaagaattcagcaactttgacctgatttttaaatgactactgtggtgactacagctgctgtagcttagtaattatttgtgataggttgtttttgagtcccatatgtataggagctccaggcccagctacctcatttgctggcacacaaacagattcttccaggtgctgaaaattaaattttaatatattatttaaatattaagagaattacagcttcagtaattttactgctacagctggagtgcaaagcatgcctgtagaatgcagagtgttggacaatctaacatataggaagttgacagtgattttttaaaaattattagcttatatgtttagtaggtgatagccttatttggcagttactttatagatgggtaactttgatttctggtagattgggcaccctttaaattcttgaaagctattattttttggtctttttaggttatgtaccttataaagaatgtattttttttaattgagtattaagaagtcggacacgactgagcgactgatctgatctgatagttgctttacaatgtgttagttgctgctgtacaataaagtgaatcagccatatatatatgtatatatttatacacacacatacatatatatacacagatatgtgtatatatcccgtcgtccttagattttcttcccatttaggtcaccacagagcactgagcggtgttccctatgctatacagtaggtt

SEQ ID NO: 49942 - DNA, 674 bp, Bovine  19866881828171
  misc_feature (1)..(1): n is a, c, g, or t
ntagtacattttctatacattaaagaaggcaaattatcgtcaaagctcaaatagtataaagctctaattcattaatattgttttaaaaatcagaagatgaaagttgagctatattgaccatgtaattatactgtaaatctgtgtagcatgaaagtgaatgctatatttcacctgagaataagcactgaacaattttaatttttttctagtttttaacaaggttgagcaatgaatctatattttctaataatcttgtgtagattattcttgattattcctaaccactataggagttagaaataagaccagcccattgaattcataaggtggttctttgaaggattctaatagccagagatgtaaggatggatatgaacaggagggaagacgactgtattgaaatgaaaagcttgtattggcccatttccagggaatacgcacattacaccctgagtttgctgctgaatctgccatttccttcttggatcacataggtatgaagacctatttccgaaacagctcatcatgttacaacgcaacaccaatagttcttgacttaatccttgactaagagaatcaaatccaagtcaaattacccaaggggaggaaaatcttttacaggcatactttaactcagaaaattgccatatttttgaagcttgccattaactcca

SEQ ID NO: 49943 - DNA, 766 bp, Bovine  19866882047297
  misc_feature (1)..(1): n is a, c, g, or t
naatatagagggcagtttaaagagtcctgcttccttaaggcctaggtgcgtatgtttttggattcagtcgtctcaggaaataggcaataactctggttcatattgatatgtcctgagacgcggaatccaatctcatgccatatacttcgttttttgctacagtataatttccagagcagaaatttccgttggcaagtgtgtagaaaaaggtaaggcagcagcaaatggataccgcagcctagctcagcatcactgaagagccacctccatatgctttggttcagtgatgtgcctttgcacagggctatttagagcacagaagcagtaacaaaatactctgtactaggaatgctgataagacatatgctcaattttaaggatgccaaatctctcaatgtgttccgataagaccgccttaaaatgcatgcatctccttcattgccacacaactgagcactttcccacatttcttgacacctgggcagaccttttaaaaacttaaagcttccactgacttcaaacgtgatccacaagttggcccagtcaaagcagggatacttgtcgtctccttcaaagatatccattgtcagcagtacacactgaaagttcaaagtatacttcacgtaggcattccattcattttccctagaaataaaaaggtgttaatgtgagaacagacatttccttgttttaaaagagctaaagaacaatttttcccccttcaagtcattcacaaaagcaatacattaaaataaactgtctagac

SEQ ID NO: 49944 - DNA, 945 bp, Bovine  19866880472477
  misc_feature (1)..(1): n is a, c, g, or t
nttagagaagattccaggccctaggaacagggggtatgagggtgggtgatcagtctggcattccttttctacttatctgctcagaacaggggcagagaagacgctataatttagcctcacctgggacactggctctaggtggtaaaacccctgcctttagcactttgtattcaattattcaatctcgggaaatgattttagttccaatcccttcctgccagatggccagcatttcccaccccatccccagagccccacactcacgtgatcagcatggactggttctctcggtctggaagaaaggggaggagacagagaagttagccaaagtgagggaccagccacaggtggaacacctgggatatccttggtgctgggacagcccctccgccacccagagccagaaatgggaaggaccaggtgggaaccttcagactgcaggccagctcccacttgaagacacagaacgactatgcttcagtgtccagcgggatggaaaagagggcagtgcgagtggagggaaggggagccgggagccgggggaagggtctcaggagagaaagaggactcagggagaggagtcaaggcagcccttactgcgcagcatgtcattgtaggcgttatccgccaccgcgtatatgtggggcggggcctccgagcggcgctttcccttgtaagctgctaccacggaggctgtatagacagggagccatttgtaggggttgatggtgacacagaagaggcccgagtatgtctggggagagagagtatagatgggttattggaggccaagttcccgtcctcaagctctagccctcgcaaaactatgatctttgcaaaaattctccaaaatgagctgcctaaggtgcgacgccacacctctgtggccgtcctggccccgccctagctctcactcctgccctcagccctgtggtcccacctcca

SEQ ID NO: 49945 - DNA, 1998 bp, Bovine  19866880506503
  misc_feature (1)..(1): n is a, c, g, or t
ngacgctggccaggccgagaaggagaagcagcccggagaataaggtgtgggtgcggggtggggtggggaagagctgtggggccaggcacctgcaagtcccacacctgtgtggccctggacaggtctcatcctgtgagcctcagtttcctcctctgtcaaatggggctaatagcagcacttccctaattagggcgggtgaggattcagtgtgtaactaggctgtgcgagcactcgccaccaagcctcacacatagtaggtgctcagcagatgctcggatcgtcatccaccagctccatgtgccccaggggccttccctcattgaaccctctcgagagcccattggttcacactctggggggactgactccatcatacaggaggggaaggtgaggctctgggggagggtgagctgcttattcaggttctcacaggtgctccctgaggaagccaggagtaagaacagctgcttaaacacccctgaatacccaaatagctggcatctattgatctctcagtgccagccagacactggggtagggctcagtaatccctcgaggaggaagttacaaccatccctgaaggatgaagaaattgaggctcgggatgaactgactcacctgaggttccctggctggaaggggcagctgctcaggccagagttgggggaggcagccccacagtgaccttggccccgacacaggtgaagaatctgacggaggagatggcagcactggacgagtctgtggtccggctgaccaaggagaagaaggccttgcaggaggcccaccagcaggccctgggtgacctgcaggctgaggaggaccgtgtgagcgcgctggccaaggccaaggttcggctggagcagcaggtggaagatgtgagttggggccacagcagggggctgcatggaggggccgggctggccaggacaggggggagcccacccaccctgtcctgcccaacagctggagtgctccctggagcaagagaagaagctgcgcatggacacggagcgggccaaacgcaagctcgagggggacctgaagctgacgcaggagtcggtggcagacgctgcccaggacaagcaacagctggaggagaagctcaaaaagtaagtgtggggagggcccagccccgacctcctgccgcgggggcctcctgagcctgcagcccgcttctcgtcgcccccaggactctagtcagtgttgcatcacagcagaggttgaaccgtagggtgaagggggcccacttagggccaggctctagggctggggcttgagagggaactctggggagatcttgagggctactccaggcacagtgcctcagcacagcatgtgtgctggggctcccagcaggttggcggcagttaggacctgggccggctcatgcccaccctctcccccaggaaggattcggagctgagtcagctgaacctgcgggtggaggatgagcagctccttggagcccagctgcagaagaagatcaaggagctgcaggtgcgtgagggacgggggcgggcgaggacccggctcaggggcccatggaggtgaccctgctgcctgcctgcccgtccccaggctcgggccgaggagctggaagaggagctggaggctgagcgggcggcccgggcccgcgtggagaagcagcgggcagaggcggcccgggagctggaggagctgagcgagcggctggaggaggccggcggtgcgtcagccgggcagcgcgagggctgccggaagcgcgaagccgagctgggccggctgcggcgggaactggaggaggcggctctgcggcacgaggccacggtggcggccctgcggcgtaagcaggcggacagtgcggccgagctgggcgagcaggtggacagcctgcagcgtgtgcggcagaagctggaaaaggagaagagcgagctccgcatggaggtggacgatctgagcgccaacgtggagaccctggcccgcggcaaggtgtcggcctccttcctaccccgacct

SEQ ID NO: 49946 - DNA, 2166 bp, Bovine  19866880550679
  misc_feature (1)..(1): n is a, c, g, or t
nacttacccagtgctcagaatccaggctacccactgcccaaaaggaatcccatgctgcctggtccccgccctcagaatccagcttgaccgcccctgtccaactgctaccctgacagacgctcccccacccctggggggtcctgcacatgtatgctcatcagcaactcacgtccgcacctctgtgctcacccaatgtcttccccaccgtgctgtacctgctcaggcccctttccaggcccagttcccctgccaccatccagctttcagcactggctggccctgcaagctacattggcagctgcactgccttctcttgggctcactggtacatggattataagtagcttgtgggtaggtcctgggtcgaataagctttgcttttgttaactcaggagtgcctgccacagctctgagtttgagagttaaagtgaacagcaatccctccgtccgggtccactggggtggacgcttgtcggctctgacacataggaagtagagaaaaccatgaactcaccgcctcctcagcctggcgcttataggccttgaccttcagctgcagcttgtccaccaggtcctgcagcctcagcaggttcttcctgtcttcctccgtctgggggcagatgggtggaggaggccagtttgggggaaggagcaagagcaatcatctttccctccctcacgaccccattctcttcccatgcctcagctgcccctccctcccatgggccaggccgaagaggttgtgcacaaacttcatctctgatgagacttataggccaaaggtctcacaacaggatctaaaaagcaaacagggctgtggccctgaggtaagaaacaggagaggcttggaaccaaacgggatttcttcatttgataatgtggagacatcagggctgttccagatctaatccggagcaccacagatgctctcagcagtgggtctagagtgaccagagaggacccaggaggaaagcagaaagaagggattatcataatccatatcattctaattatcacaacccagtatgtattgttctgggtcaggtattgagcaccaggatcaatggttcctatgtcgcttgatcactcctgatcactgcttctgctaggatgctatttctatttacacccacacaacacacctgcagttctccatttgtacctctttcccatgcctctcatatccagctgtcaaaatgaaccaacacctctttttttttgtccttcctgcccaggcatattggaaagtaagaacaaaagccctgagctatgcagatggaaggcttagaacattctggaatcttctttctctaaggccttctatctgttgtcccaggagttccatggaagatctgagtcttttcccatccctgattttatcactaaatgccacacaacgcccctgcctctgaggctggtggaaagatgccttggacggttctgaagccttcatggtagcacttcaggttattaaacatctgggaaaattctggttcaggagctttcaagaagtagaagcagattctccctttgctaaaaaaaaattcatagactcaagccaacttgtcttcagagaatgtgaaagaaaactaatcccaagacagcttttcaagaggcaggtggcaggagggctctgcgtggggcccatgtgggtcaggaggtggggcaaggggatacgttttcacgtctacttctaagggcgtggccacagcgcccgcacctggtacgtgagctccttgatgcgccgctcgctcttcctcatgcccttgaccgactccacgttgcgcttctgctcggcctccagctcgttctccagctcccgcacccgggcctccagcttctgcagctgcttcttgccgcccttgagggcgatctgctccgcctcgtccagccggtgctgcaggtccttgatggtctgctccatgttcttcttcatgcgctccaggtgcgactggtgtcctgctccttcttcagctcctccgccatcatggcggcctgcaaacgggagagagtgtaaaagaacagggcctggggcggggggagcctcttctttcccataagagtcacctctttctcattctgacatttggtcctggaggccctcaagcccacagaatggcagagtcactgttgttacagcacagtgccctggcctggacccagagc

SEQ ID NO: 49947 - DNA, 1637 bp, Bovine  19866880621272
  misc_feature (1)..(1): n is a, c, g, or t
nactgaacccactgaacacatcagttttcgtttaacagcagctttctccatcctgtcttctagggacggccaggagattgctgtggtttacttcccgggatggctacatgccaggccattacagcctacaggttggtgctttccattagcccactctctgcctcctgggacccaccactgggacccacacaaggatcgtaacaacctgggtttttctctgggccctggcttcagttcttccttggggaacttccttctcctcccacaaggctttttgctacttctcactccctaaacacacacacggtctgccagaatctaaatcctcccgaatccacaacgcttcagccattcaccttagtttctagggttatgctggtaaatatgtaaccataatctctctgtggaggcacgcccttatttatagcatttgctgatttctgttgtaactactcccatcatgaccaatttcaaagctacccaacttaacatctctgaacagaattgggaagagatgggcccaatcagctctcactagccaatgcaaaccagtttcactgcaccattgaccagttccttcttgccagctcttttttctgttttatctgcatccaaaagtttttatctgctgtccattcatactaaggacactaatgatatcaccttagcttactatcttaccatgtagtttcaaaattgcattccacatctactgtttcatttaatccttacaccgtatgaggtgtataattatccccatcatatagatggagaaactaagatttgtaggagcttatctaaggtcccgcagggagctcccagactttctgactctcagtccagtgtctttcctagcatatcagtctcttcctcctgcccctgatccacagcatggagaagctaataggaagcccttctttcagttgggagaaggtaaaggagaaaataagttagaaaataccatgagcagtagtctggggattctgagcgtttgactccacctttgggtgaccatgggcaggatcctgcatctttctgggctcagcttctgtaaactgagaggactatactagaaaactgagggaggtccttccagatctataattctttgagtgtaagatcctctctgaggcccagcctgtacagggagcagctccacagaggtggcagctctatagaaggtcctttcctctagaaagtggttagtggtaagaacttgctgactagagaagagagaaactgtctattgggaaaaatggatccagattctaggataaggggcttgagggaaagggccaaagaaaactttatttagagttaacaggaaggaaattaatgcgcaaggagaacgtttttagggaactgagaaactcagaccaggtttagacatggagacaaatccactaggcttagtgacttgctagcagatggtgagcaagccccctgctcatctctgagttttgctttccctcctttccacatggggtacttccctgggtttatctccgacatgcagggtacctttagctctacccagaacactagcttagttgttaagtgtctgcggttattgatgaagaccaggcagaggtgctgcaggtgaacatcagaggagggacatcacgtgtgggggtgag

SEQ ID NO: 49948 - DNA, 707 bp, Bovine  19866880756950
  misc_feature (1)..(1): n is a, c, g, or t
nacctttcctgttcttctgttagcagattccttcttttccttgtcaacctcccccaagtcctcagatacccccaggctgggctcttcagtcctctccctgtatcccctcactcaccctgttttcggagaacattgctgaaccgacacacttggaccagaagctcttggtatgtgatctgggtggtttcctctggctcattgccctccctgagatgtatcagaaagagccagtcattagggaatatgacttcttccccaaacaaacaaacaaaaataggaacagtcataaaatccattcattaacaccaaggcctgggaatattctgtgagggtgagccatctgccaccacaccttgagctgactgatcagatacactgggcttacaagatatactttatacacaacctgtgtatcactggaaaatgcactgccatctctgaacctcatttgataaaatgggatcatggtcttctctcttccattcgaggcatgtattaaggagaaatggtatcacgaatgtgattcttcctgaaagtgatgtcagcattgcactggtgttattcaaagtggggtctctagattacttgtacccaagtcacctagggaacttgtcaaaatgtagattcctgagcccaaactcagaatcacaatcacaagatccaagaatctgcttctttactacaagtggtataaagaatcaataggt

SEQ ID NO: 49949 - DNA, 721 bp, Bovine  19866880769510
  misc_feature (1)..(1): n is a, c, g, or t
ntggggatgtaatatacagcacaaggaatatagttagtaatactctaataacttagtatggtgacagatggtaactaggctttttgtgatgatcattttgtaatgtataaaaatatttactacattctacatacagtatagtttttatatagttctatattatataagccctatggaatttatagaatgttgtaagtcaactatacttcaattaaaaaatgaaaatctctccgcccgcccccccaaaaaggactaacaaatatatttacaacactctccagaaaatgggaaccttgaaaggaagggagattcaagtatcaagccctggggtctttgaagctggctaactttatgttcagctatttctccaaccataagagaaaaagtagatttgcaattgtttgtagttgtacaccctatctttgaatgaaatctcatgaaacaacccaatttgtaaaatagaaaaccacgatcatcaaaagccgatttattgttacagtttagtttcaaaaacaaaatatcatccagtggttatgaggaatctaggaaaacctgtcccagtaatgccagctttcgacgtaaaaggctgactagggcagctgagaagtgggattttctgcttggcaggcttcttttcccttgcctgctcatggttttcaggggagggagaatgttccgggccctgtttggggggttcccatggccccgagctcatagtttt

SEQ ID NO: 49950 - DNA, 610 bp, Bovine  19866880771074
  misc_feature (1)..(1): n is a, c, g, or t
nttgggagagaccaagaaattacctagtccatgcccctgccccgaattgtgtgacacaggataatgtcatagttaaatatgtgggggaaaaaaattgtggagactagaatcagcctgcctaggttagaattccaactccatcactcactagctgtgtgaccttgggcaagttacttagttcttggagtctatatcctcatctgtaaaatgaaaataattacaattatctcgtagttaggaggcttaaacgagataattcttataaaacttagcaccaggcctggcacatagtgagcgctcagtaaacgctagctggcatgattgttattattatgcttgtatccatgcaggtattatgcatgcatccatccaatcccctcccggagcttttgcttgcacatgtctgtgatgagcagctcatcgcctcccaagctggttgagcagctccgattgttacaaacttattccggtatagagcgaaatctgccttcttgcaacccttacccccgcccctgtgggccctagttctgtcctgtggggccacgcagagcaagtctatccttcctccacgtgacagcccttcagataggaagacagtgatcgagtcctt

SEQ ID NO: 49951 - DNA, 1222 bp, Bovine  19866880771700
  misc_feature (1)..(1): n is a, c, g, or t
ncgggtggtggtcatgcagctgccgtggggccgtagcaggctgataggtgaagaacaggtatagacacatgagagatccaggcatggatgtaagggaagggcctagaagagggacagtggtaggaaacgtgagtgggtcacccagagcagctccagagaacagcctaaatgctgacacccggccaaggcagtccacacccacccggctattatacttcccagcttagttttggggttccccactggggatgggagtctcagcacccacagagattcaggagataagatctcgctcaactgcagaggggtctcatttaccttccttattcccttttctggggtccaccaccacgggtcctgtctacagaacgcctttgacgtgctgggcttcactacagaggagaagaactccatgtacaagctgacgggcgccatcatgcactttggaaacatgaagttcaaactgaagcagcgagaggagcaggccgagcctgacggcaccgaaggtgggagccaggggtgcagggagcagctatggagccatgaagccttcgtctgggaggaggcatcccttttccaattctcccatccgccctttccttccagaggccgacaagtccgcctacctcatggggctgaactcggccgacctgctcaaggggctgtgccaccctcgggtgaaggtgggcaacgagtacgtcaccaaggggcagaatgtccagcaggtgggtcatcttcagatgttaaatggcagaggggctggcccggtgcagccgtgggagctttgcaatttactcttcccaccactccctcattcgggtttctcccccaccttccaggtggtgtatgccaaaggggcgctggccaaggctgtatatgagaggatgttcaactggatggtgacacggatcaacgccaccctggagaccaagcagcctcgccagtacttcataggtgtcctggacattgccggcttcgagatctttgacgtgagtggggagcctagggtctgggagaacaggaactcactggttcacaggcagccgccgttggccaagccctggggaaggccgtgggctccccaggggtggagacagccacgtgtcttcagggggcactccctccctgccctgaccggagagaagccagccacacccattgccaggctggacgcagccctgggctgacccctcgggccacagacccctgcctgcctgaccca

SEQ ID NO: 49952 - DNA, 1584 bp, Bovine  19866880854205
  misc_feature (1)..(1): n is a, c, g, or t
ntttgttgttttggtttaaaagcagcagaaatctttgttcaaatgaaattgaatgtagtcccacatctgtctgcagtacaggagacccggggttcgatccttgggttgggaagatcctttggaggagggcacggcaaacctccctccagtattcttgcctggagaatccccatggacagaggagcctggtgggctacagtccttggggttgcaaagagtcagacaggactgagcgatcaagtacacagcacaaggcctatagtcagtgaagagtagaactgctctatttgaagggaaagtttaagggcctagagttgctgcctgctattcctctctcctccataatgcagcctgagtgcttttctcatttattttctttgcttcctagaccgggaagcagaggcccagaaatttcagtatgtgtccatggccacctgaagccaaagctggggcccagggtgctccctgccttacgtaccctatcagtggcacagactttgccccatctcttagactctgtcatggtaatccaaacccacttttgacacgagcagccctccctccagcagtttcgagccccatatgactctggatgtgtttttggcctctggtcacttgtcagcatgcctgggcagtgaaggctgccctgagatgtgagaatgcatttggctgtttagttctgagactgcaggagtccttagggtgctctggacccaggtggagcaggaggacatcctgcaggtttagaaatgtccgcatgttctgttttgttttgccttttacccacctacatcagcaaagacacccagccccagggtctcaagacgttgttcttctgccatatggaatttggcctctgtcagcctctcaaatctgccatcaagatttttgtctgttttctttcaggagtttggtatgtgatgggaagaggggcttattaacacgtctgctgcaggttatgaagaaggagccagctgagtcatctttcaggtaggtctggacatgcacctcccactcctgagggtgcagaaaccaagtgtttaagctgttagaaatgccttctgtcatcaccagcttccaccccgcatagctggttattgtcagggagagggagtctgctggctccctggtgttgtacggaatctagcatgtactggattctgctgtgtgctggcagtgtgtttcaggaattgagccagcattcagcaagcacctattctgtgctgatgctggacaagcgggaagaaatgggagctacaatccctacccatatggaggcccctggcatgcaggaaataagcatgggaagacccctatgtgggggatgcggtatggaagggctcagagccaggacctgccctggggactgtgggagcaaaggaagggcttgtgggggagggggggtgcagacagggagggtgtcccggttccttagactcatccatgttgtcttagaggctgtggacaggacaacggctgagggaggcattccatcagggtgggtgtgagctgtcagcaggctccacgcccaagggttccctgtcagctcagcctaccttgtcccttgtcccctcacggatccaa

SEQ ID NO: 49953 - DNA, 1142 bp, Bovine  19866880923184
  misc_feature (1)..(1): n is a, c, g, or t
nttccggtcgccccaaaatggattcgaatgaatttcccctggagacatggagaaaagtggtgatgagttgagggagagctcctgtttgacacatcccttgaccaacccaaatcccaagtccaaaggcagggcccactcacgaagcgggaggagttgtcgttcctgacggtcttggcgttgccaaaggcctccagggcggggttggcctggatgatctggtcctccagggtgccctgcggaggtcaagaaggatggcaggtgagaggcctcctcctcctcctccctttctgcggtacaggcccttggaggacagtaggcctaccttgcctgtggcctgctcctttttgctgcggtcgccaatggcggcaatgaccgcgaagtattggatgactctcttggtgttgaccgtcttccctgccccggattctccgctgttgggacagtcgggcttattaggcagtgaacaaacattatttgagaccacaagcttcgagtcaggagagctttatttggcagggggagccctgcagcaggaagccaccagataatatgcatcccagccacaaagctgtgctctgacatacacagggtcaagggtagcaactaggaaagatgtgctagaagaagcggatttgggcaggtgggagacctgaatttgatctttgagttgggaagatcccctggaggaaggtatggcaacccactccagtattcttgcctggagaatccccatggacagaagagcctggtgggctacagtccttggggttgcaaagagtcatacacaactgagcgactatgcacagctcaatatggtcttggctgggcaaggtcaattaaaggagatgggcccaggccattttggaaaagaatgggcggggctggaagaatggggagggtttctgaagggaaaaatgaaggaaaatgaagaggggaagaagacatggtgttcccaggcttatggatagatgcgtgatgagttagaggggcatgagtaaagaagatgggagaggaaaaataagagggatggggaggagaaaggaaggagaggagaaaggaagaggaggagcaaggagaaggccagagaagacatcagagctgcaccagaaagtggagggaaaaagaactgggggtctgtgtgt

SEQ ID NO: 49954 - DNA, 1934 bp, Bovine  19866880932260
  misc_feature (1)..(1): n is a, c, g, or t
natcccggggccgactgccctcttcccctcgtctcctcatgttaataatgattgacatttgtagaattctttctttgtgccactgaactaagtgttttaaatgcattaatacatttaatctctagtcacctccatgaagcttcccaggtggcacagtggtaaagaatctgcctgccaatgcaggagatgcagaagacatgggttcgatccctgggtcacaaagatcccctggagtaggaaatggcaacccactccagtattcttgcctggaaaactccatgaacagaggagcctgatgggctacagtccatggggtcacaaagagctggacacaactgaacaactgagagcacacacctccatgaaatagatcctattgttactctccttctaaagatgaagaaattgaggctcagagaatttaggaataaatcactggttcgaggccacactgcaagtaaagtgaatttcaactctagcaggctgattctagagcttgagttccatgagggtgaattaatatacaatgagagagtaaagagacaatgtgttaaaaagagagaaagacaaaaagtaagcctgagaatgattaggatgggaacaaagccatctctgccttggttttgggcagcctggctaagggtactggaaaaatgtgtaatgatttgttggttacagttagagaaaagattggccccattgccacaccggattacatccagaatgcacctggattgcctaaaactcgctcaggtatgttcagaggcctctagggattgggattggatgggccaaggcccactaggggcgagtatgcatggatggaagcttttggcagggccggagtgggtcagtgtgttgtcaccaggtaaccataagcgtgtggacccccagggaaaatcatgaggcgggtgcttcggaagatcgctcagaatgaccacgacctgggggacacgtccactgtagtcgacccatccatcatcacccagctcttcagccaccgctgcttgaccatccaatgaataagatcctgcctggaacccaggattaccccctgcttggctttccaaagttttgcccaccctccctgcccccatccaggagtgctgagggccagtgctgacccacaacacttcccttgtccagctgtctgggaccgaggaccatctttgcttctgggtggaggcaacttcctgcgaccaccaggcagatgcgagagggcccaggtcagcctcaggctgtgcccctagactgcaaagagcccttggagccctgaagggacctgaaggtcatgtcccaaacccaagtgttcagtgggcaaatgagggcatggactgaaacagggaagcaactctaatcctatgtcatctctctcaggaagcaccagtacttatcttgggcatgcacttgccccgagaaatgcctgtttgtgagtcctggaagaatgattattttttaaaacgttttgttgcttctcttgtgcgtctgaattcccttttgtaccggatggcagtgcctgtctgccatctgttccaggggctctgcaggcagcctcagtttccggagggctttcagatcatttgtgtccttgaaggaatacctgtgttatgctgccaggaccagaggagctcacttttcttgtcctctgttcccagcccccctgaacagtcttgctcatgagagatgttctcagatgaagctcttttttcctacccaagttgtactcaggccctgtggttgtaggaataaagtctgtgacttcatgaaggtggtgacttgctttctcagtgtcttacacggtgcatacttactggctgctctgatttgtgtgggggatgggaaggggagtgattttcctcaggaataccccaatattccttccagaattttgggtctaggcagtcctaggcagggcaatgctggagacccaggtt

SEQ ID NO: 49955 - DNA, 1689 bp, Bovine  19866880968052
  misc_feature (1)..(1): n is a, c, g, or t
nctagttttatgacggaaattgaagctccaacaaaaaaaagttacctgcttaagctcatatagcaagttagtggtgctggacagtctgactctgaattttttttttttttttggccactttgcacagcatgtgcaatcttggttccctgaccagggactgaatccacaccccctacattggaagtgcggagtcttaatccctgggccaccagggaagtcctaaacagtctgactctggagccatatctatcagaccctcttctgccaagtttcctcttttttatccccttctcccctcctccatacactgaccctcccaggctttcttcttgctgctctttcctctctcctcctcccccaggctcacccaggtccagagcccccaccccctctcattcatatgctgagcatagtttggaggctggggataggtcaggtggatggtgacctccaggggtcagctcacaccctagagagtccttcagcccttcctacttccacccaggtgcctggcaaggaaagtcctggaggggcccaccagccagtcctcttacctatcggccatggccaaaatgtgtgtggcctgcaggacgcggtggacagagcgagcaggacccccctacctggtagagaggccagcgtgccagggaggggggcagtgctgggcctctcagggccgggtgtttctggaagctgatatgagccacagcaactgctggcattatctgggttctaagaatagcctgggctgaagagttggggggcggggccagggaagagagcaggagcctttttccactgcccccctccacccctgctgcttgtcctagaaactgggaagccttccttctggcttaccacgtgctctgggatgattcctcatggatacaccttgcccacctttgggtggaggatagggggcatcccagggattcagacccagggctgagagcactgagtccacactctgaggtccagccttccccgaggcccttcccatgggcagagtaggggcttgctttttcaaggactgatgttttggaggcaacctttattcattcagcaaacaataagaaacaggtagacatgattcagaattcaaaggtacaaccaccatgtgtaaaacggatatctagtgggaggcagctcagcttggtgctctatgatgacctagaggggtgggttggaggcaggtgggagggaggtcggagagagtggatatatggatacatgtagtgattcactttgttgtactgcaggaactaaggcaatgtcacaaagcaattatacttcaataaaaaaaaattcaaaggtgtaaaaggatacacaaggggaaaataccagtctctccctttcctggcctctagccacctagtcctctctgctcctcacttttctcacttaatgaaatatcctgaaattacagtaatgtaaagcacagtaatatattatgagaggaaacccacatgtcacactgtgagtctccactacgtgccaggcactgttctaaacacttcagatgctctaacccgtaaagtgctcatcggaatcctacgtggtaggtaatttgtctgaatctccattgttaagaggtcaagtattcttccaagacttcattgctggtaattgatcagagccaggattcaatcccaggcagtctgacatcagacaaggtattcctcatcactg

SEQ ID NO: 49956 - DNA, 1534 bp, Bovine  19866880968249
  misc_feature (1)..(1): n is a, c, g, or t
ngagttcagagtctcataaatacagtaatgattggagcccaatattacaagagggcttccctgctggctcagttggtaaagaatccgcctgcaatgcaggagatcccggttcgattcctgggttggaaagatcccctggagaagggataggctacccactccagtattcttgggcttccctgtggttcagctggtaaagaatctgcctgcaatgtaggagacctgggtttgatccctaggttgggaagatcccctggagaagggaatggctacccactccccagtttctggcctggagaattccatggacagtccatggggtcgcacagagtcagacacaactgaagtgacttagcagcagcaatattccaagaactacactgtctataacaggggatttagggaatacagaagagggggaaagtaccgggctagggagtgaggtaagtcttccagagggaagactaaggtcttccttagggagacttcctaagggaagactaagcctaatttataggcttaaccttaaaataatgaaagatttttgccaaactaagaagtatgccaggcatacagggggaaaacatacaaaggcatgacagagattcagcactgggggaagcacaagaagtattgaaaccctgtgccaaaatttagaatgaaaaacaggttgtagatctctgatgaaagagtaaagctgttgctctcttggggatgttttaagactttattattctgactattttgttcttaatcagtcagatggatttcatcacaaggcagtaaagatgtgacagcctccttggtgaaataaataataacttatttatagtttctggtctgcctccttcccaaaatgatttgatttgacttgtcataacagacacagccacaataagatgttcatatagaaacaaagaaacaaaattatgaggacttccctggtggtccagtggctaagactcagcgctcccagtgcagtggggaatgcagggggcccaggttcaattcctgatggaagaacagaccccacatgttgcaacttagagttcacatgctgcaactaaaaaaaaaaaaagattccatatggccacaatgaagatggaagatcccacgtgccacaactaagaactggtgcagccaaataaataaataatattttttaaaaagaaacaaaactgtagatgggaagagcattaatacagcttcttaaggtcttttctcttcatttgctcacttggtgttcaagataatcttctgaggatgggcggcagtttccatgtgacttagagacgagcgtgtacgtgcactctctacaggacatgcttgtgggctccatagatgcacggatgttttcttcattttccaattaatgccacagatatttcccggtcctctaatttctagctggtcagtgaaaatactcatctttacttttccaaccttcagattcattgtctgaacttcttcatccaagctactttcagattctcttgcccttttaaagtttatctcctttttttttttaagactc

SEQ ID NO: 49957 - DNA, 705 bp, Bovine  19866880978641
  misc_feature (1)..(1): n is a, c, g, or t
ncccacccccactaaaacaagagtaaaaagatggaggtaacagagaaaaactacatcaggaatttttctgaaattgagatttagctcggagcttcctcaagacacagtccagcacctttcattaacacactgtcagatcagccagtgaataagtaaactagcatagctccaaaagaaaggtaggtttcaatgtctctcaggaaaggaaaaggtcagtagttggcaacagggaacaggctgacttgcattcaatgagacaatggatgtcggtgtgctttgtaaaccgcaaaccattggatagatgttatcatttctgcaggtaaaggaaaaagattcccttctttcataaattaagttatcctataaacactcatgaattccagcttagtatcagataactggccacagtgatacagaaataaataaggctaacttccaacttttgctaggaaccagatggggaagggcagtgacctctgaacctagggtgaagagtaacataggttatattttgtcttctctcatctagattctttcaaaaagtgatttaaataaacttgaaatagaagcaatgccacctgaacttggaatacagatgtaaatgttaggaggactaagctgaggacgggtattattgaacaggatttgtcagagcaaaaaaagtaaaaacactcgaggcaggacattttatctcctagaaaagaa

SEQ ID NO: 49958 - DNA, 2743 bp, Bovine  19866880984062
  misc_feature (1)..(1): n is a, c, g, or t
nctgacttcaaagtcaggctgtctcctcatagtgtgaaggacagggactagcagggaagccaggtctttggcgatttcacagaagattatcagcttctttccagctcctggctcaatgagttagttactatcctctcattggcttcaccttcctagagctgacaggagaaaagcacagagctgtttaaagtgggaaggaactgggagagaggaagctggcaaatggccctgaatgccggatgcagaaaaagtcacttccttaattggctcacggacaagtggcaaacaggaacatctctagttacagttaaatgctgatgtacacctcacacccatgcatacgtgtccccatatgtatgctgacctatgtacccctgcatacataaaaacatatatactaatataaaaaacattgtagacataggaactgctcatttgcacacataggaacaaacagcattaatatatggatataggactcgaacatgggcccatctgcaagtatatgcaccacacacgtatgtatctacctacgtgcaccttccagaaactctctatcacattatcctgttttattttctttgtggaaccttctatgatttgaaattagctcatgtattttattcacttgtgtattatctgtatctttcactggaatataaatcccatgataacaatgaccttgtctgtcttgttcattgctacatccctagcgatgagattcaatacctagaatagacactggtacatagaaggtgcacaggcacagataagaacaaacctatacaagaatcagagaaggcaatggcaccccactccagtacttttgcctggaaaatcccatggacggaggagcctggtaggctgcagtccatggggtcgctagagtaggacacgactgagcgacttcactttcacgcattggagaaggaaatggcaacccactccagtgttcttgcctggagaatcccagggacaggggagcctggtgggctgccgtctatggggtcacacagagtcggacacgactgaagcgacttagcagcagcatacaagaatacgagaacagcttacttgagcccactttccagttacacacacacacagagtgtacatctctctccctgggctctgtgctcaagttatacattattgatagaggcaccttattcctttccagtgtcttctttctctgacataaacacccggctggggccacggctggttgggagaggggagggagcacgcatgcacacacacacatgtgcatggggacacacacatacccccaaaatgtagtattactcagccataagaaaagagtgaaaccttgccatgtgtgataatatagacagacttgaggatattatgctaaatgaagtaaatcagagaaagacagacaccctatgatttcacttatatgtggactctaaaaataaacaaacataatgaaacagaaacagattcatagatatagaaaacaaactggttgttgctgggggcagaggagagtggggaatgggtgaaacaggtgaaggagcttaagaggtacaaacttccagctataaagtaaatgtcttgtggatgtaaggtatagcatagaaaatatagtaataatactacaactttgtatggtcacagatggtaactagacttattttgatgatcatttttgtaatgtataaaaatattgaatcactatgctatacacctaaaaccaatattgtaagcaaattatacttcaatttaaaaaagatgactgaagtgacttagcagcagcagcagcaggtgaacacatgtacacccatgtcggatgtcagtgtatggcaaaaccaatacaatattgtaaagtagttagcctccaattaaaataaataaatttatattaaaaaataaaaaataataaaaaaattttaaataaataaataataaaaagactaagtgaaatatcagtacgtaataagcatataaaatgaacaagtgagtgcctataatataaatctctacattttatatattcagaatatttcataattttaaaatttgaataaaataagtaaataaaatattttactatatcaaaaaaataaaaagaaaaaaacaaacagcagcatgtgcacaatgacacttagttttagggggaaaaaatagagaggtgcggggactggaaaacttgagaatacgtgctctggaaaggaggcatctagcacttaaacgcagcgcctattaccttttgccctctgggaataaggtctcaatactgcccaatttttcagtttttcaagagagacctggaatctgtttctgaatttttaagtttgatgcaattaactttaaatttaaacactgtggtcaaacaaaactattaatcaaagatttagctgatgggctacggattgggaaccctgcagcagacccagctacttcccttttacctggcagccatatggtatgggacagctcaaggcatataatcttttttttttttttaattgtaatgttttatcgggtctatgtatgatcttttttactttttttttcacataccaaagaatcgaaatttttatatctcatatactcttcttttttttcttatatgatattatacatgttttaatgccattctcccaaatcatcaccccctgcacagagtccaaaagactgttctatacgtctgtgtctcttataatctttttttaaaggaaaacttctacaactagcttatctttacactctccatatt

SEQ ID NO: 49959 - DNA, 835 bp, Bovine  19866881048669
  misc_feature (1)..(1): n is a, c, g, or t
ntgcccatctgttgtcttcccatactatcctgtgatctattattactgtacagaccacactgtattgtaattatatccatcccccagccagcctaaaagcacctttggtgattcattcagcagatgtttattaggcactgcgccaggcacgagggatgcactgataaactaggagctcttagtcgggtgcagagtttcggaaggcatgccaggaaacacgcgtccctgtgtcatggtccaataactttggggattagccactcatcatggctccccctgtagtgattaggtccatcttagtattttaaaagctctgaggagtcctgtagtaaaagaagctatttacttcgtccaatccaagtctgccagaggttatcagtatttgctgaatacatgtgagtcatctagacagttctctcaactccaatttgtgctttggtccccagctcaagaggaggtccaagtgacactgtgatgctcagagactgctctgggagtgaacagcctctggctgcttaggggccggtgggcttgctgtccagggcccccatggagacagggggccctgggttgaacaatatgaagccccagtccctgcagctggtgctggaagagcaagtgctggcactgcagcagcagatggccgagaaccaggcagcctcatggaggaagctgaagagctcccaggaggcccagcagaggcaagcagctctcgtgaggaagctgcaggccaaggtgaggcagccactctcttaggaaggggaagaggaggacccctggggctgggggctgagaggatgaggttggccggagcccagagccacacggggcaaca

SEQ ID NO: 49960 - DNA, 1948 bp, Bovine  19866881054569
  misc_feature (1)..(1): n is a, c, g, or t
ntccttcacgcgctgcccgggaccagcacgaggcagatgtgcggtgtactttaaatgaggtgcctcaaagaagccaatcccatccaaacctctgggacatttggcatcaagtctccatgggcgttgcccattggtttggtttagaccctctgaggcctctcctgcccccaggccctggtgccccaggattgtgggaggcctgcacaaacccccggatggaaggcctgttcccctggaacaatatttgtctcccccaggatggaagaggaggacagaaagtctcctcggatgccacgcacatggctgagctgcagaaagaggtatgttccagaaggttccatcttctaaggctctttccctccctggtactcggacagcaaggctttggtgtctgctatgtgcttggtcccttgtgcctgtccagcagggaggggaagatagttcgtgcctcaaagaactgcagaccccatgggaggcaagcagagccgtcccagctctacctactacactgagtgcacttaacctctcctatgcttagggtgggagcggggaagaaagtatgctccaggccccagaccacctactgagaaagggaagggaagaaggctgaggagcagacagaggattctcacaggacagcctgaaccaagcagaagcacccgggcctcctccgccctcacatgcacgcttgcaggcaggactgtcatcagcacaccaggcagagcagcctggcacaggcgccaggatccataccccagagctcaggtcaagctccaggaacctgtttcaagtgccttcttgcctctgaggtctcacctgaagattcaccctgtcttgcaaggcccaggagtaattaaaactatgaagttctgatttcagaacctgtgccagaaatcagtagtcactactggaaggccctgactatacctcaagctctcgctttgaattctgttagactcatataaagtgatcgctgagacaggcccagactaggatgaggcagggcaggcctccctttggacctggagcacctcctgaagttttgcactcgacgaggagcctctcttgccccaccctcatcctgaatgtgccctgagctcccaataactccacctcagtgtacccatctgagaaatggatcagtcagtgattctcaacccttatacacattagaatcatctggggagctttgaaaaaaattactgatgctcaggcctcatcttgtctagttaagtcagaatgtttcttaaaatctcccaaaggggcatgatggagctttctatagcaattaaaccgttctgtatcttgattgagatagtagttatacatgaatatgtatgttaggaaatatgttaaaatgtacttaaaatctgggcattttattacatgtaaacacatgaatagttttgtttttttacaagctccctctttgagcctcctgtgcagccaggattgacaatcactggattctctgattcccaacagcccttgccctatatactgtaaagcctaatcctgagattcatgggtgtggagttgattcaaaggctggtctgacaagagccacaggagccaagcaaggagggggtgggcagcttcagggtcctccatggctcttgccctcttggttttcctgccccccaggtggccctcctgcgagcccagctggccttggagcggaagcagaagcaggactacatcgcccgctcggtgcagacgagccgtggagctggcgggcctgcaccacagcctctctcactccctcctggccgtggcccaggcccccgaggccaccgtcctggaggccgagacccgcaagctggatgagtccctgactcaaagcctgacatcgcccgggcccatcctgctgtgccgcagccccagccctgctcaaggcgcctccaggtagcagccacagcctgggagcacgcagacagacaagacggcg

SEQ ID NO: 49961 - DNA, 711 bp, Bovine  19866881111043
  misc_feature (1)..(1): n is a, c, g, or t
nccccgacccccacacacaggccctgccctcatcagtgctctcaacatcctcgagggcttcaatctcaccagcctggtatcccgggagcaggctcttcactgggtggcagaggtaaagctgaccccttcgctccacctgggtctggagacacaagagtcgggggatggggtgctgccataaggcctgactaaatcacctccaagtttcctcacacaggaagatcctcgtgtgggtgctgggaggggcttggcagcctcttcacacacctgctctgtttacagaccctgaagattgcattagctctggccagcagactgggagatcccatctacgattctaccatcactgagagtatggatgacatgcttaggtgggcccccaggagcaggaccctgagtactacagaggtggcggcaggtgtggggaaaggatcaggtgaagcagctggtggagcagtaaggcctgcagtcccaagtaaatgtcagctcaaccccagctcacagtgtgacgcaagttgcctcactgtgtgcctcagtttccccatctgtacaacaaggtggcctacttcatacagctctcaaattttcttgatcccagtgagtgaaagttgctcagtcatgtctgactctttgcaaccccatggactgtagcctgccaggctcctctatccatgggattctccaggcaagaatactgaaatgggttaccat

SEQ ID NO: 49962 - DNA, 1359 bp, Bovine  19866881113585
  misc_feature (1)..(1): n is a, c, g, or t
nttagagcctgaatgtctccacatcgttctgaatttgccttagttgattttacaattatttttcagagactccttggttatttcttttttttttaaagactagaggaacaccgtgcttggaaaggctgggctgggagactaacaaaggcagtattatactgtgcacggcagagccaataaatgaattcaggagacacctagatgtgtttctagaggagggcatgagggggaggggtctggtgcaaaggcagaaaggtgggattaagataaattaaaatggggccagcatgttggatcaggggacagcctcttcctgttcccaccatcgcttaagatttttcattctgcttcgtttgaaagttaaaagtagtcttgaccatataacctcatactctcccatcccccactgtctgtttaggaaaagaacttaagtctaagggctatttcagcctgatacagctatgtttattactggagtagtacatctatgagacattcctggggaatcttagactgttaaaactggaaaagaaccttgaagtaatctaatccaggattctcaaagtggcctccaaaccagcggcctcagcaccacttaggaacttgttataaatgcatgtttagggctccactctggatctgctgagcgagatactctggaggcagggcccagcaatctgtattttaaacttttaattttatattggggtatagtggataacaatgttgtgatagtttggggtgaacggcgaagggactcgaccatacatatacatgtatccgttctcctctaaacttccctccaggctgccacgtaacattgagcagagttccttgtgctatacagtaggatcttgttggttatccattttaaatgtagcagtgtgtacatgtccatcccaaactccctaatccctttcctccatcctttcttcccccttaccccacccccccgcaaggcaaccataagttcattctctaagtgtgtgaatctctaagcaatcaatattctaacatacccttcagtctgagggctactgctcaagtctgatcctgtcatttaagtggtggagaagctggctctgggagagctgagtaagcttgagttagaaaccagctgaagaacagaactcagggctcctgacggccagctcttactcctctccctgtgaagaagagcaggatctgggcatggactagtgacgtgtgaaaggggagggtttcagctaatgcagaaagagttccccaatagtaacagctaatgtttactgagcactttctcttggctgtgcattttttaagccccatttcaatttatgtttacaacagtctagctatagatcccatcctcattttaca

SEQ ID NO: 49963 - DNA, 1157 bp, Bovine  19866881145805
  misc_feature (1)..(1): n is a, c, g, or t
ncatacaactactgaacacaaagtaggttctcaacacctccacttccacctgtctctgttcctccactcattcttcacttatcagggcctccaagttgacggcgagactgaggtcttcttggggaaatttacctttgacgtggagaaatctgagattcagactttccacctacaggtatgttggtctctgggaggtgaagggtctaagagaatgggacagtaagggaagataagggaggaaggcagccccttgggagagcagacactggcatcatccatttttctctccagaatgaccccccagctgcctttcccaaggtgaagatccagattctaagcaactggggccaccctcgtttcacatgcttgtatcgagtccgagcccatggtattcgaacctcagagggggcaggggacagtgccacagggggcgcccattaaacatgctgattgttggagtagagtggaagtctgctgaaagaagctcatcagtgctgggaggtctgttgtgggcagggaggctggcactctagttgcctttggtacataaatgtggtggggggcgtctatcaaagtgccttcttggagaagcccagatcagtacagcagcagcagtagttagtgtgtgtggagtgtttaccatgcacctaagatagtactctggatgttacatgccttctctaactaatcttcacaaccacagagggagaaaccgctcagatcaggaaagttgcaaggtcacacagctagtgaagacctgagccacagtgggaccctgagcctacctttctctgctgctgctgctgctaagtcgcttcagtcgtgtccgactctgtgcgaccccatagacggaagcccaccaggctcccccgtccctgggattctccaggcaagaacactggagtgggctgccatttccttctccaatgcatgcaagtgaaaagtgaaagtgaagtcgctcagtcacgtctgactcttagctaccctgtggactgcagcctaccaggctttgccatccatgggattttccaggcaagagtggggtgccatggccttctccgacctttctctggaggttgccttcttgcagagccaccagtcggcatgaagctgtgctgtgcccctcacttttcaccccaactcttgctaggtgcagg

SEQ ID NO: 49964 - DNA, 1682 bp, Bovine  19866881249581
  misc_feature (1)..(1): n is a, c, g, or t
nttttaagtctaaattttaacttgcacagaacattgacattactacatctgcctactggagaaggagcaaagagatctcccttgtttcacgttttctactttcaggaaataatgtgttgtagcctcaggtatctgtgcctgaggccgtcctgagatgagagaatgtctactgtttcagggaagctgtgctctcattctcagtgctgaggggggtgggatggggtcacctggggccacacgtgttctttccccagtgctcaggtgctactgattgctcaagagaaggaaaggaacatatttgaccagcgtgccatagagaatgagctactggccaggtaagtaaaggaggggagacctgcatgtgtgtggcccctgggttgcagagagccagtcagaacagagcagccagtctctctaacccttgcccttcgttctcaggaatatccatgtaatccgacgaaggttcgaagatgtctctgaaaaggggtctctagaccaagaccgaagactatttatgtaagtgtccaaggagcattcccaaggatccagtagagggctaatttgggaaactcatcctgccgccctcttccccttaacgaccctttcttctgggagatatgatggcttgcttccttctctctgaattttagggcaaatactgaaaatatcccaccatcccaggcagttttggagaagcctagttctgcttctggagggttgtatcagagctattgacattctggatagccttgtttttcatatgcctctgggctcctcaaagttttcttgcccttcttggctagtcaagtcggacttgggcaattgggctggtggtcaaggaggaagaggagtagccagctcattctttgattggttctgggagttgcttctctgaggtcacaggcaagacttcaaggggcctggatttgtgctctaagccaggccgcatgcttccctttatgggccaccaccaggtgacttgactttatatttttaattttttaaagattgatatttattttattgttagctaagctgggtcttttgttgctgttcacaggctttctctagttgcagcgagtgggggctgctattcattgctgtgctcaggcttctcactgcagtggcttttcttacggtggagcatgggctctatggtgtgtgtgtaagatcttcccggaccagggattgaaaccctgttccttgcattggcaggcagattcttaaccactagaccacaagagaagtccaccaggtgactttagtattaatatcacatatttagacctggaaatttgtgattcttaaaattaagaacctcctggcatttcacaataccactattttcttttcttttttcttcttcctttttttttttttgaccatgccatgcagctagaataattttagttccctgaacagggatcgaaccccaggcccttgtcagtgagaacaccatgtcctagccacagggctgccagggaattcacacttaactgttttcgaaatgtgcttttatcttaacaaaacaaagtcattaatttactttccagatatatcaaacaatatcaaataaagaaaaggggaagaagttccaaaatacagtctgtggcttaactagattcgtatttttgcatctgcccaccctcacccccgttaccatttaaaaaaacctcagcctg

SEQ ID NO: 49965 - DNA, 1187 bp, Bovine  19866881252859
  misc_feature (1)..(1): n is a, c, g, or t
ngatgacctgttgctcttctttaaaactgtgcatgttggtcttgaaccaatatttatcatcccagtaatgggaccacctcatgagctggtctgtcccaaaaccaaacaaggatacctgggagatggggtaagagagaagagggctctggggtagcaggctggatcccaggctgcctccacacccactgagcattccttcaccaaacattcacttaatgtgaagggcgacaggctgtttcctggagctgggagaagaacagagctcaccttccccagggaagactctgaacacacagagcccaggaaagagagttgattctcatcatgttgaaggaaaagagaggattccttggggagacaagaggagggcactgcaggcaggggaacagcatgtgaaaggcccaaggcagatgtttagggaaacgagaagcccatagagagtgctggtagagatgaaggggagtggaagggtcagaccacgccaggatcttgaaaaccagccagacaactttgggcttaacctgaagtccctgggaaaacaaacacttttagtggcaaagggatgaagttctatgagctgcagaccgcgtcttatacctggtcacaggtgtgcaaggcatacaacagagttatgaaccccagagatggaaagtgaccatgttttcccagccatctctgctggatgtactaaaggaagctcaggctgatcactgagacctggggagatggaggagggtggtgacctgatgtccatccagtggtcgcccaacccaactcactgcattttactccttccccttttccctcctgggtccctcaccttgtcttccttctcattacttccacgggtgacctggactatccgaaatctaaaacaagattgaggtgggggagtttcagcatcatttgacacagccgtccccaaacttaggtaagcctggggggtgccctgatagatagcaagggtctctccagagttcccactatcctccttacaatgtcctaccctccaccaccacacccaggattttctgccttctgaatgatgctgtctttctgcactatgtccatgacgcacttcagaccagatgaattcagaggaagcagcagcagctgggcaccagggtcctgagggctgtctatctcggggtatgtaacgcacacagtggtccttcttcccacgtccg

SEQ ID NO: 49966 - DNA, 1171 bp, Bovine  19866881264118
  misc_feature (1)..(1): n is a, c, g, or t
ngtgatgggcttggggtagccagggtccgtggcccgccgctcctcgctgtagcgccagtaccgctcgcctttgaaaaagtaggtcttgcccacaggttcccagcgcagagctgtgtcaatgccttctcggggcagacagctgcccagctctcccaggctgtgggggtacccaggctccaccgtcacctccttaaacacccagtacttgtcacctgtggccaagaggagcccaggattagctttcctcagtcattcaatgccggagattgtggttagatccacttgcccatcatctattgggaccaaagtcattcatgaagccagtgtcaaggggaaacagccctaggccagcttgatccccgtggcgggggaggctggggcccctcggcccaggcagagcttagagggcaagaagccggaatctagtgtcaggtcctgggcagcttgcctcacgctgccccgcctctgtgccccaccctcttttcgtttcatgtgactcgctccttgctcctttctgggtgacctcagtctctcctggctttacacacacacaagtacttccaccagtgacacccagctctgaggctgtggcccatggccgctctcccagtggacctggccccaggcccgagaccctgattgcccaccgacctctgggaatttccaggtctgcttccagagttcctcatctccactgtgagggctccctcactacctctctgccctgcagcgtccccaagaaggtggcatccttggtcctctttcttcctcctctcagcactcagcctcttgcaaggacttttccatctcctgacctcactgctcctcccggcacaagccttagagacatcgccctcctcaactccagcaacatcctcaactccagaaatggcctctcacctctgccctgactgccacctgccctctggctctctgctgctcagacgaagagtgaatgccagcactgacctaatggatcgagaccacagtctgggtgggcaaccagggctctcaggactctcccctaaactacctttccaggcatggctctcacggggcactccatggccatcctgtgggttttctaaaggacttgaactactcctttggccatgctcttcctttcccttggaatgcttccctcacttctcactatctggatcttatcctt

SEQ ID NO: 49967 - DNA, 640 bp, Bovine  19866881300371
  misc_feature (1)..(1): n is a, c, g, or t
ncctctcctgaggatggcggaggaggcagcccggaaactcctcccaggtaagacccatgtcaagacagaccagagaggaagtccaggaggtcctgctgctcttgctggagaagagagtggctgaattattataccagacacttgatatttctacctttcagcacccaccatggaaatcaggggagtcctgggcatttggagggctagactaggatggacaagctgacctcatgactgtgggcagggagcctggcggctgcaaggctcttgcccttatttgagtgagtgctgatgccccctcccaggcccacacaatgctgggatgaaaggattccaggtctgagcatttgcaaccccagattccagatttggctctgccagccaatctcttgacccatgtctctccttggttcaatttccccatctatcagatgacagtcatgattccttcctccctctggggagacataaaatgaggtcagaatggagaaagttcttggagaacctcaaacaccactgagacacgagagggacttgttttgtagctaagccatgtccagggctgcaggccaagccacagtgtttgtctggtggggcagtagctgggctcagcagcatcagctggacactgtgttttctt

SEQ ID NO: 49968 - DNA, 1250 bp, Bovine  19866881318566
  misc_feature (1)..(1): n is a, c, g, or t
naaggtgctgggtccgccggttagcaccgtggtgcctcatggacaccacggggcgcagtgaccacagggccgcctcctggcatgggccctgcctcctgacagggcctggcctgttccctggagtagggagcagttacccaggacagaaggctggcagctgggcaccaggcacccaccctggggcacagccaccatcactccctgccccatgctcagcccaggccaatgcaccaccacttcagctacatgacccctggcctagggccctgctggccccggtgggcagtggccagagctgcccctcagaccctggtgaggaagggcctggccggccagactgagtagacaaagagggctctgggctgctcacacccactcctggaccggccgcttatagtaggtgacaggctgagggcccgccttgttcttgaactggaagatggtgtagaccagcaccaggatgcagagggacaggatgcagggtataaccacggccaccgcgttgacagagcctggcacgtcgttgatggtcaccatgatgtccacgtcgtcctggggtagcctccgctccttgcgccgctccgcctccttctggttgcagcccatccagtcccgcaggatgttgcgtgggtagcctggctccacgctcagcttctggttgtcaaacttccagtagtcccggcccttatagaagtacgtgtaatctgcagaaacacggcccagcatcaccatcccagacactccctgcacctgctctgggccagcaggaagaggcaagaggctgtggcagtgtggaggagggggcgcctcccactcgagaggagcccacgagcagctctgaaggtgggggtgggcgcatgcgggggtggggacagcgtgctggaatacctggagtgcccggcacaccccgcagagggtgtggctggtcagggagtatgacctgcccagctgcagaggcacccagacccagaccagcccaccctgtcatctcagaggtgctgggaagccactgaggggctttaggtagaactggtgagttcatttagtgtttcctagacaaggacccttctcagccctgttgtactatgccaataccccctcttgccccccaccccaacatgggtcagatgcaaccccctactcagagcttgtacagcgctgcctccacagctagctccagggctgcacccactcctgcctgagccaagggagacaaggagccagaattctcttgtcgacagggacaccac

SEQ ID NO: 49969 - DNA, 1231 bp, Bovine  19866881527715
  misc_feature (1)..(1): n is a, c, g, or t
nccaagaagctgctaaacaggagacccagcacaggggaagaatttgtgggagggaactgctttccccatacctccatctcttgctgtgccacctcacacgcagcccccagccccaccaccaagggtgtgggtactgtcccagaccgcaataccccgctcctgcccccctccactctgcagggcctccacacgcacacggggccgccggcgaatgtagatggcaccgacccctgggaaacaaagtttgttacaaaaaaagagaaaaaggaaaaggcagatgaaacaaaatatcactttccaaaggggtcaaaaaattctttcaacttttctgttagctccaaaattttcaaaataaaaaatgttgggggtgggggacactaatgcaggatgtaccaaactgcatttattaagacatattccatttccccatgaaaataaaatcatattcaggtatctgacactatctgagtctctgcagttcccaagttcagagagtaagggctcagacactacatctggagagtgagggctaccatgtcgtctaaatctatttagattctgagtccaaaaagcaagagtttggatagtgagggatacttgcatacattttagtgctgaacagagcttctgctcaatatgagttaattagttttattaaaacaaatttatctacaataaaagccagtaagccaattttagttaaagatagaatgactgttgagcttttaaaaacaattaacttaaaaacacactgtttacaacctctggaagcacaacctctgggatctaatatctgatgatctgaggtggaactgatgtactaataacagaaacaaagtccacattaaatgtaatgcacttggatcctgaaaccatcctgcccccatccctggtccatggaaaaattgtcttccatgaaactggtccctgctgccaaaaaggctggggactactgctttagaagaagccatcttatgtactttcaggaattatcacaccttttcccatagggtgtccatctggatgacacaccctgcagacacagaaagcatactggcataaccaaccaccacaggccctcacccaggaaagagaggaagagttgttcattttggatggctacctccataaaacagaggacaacagtctcttcccaaaggctggcatgcaaaggcagaattccagctggaaaatattcctatgccaataggaccatagggacacagacaag

SEQ ID NO: 49970 - DNA, 977 bp, Bovine  19866881632033
  misc_feature (1)..(1): n is a, c, g, or t
ngccagaggctgaactgaaggcctggaagctagtttctgacatcatgttgatttaggggaggagaggggaagattgtaaagtttatcttagatcctacctggtcttcagagggcaccaaggctcagagagaatacgtgacctgcccaaggtcacacagctagggaagtgaccctctgggctctaggtcttttgttcttcctaggcgaccacagttctgcccaagcccccttgcactcttctctggccaggggaggggactgggaggaggcctgttagctgagtccagaccccgctactgaggcaggaacatctggtcctcccttctaccatgtgtccagctctgtggttctcactgtgaagctttgaatcttttttctcttcctcccttctctctccttctctcccccatgctgcagtacacgctgtggagagtaagtggccctacccccagggaagccaagcccccatttctggggcagcctgtcctcccaagaagaggggtgggtgtgggtgggcctgggtggggggccttctctggcctgacggctgggtgactataactagcggtaagtgtatccattagctggggttccttgtagcgggagggatcagggttcaagggcaggaggaatttgttctggagcaggaggtgtagggtgcctgctgggctccctttggtggcttgagggtgggagcagaggaggcctggaaagaatttagaccacattcttaagtcccacctcgctttggggttcagtgactggcctatcggctctagtcctgaaagacctgagtcaatgggctttatctcctgagttgcagggcctcgggccttggtgggagcagaggtctggagtggtgcccatgaagggctccctgcacatgcgagggaagaagtgggccctgtagagggcatgaactctcacctctcatgcaggcccacagcaggcactcggctgccctcaagcagggccgg

SEQ ID NO: 49971 - DNA, 1191 bp, Bovine  19866881699247
  misc_feature (1)..(1): n is a, c, g, or t
ntgctgcaatgaatgtcctgttgtatgtatctttttgaatgatggtattctccaggtacatgcagggcttcccttgtagctcagttggtaaagaatctgcctgcagggcaggagacccgggtttgattcctgggttgggaagataccctggagaagaaaatggcaaccctttccagtattcttgcctgaagaatcccatggacagaggagcctggaaggctacagtctgtcgggtagcaagagtcagacatgacttagtgactaaaccaccagatatatgcccaggagtgggattgcaggatctgactggtagctctgttttcagttgtttaaggaaatagaggtatacatagtagtcagctttggctaccataacaggatagcatagactgagtggcttaaacaacagaaattagtttctcacagttttggatgctacaggtccaagatgcaagtgccatcggcagtggttttggtgaggcctctcttcctgacttgcagatggcctcctcctcactgtggcctcagtgtgaccttctctctgcacatgcacagagagctctggtgtctcatcctcttaaataaggataccattcctgtcagattaggacctcattttatgatctcatttaattacctccctaaagactctgtctccagatacagtcatgttgtggattagaccttcaacgtaacaatttgtggggggacacagttcattccattatagtgtggaaggctaaagtgtgtaggatgttgccaaaaagtttttgttttgtttctaataaactgtggctgtgaaatagttttcttgaccagcaaaatgatgatttatctatcttcctgcccctcagttaataaaaatgttagagcactttataggctgctcagaaactaccaattatctcttctgtcgattcagatggaaacaaatggatccatctgtggggaaaaggtctttcaaattttagtcagagatgcaaataaagcctcaggcctggcaattatcaatttataggtgacactgagatgagaggggctgatttatacaacacgtgagctagaatggaattcagaatcctctcagagatctggaaagcagggcctcaactgcagcagaaaaatttacaggaatattttggaaatactgatgttttaacaaataagagagacaaggtctgcttttgcaga

SEQ ID NO: 49972 - DNA, 820 bp, Bovine  19866880359685
  misc_feature (1)..(1): n is a, c, g, or t
ngttggataaagacttgttgaaatgaaggagttacactaagttagaagtaatgaaggcttggactaaggaaatggctgtggaaaatggaaggtatttgaaaggtgaaatcaactacaaatggcaagtggatagacagaatgggttaaagatgaaaaagacatatttttttgcctggatgtctgggaagaatcaggtatctaatcccttaagtagagcctcgtccttggatagtcaataagatcctgaaagaaagttcagtcatttataataattgacaaaaagaaggtagcatgaaatcctttctgtaaattttaggataggattaatgaagatctctccagaattttatgaggttctattatttaactaccatttattgtgttaaaagtttagttctttgactgttcccacatatcttgttacttctcatattgtacggttgaaaatgtcttgagtaagtaaaaatgttgtatttgctgaagataagtttatttcatttgaagtacttgatgactgactctacaagtgtagtgatatcatagtttcatcaagatgacagattgatcagggaattgtatctgcctcttgcatgataattaggtaatttatttaatcacatccaggaacatgatttagataagaaaatattgaattcagatcagtcctgtttatgatatcacacagtgtgcttgcttaatgatttaacagccaagccatgctaaacaattcagccttttaaagaagccatgtaagatgaatgttaatatagccttataattgcctttcaactgttaaggaaaatgctgattaaagtttaca

SEQ ID NO: 49973 - DNA, 1267 bp, Bovine  19866880380734
  misc_feature (1)..(1): n is a, c, g, or t
nccatgaaatagcatgagcatgatgccctttaaaggatgctgttttggaagtggtgacactgaatgtgcaaacattaccccagttaccagaaagaatgactgtgggcaaggtatttcatctctctgagtctcaatttccatgtcgccacactacttacaatacttatcttgagggctgtcataaaaatttagagcaatatgaaaataaaccccatggaatctctgtaagcccaaatacagtttggtgttttcctccacttacgggcatggtttctagatgagactgcctgatgactattttacatttggacgattctcttaaactctcttgagtcctagttttttcaactatagcatgaagatgacagtagtaccagattcatagtgttgctgtgttcgtgaactgcctaccaaggtttggtgcatcccaagtgtccaatgagtattattgccatgattttttctctgctggattttgtagctaaggtcattagacaggctcttccttcagctccatctgactccttagctctctaaaaattggctgtatttctgaagaaaaagtgaagatgcagagaacatctgttttccatttaggaggcttttaggctggatgtcttatgaaataaactgcattattgtcattatctatctgaagccttcttttcacaatgaagctgttcatacttagagtagaaaattacaacttccagaactgtctccccaggggaaatctaatgagtatgtttttgtttgtttgtttatttgttttttggtgtctctcataaatgatccctaccaaatgaagaaatctgattaaagtcatggaaacttttcgatagacagcgacagaaaaactgtggtacatgccacagccatttttattgtctcatcttcttttgatccatcaatccaataagactatttagctgccttttttatcgcaatagaagcacaaaaatgttagaaaatttctgactgcaaataattgcccatttggggagaacaaggtcaggtcataagaataaccaccaggagacaccatttagctccaggaacactcagagttgacatcctccactctcataagacttatccttttctatagcagacaggctttcaggatacaacctaaaagcacatttccattaagccctgagacatagcaatctttcttgagtaatgctacccaggccctgctgattcccatgtcaattctagaagtcataatggaaccagttaaagtaactatttaagaaaagggaat

SEQ ID NO: 49974 - DNA, 1119 bp, Bovine  19866880385538
  misc_feature (1)..(1): n is a, c, g, or t
ncgtgtgcctctgtgtctctcgtttgttgggagagatcaatgtggcggtggcctgagccttctgctccccttcagtaatgcttcaagggtaagtgctgcgaatcatagatggcccttgtgattcagtgccagcaatagctccatatttgagtgtttcagcgcgatgtatgggaagaatacgtgtgttcagagttagataattgtatatttcaatcccgtctcgaccacttgctagtagaggaaccctcggaaatttactcaacttcctgaatcttagagtctgtaacgcttttcttgcaggagaagacaattcactgtaagtgaagtgtccaggacaaagcccaggctatagcagcagcactctccacggctattgatcacaataaaaataaattagatgccatgtatgaaagcatggccgattgactgttcattattgactgctgctaatagtgataaaccaaatgggtgttaagcactatctaggagagcaaagcggaggccactcctcttttccagccagcatcctttggcgtgtgactttaaacacagggccgtgtgaggcagtgtggcatattttgtgggagcaccctatctctgtcctccctaattccaggtttgcctcttcccaattctgtatctttaagggaagttttttctatcctaatatacttttccttctttgtaaaataaaagtatcccaatagctctctctgggtaattgtgtggattaaatgtgcagcatttaataaatacgagttgctcagtacaagtagattttctttatcttccttttcaggttttgtctgtgcaagattttcaaaagacagcgtttgtctttgacttgatttccttgcttctctgcacttttctctttcagtgtattgaattttctggtctcggaggcaccctacaatagtccattcacattaaggtgaaggtaatttcttactttgctgtctctttccatttggcacacagagggtgaaccctgcctctatgactgttaaagaggtagtagacattttatgatcactgaaacagtgacaggatatcagggtcaaggaaagaagtactttcagtcatttggagccaataccggacctccggatatgtcaa

SEQ ID NO: 49975 - DNA, 888 bp, Bovine  19866880455763
  misc_feature (1)..(1): n is a, c, g, or t
ncctattataagcgagtatattatgtatcttttcactgctatgccgtctctgcctggaatagagttagtacccagtgaatacatgttgacagaatgaatggatgaaaacaatgaatgaactgtgctaactttcttacataaattgtttcttttttaagtcgtcttttaacatgaagacactttattattatcatcctttaacatgaagtaactacaggtcagaatggttaagtaacctgtgtgaaatcaaacggccagtaagtaaggagctgacatttaaaagcattctgttctattgctgtgatgatgagatttttatttttacatttggaaactcagtaattctgaaagtttagcatgaactcttctggaaggtgggtaacactgaacggaaccaacttgtttctaggacaagtgtttgacaaactcagatgggtagtttggatttttcctccagcgaacacccagagccagacctctctcaccccctactatgggaacaacacctcagatggaacaggggctctgggaactgtctgctgtcatgctgggaaatgtggacctgagtgaatcccgaattctcagcttactttcctagctaccaacatgtatacagtttttaaaattagaaaaggaagaagaaactaacaaagcctttcccttctcagaccagcatttttctgtatcagtaaaaggccgacagaaccagcgggcctccaactaactgactgttgtgttctgggctctcgctggctttttcactaaggcgttaagaatgagccccagatggtttctctaaacctaacctctgtgctccaggccttggccagtccatctggcctttcatgcttattaatagatttttcacctagcccaagaagtcaggac

SEQ ID NO: 49976 - DNA, 1711 bp, Bovine  19866880495123
  misc_feature (1)..(1): n is a, c, g, or t
nactgtgacatattttacctgcctgatacacagtacactctcagcttttgcttgtttcactgaattaaactgatcagaacttttttctgtatatttcatgttgccccaataatctgaaaagtggttaaaccacaagcagtaactacctcagtcatatagcctggagattcatttatggtaagatcattgatgctttaaattgagtccctcttcctgattcacattattattttaatattaagttcattaccggtggccactgtattctatgtggacagtgtggggaaggaaggaaagaaatagtaggaaaaaagaaaaatcttagtactagaatgtcaactgtataatcgagtttggcaagagaaagttaggacccaaaccatcttcaagagctacttaaataaatgtcaattaaaatggcatatatgctgtgacttgcttaatttctcaaattatattttcttatttccaacatggagacaataatgccttatgttccacttgaaaattaaataaaacataagagaagcacctggagcagtgactggcacaaagtaggcacccaaaatatcaataacattagcaatatttattcctttatcccagtggttctcaaccaggggcaatttcgtcccctagggaaaactaggagacttttttggttgtcacagttgggagggtgcttaatgctggcatagagtgggtagagaccaggaacgctgccaaacatccacaatgtacagggtggtcccacaagaattatctggctcaaaatgtcagcagtgccaaggttaaaaaaaaaagaaaaaaacctgttttactccctagtttctgaaatccattatctcatggtctgagacagtcagggggacttagagagcacattctgacagcacatatacagacacagtctagagagatttccttagaaatctccccgtcttttcctcaagcactacaaggctctgtttgggtgccctgtgtttaccattcgaatgatatcactcctttgccatggcacctccaagccctttccttctgtacctggagtgtccatgtccttcactgtcgtaatgactgcattcttccctccctaaggccccagtctgtctccttatggtctttaaaatccaatttaattgggttgaattgccttttgactcctccgctcctctgcaatagcaagtccctttaattctctctcacactcagtccgtcttctcatttctactactcactaactgaagtcaatgtattacctttaatttatttggggactctaaataacacaccatagaagttagcatttatagcatgtattcatttttttgctatctcgttacaacactgaagttaataaaattgacatctaattacaactaacaagcatcgtcttattaaaactaaaacaataaagaaagcagtgaagattgcattacccgtgtgatgcattctcctacaggaaatactagctaccaaggctatggctcagtggccccacacgagggggtcagtgtcagacaccaaggaaagaaacctggagcttcactgaatgttttaaacagactggcaatcctagaatacactaagactgaagaacacttaggattaaattgaagaagccaggtcttgttagtatcaaaatacaaagggaggattcctgtgaaggagagacataggacaagagggagagataggaagaaccaggcag

SEQ ID NO: 49977 - DNA, 782 bp, Bovine  19866880521692
  misc_feature (1)..(1): n is a, c, g, or t
ntattgtcctaatctacattattcatgacatgatagcttttacatcagtcctgatcctatgaaccttattcttctgcacatgaaaaaatctcaatccctagcatctatgtggtttattctgccacactctagttccccatggtttggaaatagaagacctgttctttcctcctctttgattctctaattaatctgcaataaatgaaggctccaagtgttttatggcacttcagtttcccattcccctctgacatttggagggaaaattgaacacacagcaagacctctgaacaagaagtaatagccgttaaattgaaacacgatgcaaggttttcctaaccatgagctcataatacgcgtgttcatagaaagtgatgtgcttgctgcctgcagcaaaaccagatgctctctgtttccagttgatcaatgttgctgtaaggtaggagtacatgtctgaatttgagaaagaattaaagggacaggatgataattctacctcaagaggccacgcaataatggtgatgaattacaatgcaccgagttttggattccattcagtgacacttgcatagcattatggaaaaacaattatccttgtaaattcagatttgggattgaattggaataggatttgctactttccagctaactgatctcaagaaacaggaacaaccaccacatagcaaacctgtgataagttaatggacacagagtgacactgcccagcacctgctcaatagaagggcgtttgcctaaaaaatgtgagcgacattataatattt

SEQ ID NO: 49978 - DNA, 1334 bp, Bovine  19866880536370
  misc_feature (1)..(1): n is a, c, g, or t
ncctggtaggctgcagtccgtggggttgctaagagtcggacacgactgagcgacttcactttcacttttcactttcatgcattggagaaagaaatggcaacccactccagtgttcttgcctggagaatcccagggaaggaggagcctggtggctgccggctgtggggtcacacagagtcggacacgactgaagtgacttatcaggaacagcagcccagatcacagttccagaaactgtcataatttgcccttcactgtgacccaagaacatgggtatccttgaaaagcccactaaaattctcccaatgtgcagccaggtttgggaaccattagagataaaaagtatcttgtatcaggtttgttcctgtcaaccttccattcaaggtgctccagtccttacagcgaggaatgtaacaagatctggggacaatgtgataaatgaccaccttagatagataggaagataagccacgtgggtgtccctcaaccaaaaagactaaagcaaagcggctcttcgcattggaagtaacagaaaaagcttgtcactggggcaagagacaacctgtttcctgctaataaactctaaggtggcttttgtggctgccttgattaattggtgacgatgaaataaccagtgctcagggatacatgagatggcaaaggattgtaagtgacaatctgctgttaaaattcatcggcccctgcaaagcgctgtgattaatgaagtctctgtgcctgcctgggctccgaggaggtggggccgctgtgggagggaagggaaaacaaatttgcaaggatgctctcgctaaagaggttcggcacccggttgcatttaatctgtctgctgttccattacgccggtaccttctccctctcgattgttcactggcgctgccattaatcacagactattgtaaagagaaggagcgtagggaggagggaggggagaccgagctctccttcccggcttgtagcgggggaggatgatgcgtgagcagggggcccaggcgggggaccgctgggttatgaccaaccagaggaacttaaaatcagattcacagagttgagcctcagcaggccacagctggacgctccccgcctgccgcggcctctgcggaggttcttggtgcaacatcgccatctacagccaacatagtgaactgctccgagggagttgctgagcgccagagaaagcgcctatttcagatctcttgcaaatccgttggttttagcaaatccctgcgttggccaggaaggcaggattactacactggcttccatgacacaggactcccttccttacttggtgttcggacagcgtgttctcctgcaca

SEQ ID NO: 49979 - DNA, 2066 bp, Bovine  19866880547886
  misc_feature (1)..(1): n is a, c, g, or t
nactttcattgtgaatgaatggatagatgaatgaatgaacaaggagaattgtgaaatgaattaacaattgactaagtatccaatagcttcccctgataggctaatgtcagattcaagtaatattttattactcaaaataaaaaaaataaaaatcttaccattaagcctaaagtattcctccctgtgtttttcttattttcagattaatagttgccaatcgtgcaacgagtagtagcaagtatactttttgttttgcatctgcctcctttccttcccaactcatagttttcaggtaaggtgtcctgatcatttttcttcacatatccccttcatcttatccatatgattaaaaagggaacagtcgtattttttctggctggactctgactcctggatgcgatttatagacaacagacagacaatagacactccagactggattaatcgaaagtcatccctgaaaattaaaaattgagggaatatgagagtctcagtttggctgagtgatgaagtcataaactgagctgagaaatggagtatttcctgccatatcaataaacaagggtgtcacagtcatcctagattccagcctttcagggcaaccaggaagaagaatacctgccatgcagtagctctcagactgcccccactccctacagtgagcgaggaactaaggatgtgaaaaatcaaatcacaggatgctggctggccccagatagctgagatgcatatgaaaggaacgatttcagtgagcccagactcttgcatctttacatacataaagccactaaattcctcaacttgagatatctggtttttcttaaataacaaaagtcttttgatgttctgcctacctgccccttcttgcaaacttctatgtaacctggctcccacccctccaccccacctcctcggaatagttctttcagggttacttgagatgttgcctcccaggcttgaagttctaaaagttttcaccaaataaaacataactctcatcttctaggttgctactattttgttgaagtggacagagtcaagtttgatggtgttcatatcccaccaagtgcactgggaaacccggaaggagagagaaaacctgaaacaatagcaacagatgtgcaaagagaaacagagatagaagatcaaaaagcacacttcttggcgtccttctcattttacagcccttggcctcactctgttcctaatgtccattttcatccctgtcctttaggtctgtgaaaacagcttctattaaaaagagagagagagagagagaactctcttttggataaccgaaatgcatacagcttgtgttaccagccatcaaaatagaactaaagacaacaaaaacaaaaagcagtatgagacatctgaaggagcaaaaccccaatttccatattccagcctttttccatacctatctaaccataaacatttatgtcaccttgaaattatccaaagcactcaaccccttttgtcaaagacacagaggcagagtgtttcatctttgaagttatactgcctttaccattagaaaaaaaatacatctgctaaattttttttcaacagagcaacataataaaagagtaagtgtctttgtagggaaaagtaatatagaaagataattaaatctcaggggcatttttttggtctaatgcagtttttctcaaaaagaaaaacaagcatcaaagctgcccccaaagacactttccaacctgccattgccacgaacatgaagttgagaaatgagaattctgtgcttggtttgttccttcttttcatgaaaaagaggcttaatattcacaggggacagagtaggaaaaaaaaaaaaaaaaccctctgctattatttccaggggttgaaatgcttctcaccaccaaaggtgttcgtctttacaaagatggttgctagggagttggatgatttgagggaatatttgaatatttgaatgtttacaaaactaaagagtggcatcactggcaaatgcacttattggcagaactgagccaattagttggtgctgctaaagtcactgcacacagttatttcacgaagggacaaac

SEQ ID NO: 49980 - DNA, 3149 bp, Bovine  19866880642577
  misc_feature (1)..(1): n is a, c, g, or t
natgtcaagaaggaagattaaaaaaaaaagaaggaagattaaggaaaatagcattctgagtaccgggtgaactagggcaaagtccccgagaaagcaaaagcttaactcgttccagggtcaaaaagcccagatggataggaaagaatgagaaaagagagagtagttgaaggccaaatcacaaaagaaaacacagcaccaatccacaaaccatgcaaaaggcatccactggagagcttcaagcagaatactctactatgtacagggtggactgtagagagataagagtaacagcaagaaaactggagagctggaatactgctgcagtattagaatggaaacccagtggtggattggaagaagatggtataggtggggatggaggaaaatgaattatctgattgagtgaacaaatgacatttatcagaacttgctgatgtactgaatgtgataaggaagacacagaaataccacccttcctccttccttttactctctggaacaagagaacgaacagtggttgagaagagtgagaatagagtgaagggaagacatgcagacctaagagttttagtttgcctgtacttaattttagtttgctgctgtgcttagtcactctgtggtatctgactctttgcaaccccatggactgtagcctgccaggctcctctatccatggagattctccaggcaagaataccagagtggattgccacgccctcctccaggggatcttcccaacccagggactgaagccacgtctccctcactgcaggcagattctttaccatctgagccagggaagcctaagaatactggagtggatagcctattccttctccaggggaacttcccaacccaggaatagaaccagggtctcctgcattgcaggcagattcttaaccaactgaggcaccagggaagcccttagttttagtttgcatatgttaaatctgagctgcctcttagacattcatgtgcagataccatgtacgcagttgaagctccagggtcaggccagaattagagacagagtttgggaatattatcttaggtattatatagtttttaagtcgagggtctggattaatctatccatggagactcacttgaaagacaaaataaagggacccaggaaaaaaaatagcaggactcaccaagatttagagatagaccctgaaagacagagaaagtaaaggaagaaagtgagaaagaatcagccatgaatactgaggaagggtgacaagctggatggaaaaactacgttgattatcaggaattacctgaaataaactgccaagcttagggaagctacaaaaggagtatttatacagatatctcatcattaaagcacttctgccttaagagagctatcagatacctaatctgagaacagaaatgagggtaaatcctggagtatgcttattagcctgcaatgtctacatctatctgtttaatattatggctccttaaccttaatataagttaacagagcacactgtgtgcagaagcattatcctaagtgctttttaatcagcagtcacttttttagtcctctcaactagcttacaagaaagtactagtaaatgaagaataaacacggatacagagctcactgtgaatccagccctgttcaagcacattatataaattaactcaagagataggaactgttcatattaccattctcattttatagatgaagaaactgaggcagggaaactttaagcagattgtccaagaacacacggctagtaagaggtggatccaggtttgaacccagcaatctaactccattctgtgcaatttaccattgaactacattgctcctgtttagctacaggcatttctcaagtgctattaacaattatactaagctaattttacaaatgaggggactgagccttgacagggttaggttacttcaccaagatcacttggataatgagtggtagatctgtgttttgaacttaagtctctcactcctaactactattaagcaagaaccataatcagcaagatacagggagagaaaccagaattacaagagaaatatgattctgtgattacacttctctaaattaatggaagaaagagaaacaaaatgaagatcaaggttttagctaaaagacaccatagccttgctcttgaaagcaaatgccagtttctctttatttcttctgtggacactcggggttgggtgtcatttgccatttttagcacctgataaccctgcttcgcttccaaggaaccatctccttagaatggaccactctgctttttagtgtcttccctttttgaacaattcaagttttattaaattttatttttattgagatagttgatttataatattatatttatttcaggtgtgctacatagtgattcaaaatgttcctacattatactccatgtaaagttattataaaacaatggctcaagagggaggggatatatgtgtacatatggctgattcagtgttgtacagaagaaacccaggctttccaggtagctcaggggtaaacaatctgtcagcaatgcagaagacgtgggagactcaggtttgatccctgggtggggaagatcccttggaggtgaagatggcaacccacgccagtagttttgcttggaaaactcccatggacagaggagcctggcaggctataggtccatggggtcgcaaagagtcagacccaccgccgggtgactgagcacgcatagcaggaactaacacaacattgcaaagcaattatattccaataaaaaaaagtaagtaatggctatattccctgagctgtacactgtatccctgtagcttatttgttttatatgtcacagtttctacctcctaatcttctaccctatcttgcccttttcccattccttctccatactggtaaccactagtttgctttctatatctgggagtctgtttttattttgttatattcatcatttgtttgttttttagattcaacatttaagtgaaaatatagagtatttgtctttctctgacatttcattaagcataatactttgtaggtccatccattgctgcaaaaggcaaaacgtcactcttttttaaagttagtagcattccattgcatatgtaccacatcttctttatccattcatctgttgaggacacttag

SEQ ID NO: 49981 - DNA, 1038 bp, Bovine  19866880715795
  misc_feature (1)..(1): n is a, c, g, or t
nctttgtttgaactggtttgtggtccgacttactttttctacttcaagtacaacactactctaattacttttgtttaaaaggaataggggcttccctggtgactcacatggtaatgaattcgcctgcaatgcaagagacctgggctctctctctgggttgggcagatcccctggagaagaacagggaaacccactccagtattcttgcctggagaatccccatggacagaggagcctggcaggttacggtccatgaggtcgcagagagttggacacaattgagccactaagcacacaaaagatggggaggggtgaaatcgtgcttcagatgataaataattgcctagtgttttagagatattactatcaaaaggaaaagtcctaattataagtgctattggttgctatttcacttgtattccactttttatggaatacaatccaatacaacaatactggaatgggttgcattcccttctccaggggatattcctgacccaggaatcgaacccatatctcctacattggcaggcagatgctttaccactgagccaccagggaagcccaattacaaatgaaacccctctatttagttgtcaatcactgttcagtttggaatcagacctattttgtatgcaggcaaattataaaactgtgtgtacttagaaaaaaataaaatttaatttctttataattcttttatagtttggattctggttgtccccaaagtattgttttcacttgtttatgctcttaagtttctgcaaaatagatgctgacaggaattagcatattttgagaaagatgactgtgatgttttcaactgtctaaatctcttgagttggggagattgaaagaactgaaagcgcgttttccttcagtcacatttccttcatctcgatgcctactgtttaaccgtctttgcagaggatacataagagctttcaacccagtttcagcagcgactccctaggaagtacttgggaagctatgaagtttgcaaattgacactcgccccacaatttcagaaaacagcct

SEQ ID NO: 49982 - DNA, 1407 bp, Bovine  19866880773926
  misc_feature (1)..(1): n is a, c, g, or t
ntcctactgaaattgtacttacagcctgcttctgctgagtggaagatggaagagcaacacccagcttagacttacatcccactactttggctggctggggaaactgaccacctctagcttgaactgagctggaatgaaggattcgcaagttacttaggcactctgctcataaggtaggagaagctcagaccatgtctgcttctgtggtttggtggggtgagtggactgcaaacaagtcagtcgaccctcctgaaccatgaagaggagggtagcaggttttctgtgagtgcttccttgattaggatcagtattgccacaaaggtttcttgttgtcttaagccatgacttctccagtcgtttggctaaaaattacaggctttctcaattcttcttttagcctgttgaatgctcaggattgagggtctatacaatgctctgtctggaatatgtgggagcagataagaaaacagggaattctacaccgtcacttttcatgttcccaattttctaggcaacccactggctttccacctttcttatgcttgtttgttgtgttgtgtctggattttgtttagctttaaagaggaggatccagaaggaatgggttactccattttggctagaaccagaaaccccttcaaattatcattgaagacctattgcttacagcaaacttcaagcatatgttctgatgagctcaacatgtgttttaattgtgttatttgttttcctccatagttagagaggtagttgggtggaaaaaagttctatttcaagtggtgcctctagtggctgttattatacatgtttcatctacaatcttcctagttgtgattattttattagggaagagaaacaaaagatactgtagcatgtttcacatggtaaattcttttttttttttttaaacgggcatccctgatggctcagataagaaagaatgtgcctgcaaggagggagacctgggttcgatccctgggaagtgaaggagggaatggcaactcacttcagtatttttgcctggagaattccacggacagaggagaccaacaggctatagtccatgaggccgcaaagagtcagacatgactgaatgactaacatttaacattttttctcagttgcttgaaggtgccatgtactatatttcagccttgtttatttaaaaattagtctcactcaaaatccaaaatcattttctattcccagctgcagtgacctaaaaagtttgccttaagtatgactccatagacatatttatatttaatcaagcctccttactgacactcctggctacagctgctgattctgctgctgacaaggacaggaaggactttgagtaaaatgttgtgatgtctagttagttcagggcaggactttttccttcaaacatcacatagaggtcat

SEQ ID NO: 49983 - DNA, 1205 bp, Bovine  19866880785901
  misc_feature (1)..(1): n is a, c, g, or t
nagaatgccatggagctggggatagagggatgacattaggccagattagagtgtcccaaacctcccactgttctgaccacagttcagcaggtttttttaagataaatgcactttagattgttgcaatctttttgttaatttccagagttctgaaaaaattgatttggacaattttgccagcattttgtttttgcttctatggagaaacagatttatagaggttcttgttccaccattccccaaacccttccctttagctataaaagctttctggtttctgaaaacaaacaaacaaagaaaaactgagctgaaaatttaaacctggtctggcaaacccacaagtaaatcagcttcttagattttatactttttatttatactaaattgttttaaggtctctcaaagtcttttcttttatagatgtttgattccaggtgaataattaaaatgactgtttgcaatcaactcccaacacttcatttactgctagcacccatgttataagtgccttaaaatctaacccatcagagaaccaattatggattcccattgaaggaggaaacagacagaacaggcttcatcttgagaactggactccatcttgggccggactgtggactttgagctatctgcccagtatctatggaaacgacataccaactggaaaaccaggcccccagaaggaagagccccaggctcgaacctagactcgcctttgcctaaaagaataccctaattatctgtgtaactgaatagaatcataaattctattatgcttgttggggtttgaccacaggcctattgataattgtccactgttaactacctaggtttaaggcatatgaatcacaggttaactttgattgtatctttcttttcttttgttcagactagttttagggaatcctaggggggtggaggtgggtttgggcacatacacttagggtataaaaggttttcacaaaaactggttggggtccttggctaagaggagactctgccttgggcccgccggtgtaataaactgcactccactatctgcattgtccttctgagtgagtttcctggaacacgtggctacaacaccatccttaagattctgttcttctggctctatttctaggatcaatatgagtatctatcagaaaaacagaggtaccataatgttatgggataaaatatttttaaaggcattcagttcagtt

SEQ ID NO: 49984 - DNA, 2437 bp, Bovine  19866880838322
  misc_feature (1)..(1): n is a, c, g, or t
ntggacctttgttggcaaagtaatgcctctgttttttaatatgttgtttaggttggtcataacttttcttccaaggagcaagtatcttttaatttcccagctgcagtcactatctgcagagattttggagccccccaaaatagtctctcaccgattccatttttccccatttatttatcatgaagtgatgggaccagatgccatgatcttagttttctgaatgttgagctttaagccaacattttcattctcctcttccacagtcccttggacggcaaggagatccaaccagtccattctgaaggagatcagccctgggacttctttggaaggaatgatgctaaagctgaaactccagtactttggccacctcatgcgaagagttgactcattggaaaagattctgatgctggagggattggggacaggaggagcaggggacgacagaggatgagatggctggatggcatcactgactcgatggacgtgagtctgggggatctccaggagttggtgatggacaggaaggcctggcgtgctgcgattcatggggtcgcaaagagtcggacacgactgagggactgaactgaactgaactgaacttcgactttcattaaaaggctctttagttcttcttcactttctgccataaggatggtgtcatctacatatctgaagttatcaatatttctccctgcaatcttgattccagcttgtgatttatccagcccagcatttctcatgatgtactctgcatgtaagttaaataagcagggtgacaatatacagcatttatgtactcctttactgattttgaaccagtctgttgctccatgcctggttctaactattgattcttgacctgcatacagatttctcagcaacattatgaggaatataaaattatgcaatattatttcttgttcattagttaaaaagtaaagatattcatatatatatatatatatctgtgtgtgtgtatgtgtgtgtgtgtgtgtgtgtgtatttcataggatgagtaacatgagttcagtgatttagcccttatgttaccactttgtggtctttgaaaaaaagcatagctatgcagcaaataatgcctatgacagacaaggcctgcatactactcactcactaggaatgggttaagagttaagataaaaaaaaaaaaaaaaagaaagaaaaaggaattaagaaagacaccattgcaaaaccaggctttctgatgcagagttagaaaaagtcatcacagtcaagatttgcccacatgttataatgtattcataaatagcaccttaggcgacatagacattcatacatgtgctttcaaaaagtactttaactcctagaggagtggtcaggtgttccaggatctatgtcttaagggaacatgcctgcttttcagtgtgtgtgcatctgctatttcagttgtagggaattattgcctcttattctctctgctactgatgttcaacatgctttggctccgctctggggccttaggcctagtgctgtttgtggatcctattggctttgatgaaagagagagggggggaaagaatggttttaaataaaaaaatcggaagctccaatcactccaagtggcagcagtgtcattaagtatgacaaggaatgtatttttatattatatttaggaaatttgtgaatgctgatgaggcttttctgtttttttccctgggcaatgtcactgcaatgccgtgaatgctgcctgcacatatatatttctcctttttcctcttgcctgggttgtaggtttactatttatcctgatctgaatagttagagaatgtacctgtggtttttattggaggttaatgtcagtgactgcttggcccaaggtcatcttaaacagagtgaaattataagttgactgtggtaagataacacatttgcctacactcctgccgtgctctgtcctggtgtgtcatcatggggagctgttcaagtgaagtctcagtttcctcatctataaaacagagataacagtatttccttcactgagtttttgggaggaaaaaaaaaccatcaaatgaaagtgtttagcatagtacagggtatgtggtaaggtctaaaaaatgttgtcatggctgttatgaatcttcgtgtgcttagttgctcagtcatgtctgactctttgcaaaaaagttctgtatcagtcagtaagcatagagggcaaaaagagtgtggcaagcagatctcatttatctccaagattcctgcccctccccactatatgttccctgtatgaccctttccccttgaatgtgggtgggattcaggaatacaatgagtcactgtgcctgtgattatgttacattatacatccaaagggatatttcagatgtaactaaggtcgttaatcaactgacattgagttagtaaaaagtgagattatcctgtgtgggcctgacctaat

SEQ ID NO: 49985 - DNA, 1021 bp, Bovine  19866880853804
  misc_feature (1)..(1): n is a, c, g, or t
nacacatctaattggtgctctacctaaacaaagatgtctattttgtatgctgagagttctagctacaatagattacaagggattaagatggtgattacctctgccttccatctgggaactgaggtcattaaatcttagtctctggaatgggcttcacaatttctccttatctgaaaggttactcatttctccctttgaacttgctgagcaatttacctcaataataccccttgattcagagctccataggttaatttacattatgtaaagatcactttcctttgatctaaacactgtcatagttttatatgatgggacaaggttaatcggattacaccattagttttttctaatattatcattatttcatatatttttatcccatctccttttattattcctcttttcagaatctcttaaatcacatgccacatgcagaatatagtttaagagtttttttaaaagctaaattgctgtgagtttagaatttggcatatactctattaataacagcttctccatgctataaagaagtctgccttaaatacgagcacacacacaatgaaacaagcttaaagtcacagcattacagctagaaacgatcttagaagatggttttctgtgggagtgggttcaaaaaatggttttgcatttggaaattagcatgttattgatgtctaggagagaacaaattttctgtggagtgatggaactgaaggcagattcctgtatactgcagagcagcagtggaagtaaaactagagctggatggtggactgtacttgcaaagcgtctaatagagaagatgtggcagcattcagaggaattagggttgacagacagaccttgaatgaattagaagacccatatgataactcttgaatgatgcttttgaactgtggtgctggagaagactcttgagagtcccttggacagcaaggaggtccagccagtccatcctaaaggaaatcagtcctgaatattcatcagaaggactgatgctgaagctgaaactccaata

SEQ ID NO: 49986 - DNA, 1691 bp, Bovine  19866880858866
  misc_feature (1)..(1): n is a, c, g, or t
ncatctagaacattatgtgttaccaagacttttcactttgtcttaatgctatgatgataataacactattaacaataaagtcactagcgctgatgtagcatcttactatttataaacactctgctatagttcaaatgtgttctcaaatcaaccccatgtagtaggatcactggttagtctcatattgctctcctatctcaccctttctatgttctgctttgtgtcctgggtaggatgcaggaggctgatccatgaagacctggactccacagtctctgatttatagttgatcttggctgaagagagacagtagctaagagggcacaaagagaggaggtcacatgatcgtggaaagaagtttgagctttatcaagaaagatttttttttttaattctaagggcgtcgtaacagatgggcatagtacttttctgtatgtcacaatgactgcctcaatataatcaacctccttcttcagcaaaacaggaaaataattataggaataaataagaaacattcttctgcctctgctctttggatattatgcattctcttctgggaatgaaagacatctaagcaaagtattttatgagggctgagatgataaaatctttattcctagttgctttgggtaagattttcccctacatccttgctggtacaatcgccatcactaccatcatcaaagccattgatgaatgttgtgctgtgtaaaaggatgttgtgaattgcgtttattgcaacatgagaatttgcaaatctgaagcctcaacctataggtggtattcgcagtagttatgcctgactctctggatatatagaacattgcatggcaactcaaacctcagcacacccaagctgccatctagccatcttagatacctatgtcatggtcagcagagtggacctgttcaggtcagccaaggtctacctggatcattgctagactttaagttaatatcctaatggaacccttgctgcacaatttgtagcaacccattgtgagagctggggaaaggggttacttccaaaagccttcttctctttcctgccaaccaaagcattgcagtataaattcattcctccaaactgcttactctctgtaattaactctgctctaggaatagctgttttataactgttgcaaatcaaaggactatgccactgaagtattcgcttgccaggagactgtgacatctcatccattaaaggaatgatgtttaagaacagcctcttctccttttctttttgaaagattgcttcactgaatggacattgccttgagttgtatcgagggaaatgggagttgaatcagcagcacttgtacaatgcctaactgctattactctgctcccaggagctttgaatttgcatggcttagcagactgctggctgtaacgatagaactcagagtgggttgacagcactggaatgtctaaggatgtactatgctcgtatcttcatttttcagaattcacctcttaagaggcagacagggcttttgaggatgaggctaatagtccctaattcccttgggtgttcattgtggaatgcttttacccatgctaaggtaatttgctattttaatatggatgtaatacacaatgctactaaaatttccactgtagtgaccccttcatgagtgtctattacctgttcaacagctcctggattctatagtttgaattaacct

SEQ ID NO: 49987 - DNA, 1146 bp, Bovine  19866880878932
  misc_feature (1)..(1): n is a, c, g, or t
ntttatttcaaagccatcttatcagtttgtatatttccttcccttccatcaccaatctttggtcctgtactaagacctgtcgacttttccaaggacaccctgactcatctccatttctttatcttcctcttccttgacattatctcactctgctgctgctgctgctaagtcacttcagtcatgtccaactctgtgtgaccccacagacggcagcccactaggctcccctgtccctgggattctccaggcaagaacactggagtgggttgccatttccttctccaatgcatgaaagtgaaaagtgaaagggaagtcgcttctccattatctcactctagccatcatcttatcttgtcttctcatcacagtacctgctaggtatgtcagtgaggcatgggaaacaagccactcccaaatctatacatagtcaaattaaaacagttacattttagtcctttctgtttcaaatgcattacttaattaatgagttaatataattcaaaataagttaaatttttagacttttcaattgccaattgttttatattttcaagggaaattattttattaacaaaatgtatcacacaaatggctcagaagtgcattatgagtaattatatctcaagacaatttatactctggcttaaacagtctcttgctgcattaaagccccttaggaaatgatactattgtaatatcaattctatttcataaagctctagtggatgtcattgagattatagccaaaactcttcttgttatacagtaagtcatattaatgtgtgtataaagcatgttttgacaaggcagtataatattattattatttattaggtccaaggcacctctcagccagtaggaaattagctttaatatcacattatagctcctctagcttctgctttaatgggcttcagacaacagcctgtttccactccttcaagatggcttagagtcttaactgctcctgctgagctggtctctgtgaactgtgaagtttttaatctgatctctgctcagccccaagcatttaatttgtagtttaggaattagtagaggtctgctatgcagatcaacaagggtaaaaactgttgggctttattgatacacactgcaggaagttgagtaggggagagcaaactggtg

SEQ ID NO: 49988 - DNA, 2562 bp, Bovine  19866880950188
  misc_feature (1)..(1): n is a, c, g, or t
ngtggccgagaagtgaggaaagataagatgccaaatcccaggaccttctggctctgctagtctgcaggtaaactagctggcataacggcagagttacaggacaagacggggcaggagcagaactggaaggagagaatgttataaacaagtaaaaggagattctagggcctgggttggatgaagcagtgtctgctacattgacattattatcattattaccttttattaggatggaactgcatctttcctttatgtgcctcatttcgatgaatactgggaaaacccatatattctccttgagtccaaggtagaaatcaagccaagactgggaaaaggatattagttcacaggaagatatatccattccaaatgatggtcgaaaatggaagccctaagctgaaagctttattaggcaacctgcggcatccatcgtaggcactgttcccagccaagggactagagtccagcctctgtgatttattggagatgagatgcaatgaaacaacacagaaaatggagactgggagagacagctcttttatcacagtaataaatatatgttcccagagccactgaaacctttttaaattctccaccccttatttaatacaattaaagcctgaattaattgtacaaggggtaaacaaagacatatactgctgtccagagactcaaaaggagatctagattaccttcctacattaatgctacctaacaaataaacctctgggctggacataggttagcactaggcatacattgaaaagaaattaatctgccccccaattttatggtcccagctagtttcctgtaataattctttttaaaaaatgtgtgctttttatgcttcacatttttctctgaacaggacatgttatctcctaattttatgagaataggccattgggtaaaaagtaaggagatggacacctgcagatttttcctaagtaatgactcagaagtcctactatgtcatgaagaaaacaaatctgaccctagcttaaagaagtaaaactccatgattttgagttttgtgctgtattcatggcattcttttgggtgtggagagccttgattaattacaattggttcttcagggtggaggaagattttttcaaagtggctcagtggtaaagaatctgcctgctcatgcaagagacactaattcaatccctgggtcaggaagagtccctgaagaaggaaatggcaacccacaaagtattcttgttctggaaatcccatggacagaggagacgggtgggctattgtccatggggtcataaaagagccagacatgacttagtgattaacactttctttcacttacctcattgtatggttttgggtcagccttgaaggcttggaaaagtctaaaaaaaaaaaaaaagtcagctgatataccaatgatctgaaaagtaaactagctagaaaaaattcatgttagttgtatgacatcattgggaaggtagttctagggaaaatcatgtgaaaaattacttggttggagtgtatcttagttttctcttgctatataaaaaaaattaccacagatatagaataacacacacattgattcttgcaaagttttgtgggtcatgaacctggtcatggcttagcagtgtcccaaagctgtaatcaaggtttgttttgggctatgttctcatctgaaggcttgactgaggaagtattcatctttacactcatccaggttgcggccagaacccacttcctgtggccagaggattcgggacctggcttcctgttggctatgggctggaggctgccatcgggttgtggaggccacctgcagttccttgaggctacccacaatgctttgtcacgtgggctgtccaacctggtcatgcacttcatcaagcctctgtgtagtgcatggtgatggaatcttattcagtttaacacagtcactggagtgatttttaacagagaccatccattaccttagtcatattctatggatagaaacaaatcacaaatcccacttctacaccaatggatgggattatacaaagatgtgtgtatatagagtctgcctccatcttttttatatttgactgatgacaacttttgagtctcaccccttcctctttcctttctgcctcatatctgggcaagccgataagaaagcctgcatactctcccacttgacgctggcaggaagttcaaatcatacaagcctctggccatgcgcaggaaccctcactccctgcttcaccccttaaactccgtaaaaacctcaagccatttcagaccttcttgggagccaccgtggcctcccttgaaagcctcattatgtgcataatgaatattttcatactctcttgggctgtgtgtagtgtcatcagtcttgacgtctgaatcaaatttcaggcagacgtccatttccactctgtgtgggggctgtaactgtgtagttatctctgggaggggccatgggggacaacctaagggcagaacaccaaagtatgattactgccaatgtcaggaatctgaagttttctaaattatgactccagctgtgtcgggaaatttttaaagagctta

SEQ ID NO: 49989 - DNA, 1817 bp, Bovine  19866880959713
  misc_feature (1)..(1): n is a, c, g, or t
nagagtccttggactgcaaggagatccaatcagtccatcctaaatgaaatcagtcctgaacattcattggagggactgatgctgaagatgaaactccaatcctttggccacctgatgggaggaactgactcattagaaaagaccctgattctgggaaagtttgaaggtgggaggagaagggaacaacagaggatgagatggttggatggcatcaccgactcaatggacatgagtaaactccaggagtaggtgatggacagggagacctggtgtgctccagtccatggggtcacaaacagtcagacatgactgagtgactacactgaactgaaaagtaggttgactattgtctaaaaaggatatggatctctgaactctgcaagtcatttctttgtatcttgtagttttagttgtaaactagcaagccagaccattttaatttcctccttattgtccccatctgatcagtctttcctttggatcaaatctccctaacggtttctgagaattcaaagtcatatatcacattaatatcataccattccacattttcaaatatatttaacattaaacctcaaagctccccaaatctgatgcacaagtcataaaatgactcactcttcctggaacatatcctatattcccagaatactaaatcacagtggagggcaaaggccacaggccacatctccatcattcgtttttatattttcatgtaacatgtaaagcagtgcatgtagccagttcttactaaataaatgttgccctgttacttatcatcatcagagtctacagtgctaatatatttgctgttgtggttgctaagttgtgtctgactcttttcaaccccatggactgagcactcctctgtccttcactatttcccagagtttgctcaaattcatgtccattgagttggtgatgatatttaactttctcatcctcttccaccctcttctccttctgacttcaatctttgccagcatgagggtcctttccaataagttggtccttcacatccagtggccaaagaactggaacttttgatgccctggtggctcagatggtgaagaatccgcctgtagagtgagagactcaggttaaatccctgggtcacgaagctccctggagaagggaatggcaacccactgcaatattcttgcctggagaatcccatggacagaggagcctggtgggctgcagtccatggggtcgaaaagagtcagccatgactgagttacaacactttaattttcagccttctttatggtccaactctgtcatccatatgactaaatagctttgactatacagacctttgtcagcaaagtgatatctctgcttttcaatacactgtctaggtttcttaagctttcttttcaagaggcaagcatcttttaatttcatggctgcagtcactgtctgcagtaattttggagaccaagaaaataaaatccatcactgcttccatttttcccccttctgtttcccatgaagtgatgggaccagatgccatgaacttagtttttttttttttttttttaatgttgagtttcaagattttactctcaagtttcgctgcttttcactctcttctttcaccctcatcaagaggctctttagttcctattcatggtctgccattagagtggtatcatctgcctatctgaggttgttgattccagcttatgattcatccagtccaggattttgcatgatttactctgcatataaatttaaataagcacagtgaaaatttacagccttgatgtactcctttcccagttttgaaccaatcagtttttctatgtctgatt

SEQ ID NO: 49990 - DNA, 983 bp, Bovine  19866880972270
  misc_feature (1)..(1): n is a, c, g, or t
nctcctgcattgcaggcagattctttactatctgagccccagctaagcctagtatattgggaggttctatattctgtatctatccatatgtcctgtatgtcatctatagccatatgtatatgtatctatctgtatctatctacaaaacacaatgaaaaaagaaatgaagtaatccacacatcatttcagttatggctctcaattttgccagtttaatagttggacagaaataaaattaccttttgccacacacagtcttgatcattgaactgagtgtcttccattgcttaaagaatattagattttttcatcttaatttgagaggcagtgaggcagagtgaaataggactactttaggatcatctatacctggcttccacctctgcatcattcccctcactggccagccttgggagaggtacttttctgaacctcagattcttcatgtgcaaaatgaggatattttaaggttgctgtaaactttagaaggaagtcaggatgtttcagaaggaaacaaggaaattgataagagggttaaacggatcctggagagctgatgccttgagtctgatgtttaggtgaaaggctcaggtgttgctttctcttactccctctgaattggttttcctatttgttattgctggccgttccttcatctgtcctgcggcactaccgcattactcttcaccatggctttgcattttagaacatgctctcttttcttagatggttggagttaatttaagacaaaatagcttcaactgctcagcaaataacaggctgctgaagaagacaatatagttagaaaagaaaacgttaaaaggcaagaaaacagaccacttggaatcttcgtgaattgaagcttaggtagggagggcaactgtgaaaataaaccagataatagcagaatgcaaagatgctgtagttgccggtcagaatattttaagtatctgtttagaagcttatttaaatgggaagcaaga

SEQ ID NO: 49991 - DNA, 983 bp, Bovine  19866881000257
  misc_feature (1)..(1): n is a, c, g, or t
ncccagccccataacctcatgctcctttgcacattctaaagtcttgttgttagaagccaggagttcctccacctccgttttcctgacttaagagagaggggaaatgagttgctctctaagctttcatcagtgcacatgtcactgctctgttcttctgttctgactcctgtgtcctttttaaacgtgcccattcccctcttgtctcctaatattcaaattgatgccgtagctcatgacctactctgaagctcaggtggtacttgcagaaaatcttttctttgcagtcatgcagaggaagctatgttcaggctccagaagaggcctatttgtgccagcttgtctcttagcttgcactgacacattgttcgtttaattttctcagtctactactccattagctttatcctatggtggggctggcccatttattcctgcttaaaatttaatcagacatttcactgctcgtcaacattttaacggggccatttagagcgctgaaactccacacatctctcctaattactgctagccgacagatgtcactttcactgttctgtcttccctgtctcctccagttgcacagacctgaaggagacactcattctttaaataaaccttaaagcagaaaacacaatcagagattaatggggagatgccaacccatgtttctgcctgattggaatctagtcatttagggaagttaaagactgcatcttgtacctcatcaggacttgaagcctactctcgatttttgttgttgttgttattgtacagagtgcaagggtcatgggaagtagaagggatgcagaatcaacaactagactccctgatctgccatgcttgtcatgcctttcttgggctactgtctgctcaggcttgttccttattcaactgtgaaattggaatcgcaagaggaatggttgcattttcattgccaggactcctctcatgatggagcacaaggaaagggggactgagtttgg

SEQ ID NO: 49992 - DNA, 3110 bp, Bovine  19866881080530
  misc_feature (1)..(1): n is a, c, g, or t
nttgttatcttatccccaagaaattttatttttctggacagtctcttctgaaatttgtgaacatcttagatgttccagtttcacccttattttacttatattctcagtataatcttgatgtcctttcttctgcattcaaatgcaaggacaaacaaacagaaagagatggtggttgattcccagggggagtcttgccctctgtactataatgacctttgaaatccttacttgtcattgaaggcaccattggctgcctggctaacattcagtcttgagttgcacccagctaagagcctttcctgatatgggactatcaccgttatcactacatttcctttcttctaaaaactcctgagtaggaatgttgctttttttcctttgaaatcttgacctctcagaggaatgcatgcctatctatgggactccatacaatggtaggcaattgtcatctgagtatcttaagtgtacctcagttttaattttgtaagaaagacagtgggtgatttctactcctaggaacccttcctttattagaattatcttccttgagatatctattcatctcaggaaataccatacaacccagagttagtgtttgttttaccttgtttctactgatattcttaattgctatggaaatgtccctatgactaatgtaacatcatcccatttaaatttcctcagggcaatgggaaatattttgcttcccaattaggttgatctcctatgacactcttgctcattatgggagtgaccaccagcaccaggagtcccacaggtcattctattttaatcaatttaaaagacagattttaagaaaatataacccttttcctatctgaatgactaatttgtaaaaacgtcaaaagaagtttgtaaaatggaatgattacaactgagtactaaatcaacattctaaaggacaaaggatgaaatatctgaaagtcaaattggagagggaagtgaaacacatattcaccatgaaaactagcccacaagtcttctctctttttaatcttgatggaatttttatcttagggacatcatttcttttcctgccgtagtatattgaacatgtccattcctccctttcccctacccactcccataggtttcaacaatttgaattcaaacggagataggctggtgtctccattcatttccacatgcaccctggactctatacaagaatttgactattgctttctctgcctgcttctaatgctgcatcttcagcatttcttctctcccctttgccaaaataagatttctgtttcatagtacatgattttactttggatttatagcatcatctttctcaaaagaatattaagaccatgtgggacactacagttatattctccattgcactgaggaaggagcctgaagacaaaaccaactgcatttaggaattttcaactttcccacttttatcagttcatgttatataaaagggaataaatggcatgttaattgtgctctcagatgatactaattcgggaatgttgcaaaaacaggagagagagaataatggcactggagggactaaagaggtttagctatgtgggtgggtggaaccaagagagcgcaaatcaccccagaaaaggttccaagtaatttaaacctaccctgtgttcatgtgcatgtggatttatgtgggtttctatatgcacctgttcggttacactatttaaggttaaacacgtataattttatggagaaaaagcaagctagcactggccataataacatagggtacctactgcttcctctctgcagtgatttggccatggtattagcttgtatcaaataaaaagttccattttcttatttataacatgaggggcttgcataaaattcatgagtcctccaggctttaaaagtacatgaataaacatttgagtcatagtttctatggcatctagattatagaacacggaacaatttggaaataaaatattgactaaattatttcctgatgttcttattcttcaggtgcccctttatgacttctttgcatcatcccatttttcatcagaaattaactttgctcaggctcgagccacactgatgaattctgccaaaaagcttacaaatattttgacctcatgataccgatgggatggggggctttcttatttggaggtaaaagagggctctgaagtcaatatccacaagttgatctaaagatgatctgtctaactgtagaaactgagctgcaccctggggaaatttgattattataaatgtaggaagtaagaaataccaagaggccaattacttgaaatggatgagctccaagtggttagaaataagcagagtttctaggacagtaagttcactgatacactgattcactgccccaggaggatgccacctacatacatctccctctgagtcactgcttgatgaggttaggacagattggaatagggatcaagagactagaagggagtgtggttggactgttgtgtttgaaagcaagggaatgaaaagatctgatataccagaaaattaaattgttttcaaaacatcactgagcagtatctgcaggtggaaccttgtctgttgaaaggtacttgggtattttggaaagaaatattttgggttttgacctttctcttattaactggtttgtaggaaaacctattcagaaggagctaccaacttaatctagtccaggggatgaccagtaattactggtatctcctagtggctgaaggaacattggcatctgttatatagagctggcagggatctttaggactgaagactatagatctctatactccaaaatcactgtggatggtgattgcagccatgaaattaaaagacatttactccttggaacgaaagttatgaccaacctagatagcatattcaaaagcagagacattactttgccaacaaaggtccatctagtcaaggcagtggtttttccattggtcacatatggatgtgagagttggactgtgaagaaagctgagtgctgaagaattgatgcttttgaactgtggtgttggagaagactcttgagagtcccttggactgcaaggaggtccaaccagtccatcctaaaggagatcagtccgggtgttcatggaaggact

SEQ ID NO: 49993 - DNA, 1081 bp, Bovine  19866881084485
  misc_feature (1)..(1): n is a, c, g, or t
ngtttagatcgctgtaggctctaaagaatcaatgactgtatgtgcaatgactgctttcatctcagcttttgttcaatgattcttgtttgtgcttcaagttttgcaaactacttcgagatccctctgggctgaaaaaggcaagagtaatataagatatcactggcagtggtaataaccttttatttatcaaacaccttgcttccagggagctcagagtgccttatggatgttatctcatgaatcctcctgacatccctatgaggccgggaacaaatactgttccattctgagtggcaagagagaaaactgtaaggagggaaggtagaaaacacagaaatctttgaagaggaatgaaggtaactcctagtagggccatgatacgatgtattttgataggaaatggaaaatctctcttcccagaaatgtcatttctatcaatgttgacagctaatattgactgaatgcttactatatgccacgtatttcttttaagcacactgcttttattaacaaattgagtcttctcaacagtgcaataagattattatgatcattatactcattttacagatgaggaaagtgtgtacagaggacctaagtgacttgctcagaattaggaagtttgagtcaatagtcaaaataaaataatcaaatcaaatttagctataaatctcaaactcttacctgcttactacactgtggaattaatgctacgttaagacctgaagtaaatacagttagtggtacattccttggtctcatgaatgttttcacctgcaagtctttcaaaatacaggtagtctgagatggtgggattttcagtcaatattgacattattcctcctgaaacactcaagtagaaaaatgagtaggtatgattttgaaaaacactccacatcaagcgataggacttgcagaagattttcaaggcaggcaaggacagaagagggaactaaaatgggtttcatgcttaatatactccatgcacagtgctagcgaggcaccacatgtatgttctctcattttgtatttccaacacatcttctttaagtaggtagtagcatcctgattttgctcatga

SEQ ID NO: 49994 - DNA, 1591 bp, Bovine  19866881094672
  misc_feature (1)..(1): n is a, c, g, or t
ncagcctttttaaacctgaagccttttctttcgtcatccataaggtccttcttcctcaagctgatcaagaaataaagaacagttgtgtccaactctttgtgaccccatggatggtagccccccccaccaggttcctcggtccatggaattgtccaggcaagaatactggagtggacagccattcccttctccaggggaaagaacacccagaagggctaaataggctgttttgctggctagacttctcttttgaataaattcaagatacataaggattgtgttggcatgcaggcatgctcatttaattgagtttgaggacagaagtgtttcactgctgctgggaatcattcatgaaggaagacaatggtcctttggtttgccccattgcactaaccttgatctattatcctctcctgttctcagccaatctcagagaacatgtatgatctgcagagtcaggttctcatagaaactatgtcaagactcccaatttcctgcctctgattttgtgcttggacaaattttactctgcatagatctatttcataaaattaagaaattaggtagcattttaagaaagtaagcccctacacattgagattcagtaaatagtaattgaaattatatttgaattctttagacgtcaatccaaagtgaagaaacaaactttagcacctgctctggctttagaaggcccttttttttttttctgttttcccttgtcttttttcgtacctcagtcacatctcctgagattccaaatgccagcataactataaacacaattcactaagtttctggcacaaaatgaatcaacagtggcagttctgcaccgctcagatcgaaggagacgtcattgtgaagtcatgtttggtttttctctctggagagattttccatcctttccaactttgtaatgacaaaactctggaatatggaacacaaaaagaattcatgtaatcaaagaaatccgatattctcctaagtgacatctttgcaaatattattgttatttgctcataaatgaagcaactgggaatcaaagaaaccccagactacatagctcttaagagatgaagctaaactatgaatctgaatgtacggagcactcaccatgatgatcatgcacgtaggtgttccatgttccactgtggttattccagagaaaattggagaattgaacccatcttaatagttacacaggagatccaataggcctttgttagaatccccaattaatagtgaaaaatttctagaaagtttttaatgcaaaatctttagatattctttttgtgcaccagaactgagaaaaaactcaaacctgtctgaatataaagtttagactctattcctaacatttgatgttctctgctttccatgttattttagagcagctctttagggattaaaataacagtcacattatgtcattacattaaattattgaaatacttttgctgctgctgctgctaagtcgcttcagtcgtgtctgactctgtgcgaccccatagacggcagcccaccaggctccgccgtccctgggattctccaggcaagaacactggagtgggttgccatttcctcttccaag

SEQ ID NO: 49995 - DNA, 1388 bp, Bovine  19866881110016
  misc_feature (1)..(1): n is a, c, g, or t
ntgggttgccatttccttctccaatgcaggaaagtgaaaagtgaaagtgaagtcgctcaagtcgtgtctgaccctcagtgaccccatggactgcagcctaccaggctcctcccaatcatgggattttccaggcaggagtactggagtggggtgccatatgtctccaaacctcaatttccctacctgtcaaatggggatagccatacctatcctgaagcattgttttgaaagtcaaggaaacatgctaagcgaagcacagtgaaggtacttaagaagtcatagctctcatcattagcagcacttccaccttagaatgtaaagcctaacgtctgcttcctaagctcacttctaatcagacaactgttgttgtttgaccatattccattgacattgttgtgatctgaggtgaaggctaagtccgcaattattctatctcctatccgacttggcagcatgtcacatagagtgctataaaaactctgggctcctttcagagaccacaaaaaagagggttaagggtggaatcagaaaatcaatttagtttccgcctaggcagccttttgctataatgtttcttgaacaacataatggctctgtggagctgatgacagagggcagcagaagaaacagcccagtcgtgatgcaagtttgtctgctgcatcttgagctggcattgcaaggacaatagattctttagcactaggggtaatacttgcagaaaagctactgatgtggcaacctcaagtatgccctgcaaatctatgtgccaaggtctagttctgtacactgcccactgtgtgtgtgtgtgtgttaactcacttcagtcttgtcaactctttgtgaccctatggactgttgcccgcctttgtcatgggtattctccaagaatactgaagtgggttgccatgccctcctccagggatcttccccacccagggatcgaacctatgtctcctgcagctcctgcattgcagctgggttctttactgctgagccactggggaagcccatactgcccactatctatacttaattctgtaaagtctgtttgtcctcataaagtatcaggaaaaaaattaaaaagtagacagaagaacaaaatatttgtagccctagtaatcaaagacaactattgtcagcatttcagcaaattatttctagtttttactaattttgagcattgatccagctgttattatatgttccattacatattcaatcatgtaacaccctgaacaaggagttggcaaactacaacaacagctctgaatcaccgcctgttctcgtaactaagattctattataacacatccaaacagggcaagcctggcatgctgtactccatgcagtcacaaagagtcggacacgactgagtgactgaacaacaa

SEQ ID NO: 49996 - DNA, 1467 bp, Bovine  19866881114003
  misc_feature (1)..(1): n is a, c, g, or t
nttgagaaaatctatgaaagaacaagtgatgctatgagttttatgatcttcaaattaaggggccttaatgcttgccttaaatcagacctcactggttcacaaatcttgtccactttctacaacaatcatttttaacttttgtgctccccacagaactctgaccatccagctgctcaccccactctccttgcttaaaacaaagagaaatgtaagccattacacaggaatcctctgtcatctctctatcagccctggaagactactttcttccttccctgagttcctcacctctctcgttataactgaagaagtacatattatcctgtatctagctcacttatactttagtcttcttatctgatctcagaggaaatcaatgtgttgttctcctccattatctgtctcactccaatgctgaacttttctcaataacatgtgattccacttaagtttgctcatctgaaaatacagtgaaaacattaaaaattctcatttatacccagatattccatctccatctgtggatgattgctaattccctcctgagcttcagtacacatcatcttcaaccactctcctaacacacgatgatcagcttgaactgaacacatccaaagctctgaacactggctattcaacactctaagctctttttatatccaccctccccccccccaatgaatgataccactgttaatccttttcagaatgtcaagtgcctgggagtcatctttggccaaaccctctctttttccaccttcgttaacaaataaacaccacatctcctaaataccccttgaatacatccacttctatttccattaccaccagcaccctggaccaaagaccctcacatctttctggaccatcttaacactccctttcctctttcagtttttaaattcccacttaatcctgtttagtcaattatctggcctgcaatcagagtggtagttcctaagtacaaatctggtgatgtatcacagctgtgtaaaatccttcaatgaattatttttgctctttgctcttgggtgttgttcagtcactcagtctgtgtcccgactctttgcaacaccatggactgtagcacatcaggcttccctgtcctacatcacctcccagagcttgctcagacttatgcccatcgagtcattgatgtcatctaaccatctcatcctctatccttcccttctcctcctgttttctgtctttcccagcaatagggccttttacaatgagtcagttctttgcatcaggtggccaaagtattgaagcttcagcatcagtccttccaatgaacagccaggactgatttcctttaggattgactggtttgatctccttacagtccaagggactctcaagagtcttctccaacaccacagttcaaaagcatcaattcttcagcgctcagccttctttatggtccaactttcacatccatatatgactacggaaaaatcatag

SEQ ID NO: 49997 - DNA, 766 bp, Bovine  19866881168656
  misc_feature (1)..(1): n is a, c, g, or t
ntcgggggaacagaagagaagcaggcgatgtaagagaagaatccttataaatatctattcttgcttcatctctctgcttatactcaccctaaatgctccctgatctgccctgtacttattacccctaaatgccattcacatggcaaggaatattaggttttcaccatcacctgcctccatggaagacataaatggttcatgtcactgtgttaaaaagagtgattaagtagaacaaatgttacagttatggaaagtgaggctcagagagatcaataataatgtttggcatttatgtgatgcttttagtcttccaggggcgtttctaccacctaactcctgtgacatatgtgataaggttttaggtaaatggggcagagattatcatctttattatgcagaggagactgagatttcaagcaagtcactgctctaaccacacattaagtatgtgagatcagacaaggtatcttacctctatgtatgtgtcagtttcaaatctgaaataggaacattagttgaacttataaggaatgaaattgggtcatttgtagagaggtggatggacctagagtcagttgtacagaatgaagttaagtcagaaagagaaaaacagagtattaacgcatatacatggaatctagaaaaatggtacagatggccttatttccaggtcaggaatagaggctcagacagaaaatagacgtgtggacacagcagggaaggggatagtgggacaaattggaagactgggattgacatatatgct

SEQ ID NO: 49998 - DNA, 1546 bp, Bovine  19866881288852
  misc_feature (1)..(1): n is a, c, g, or t
ntagagaacccccatggacagaggagcctagcgggctacagtccatgaggtcgcaaagagtaagacacaactgattggctaagtacacaagactagcaagaggccatgtgactagcaggcaaaatgctgctttcaagaattcaatctgtgtttagatttttcatcaatatttgcttcagttttgtacaccctatacagttttgggagaaggaaatggccacacactccagtattcatacctgagaaatcctatggtcagaggagcctgaagggctacagtccccagttaaaaagcatcagacacaactgagcacgcacacacacatagtttttggtaaagataggcaaaagagagaatgagtaacctagtcccaatttcaaaaagaaaaatttgaatcatttcttctaaattccataagaaaagctacattgtgtgattctgctctggctgtgttgatcggggcaggggattaataaattttcaatagaataaatttatttcatagaataaattttcaatcgtgatgatgacaagtgtcaccaagaaaatgatgtgagtttttaggaagaatgatgtcagagtgtatttcctctagtgtcttacttagggatgcttttctttccccaagttactgtggtcagcaaaatcccactttcccataaatgaaaagacatttcgggaaaaaaaaaagagtgatgggggaaagaatgaggacaactgtccatcttagagaccatttagtgcaaatgcagatgcctctgagcaaagaatttttgcttcaagtgtagtttttttcctgtaattcttttccaaaattccacttcattcacttcaatcgcatgtgcattggactgttctatgtaaagcggcagtttactcaggaagtggttcttttttagcgtgtttaaatcccaagatgaaatgccacttcagaaagctgcaatcttcatggcactggagagtttcgggagtgcagaaacttcttttctgaactcattctcctgtttaggaaagtagtttaggtttcacaagtcccacccatctattgtgtttccttgaaaagcacaaaggataaaaataagctgcgtgatctcttgagaaaattgtgtttgtaacctatttcctcctgaaagtgatttcaaaagtaaatttgagccaactttgaaaggcaaagaaaaatccctctgttccttttcagtcaatattacttatgacttactacctcttatcttatgcttttcttttctttcttctccctgctctgtccacttggaaatcaaagacaagacagtcaaaagctattagggagagagacttgacaattccaaaagaatatcagttcagttcagttcagtcgctcagtcgtgtccgactctttgagaccccataaatcgcagcacgccaggcctccctgtccatcaccaactcccgaagttcattcagaatcacgtccatcgagtcagtgatgccatccagccatctcatcctctgtcctccccttctcctcttgcccccaatccctcccagcatcagagtcttttccaa

SEQ ID NO: 49999 - DNA, 823 bp, Bovine  19866881290008
  misc_feature (1)..(1): n is a, c, g, or t
nctccttattttatataaacagtgaataaccagtgcttcccttggaagaattgattactgcttcaccctaaggactctgttgagagaactgattcttggagctacctgaaggcatatggaaatagctacattaccgagaaactttttataataaagagctttatctgtaatataatgtacttcttctttctccaaagaagtcagtgcctgagattaaacatccgttgcggagtcagtggccaagagagactttattgagtccccactggccttgtactagaggaccaggacatgattgaaggtggtgatttccataaactgcttcaaggaaggttttaggacacagactggtaagagatattccaggattctttcttcttttcttttgtaatcatgattaaaacaaacaagaacagaccctgggcacagcttctgtaagtaaggaacactcaagcctgataataacttgaaatgtacacagtaccatccaataagagaaatgctaggggcaaatgggggaaatcacatctcgtgttgttttatgggaagtaggctcctctctccttccttccttttctctcatttccttgaaattaccaggctttgtaagttcctgattaactagcacttcataaactttctcattacccatgaacacatacatgacacaaattgagttcacttgctccttcttgctggattaatcatttcttattctctgtgccacagggtcaaattgtgtttttcctgtatttatcgtatgcattttgtgtttgttttcaccttttctgagacatttcttgcatagattctctctcaactt

SEQ ID NO: 50000 - DNA, 1062 bp, Bovine  19866881339223
  misc_feature (1)..(1): n is a, c, g, or t
nttctagcacttattcagtaaatgctgcgaggatatggttggagagaaaaggattctgcacgtatttgctgcaggcctccaatttccaagagctccctctgcaggaaggttcaggttcaggaagccagaatgccttgtggatctgggttactttgagcacaaactcttaatgcatctacagtcaacggccctggccttattgccttatttaacataatctgcctcttgcagagaaccttagaaagtaaatgccagaggctccaggatcaggaattaattataagaattgcaaaaccccggaaagtggttggcaggaggtgccccgtacaatggcaatttgtcggccactgttggaggaatgaagacagtaagcccgatggccacttcccttccctttggcttggagcacttggctttcatttatgaggccatcgggttcaattaagcttctgcatagcgagttgtcagtcaccatcaaggcacctcctggatacgtgtcagagcagcctccttcttgtcacttcaatctcgttctagaaacctgtgagcaggatttcaaggggttgagctggtgcatattgtgtaacactgtattttcctccctttctcttctgactctttttccagaggcttcagccatcacaggtcaggcttgcagagagccgaggggtgccaggcttatgagtcctctgggagtgcccatcttcgtgagctttgacaaggacatccttcggggagactgtagcagcagcttgatcagagtaagcagccccgggccatggcttttctgagggttcacattaacccagcaaagatggagaggtgggcactaatcccaaagaacaaaccaaagtactgaaaagtactgcctgggtggtaggttgagcgaagaggttggctccactctgttcgcctttgaaagcagctgcatttaatttttttctttatcagacacacctgacagctgacatctgtctatgtggcatgcatttgcaatttgccaaattacctctaacatcacccctttcccagccactcaagaaaatatatctgaatgcaaat

SEQ ID NO: 50001 - DNA, 1326 bp, Bovine  19866881351653
  misc_feature (1)..(1): n is a, c, g, or t
naaacagaattttccgtcaaattttttacacagatctgaatatactgaaaccatttaacaagaccttacttaaagctcagggaaagtagaagaacattaatatcaaagggtagcttcaaactgttgaactgagggctatttcctttttaatgaagcccactccattgaattgctaattccattggtgttatttaatactttgagtatgtttcacaatggtagatctggtttcagctttcttctcaaactcctcaaggaaatttacctttaaaacaatgtcataaggatgtttcttttatgaaaacagctgtcaggattaaatagataatccaaagaaatcaagtgtggtatatttaaagcagttactggtcaattactctgatataatccatatagaatccatacagttcaactttctatttttaccttccccatttcagggttatatgaacttgtaacaatttggatatatgaaggtagtgaagtatcacaactctaaaatcttagtggctaaacataagatttatctctcacttaattcatatgtcctttgaggtctcctcagaattctgttgtacattgttctcattatgagagccattctgatggaattgtcatcagccagaacagtgttaatgtccagaggaaaataaaagggaaaatatcctaaacttttcacccagaaaatatacatcttaattttggttacattgtattggctaaaacaagtcacaagccaccacgaatctgaggggtcttcaaagcaaaacttgcactggacaatataggctaggatgactttgttcaaggttattgtacaagggatgagagccagagctcaaagtgagcttaactctactgaaacaaaagacttgagaatttttaggagctggagttggggatcttaagccatctgtgtttgcttattggctttaaatcaaagaaaagtaaacttttgcttttcttcatgacaatatagttatacaacttgcagcaaggcacctgccagggttaggctcctacctttccacagtaactgggagattggggtattatcttcctctatgacaatatttcaaaggtatttttctcaggtccttgataaagacattcctgggttgtaaaactgcaagaagcttttaaaagtttatatctcaaaggagcagagagagaaaactaacaaatttcttacagtaaagctccctatgaaaagggagatcagggacgtagaagcaggaaggagcttgtctaaagtatagtcaagctgagtgaactgtcttggtcaggtaagagaacttcatttctactgtggctctgagagttgaa

SEQ ID NO: 50002 - DNA, 902 bp, Bovine  19866881412550
  misc_feature (1)..(1): n is a, c, g, or t
ntacaagaattcagactccttgaggggaggaagcctgtgtatccctgtatctctgacatgacataacacagaagattgtagatactggccttccataaatactagaaaaatgaaaaaaatgtttaagtgtgttttttaaaaaatcagggtaaacctgaatggaaacagaaaacttttcttctcttgttaacgtagattggttagaacaaagttgtaaaagttatttagtaaaggattgaagctcaaattttggtgaataaatcgtttttcatagaaacccagttgtttcataatatatataaactcacttattaattgaagtaatatttttaaaagctattgataaaactaagaatagaataaaaattagaaagtgttagttccatggagagacagaaaattgctgttttttcggtattttattcagccagtgacatcatggaatttatttccccaatcttgcttaataggacatgagggaaaggcagggcggtaagagtagagaactgccaactgagaaggtgcttgtcccctagcaagctaagcaaagagaaccgaagagtttatttttatttgcttttgtggtagggaaattgaaatctagaagaggaaaaaaccatgagagaaagagaaggtagaacttttctcaattcccaaagaacaaaagacagaattatgaatgagtcccagaaagcctgctgagatgaaaagacaccattttgaccaaagaattcttcctttcaggcctcatagttcatcttaaaaacatgaaaacctgaattaagaacagtcaaaaattagtgtgatatgagcagaaagttgtaccgtgttcattggtttcattcaaacctagctctaaaatacgtagatagtttaagacactgatatctccaaagtctaca

SEQ ID NO: 50003 - DNA, 725 bp, Bovine  19866881426566
  misc_feature (1)..(1): n is a, c, g, or t
ngcaccagggaagtccctgattttcaacttcaaataaaatcctccttcactctccctctctgtggttcctgagaaatatgcctgcttccatccctttcatggaagaaaccactttgttctaaacaaacaacagagagaagagtgagccagtattggaaagaggcagctgcctggctgagacagggtcgacctgtcagttaagctggagtggagcagagaggcgggaacagtatgtaccaggtgatgggatcatttcagacttgcttttgcaggggtgcccacttaagctgcatcttcaccctttagggtggggaaggtatgggtggaaggaaactgttctgcctttgatttctcctcagagcatggctgtggttgagaaaagttaattgttggaaaacagccttggctctgttcccacgtagttaggcccttctggtttcagcatcagacccagctgctttgcctaaggcttagggctcagagccataagacagcaagaagctgcttcagcgatttatttttatgtatttatttgtgttttggtgggagaagggttttggccataagtgaaacaagccacaaagggagaggagggagaggagagagataaactagaggaatttttcatctccattctcccctggaaagaggagtcttagattggctttgaattctccaaaaactaacatacagcgttgggaaaaaacgttttgtatggcccagag

SEQ ID NO: 50004 - DNA, 1334 bp, Bovine  19866881474547
  misc_feature (1)..(1): n is a, c, g, or t
ncatgatctgggatccttagttaaatcttgcatggttacctctgtggtgtgaccaactgaagtaaccatctggataaatacttcgtctaatttgttatatgggcaactttctgtataacaaaattatattaaaagaatttgtttagtagtgaatagaagctagttgcttctattgcgagtatgcttttggaaaaggaaatgacatgccactccagtattcttgcctggagaatccaatggacagaggagcctggcaggctatggtccatggggtcacacagagtcatttggacatgactgttgcgacttagcatgcacacactagtatgctcgcaaggaccgaaaaatagaggcatgaggttcaaacctcaccacttcaacttgaattcatacaactgaagaagattatctgggttcagtaatcctcagtgttttgagacctgtcctgtaatctctgacatatcagttatacactgagtctggttatgtattgaatctgtatgcatatacatatcagttatactttctctcaagggaagtggatacactaaccaaccaattccagttttctttttccttctgttggcatgtcatattctcccatatacaaacatcactgcttcttctgtggatattattcttggcagagaggtatctctggtcttccttaaggctttaactcattagtgaatctactcatccgtcttctattggctgattgtctagcaggtatcagaaaaacctatccaggcaaggctacaaacacatccagacgtgagagccaagactaacgcccagaagctctgctcttgaggatgtaggacttgcctgaattagagaaatgagtcctctgcaggatgggaaggatgatgaaattgtcaacagtgatttttctgacttagcataaatagtattgataaacagggggctttgaaaatgccttatatatctactccataatttcttcatgccataaatggtgggttcagtggaatttcatagccaaggaagaaaaggaaatcaaacataatagaacacattcaggtcagcacattgccttcaggacagctggactaatagggggtcaagcacatgtggagaatttgcaaatgagatgaccctggagaaatttgggcacaataacaccctgattagtgagtacagctgctcaggattcagaatcattctgtgtcagtctccatttcaaacttgtcatcaccttcctaacatttggtgtctcatccctgtgctcctcagtcctgccacacagtagcaaagggggcaaatctaacatttatacattctgaaataatcagcgcaaatcttaagaattt

SEQ ID NO: 50005 - DNA, 2030 bp, Bovine  19866880508406
  misc_feature (1)..(1): n is a, c, g, or t
ncctttgtgccataacattggaaaagaaaacttgcctaagagatagttcagtgtgttattttttaaccctcttttaagctatgaattgttttcctgcattttcttagtaaccctggagaatcaagaacagataggcagatagctggtttaaaaaagaagcccacaaaccagatcctttattgaatactgtttctgtgtagggaaaggatagagaattctaatttgagagttttactaggtggtggattcattttgatatttggcaaaactaatacaattatgtaaagtttaaaaaaaaaaaaaaaagcttacagagaggctgcctgcaaaaaagcaatgccctttgaagcattcgtatggacatggagactgtatagcccttagggagatctacagacatccgctctgccgagtgctgggaagcggctttttcccatgcttgcagcatccctgtggggtaaagttctgttaattttgcataaatatttaccatatctcattttagctagcattgcttccttacactggtagtaataaggaaatctttgcttacccagcttgaaaagtttgttatagatatgacttgtctggagaatgttgttatctttgagggctgatgaagttaaaagtcagattggaaaaaataatggggtaaattacaaattcacaatccataaataatctacttattatagaaatatttgcccatgtttactgtcctatatttaaaagtgagaaggttattatcatacagtcagcatgattcacttcagctttgtcccatctaacaagtcagatcattgtcgctttcatatatcttgtcagtgtgatacttgagtaatttagtctcatttactacactttaacagttatttcctcatttagttgtaaaagcttcaatttattaagtaggttctttgtaggcattgtatttaatacatataacagcactataaggcagatgttattcctgttttacagatgagaaaaatcttagattcagagacatttgttgactagcctgttatttcccagcttatacatacttgggaccaggtttaaaatccaggtcttctgactcctggttcattgtgtttgctactgcacataattatgggtaactattttttctgtgaaggtagggtccaaacacaactacaaagtatggaattcaaatgagaatgttcagtcaaagaaggttatttatttagtttctttatcttttaacgtggacttccctggtgcaggggtaaagaatctgcctgccaatgcaggagacacaggagacttggatttgattcctgggttgggaagatcctctggagaaggaaatgggaacccattccagtattcttgcctagggaatcccatggacagaggagcctggtggtctacagtccatggggtcacaaagagttggacacgactgtagaacctaagcacacagcacattttgcatagtttgttagaactatttcttattgctaaaatagtaagaccctagtgtttaaagctggagaaggcaatggcaacccactccagtactcttgcctggaaaatcccatggatggaggagcctggtaggctgcagtccatggggtcgcaaagagtcggacacggctgagtgacttcactttcacttttcactttcctgcattggagaaggaaatggcaacccactccagtgttcttgcctggagaatcccagggacgggggagcctggtgggctaccatctatggggtcgcacagagttggacacaactgaagcgacttagcagcagcagcagtgtttaaagcacttacaaatgaacttgaacacaggtttagaaagtaaaacaatgacaatggcgctttagatgtttttatgtaaaagttctaaatcaaagggaaaaaattaagagctattataatataaaccttctgtttggcccacacaggttttccactaatagttagtggaaaaagagaattctttttcatgtgtatgactgtaggtgttttctatattcaacctttattttatgtgaa

SEQ ID NO: 50006 - DNA, 2062 bp, Bovine  19866880511410
  misc_feature (1)..(1): n is a, c, g, or t
nggatccaacctggcatctcttgtgtctcctgcattggtaggtggattctttacaacttaccattacctgggaagcagaagattaaaaaaagtaaatacatctaagaatagaaaagttctcaatggtacccaaaacgctgttgctagtagtttaagaggcaggtagtcttcataaaaggggacttgcttttcagtagattcctattttagcatttatatatatgctaattttttcagataaatgaagaggagaaaaagaactcttggtctcagtcccatttctcaactccattcgccttccgacttccaaagccttgccctgcttccctcccacccagctctcatccactccagcctccaagcctgtctgcaccacaaccactgcccctggggtggctactcttcactgtgtgcggaccaaggcctccccttcatgctcagctgcaagaaacacacaagggcctcaaatgcttgaaggagggaaattgccccaggtgggagccctgtgagcaagccaaggggcttggtttcctattaagtgcggggaaggagtggcagttaaacaccgagcttcaaagagtctagcattttcaaaacttgcttttggggaatatgcagcttttattggaggtgtcagacattaatgagagttctggatgttcccagcctgaagagccctctccctctcttctcttcccccaccccttctaacaactagatagcccctccttgatgaatcaagagaggctcagcctttaaggggtattcctgtcccatggctcagcccacttccccacccccccccatcacctctgtaataaggggtggaagctgagaggatgcaaggggtggggagtgggaacccaagggcagggcagggagcaagttcagacagaggcaaagcgagcccagcttgttcacctgctcctttggacaaggtgtcgtggctgatgattaggaattctggggcctgacctttgccagttgggatgaaccttccgcaaacaattgctcctatgggaagtgaccactctcttagatattttgagctccttaaacaaacggaagtgtgagagctctgttttgtccaaatatgtagttacaaatgagccttgcatgcatgctcactcacccaatcgtgtctgactctttgtgaccccaggaactgtagcctgccaggctcctctgtctatgggattttccaggcaagaatactggagtaggttgccatttcctcctccaagggatcttcccaacccagggattgaacccgggtcctacattgggaggcagatactttaccatttagccacctgggaagcccccacaaattagccttatttgaccacatttgtaatgccttcaaaggtagattgaagtgagcttgaaaggttaaggaacgtgtccaaaatacagggacatcttccaatatgtctagaacagaggacacactcacaaatatttgtggaataaatgtatgcattcgtgtatgcatgagtgaatgagtgagtgaatgatcctgttttctctttatctttacttacaacacttagacattagatgatattagacatttagattagatgttagaaattacttctgttggttaggcattggaatccctgaaaagacaataccctgagatactaaaggaaagcctccctgtcttacttatatttcaatgaatagtggatggatggatggacagataaatgagtaaatgaatggaacgatatatggtatcatcatccctacaaatacaatatgagggcttccctcaaaaaaataagagggcttcctcatagcttagttggtaaagaatccgcctgcaatgcaggagaccctggttcaattcctgggttgggaagattccctggagaagggataggctactcactccagtactcttgggcttccccggtggctcagctggtaaagaatctgcctgcaatgtggcagacccgggttcaaccccggggttgagaagatcccctggagaatggaaaggctacccactccagtattctggcctggagaatgccatggactgtatagtccatgg

SEQ ID NO: 50007 - DNA, 1694 bp, Bovine  19866880596569
  misc_feature (1)..(1): n is a, c, g, or t
ncctgtctgctgtgcgggagaaccagattcaatccctgggccgggaagatcccctggagaagggaatggctatccactccagtattcttggctggagaattccatggacagaggagcctggtgggctacaatccatggggtcacaaagagttggacacaactgagtaccacacgtatagtcagtgatgaaaagagggtaaaaggcatcttgaatcggtggggaacaccagggttctggatagaatctccttagaccaggatggagtaatactcaacagagtcccagtgagaaaggtcaaggatctgtctataggaggaacacagcgggcaagacaacttccatctctgtctctcctccctggcatctggtgaacaccagatcagcagtcccagacacctgcgaagacccctgtcgagacggagacaggaggagctggccagccctccacgttcccacctctgagccacagtgctgcaggcccactgatttgcatgctttggcagcactggggtatgagcttgcctggggagcaattctctgggtaagggaggtggaagcacaggagtggagaactgttccagcaggatttttcactcttgcctgataaacacacagggagcgttctgcaaggaggctgaaacgctcccatttctgggctgcttctcttctcaccagctccactcccaggtaaacccagtaagacttcccctgtcactttatgactacgtggcaatgtattggcacttcctgggatagcaatgattaaaataaccagcacctttggagaccctcctgggcagtagccaccagagcaaaccaagagacttcccagtgaagtcattctaaccagtcaaaacagtttttcccaggaccccacagacaccaagcctaacttttttgttatttgagattcctccaaggaactgggcactgtggcctaatggccagagttctgtacagagaacacacggtaaactgagcccgagggttacttcaaaggctattttctgctggactttgggcaagttgcttgatctccatagctttcaatttccattacatactaaaaccaaaaattctgtctgtattcatgccactttcttcgtgggaacaaagaaacaccttggcatttctccgtttcaaaggaaactgaggctggcccctgaaggcacctgaagaacaggacacgggaggaccttgatgggctgggggaagaatgctggcttacgggatgggagatcagagctgcagttctccaccggctgaatggtctcagctgtggatagcaggtgcaaaggtgcagcgagggagacatgccctgggcagacatcactgatgacctgctgtattcacttccttctcctaaactcagtgcatagcgaccaccagcgatgatcagaagtggctctcctgaagaaacccacttgctaccccaggacaggaagatcttccagggtccctccagctctgactccctgtagattttcatgatttaaagcttcttctctagaatggcagagtaaacccaactggtgtcaccaagggcttccttgcgacatggcctgtgagtgtcccagtgactttctccacctgtgccattgtacaaagccttgctctccaggcccttctcacagatgtcaggggcatgggtccgggtgaccatggacagagggcgcccactcctccacctttg

SEQ ID NO: 50008 - DNA, 1473 bp, Bovine  19866880644104
  misc_feature (1)..(1): n is a, c, g, or t
ntctcccgcattgcaggtggtttctttaccagctgagtccaagggaagcccaagaatactggagtggatagcttatcccttctccaggggatcttcccaacccaggaatcgaaccagggtctcctgcatggcaggcagattctttactaacaggggaagccctgttaagtgggcagctgacttttatttcactttgtgtatttatttatttagttaattagttagttagttagttattttttggccacatggtctggcttgcaggatctcagttccccgaccagggattgaacccagagcacgacggtgaaagcccggaatcctaacaggaggccatcggggagctccctgtgcatttttagcatttatagtgagtgctcccgaaatgttcgctggtacatttctagattccatttcttataccactgctgactcccgtctcagtctccttatgcttattataggtaggacgatccttagtggatgaaaccatttagtttccccagtatccccaaacctctcatcccagggacccaagggcctatcaaggtactaattagcaaagcctcaggacaggcccaggcggggagggagccttattgacgttaattggtactatcagatctttgcccagtcaggatggagcagcgcaggctgtgacagtgtctctgcccttgggggttcacaatctgtccaagactgcaccgcccccggtggctgtggtgggtggctgggtaggcagctcctcccctctctccccttcacagggcccagcatgtgagaagggcaggggtgaagcagggatagaactaccatctaccataccgtctcctacgaaagggtagggaccagggtctcagaccagccaacactccaagtgcaaccatgatgtctaccctgtgagagacgccagcctctgccaatggctcccagctaatttaatgaacccagggagcttgtttgaagtccagagtcccaggcaatgcccgctatggttgaggtcccggcacctgtatttttaattttctttctttttttttattggctgcaccttgagtccagaacttcccagaccagggatggaacctgtgccccttgctgtggaagcacagagttttaacccctgaaccaccagggaagtcccggggacctatattttcaacaagcatccaggggattctaataaggctggtctgcaggacctcattttagagaagactggtctgatgttcgtgtgtccaatattacttagtgcaaagtcaggtgcacagtactcaacaataataaatgctgattgatgaaaaaaatgaatgaatgagcaagtgggcagaatagagactgaatatctgtagggtctaaatcaaagatccaccttcctctaggaattcccttccttggggaaacttaagcccttcctccctggctcactctcttttgtggttgggaccagatttcttctgctgaaattgcaag

SEQ ID NO: 50009 - DNA, 1586 bp, Bovine  19866880652522
  misc_feature (1)..(1): n is a, c, g, or t
nttcctgaagagcctgagggtgacctgatttatgagaaccacaaacaaatggagagtttccaggatgctaggcactctgtccttttcctgcaccctcactttgcttctctctctgtagcccatggaataggatagtttcttttttaaatttgggctgtgcaggctctctgctgtggctcgggcctttctctatctgcagtgccagcttagttgctctgtagcatgtgaggtcttagctccccaacccggggtcaaactcatgtcccctgcattggaaggtggattcttaaccacttgggccaccagggacatccctttgagaaaaataaggtagaaatggaaattattttctagttggggcaactgagacaaagagtgaagtgattcgttccagttcacacagttggtggtagaagaaatggcaactcattctagttttcttgcctggaaaattccatggacagaggagcctggtgggctatagttcatggggtcagcatcaggcacgactggcaacagtgcacacacacgcacacacacacacacacagttggtaggaggcaggttcataactctgaccaggggccttcactctgccctgtaccagctcttctgcctcatctcaggatccacaacgcctgctgatgccaactggcatgtccctaagtgctgacagggtgggtgggcttctcccgtggcctcctgtgtataaggatacccgaatgagatcaactctaagtgtacgttaatacctcccctgaattgtggattgataaggacctgggcctggggggacgggaattgcctttaaatcaggttctgaagaacatcctagcctctcacccttggataaatttgtctctgcctggcagggcctggcaactgccggtggcccagctcccgcctcattaccaggaagcccagccctgccagtgtctgcttgtcactttctttgtcccagggagcccctggagacctttaggaacacgttccacctgttgggcctggctggcactctccctgcccgcagggcctgaaacaatgactttgctgttgggcttcatgatcatcacttgtggacagggaaccccagggacctgttcagctgggcgctcacttgcattttaatcacgtggccaaagagctctggagtaggaatagggaatcttggtttaaattccactaattaccgtgcatccttgtacttctgttttctgggccttagtttcctcatgtgctgaggatggaacctaatgtcccttccaatcccgaagtgccaggagtcagagagagtcaggaggtcattgggttacagagagggcagagggttaacggctgatttcagacactggtctccctagggtcccagctgtctgccagctgacagttcaagcacccaggaccctgagaacagtcccagagaccttggaccctgcctgtcccaggagcttgaaagcatggctggccttgggtctccatgggaacaaggggcagagggaagaacagggagatggtgcgtggtgggtaggggagggagctgtggacacagccagagttgagcggctggagtctggcccagccccagg

SEQ ID NO: 50010 - DNA, 2029 bp, Bovine  19866880669054
  misc_feature (1)..(1): n is a, c, g, or t
ncccctagctcagaactccacatgcagggtggggaaagctcagagctggcgtggcctcagcctggcccagaatgagcagagaccctctgccatccctttttttcccccaatgattcgacattttttaatttatttaattttaaattcattttatttttgctgtgttgagactttgtttctgtgtgcagggtttctctagatgcggtcagcaggggctactctttgtagcagtgtacaagtttctcgttgtggtggcttctcttattggggagcacaggcttcactagttatggtatgtggccttaacagttgtggcttatgggtttagttgccccgcagcatgtgggatcttcccagatcagggatagaatctgtgtcccttgcactggtacacagattctcaaccactgggccatcaggcacgtcctgccttctttccacagatatcactgggaaagcccaaagccagtgaccacccagcacaaggcaactcaattaactaaggttttaatgagggctacattgacaacttctattgtccaagtctaataattctctttaactgagatcttttgccttcattaaagtaattagggcctgtgaggaaatgattagaaaaactctcaggatttccacccgtcatgtggaatcccacatgccatatgtttcatcactgggacgcaagcttggtcaattctttcaggtattgtcactccttaacaaagctaataagactctctttttttttttgcttcaaaagtcttaataagatagaaaatttgaggaaatcaatcagtaattagccattaaaactgatttatccagtactatgagagcacagaagtatttaataagatccttgtggaacttccctggcagtccagtggttaagacttcaatgcagggggcacagcttcaatccctggtagggaaactaagatcctatatgccgtgtggcacagcaaaaaaataaataaataaataaagatccttggtttctgggaactaagaactctggataagtagaaaaactggcataccacataacgaggcaacagctgaataggctcctacactagaactagagtaagaaatcatgtatgcatgcattcactgatacaccacgcacaccctactagcaggagagtctatacaagtggacaccctggcagttcatagtggcaacaggtgtcccatacagacagccatggggagagcatagggtgatcattgacattttaggaatcagtgaactaacatggaccagaacgggcgaatttaattcagatgatgattatatctaccactgtgggcaggattcccttagaaagaatggaatagccctcatactcaacaaaagagtccaaaatgcagtatatgggtgcaatctcaaaaatgacagaatgatctctgttcgtttccaaggcaaaccattcaatatcacagtaatccaagtctatgccccaaccactaatgccgaagaagcttaagctgaacagttctatgaagacctacaagaccttctggaactaacaccaaaaaagttatccttttcatcataggggactggaatgcaaaagtaggaagtcaacagtggtcacaggactggaaaaggtcagttttccttccaatcccaaagaaaggcaatgccaaagaatgttcaaactactgcacaattgcacgcatttcacatgctagcaaagtaatgctcaaaattctccaagctaggcttcaacagtacttgaaccgagaacttccagatgtacaagctggatttagaaaaggcagaggaaaaaaaaagaaagaaagaaaaggcagaggaatcagagatcaaattgccaacatctgctggatcatagaaaaagcaagagaattccagaaaaacatctacttctgcttcattgactacgctaaagtctttaactgtgtggatcacagcaaactgtggaaaattctgaaagagatgggaataccagaccaccttacctgccacctatgaaacctgtgtgcaggtcaagaagcacttcca

SEQ ID NO: 50011 - DNA, 2327 bp, Bovine  19866880686436
  misc_feature (1)..(1): n is a, c, g, or t
ngggcctgagctttcctctggacagatgccccagctcttggaggagttctggtgtgtctggagaagccacgagagtgtgctggcaagaatctagagttggaattctacctttcagccgcttgccggctgtgtaacacgagaggaagctcatcacctccctgaactcagtttactcagccataaaatgggacaggtgctaatcttaactgcatctaatgataggaacctagcaggtggccaagctcacctaagtccccatgcatcctcatctcctcctgggacctggatgggtcccagctaattatcacgttttctaggtgaagattctgtctcttgcctgctctatcaggttccagattgctgtgaggctctttgagagaatgatgtgaaagttatttattgagtgacaggggctgtgggagcagccacctccctcatgtacagagctgggaagtgacttgtccaaaggcaacacagtaccctagtgatggaaggagcctggctgggggtaggatcctggccaggggtaggtctctggactcccactccatgctctctccagcacccatcatagactcatcctctgagctcccctactcttctgctccactcttcaggtcccggtaagaggtgccaaggtcaagagacgacctgcctataagcctaggaagctgggtgcccccagcagaagcagctctcgccttgctttccaggcaggtctccctatcaagctgcttacagaacagatcttggatttttctgcctctatgcattgtttgcagtatttttttccaggtggtatatccactcaccatccactcccataatccccatcataacatccagaatttattgagctttcagtgtgtgtcaggcagtgtgctaaccagcactttaaagtcacttgatcttgtttagtcctcataacaactacacattggactgttatatttccgttttacagatggggaaaatgaggtttagagggtttagcttgccaaagttacccagccagtaagtaacagggctcctatttgaaagctctacactctgttccctctgtacataattaagatgccacctcctttctgaagttagaagttacctgatctgttattaaattactgtaacacttcaatgttcctaatagcccttgtggcctgttctgtaggacttttcttattcttcctcctggctgttaactgattgtcttccccactgcaccaaataccatgtagggtacatgtcaggtgtcagaaagggctcagtgggggccacagtagccctgcaaggatagaaagtgtttaataagtacctcttcgggtccatacaaccactcaccccctgtcgcaccttccgctcctctccccacccttggcaagaaggcaggagactttcttcctatttcttctggcagaggaaagagaccagtagctttttggaggcctagtgaacccagggatgtcccctcccccatctgcctcaggacactgccaggctgttcccttctctttcctttccttttctttccctcctccacttcaggtttgccccaaatctgaggccattgcttatctacaactgcacttcacctaccatcatcctagaaaaatgcctgcacatagtttatatacccctgtgtgcttgcaatttccatatctctatttgcatactatttgcatagccatgtgcaccaggggtctgattctctgaccaccattatctggaacctctgtctcttttctatgtgcaaaattacatttctttctggggctttacttttccagaagccagaggagcatgtacctaatgactcttaagggacttccagctctagtagcctaggattctcgggtcctggggttaggagggggtggaactcctggggatggggccactggggaagagatggggccttatggggccttataggttcatagttggaaggacagctgtgggttccagaccacaggaggggagattgtgtgcaggaagggagattggatggaggatgggaggttgggggaaaggtggtagacaggacttcaccttcattcatttacccattcattcaataaatattgactgagcacttcctatatatcaaggaagttctccatgctgggcatatgccttcttacttcatccgcacacctttaggagaagcatacaatttttagatttcttttatggatgaggaaactgaagttcagggggattaatatagctaggagatgggagagttgaaatttagactaggtctgcctgactccaaagctggtgcttttaatcctgctgtccaacgtctgagcctgtctcctcttctc

SEQ ID NO: 50012 - DNA, 1264 bp, Bovine  19866880706028
  misc_feature (1)..(1): n is a, c, g, or t
nttggacacaactgaagtgacttagcacacacatgcgcacctgagttggtcacccacaccccacacttgggtcccagcaggcaggagcagccctttaccgcccttgtctatatagaaaacccccagggttctcaccttgctgcccaggctggctctgagatagcaggaactgggaaacagactgtaggtgtccgggaaccagcacgagctgctggagtgggtggagggaggccatgtcctatgcagggcgacacagacatcatagaatttacaagctgggagcgtgggctccatccacccgctgcctgtctgtcccaggggtatccaccgggagcttgccctatgcctctgtgtgtccttgtatgtggcacatagcggctaccccgttaatggtgctattgatacactgcctgtcctcagtcaggccgtgcctcgcagcctgttgttacttaaccttgccttgttatttaactttcgtgtgtgtcagaactgtctcccagctagactgataatgccccgaggacacagactgtgggtattacccatctctcagaggtttaccctagaaatgacacacagtacacatttttttttttttaatctcatgccctttgattatactaaaagccattttcgtctttggccgtttccagggtctaaaccattcctgggggaagaagcccgttgcttgctcttaataaaaacgctttgatgaaacagaaagtccatttccccttggggttcctcccattagcccccacaaagagaaataccagtcccaatatccagggacatgggagtcctctgtgatctggacccgtgggagtctatgatccccacaggaccgagcttaggtctgtgcacaaagaaaagacttggtaaatccttgctgaaaagaagtgaaagaataagtgcacattctatccttaaatatttccagggaagtggtggctcattcttccctgggggaatccatatcaaatcagggactcaccctgtggacatccagccttctcagacatttgtcattactatttcaggagcccctttattccttctagcttgacaaactcttgaggaggaagaatgggcttagtggggacagaagtgctctgtgaccataggtgtcatcgtggggctccactgaatatggctggcagaccccagccctatagctgtgagccctatcattttggcaagacaggctgctttttctcccagaggggtggagacctccctctttgcataagtagccaggcttcat

SEQ ID NO: 50013 - DNA, 3669 bp, Bovine  19866880725335
  misc_feature (1)..(1): n is a, c, g, or t
nggatagagaagtgagctggggagtcataagcacacaggtggtggttggcatcctgggtcaggagggtctcacctgtttaatttgtacagaagaagcaaagaagaaaattgaaatcccaaccctgggaaacaccagcatttgagggctgggcaaaggaagaggaccaaggggagaaaataagaaggtggagccagaaaaggcaagaaattgcaatgaagtgggtgaagcagctgtaaggagccctgaaggattgccgtgggaacaccgatgaaagacccccaaatcaggatgggatgcaggagggctgactccctaatttgtttggagaacaggttgggaattcataaaaagaacagcatagcagaaggaatagtctgtgagaggcattgaattctaaaacaacatgatgcatctggggaaccacaagctttttgttctggctggagctaagggtttaggcctaagacaggaggttgatgagagctggatcatggtgggccatggatgctaaattaccctcgaagctatgaggagccattgacaatttgaagttggagacaatatgatgttcattgaccattcatttcttaaatatttattgagcacacactatttggcccttgagatgtggcagtgcacaggatcgttattggtgatctctgcttagagtctagcaaggaaaacagacattaaacagaatgcaatttgtgatgaagcctccagagaaggcgtgtgggtatttgagggaccaaacctagtccaggtatcagggacttctctttggaatgatggtcaagttgatggcagaagaaagagtagactcgaatggggtaaaggtctgagttagaggtggggaaggggagcaggatggcggggcagagggagtgttgggaagaacattctctgcagatgaaacagtgtgggcaaaggccctgaggctggggtgggcagggagaggaagcacagaaggttggaatggaacacagggagggagactgtgtgaatgaggaggctggagcagtaggcgggctagatcctgtagggcactgtaggccacgtgaaggaaaccgaaccatgccatgagagatttggaatccttaaagatggggctttgtctagaatagttgggaggtagctatcacctcagttcaaaccgagctggggacaccaatgtggagaaaagaagtgggaggcatggaagagccataaaggagcatcatgcattctcatcgtgcattggatactgagcacctgccaagttctgggtgctgcagcagacactgaggatccagcaggggaccacacaagcatcacactcccctcatgaagtctccagcctagtcagggagaaagatgttaaataaatagtcacattaatacttgcagtcaatgctaaaggaaaacaaccctgaatattcattggaaggactgatgctgaagttccaataatttgaccaggtgatgcaaagagcagacttattggaaaagaccctgatgctgggaaaggttgaaggcaggaggagaatcgggtagctgaggatgagatggttggatggcatcactgactcaatggacatgaatctgagcaaactctaggagatagtgaaggacagaggagcctggcacgctgcagtccatgtggtcgcaaagagtcggactcaactgagcgactaaacaggaacaacaatacttgtggcgtcctgaaggaagagggtagagaaaatgctctaattcggtcttctccttgggtctcactggaacattgtccttgggactgggacatagtttcttctacttctggtgtgaaataatctccaagatatactgttaagcaaaaaaaaaaaaaagaagaagaagaagaagaaagaaagcaaaaaaggcaaaattattcagagcagtgtgggcagaatgctactatttataaaaaaacttaaagggagagccatatctctgcttgcacatgtacagcctgtctccagatagaagagaagaagctggttgcagtgactaaataattatttatttaaaaacaacaacaaatggcttggggtgtggcagcaaggggtgggtggaggaaaagagggagggagattattgatagcatctctcaccacgctgccccacacctgtctccacccttcgtgggcccccagcctactaaagaggctccttgtgaaagggtaggtcaatgaaagcagcagaaccattgctgattgattaggaaacgagtacatgctgaatcctgtcggcatgggatgttccaaactaggggagggcaggggtggccagtcgaagctccctgagcagaacctcccttacgaggtcctgggtggaggctgatccgagtgtcccaggacagcatgagaagatgaagggggaggaaaagtatgccgagttcagctccagtgaagagataaacagcagctcaagacatacaagagttgacagcttctgcaggaaggcagggaactaacatttaacaagccaggtactctttgccaggcattgagttagaagcttaatggacattatctcattaaacttaattaaaagaaaatatgagggaggtgttactgttgttttacggatgagaaaaccaaatctcagcagggttaagtaacgtgccccagctacacagacagtggtggagccaggcctcactcccagatctgttgggcccctgtgtctgtttaggatagtaatactgagggtagggattcctggactgtgtgggaaggttaagctacagtaccttaggtcccttcccagcccagagttgatgatgctgtgaggtctccagggcgagatgcaaagcttcagagacctcacacagttcgtctcctccagggacctctggagagtggatggtccactcatgcatcaagatgctaagcctgtgtcaggatggttagggctgagctcttctgcccaagcaagtgcaggggtcttaaaaataaaacacaagcatttccattattctttttttaatgtttatttattgggctgcattagatcttagttccagcatgcagggtcttcattgatcatgtgggatctttgaggcagtgtgagggctcagtaggcgcagcatgtgggcttagctgccccatggcatatcagttccccaaccagggatcaaaacctgcatcctctgcaatggaaggtggattcttaaccactggaccccccagggaagtccccacaggggtcttttaagaaggaagaagaagggactggaaataaagcagccatcccgcagtgtcggccacaacagcatcctggaggcatgctcctctcctcaccagagcatctgagcaaggcctctttggtctggcagtgcccaggcagccttgccaggggtcacactgcagagaggccctggcctggggtccgcagggagtggtaggagcagggcagagctggagctgggtggtgtacatggtccagagcctttcctgtgacacagagcacagggcattggtttgggattaggaaaccatccaggaagtggagccctaatctctgtggagtctacggcctagcaccctgggagaagctacagaagatggacacggaaatggaagagaatgtttacaagcttctctcacctttcaggtgtctccctctggatctctgggccccctctctgtccctccagtccacagcac

SEQ ID NO: 50014 - DNA, 1501 bp, Bovine  19866880741238
  misc_feature (1)..(1): n is a, c, g, or t
naacacacacacaaaaatcctcagcaaaataataggactgaatccaataatacggaaaaaggaaaataaattatgaccaactggggtttctcccaggaatgaaacaggaatatctgtttcaaaatgctaataacaccaattaatgtaatttaccatgatatgtagttccacataaattatattaatgtaatgtaaatttaataacaacatctgatgatctcagtcattcaacaaaattcaacatctattcatgataaaactcctatcaaactaaaaatagaaggaaacttcctcaattaaaaaaaaagtatctatggctaacatcatattaataataaatgactgaatgcattcttcctaagattgaggataaggccaggaaggccaggatgccctgtctcaccacagtgattcagcctcatactggaaatcctaaccagcgcagtaaaggtaataacaagaaataaaagataaacactgggaaacaagcaaataaaaactgtcagttatttacatagaaaaatcttaaaaagttaattttaaaaacctctttgaagtagttagtttactaaaagatcacatgagcttactaacaaggacaagaataaagccaatcacattcctatataccatcaataaacaaccagaatttgaaaattttttaaaaatttataagaacatcccccttctcccaagataaaatacgtaggtaaaaatcaatgacttcttatcagcttcaagagcaaggccatttctattggtcaaagctaaaataagcaattaacccaagcaagtaaacaattaatcttagttctaatgagcttcaaatctttatcaatataatttcaatctccagaaactgttcatttttgcaataaatcaaacatcttagaaaattaataatttggtttttagaaagaaaaagtcatcacctgttcatgttcactaccaaagtcatcgtcttctgctccaataatatgaggtgccacacgggtagagggactcccaacaagcgactgagtgtcctggaaacattcatagagaaggaacagaaaaattgcctggtggtcaatttcagagacagaataaagccaaactatcaaaaagacatggttcactaaactgactggatttcttttccttttctttaggtactttattttcaaagtggttctcaaattttccagtattgattgtttcttggtcagggggagggggagaaaacatttcccctagaaataataaacatcctctgtttatacacccttgtttatctggttctaatccctgtctgtaggcttcatttattgtttcatatatatctagaccttgttacagaaagaaattaagctggcttacacaaacagttacaatttttaacagtgaacgaaggccacaggacaaaggaaaaatggcactgttgacattttgggccagatgattcttcgttgtgggggctgtcctatgcactgtagggtccggagggcatactggccactgc

SEQ ID NO: 50015 - DNA, 3073 bp, Bovine  19866880777571
  misc_feature (1)..(1): n is a, c, g, or t
nctaagtagagaaagtaaaataccctaaatctcatctgttgtccaaaattctgacatttgaggtaacaaaatcactagcaaaacatggaagaataaagatatctatttaaaataactttaagtatcaacaataaaggtctactaatacaacattcaagagctctatcttatatatatatatatgtacgtgtatatatatatataataattcaaatatccatgttttccttctgttacttatcattagtaacaattcttgtaaatacactggtaagaaagtaaaacattatttcaatattaataacagtatgtcttattggaaaaacctgcttatcattgcaaatctatttcttttcactaataagtggaaataacaggaaaaaacaaagttaaacaacacaagcacacacacaagaaaaaccaaaatggaaaaatgacacacaattttaagattagactgaaaaaccactgtaaaaaaaaacgaagaaaaaagaataacaacttacagatatatctcatcatacagtgatatcttaaagctacaaccacatctctttattaaattcagagatggttcaccctcatttctgattaattttcaaccagggatggtttatcatttgtttgctacatttttgtcacataattgataatacttgtaacttacattagggcacgatatcagaaagaatcactttgtaaacaaggcttttataacatgagcaatggcttaattagctgatttgctaattatgctgtttgtatatatctgcttgtttttttgatggtgacatctcccatatccattctaaaaaaactatctaaaataaaactgagtcaaaacggtcttgagaatttctttacttataattttgggctatgcctggagaaaacagaagacccctgtattatggtaaaaccaaactggaacttgttctagaatatgaataaagataaaatatagagtatcattttgtagtagaacagcactgaaagaaaaaaaccattttgcactagatgagcaactgaggaaaagctaataaaatattaagaggaacagactgacttttagacacaaatcaacagaatatacaacttggctcagcaaagaataagggtggggggaaggaaagggtggtggacaactgtctaaaccatttacagtcacataaacataaaatgggaggagatcattatttagcctagtacagcaagtgtatacaagtaacaggacaacttaaaagaaaagtctgtgctaaagatcaagaaagacttcctgactataagatctatcagattgttgttcagtctcctgaggaagtgacgatagctttatcctctagagatacttaaaattagaatggataaggtactagaaagcatccggtaagagaaaaatccaaccctgacttagcttggaaagttacaagggaagcaggacagaaaaaatacacacggaaagacaataatttagagtgacatctggaggacttgaaagccagaaaatctaggtcatatcttgaatctatcctttccagttttataatcttaacttaaatgctatgagttgctctaagtgtaaatgatgatctgcctcacattgaattgaagacactgtaaatgttagagccacactgccataggatatcattacatatatcagggtattttcttcaaaaggaaacaacatttataattttgctgattttaaattttcagtccaaatgccattattttgaagattcttaactactgaaaggaaaaggaccgtgccttccaatgaagttttaaaacatcatcaacaccatgttttaatggatgaaacttaatgaagttaattatgctccctgtttctgaaaatgtggcatggtcaatccctaggagataagcaattaaatgataagtagcatttctggtaactttgttagacaaccatgatgtaaaagcacttctccaattaccgctggaaaatggttaaaatatcctgctgcttttacaacccgtatcagtaggcaggcaattcatactcaattcatgaaaccacccagtggttaagtggtattaccaagttaacatatttttattatgattcaaataaagcttctctcatcatctcactaaatacacgtgaacatctttataaatgtgccgttaatctagaagactataggctctgtacttttaaaaaaatttacttggactgtacatgttgactcatgtaaaactgtacaagtgaatgtactactgcatacctgtctgaatcagaatttaaaactgaaaaactagaagaaaagaacattagagtgaatacaaagctagctctgtgatcctggccctactttcaattcagtatttatctaatgactgattttacaaatgaatgctacaaataatttcaccttgcagatgactcaggcagccttgaaaacagtgcacatacagaatttttgttttgtattttaatcaaaagcattattatatggcactgttggcagaaaaagtattatgaatgaaaacgttaattactgggcaaatgcatataaagcctctggtttccagtctcactttaaaaaggtgcttctttaaaaaaaaaaaaaaaagaacaaaaagacttgcttcagttaaacagcttaaagataaacttacagtgctaaaaaaaaaaaagccaatatattaaaaaccttttatctataaatcaaaaccaacaaaatctacaagtcctagagaggacataggttcttttcaacaaagacctttatagcaaaatcgtacctgtattgtccctgaaaattcactgttctagaatacagcctgaaacaatttactcagtccactgaaaaaacattctcttatctctcaaaagaaattccaactaccacaggacccctaaactcttagggtgaggacaagcatccaggaggattagaaacaattaggattatttggggactaaggacagcaatcaatgcaaactggagaacagcaatcagatatttctatcacttttcaagtgctggttctaaaagctgaaaaatataatcttcaggtttcatagaaattacaaagcaagaca

SEQ ID NO: 50016 - DNA, 1215 bp, Bovine  19866880813815
  misc_feature (1)..(1): n is a, c, g, or t
nccgaccacatgggaaattctccagttagccctcccagtcatgagaatgaggccacaaccagtcaaaggcggtgggcaagagggaggccaccagagaagcctgaagaaccagccctttgtgctggactggggtccttgggggatgagtgcatttttggcgtttttagaatgatttttttttttttttaatgagcagcagaagggggaaggggagggagggagggagggagagacagagaggccaaaggcaggacttgggaaaagaagagagaggaggaggggtaagggctggagagggaggttttaaagaacgtggaaaaatataaaaggaggtagagaaacagagagagacagggcccagcagggcaattcttaggacagaggggagtcgccatgtccatgcctgaatggacagcttctaaagagaaagggtgctcatgtttggaggtggaggagtgggtgaaatgaaggtgccgagaaagaatttgacctccagtttacatgtgggaaaaacaggcttcaaaagggatgcaggatggacttttctggtggtccagtggctaagctccccatgcagggggccctggattgatacctggtcagagagctagatcccacacgctgcaactaagacccagcacagccaaataagtaaacctttttttttttaagttgggggaatgcagcagctggtggagacttctccccacaccaggcaccaggtattgtgttgaaaggctttgcaagcagcacctcatttaatcctcacgacaaccacacgaggcccgggatgtgtcatcatcccactcagcaccactttgcaggcgaggaactttgagaagtcgggcaccttactaacacctaacgtgacagcaatggcaccccactccagtactcttgcctggaaaatcccatgggtggaggagcctggtgggctgcagcccatgggatcgctaagtcagacatgactgagcgacttcactttcacttttcactttcatgcattggagaaagaaatggcaacccactccagtgttcttgcctggagaatcccagggacgggggagcctggtgggctgctgtctatggggtcgcacagagtcggacatgactgaagcgacttggcagcagcagcagcagcagcagcagcaacgtgacagcagtcagctgagccgcagcggggcttgcagctagctcagagctcatgggcacctc

SEQ ID NO: 50017 - DNA, 805 bp, Bovine  19866880830256
  misc_feature (1)..(1): n is a, c, g, or t
ngaaaagaggttttcgtcatgacccacattgtttgtgcagtttagagtcagtgacccagtctcatcagttcaggtgggacccttcctgacgaaatctaagtccccggatgctggccaagggccaaccttgcagacagccctttccaggcctgctctattaactcttttctgcacaaaaaccatagagctagagcttcggatgagagatgaatgaggtgtgggcagatttaccgagtcctgttgtacgagttctgccctaccaggaaaactatgccagttctcagggctttcgtgcattaatctcctaggcatgagaggctgtgactgaattccgtagggatttaccatgtagattccactgggcttgagatgccagttcaggtttcagctctgctatacatactacaaaccagaaccaaagaccaaatgtcctggcctcagggtgatgaggctggttttttttttttttttttttttccatttcagatacattccctgttcatcttgttactactttttctctcaaaaaggtgccactctctctggacagtatattatgaaaaagccaatgtcaggaggaaaaaaatatttcttaatcaatagtctctcatcttacctaggcaaagcaagaacacaagtgtagtaaaagggcttaggaagtgagaattcttaggttctttgaactaatttggctactcacctgccagatcctttgggcaggtcacttgtttactctttacctctgtttgaaccctactgtcaataaacaaaatactccattgcatatttcatagagacattaggt

SEQ ID NO: 50018 - DNA, 1088 bp, Bovine  19866880906989
  misc_feature (1)..(1): n is a, c, g, or t
ntcgcttgccaaagatcacgccagtcactagcaaagctctcattccaatctgagtctgcctggttccaaaacctgtatcctcagccactatttcagggctgggtggctcagtgctgagaactaggagtcctcccacctctttcctgttgctccagattggctgaattctctttggctgagaggtgtggagtagccgacacagggctgcccagcccaaagtccctgtccactgggaaaggaactctgagtcctgggtgaggggagggaaacagcagggcgcagggagcctggagggttggcccggggttcctggaagccctctcctcagtggaacctttctcactgtctgctttctagtctctgatcagctgactgctgggaggctgtcctgctaggacaggatcagggcattgggcacttggagctgtcagggagaaatatgggaatcatttcaacaggtaatcacaggatattgtgagcttgttcagtgcaaagaaagctcaaatggcacagataatcgatggacgttgcatctaagggatttcctgtggatggccacaaaggagtcttccctggggccctggtggtgggatgaagtgctgggctgggggagggctggcagggagtggtggctgtgatgtccgaggggccgatgaaaggttaaggggagttggggagagtgtgcctttgcctttgatcaggagtttagagactgcattttagccccatcttggtcacttacttacacgaaaacttggcaaagtcgttgtttttctggagcctcaatttcctcctctctgaagtagagggattacctggatttggtcagttcagacactctgattctgccatctctagaggctcctcagctggaacgtcaggacaaaaaacctttgtaataatcaacacgggcacggggtagagcttgtgcttgtcttcatgtgtatcttttattagtagtgttagcaacagacatgcaacagctaacattccttgaggatgcaggacatattaggctgtatggcaagtacactatttcttttatccctcatgtgctaagtgctaagttgcttcagtcgtgtccgact

SEQ ID NO: 50019 - DNA, 2271 bp, Bovine  19866880998321
  misc_feature (1)..(1): n is a, c, g, or t
nacccctcctcccacctccctccccatcccatccctcagggtcaccatcatctttaatatagcaatttgatgagcagaaattctggaccctgttgtatatgagcttttaattccagagttcactttttcccctggacaccattgccaaatgtttcttttaaggagatggaatttcccagcaggcgtcttgtttgtgggtagagaagttaataatgccggtgctttcttactgaaccgagaggccaactgttgatatctttaagagcatgttaatattccatttgtggtcagagtgactcagtctcgaatcatggggcactttgccatttcaaagaggaaaagccttagtcctcttagacttcagttaatagcccatgtttagtaattctttcttggttaacccaaaaattgccagatgaacatggatagctgttaagatgataagaaagagcacgtgtatacctgtgatggattcattttgatatttggcaaaactaatacaattatgtcaagtttaaaaataaaataaaattaaaaaaaaaaaaagaaaatattttaagctgaatatgatgtagtgtcacagttatatgaatacttaagtgttatatgctcagcaatactttgtaagtagtatgcagtaataggaataattacttcaaaatagatcacccttcttaaaaatgatgaagaaaataatctgttgtaagtcagtgtttttttccaacgtgggtcataaaatcagtttagtgggttggggccagtatttttttttttaaaaaagaatagaataagaaataagagtgctttgcatgtaaaggaggtaagtgttactttttgtgacttttgttgtatacacacatgcacacattgtgtgcatttgtacacatgtatagctgtgtgtgtatgtgcacacgttggttaataatgtaaaatttctcatagtagaggttgtaaaaaaaaaaaaaaaaattgaaagccacttgtctaagccaccaccatttagggtatcttgatgcttaggcccagtgactcagttcctcgtgcaaggaagatttgaggatatttttattttgaaagatactaataggagtattatgattagataggctaattatcttgatgatagatttcaattttgcctcaagaaaagaattatagtagcttacatttattgagcatatgtattaataccatcagctataataggtgttatacattttttatcttagttaattctcagaacagcctgatgaagtagtactattgttattacttaaacaaaaggaaaaactgaggccaaagcgagttagctaacttgccaaacttactcagctagtaagtgattgcctctacctaatttcaaaataccagcactcaaaggctccaaggtctgaaaatgcattatattttgggagagcagtgaaaattttacaggtgtactaggattatattaatgctaaaatggctggagttgatcttacaaacaaagtcttgagttcaagttataacttgttctagcagtgctgcttctgggaatcctcacatttcttctgtttgattcagtgctgcatctcctctctgattgcatggcttatctctcccattagatgtttctagtggtagatgtttctaagtttagatatctctaaagcaacacaccatcatatttgactttatatctctgaagacaatgagattgtaggaactcagaacaagtgatggaaatgaaaaatttgaattttatcttatttacagaaatgttaaccataaaatctgtggcttagaaatatcactttatgaaatacagagtgaattggcaagtgtagaaacaggcagtccagtgaattcagactgttcgacatgtgtctggtgtctaattggtctttgaacaagagtgaatgagtagagtttgggctgtatcttgcatgcagaagagaggcacagccagaaacatgtccgtgtcgaaaatgaattgaagtaaatagacagggagatcagtaagaaaagacgactacttggcttaagaggaacttgacaaatgtgtgttaaatggctgacaaattgtcaccatctattgaatacctactttgtgacagtagttgtacctaatgctttacagttactctttttaactctcatagtgatcttaaaaaagcaaatgtcaccattttatagatgaggcaattgaggccaaataagtggatgctggggaaatccacatgtgaggcaatacagtgaagactactcactgaacacgtaacaaactcatgt

SEQ ID NO: 50020 - DNA, 1758 bp, Bovine  19866881018734
  misc_feature (1)..(1): n is a, c, g, or t
ncccacaccttggagtttggggaggggagaggagttatgagctcatgatgtgaactggagtgcttgtgggagaaaaaaacatttcaaacgagctaccaacctaatcagtagagctctgtgtgtgagtgataggggtgcgaggataatcattcgaggcctgaagggttggtctcgcatgtcatcttggagtatgacaatgatgagaataactaacacctgcatacaggagtgactaagggagcttgggttctaagggagctgcagagacccaagtttatagctgagctcagccgctagttactagctgactgacctctggcaagttacttacaccctctgcttctccatctcttttgtgaggtatcatcataaatgactcctctgtcttttgtgcaaggtgacatgttctccacctgggactagaacctaggtcttatcaattcatggcctatgctttgtgtacactgcagtggagggaaaggggactgtgcatgtttaattagctggtatagggaagagctttggagatacaaagctcttgataagtggtaatcctcttaaatctgtgtagggctgatgtgtggatggaatatacaaggccaacagcattgggggaattgacgaggagggcagggcagcccagacagagagacagggaaagagagagaaaatgagtcaatgaatgttgagcgtgtgcacacaagtttgtatgtgtgtctgtggatgtacgtgcattgtttttgctcacctttggggtgcttcaaagtgatgggtagggattaaagtatcagatgggaccaacaggagacctccatgtctctgcatcccgggagttctgggattctctcctcggttggaaggtgaccctgggttctggggcagagaagcatggaagttctgaatgcacatctgtgtggcccaggggaggtgttgaagaagaacctggtgcagagtgagctctctgcatgctgccctgctcactcaatgtctcaagatgcttataacatttgaaaattggcctgatgattccttctggcaaagttgccagtcctgctgtagactggaactgggggatctgtgaactcagagacactctgttctgctttgactcagtggcggacaatctgttttcccctaggagctgggttttggtcttcagttatcagtcagtgcgctctctcctctgtttcctcctcctccccataaggaggctccgcccacatcctcactagcttccttcttttgccttcctcctttcctctgctggtggtgagggcagccagaagtcgacctgggttgaagatgtaagtgcctgtagttccttgcagggggtgggggtggggtgggatggggggatcccgggaaataatcatttgcttgagaagcgagacaacaaaggggaagaagataataaagcaggttgtaggttacactatgggcaaccaccacctggccccactagggacggtgggagagcatacagggcatcctagagcaaggtatcccgttggccgctgaccggagattgtgacacttagggcttgcgtgtgtacctcggctgcatgggttccggggaccagaaagttctcaggtgagctgcaggtgcctgaggctggaagccctcaagttggggagcatggatggaggtgagcagggccccacggctcctcctggccatcccgaaccaccctggagaccagacccgtactcagctgctgggtacgggcagctcctcgggccatacccgctcacatagag

SEQ ID NO: 50021 - DNA, 850 bp, Bovine  19866881019828
  misc_feature (1)..(1): n is a, c, g, or t
ncgcacttgtaagggcgctgggcggtcgcggccggtggcagtacttgagcatgcaggggtaccaggccaggctcagaccatagcggcagatgcagggcttcccgcggtcccccacctgcccgcagcgaggcagcaacacctgctctgaagccttggggagagcctcgaacacggagccatccacacctgggagagaaggcgggggtcagggcgggggcgggggcctcccccacatggccccttcaggcatcctagtgctcccatgagctaagtgttaccatccttgttttacagatgagaaaactggcccagagaggttatcggcctggctgacgtcacacagtaaatagggattcaggactgtctgacttcaagtcctccacttgcccctgccagtgccacgcaggcatcacttcctccaggaagccctccctgaccagtcctagctgggtggagaactcccatatctcatcattgctccccatcatatttgaggtgatatagcagtgggccgcacccagctgaccttgctccagccagaaccggacgtcttcctggcgggtgtagatggcatccacggcctcggcacacacgttgcggagatgggggctcagcagcgccccctggctgaagttgacggcgatgtccatgtgcatctgctctgggccccgcacctcctcagcctgccgcactgcccgtgggtttttctgagtggaagagaagagttgttcctacccggcctcagtcagccccctgcccactctttccctgatcgctgattgtcagacaaacccaggctggctgccttcagatccttggggccacctgcagggtgacagtcagggggaac

SEQ ID NO: 50022 - DNA, 815 bp, Bovine  19866881153904
  misc_feature (1)..(1): n is a, c, g, or t
nctagtaattaaatgcttaatatgcacaaggcagtgcttcttatttaatgcttctcattttatgatttactcctcaaaacgaagtggtgagttcagtattagtattatcactgtcctacaaacgattcttagcgaggttaagcaacttgcccaagttcaaataccttttcattgtaaaaccaaaatatgaaccttgtgttttttctgaggagtcattgaacctagggtgttgagatcacatgtaattctcattgactgtactgtgacaatactttggccacctgatgcgaagagcctactcattagaaaagaccctgatgctgggaaagattgagggccggaggagaagggggcaacagaggatgagatggttagatagcatcaccgactcaatgggcatgagtttgagcagctctgggagatagtgaaggacatggaaacctgacgtgctgtaatccatggggttgccaagagttggacacgactgagtgactgaacaatgacagtactgtaacaatactggaatagtctgttttttgcactgatgtttattatcattttatgaggagctgagcctaggaattatcttaattgttaacctgttttgcagaattctttgtctggtaactttactcacttaagtgatttttctcttgcatttaaatattactaaaatcaggatgtatgttacaatggaatttttgagaattctaaatttagtagctaacattgtttgaatgttaataaaagcttgaccactctccaatgtaggtgaaatttccttaacttcctccccttcatttcggtcatccatt

SEQ ID NO: 50023 - DNA, 774 bp, Bovine  19866881286946
  misc_feature (1)..(1): n is a, c, g, or t
nagataatttttttcttattataaaatgatatatgttctttgaagagagtttaaaatacagtgaggcaaatgtaagagagtgggaatcgcccataattctactatgtataataacattaataatcataactgatgtgctgaatgctgtgtattaaggactatactaagggctttgaggtactgttatcattaaccctttttttagagtgtgaggaaaacagactcagagaggttaagtaacttggcaaaggtcacacagccaggaattgatgagattttaatatgcacagagtgactccagggcccgggctcttaaattcctctttcttgtgtgaaatagcaacagcaatgaattggaaagggaggcgttgaagctgtttactggattttgcctacttgggactggagcaattgtgattatagtggtcaggtggggaccaccagtttcaggaatctttcgaaagcaacatctcgtggttctttaactcaggctttatgaagacagggaaggcgttactgaaagccagaggcgtgctccatcctgagctttccactcggttgaggctatgcgcacacgggagcagcagggacagtctccctccatcaagggtggaggctctgggtgagcccccctgggctctgcttcgtggtctgctgcccacttcatggcctgggtgccctccctttctctcctcagtgcccctgtagccagggctaagagtcttctgtcctggtgggtggtccaggtgtgaccctgcggcaggcagacctgtc

SEQ ID NO: 50024 - DNA, 1449 bp, Bovine  19866881360339
  misc_feature (1)..(1): n is a, c, g, or t
nactccacacacagtttgcattcctgaacgtgtatgcctgtgtgcgtgtgtgttataagaagtcgtttaaaaaccaaagcacggtgttcatctattcagattggtcttatttggaaccatcttcttttcatgtaaatagattcccttttcttaacaaggccattagtgctatttacctagtaacacttgagtgtgtcaataatgttactttgtcaagaccgcatttaagtaattactgcattttctagtattaagtgtcttcactgcattcaaagaaaagtgcccatgcatctaaagagaaaggcccaaacacatgtggcgtgcttttacttccaacaataagtgttacatgtcttaaaagattgaaatttccttttagccttgggccaaggagacagactgagaaccgagaatttagagatggaaggtagctcattcaaccttctaatccaacgctggaataccttctatgcaaccctggcagatggccatccatctgcttgtatacttccaatgctggggagctcattatcgcctgaggcaactcataaattctttcttatttgagctaacatcagcccgtaacttctatccattggtcctggttatggagcaacataggaaagctcttaagtatttgaagacagctgccacagcttcctttagtcttttcaaattaaaataactagagtcttctaaattaagacttttttctgaaatgtggcagagcaagaatgaagtgattgttatatcatgcaatacccatcacagtactttggttgtaattgcagctagcaggtaggcatctcttctagtattttaaacttgggctaagcgtactctgcagtacagtttctgaatgtaacccatgccttgtttagctaggaacagtaagaaatctgtccctggtgaatagaaaacctgctatcttcttcctgttgctatttggaattccttgagagagcacaagctccgagaaattgctctgagataaaatttaaatgttttcctttagaagggaaaattaaatgcacccaaatataaactttttgaaagtagaaactctgttcaatttttctttctgtcccctatagtatgtaatatcctacctggcagaaagaagctgctggatgaattgctactctattgagctgaaaaaaagaaaactgctcaatcttatgttgaaatatgtatatatcagggatatgtatatatacacacacacacgtatatatatactatatgtgaaatacatatatattcatatatgtacagagagacacatatacatatgcacacacacacatcctttttttttttaaccttcaaatacctttataatatcctgaagtcattttataataattcataggaagacttaatgccactgttcagacaaaactgttctctggataaactataaatcccaaacacctgggggaatatgaa

SEQ ID NO: 50025 - DNA, 912 bp, Bovine  19866881531846
  misc_feature (1)..(1): n is a, c, g, or t
naacacaaatcccaaagttttccttccaccataatggaaataggaagaaaatctctgagaagcaaagaagaaggaaagatcattacttgggggcctttaggtgattttcacgtggaatgagctggtgacccaaggttctgtttctacggaattaaacacccttactattgcaatgaaaactaccaacatattagttcctaataagacttgtctccagggtcaacagagaaggcaagaattaagagaaccagcaaaacaattacccatgaaagtggcttctcagaggcaaaacatcgtgaaaggaaaaggaatgggaataaccagaaaaaatcaaaataagcattgttaataatgttaagtgtactctcggagaagttgaaaattaaatgcattaaaaaaaatacacaaacaaagaataaatagtttaaatatttaatagaatcttttaggtgaacattcacgtgatactgggaagcatcaacaggaacaggaaattctgtttctggagtagctgttagggtaagataatggaatttggcccttttaaaatcaacaaatgagtcttacaattgggtgaaactctcttattagggaattcaactactttttgcagaagcacttctcaaaatgttttctttgctccctaacttcagttatttgatcttttttttttttctttttaatgatgtaatggtttgaaggctgacaaaaaaaaaaaaaaattgaaacttgggacttgaatacaatgtcatagttacactaaaaaatatcatgcagtaaagaatatgcttttatcacttaaatattgcaaagaataactctaaagagtaaggaaactcacttaaaccacaaatgggtctacctcaattcaccaagcaacataggtaagtactgtaaaagactgacccaact

SEQ ID NO: 50026 - DNA, 2154 bp, Bovine  19866881563853
  misc_feature (1)..(1): n is a, c, g, or t
ncatcccgccctttgtaaggttgagaacttcctgcctggcttcattatttaaagcaaatttacactcttccccctcgagacttttggtttatttaggagtctctttttgattttgggagagttgagtagtctgcagtaagaatggactctggaggcagcagaactgggtttgaactctgtctctgcaactgacgagccatgtgcccccccaaacaacccacttacacactttaagatttactgtttgcaaataagaaacacagtcacacggaaggatcgtttgagtctgaaactgtgataataattacacaaaactgcctagcaccaaatatttacaggattcatttcccacctccctaaccattccctcttttcctctcttctttctggaaaagacgtctcacacagataaaatttatcaacaagttggaaacacataggcaaacacacctatggcttcctttggactggagagtaaaaggtctgctgctgctgctgctgctgctaagtcacttcagtcgtgtccaactctgtgtgaccccatagacgggagcccaccaggctcccctgtccctgggattctccaggcaagaacactggagtgggttgccatttccttctccaaagcgtgaaagtgaaaagtgaaaatgaagttgctcagtcgtgtctgactcttcgagaccccatggactgcagcctaccagactcctccgtccatgggattttccaggcaagagtactggagtggggtgccgttgccttctccaaaatgcgtctagtgactcaataaacatacctgtgtgctcacaagtcaactccaactctctcttttatacatgacaaatttcttaagtagattccatctggtgtgttttcttcctttcatggatgcataatctaggcctagagagatgagtgaaataactaaatataagatcatgcaggtctttagaggcacacatggagcccaaagtcaggtctcctggttaattctgagccttgtgcttgtttcctggatgtgttctttttttcccaacccctgctctgaaatgaatcacaaggttcttccatgataggcagcccagtgtatgcagaagaacccagtgtggtgacaaccagcattcacacatcagatagttcccaagaatagccactagcaaaaggttttcagagtttgattccatgctcagcctttcgagccccagccctccccaccccttcttctggccatttcacttatttggggggcaaaacagccatgtataggggtgaatcaacagttctctgtggcactccttcccagtcaaagaatcagagaggcactccacgcctcttgtcgaccaggtaggtggccaggataactagaagactctgattcaaaacaggtcagggttaggaattccctggctgtccagtgattaggactcagcattttcactgccaccgcccaggtttagtccctggtcagggaactaagatctgcaagtcaagtggagaggccaaaaaaaaaaaatcagggtctaaaaagagagctagcattaatccagctcttcactggaagcagatgctgctggtgtccccagagggctagaaagcagcacagtggttaaagtgcttcaagtcctgggcaccgaaaataatccatgaggatgtgacctcccagagagcacagccccttcctagagtttttaaacttgaatgcacggacctgtatgccagagggagaagaaaacttttatgggcttaaaatgatggggttttttcagacatgtgtcagtactagcagtgctatgtgctaagaactgaagccaaagcattaaataacaggactgataagcatattgcatttccagaggaggtacaagcaggaaaaacaagaaggcctctatggaaagcttcttttcaggaaggaacaactccaagtggccccaccctcctaagaaattgtatgtttattgaaggactccatgtctcctcacttcatcagtctttgtctagaagttcagtgctgcccaagagaagattccaaagtgcaacaggccaaggtacatctaggaacttctctggtggtactgtggataagaatccacctgccaatgcaggggacaggggttccatccctgatctgggaaagattccacatgccttggagca

SEQ ID NO: 50027 - DNA, 1139 bp, Bovine  19866881752730
  misc_feature (1)..(1): n is a, c, g, or t
ntgtgtgtgtactgacttgtagacctgtgagctctttgataattatattctggatttgcattctcccaggatggtctttcttccaacctgttcccaagagattattttcagaggaagagattccatagcctatgttgtttataataaattctagtgaagtttttttaaaccttgaattttttaggaaaggtcaaagtgaaattgggatagtcatatttaactgacaatgacatgacattttgcatttatgtgttggtgttactaatgtatatttacttacttttctagatcaatgggcagtgcagctgttttcagagcattgaactgctaaaatctcgccctgctcacttggctgtcttcttacaccatgtagtttcccagtttgaccctgcaacattggtaatgtatttcatgatttagccagtttagagttcttaattgattcaaataccgtgaaacttttcagttttagcaagatgggtagatagacttctgccagttttctaaattagatatgaaagatgattaaaatgttactaatttatttttcaaaggcttggttatatggtaataactgcattgttcatggtgacctacttgtttcagacatttctactcaacgaggatctagcagattacatttttcttgatttcttccccatttctttctctactacagctctgttatctctattcagacctatataaacagaccaattccaaggagacccgtcgtgtcttccttgagttccatcagttcttcctggatcgatctgctgtaagttaccaagttaatatattacagtctttgcttcagtatactgaattactggcctcctacttctggtcttccctcccgtgtttttggacttgattgtgctttctgacgtctgtattatatctcaattattgactactcatgactgtttttttttttttatcatttctaagttaattataggtatataaattctcacaaaaggttttaagggatatatatgtatatatataggtttatatatatgcatatttaggataagggaatgaaaaagaatacaatatatatgtgtatatataaatatacatatatatttaagatccaaaggttagtacttgtataattggactctggttggcct

SEQ ID NO: 50028 - DNA, 1191 bp, Bovine  19866881791104
  misc_feature (1)..(1): n is a, c, g, or t
ngtgtcagattctaagaaaaatcaaattttaatctcagtctttaagcgtttcgtgtctcatattccccagctgtcaacctttctgtcagatttagaagtgggatagactgaaaaagttaagttgtggtaagctgtgaacaagaaaatattatacgatgatcaaaaaaaggtctggatacatcaagagtcagaagttttttagtggagaatccttgataatccacattaaatatgtagatttctgctccttatcacttggggatacttactgggatactggaaaggattgtggctgtctgtctttttgcctggccttacataagctcagtatcccattctctattgtgttctctgtgttcttggcacagttcagtggacccggggaggaaaagttgaaacatgctgctgctaccttttgcagtaaccaaccctttgccctggaaatgatcaagtctcgccagaaaaaggattctcgattccagacttttgtgcaagtgagttgagtgagtcatgtaaccaaaaaaaaaaaaatgcagtttttttgggggtcaattacggaatgaactaggggaattctaagactaaaattttgcataagggttatatctatgtttacatttttaaagccatacattatctcttaaattactggaggatataaaggtgatactgtaatggtgaattataaagaatatatgatgggattaaaatatttgacttagaagatattgcttccacattgccttggagatattgcaggaaatggccatgcacactattgaaataatcctgtcaaaacctgagaagggccttatagccagcccagagaagagtcaaacagcagtcatgcttactgggctatatattggtatagataaccatcagcaaactagagcccgcgggccatatccggcctcttccctgtttttataaattaagttttattggaacacagtttattttgtattgctgtagacaaatcaccacaaatgttgcaacttgatgcagatgtatcatgtcacagttttgtagtttaagagtacaaatacagtttatctatgttctttcttcatgctttcatcaggctgaaatcaaggtatcacttgcagctgcagttctcatctgggactctcttaagctcactagttgtcagcagaattcacttaccttgtaaatgtataatcgagaacc

SEQ ID NO: 50029 - DNA, 1379 bp, Bovine  19866880291152
  misc_feature (1)..(1): n is a, c, g, or t
ncctgggatttctttggaaggaatgatgctaaagcttaaactccagtactttggccacctcatgagaagaggtgactcattggaaaagactcttatgctgggagggattgggggcaggaggagaaggggacgacagaggatgagatggctggatggcatcactgactcaatggacgtgagtctgagtgaactccgggagttggtgatggacagggaggcctggcgtgctgcgattcatggggtcgcaaagagtcggacatgactgagcaactgaactgaactgaactgaagtcaatatgacttataagaagagaaggagagacacagataaagacacagagggaaaacaccatgtagcaatgaaagcagaaactgaagtgatgtgtttataagccaagggatgaaaaggattgccttcagagagagcatggccctgctgacacccaggtagcatccagaaccgtgagagaacgtccttttgcttggattgtggcgcactgtgatcgtatactacttttgtttaaggctacgctaactctgatattttgtttcagaacaaatgtggccccaggaaactaattacgccctcaatgcttatatgtcttagccagggccatggggtctatttctcagtgtcacagagcatcaacagaagtcgacagatactggggcaattctccatttctaagtagaaattggagctttttgttcttattcagtgtcattttcaactctcatccagtgatacaacaattcagagcacttcattcccaagtaaagatctccaaaggtaaagttcatccagtaggaagagaaagacaaaatatcttctctgtaaatttagaagtgtagggatatcttagatcagagtcaatcataatgctagaatatctggtgtttactatagtttttactttcaaatggaagtcagtgcactttttctggtgacagtacatgcccattttgtgtactagagccttcttttatagcaatattgacacacgatttaatgttcccatttctcctgattggtttggcacaaacaatgcatttatatgccaatgaataagacagatgtagttgactcccttctctctctaacatatacacacatacatataaaacagaaaatatatcattatttttcttatgaacagatgctgagaataatagattaatccatgagttcatgaattaatatcccaaggattatttccccaaggcagggaatacttttattagctaaagattgatgaaaattcgagattttctatggcattcgaattttgttaggtttttagctttacatgaattatttaaaccttaaagttataaacagtctctataaatcggagaggcaaccacagccaccctcagga

SEQ ID NO: 50030 - DNA, 1696 bp, Bovine  19866880411509
  misc_feature (1)..(1): n is a, c, g, or t
ncattctcttactgtcatcctactgaggctttgagtgggaatggagatataatcatgtttgtttgttttatctgctatgtttagctagaagtccctatggtttgtttttggggagaattaagtaattgtgaaaccaattatattctttgtgctctgcatgacaatcagtttctattagttttcactaaacactagtgaaagcgttcagaagtttttgaattccctgtgaaggaaaaagaaaggaagtgaaggtggcaattaccaagagtgtatttgtgtgtgctcagtcatgtctggctctctgcggcccccatgcaccataacccaccatgctcctctgtccatgggatttcccaggcagaatactggagtgggttgccatttccttctccagggaatcttcccaacacagggattgaatctgaatctcttgcatctcctgcactggcagtcagattctttaccaccaagccaccttggaagccccaattacccagttcttgttcagttgttcagttacgtctgactctttgcaacaccatggactgtagcacaccaggcttccttgtccttcactagtagccatctcaaaatagtaatgtctaaacagtcttcttctttgcctggtccagaacaggtgctcaatatttatatgacttacgtgatgcttataaagtactccaagaatcaggtgggtccagctttaatcccaacatcttggagcacaggcccatgaatactgagttgttgctgaataaatactgaggaatccactatttgtttttctggagttgaagctagaaaagcaaggcccttctcattctaaatgtctgaaatgagaagtgaaaactactacaccctcatcaatttcaatgaaggcaaaatactgaattccctggaatgcatcaagtagaactttgatacatactagtgatactgtccatagtaaatcagataaatcatgtatagaaggtgtgaattttatcacctctagtgatggtatcctaatatgtcacgctctctcctccttccccaaagcatgctgtgtcattaattgttttacttctgtctggggactgaaagcttggccaacggctgttgatgtttcgacagtgcaggtgagtcagacagaaacatcacccacttagaggcagagtggtgccgatgatctctgtctcctcctcttagcactacggcccttttcacaagtatctgctgccccttctggatgcctgcagtttgttccctgtgaatatctgaagaggtgttgggagctcacggtgggttaccaggggcctttgggcatctagcagtttgctcagaccaaaagccaacacagctacttggcaggctccaagcgagcaccctggctgctctcagaagccttcttctaaccctgggctaattgtctccactgtgctgggcgctctttgtggacacccatgagctgcagctgcgtccaacagcaccatgacacagaatctcagctgtgctagcaggccagcttctgctctgaaatgctcctaattagctgttaatgcatgacatctccacaacgcatctcggtgcagagaacagcccattcatctcatgcatagaaggctgatgacaaaggtgagaaagaatgaattgttatgatacattttgttctgagtaaaaaaaaaaaagaatatatatatatgtgtatatatatatt

SEQ ID NO: 50031 - DNA, 1867 bp, Bovine  19866880457859
  misc_feature (1)..(1): n is a, c, g, or t
ntaactgtgctttcagcgcttttcctttgatacaaaagggaaaggtaccaactgactggggactcactttgagttgcctggattttccaaaggtttggatgagagggacagggcgggggaacccggggaggtgtgttcagatctgagcaaaggctgctccctatccaagccatattctctctcagatttctgtgacttttttttttttttaattttttgttttgtattggggtagagttgattaacaatgttgtgacagtttcaggtggacagcaaagggactcagccatacatattctgcccccaactctcctcccatccaggctgccacataacactgagcagaattccctgtactctacagtatgacttttattttccagataacacaaccacatttaagagccctgctctgccttcccttcacccccaaaaagctgcttatcagggtccttaagatcttattcatggcagtcttctgagcagcctcagtctcattctgagaagttttttatacaagttgtacgagttggaaaagtacaagaataatgggtacatttctgcgatgagtcaaacgcttcatccctatcagtctgtgtgaggtacaggatgtctgtgtttttaatgtttgtgtccttaatggacaagatttgatatgtgtgtttcctaatcctgagctattgaaatattgattttcatcctgacctggcctcctgggcacagagccagtctatctgcatctctgccctccacatttagcctgtcttcctgctggcctagactgggaacaccagggtgagattagatttgttggggggcagggggaggaatgtaaaaccagtgaaataactgtctggcctcatttctgtttgacagaacagggcagctattcttgacattcttggctaatgttatcatgtgtttaccctaagagccttttgccttttattttcctttttgattttttaaaatcttattttattgaagtagagttgattgacaataatgtcttaatttgctgcacagcaaagggactcagttatacacacacacacacacacacacacacacacacacacacactcatatgcttttccatattattttctattatggcttattgtggtgacttccctggtggctcagatgataaagcgtctgcctacaacgtgggagacctgggttcaatccctgggttgggaagatcccctggagaaggaaatggcaacccactccagtattcttgcctggaaaatcccatggacggaggaacctggtacgctacagtccatggcgtcgcaaagagtcagacacgactgagcgacatttactttactttactataggatattgaatatagttccttctaccatgttgtcctatctgatttgaatatatagaggctatcagtgaaaataaaagaaatctgagctaaagatccatttgaacatttcaatagggttgtctaaaatatgtaaaatattttacaaggaattccagagaaatgaaaaatctataccacatcaaaagtatcttctgacatggaaaatattagaaacttttccatttttgtgtgctctttgcatatcgatggtttggaaccaaactcaaaacctggtgctgggcagtgtctgaggggctatcagttcagttcagtcactcagtcgtgtctgactctttgcgaccccatgaactgtagcacgccaggcctccctgtccatcaccaactcccggagtccacccaaacccatgtccattgagtcagtgatgccatccaaccatctcatcctctggatccccttctcctcctgcccttaatctttccaagcatcagggtcttttcaaatgagtcagctcttcgtaacag

SEQ ID NO: 50032 - DNA, 1426 bp, Bovine  19866880490509
  misc_feature (1)..(1): n is a, c, g, or t
naggtggccaaagtactggagtttcagctttagcatcattcctttccaaagaaatcccagggctgatctccttcagaatggactggttggatctccttgcaatccaagggactctcaagagtcttctcccaacaccacagttcaaaagcatcaattcttcggcactcagccttcttcacagtccaactctcacatccatacatgaccacaggaagaaccatagccttgactagatggacctttgttggcaaagtaatgtctctgctttagatgttgtcaaagttaatttctgggtgttaaattcctattaatgctcagcagtttccctataggattgctgttgataaaatctttctgacgagggaaatgttaagattttacttctgtcgtcttcctcctgtgccttccccagcatctgagatttgtggtgtggatttattcctttgagttttcactgcagtgtgtctagcccagcgttttaacagttaatgtttgcctagtaacattggaaaggaggatttctcaccagaggtgatttctggcacgcagagtgtgtggcttctgagctttattatttttatggggtggagaagtttctccaggctatttctgtgaatgagagatcaaagtcagatggatctgacaagtttcctctgagagggaccacccagtggtttgatagttcttgttttgtttttttttaacctctcggtgactgatgttcccatgatccactgtcattttgtttggagtgaaagcgtatgaagaagcccctctttctgctcgtgatttttgccagaaaactactgggtgcttttattgtttttattattgtttcattcaaattcataaaaatttcccatgttcttttccctccagccacccctccagcttctcttagctactatttgtttgttttcccttcccctaaagtggagttcagtgaaacctatttgactccctgtctgggtgaggaagcagcagactttcctggattgggttctggcaacaactcggagactagcttcaccttctcttggggtgaagttggcctcctagattctgctgatgaatagttttatcagggaagtggtgtgttactttggccttcagttccttaccacgggtaaggcgttcaggagtctagatacatgaggaatggggtgatctaatttaggaatagctgaatgaggcaggtaatcagaagtgaaatcagaggcaccttatgaaaaaccagatagctcagcaagcaggattaagttggaggcacacacggtcaaacagttgatctaagaatcaactgtaactcaggaaaatttctgcggatctcactttccacgttgccttgtgcgaggtcgctcacttttaaaaagtccgtgtttcacacaaaactgtatctgttaaaagtattttctaatgttatttt

SEQ ID NO: 50033 - DNA, 1368 bp, Bovine  19866880532925
  misc_feature (1)..(1): n is a, c, g, or t
natagttcagaaactttattataccttcagtcacgctacatgtttgtcttctgtccggctctggctccatcctttcccttcagcctgctcactagatgcattgttttcttctcatgatagtgaggcaacgtttaaatgcaaggagagcactatcggggcttccctggtggctcagatggtaaaaaatccacctgcaatgtgggagacctcagttttatccctgggtggggaagatcccctgggagagggaatggttacccactctagtactcttgcctggagatgcccatggagaggggagcctggtgggctatagtccatggggctgcaaagagtcggccactactgagcgactcagtgcagcacagcgcctggtagggtgttgcatttctccttgttcagctgcacctaatcccttatgctcgaactcaccctttattgaatgggtggggggctatatttctctagtctgaaggcaccacgaatgatgattgcttcactttgccacttatgtctgggtgtttgtcatcatttctgatcatctgcttttgtttcgctcccagtgtaatcttgatatttaagagtagtttgtctgttatcaaatcattttatctcttgagctacccgacagtagaccctcttgttttcacagaagaaaagaaagaaaactgtgagagctttactatcttttatgtgattaatgcagtcttgattaagatcttagaactgcaaatatgtgacaaggcagccatggcctttttcttttctcttggtggtggtggtcaaaagtattaggtttgcagcatcacagtataaaaaatattgggagtattatttaacctttgttgcagagcatattggcataaaattatttggaaaatttgattttatatactggtgctgataataaatcatgtgtccttaagtaatttcttaacctagtcaaaataacatagttgggatgaaaatgcatgtctgttcatctgtaggctctacggctcaatactttctactagttgatctaatcactaaggttttgcagtgtttgtattattgatactcagattgataaaagagtaggagttttaagtagtaaaaagagttaagaatgatttttttgtctgccttttgaactctgaaatcttaaatgctatttttgcctttactaattttgaaaaaatcgctaatgagccccatgttttgtgatggcaggctgtttcatgcatactctttcctcttgagcccttgccagttgccctgtccttgtttttatccagtataccaatttgatttagacaatatggcctttaacttgaggggctcttgagtaaacgaaaaagatcaaaagttaaaaaaaaaaagaatttc

SEQ ID NO: 50034 - DNA, 1735 bp, Bovine  19866880544149
  misc_feature (1)..(1): n is a, c, g, or t
nacaccgtttcttgtacctgtgggacactttgaagttattcttttttttcccccttggttctgtttaatgctaagccataactcttttgaataatgttgtttggtaaaatatgctaacgtgcaggctctaagtgtaggttagagttcaatacaaaatttgggggttttttcctgtgttatgtagagaaagggttttcagcctttagaagttgattgtaaatgcagtctattttgggaaaacacatagccgtgcaagtttcttgtttgtttattaatggagggctctattctagcacctagatgtgcttggagaattctccccaagtatcactgccttcttattccatttattctaataacaaatctagctctacttctttctccctctgcctcctttctcatttcagaaatggaagctaaaagagatgaaagtgaaagtgttagtcgctcagtcatgtctgactctttgtatccctatggactgcagcccaccaggctcctctgtccacagaatcctccaggcaaggatactggagtgggtagccatgcccttctacagggtatcttcctgacccagggatcaaatctgggtctcccgcattgcagacagattctctaccatctgagccacgagataaaagtaaataagcgcatgcctgtggcattggggaaaggtctttgagctaggagacagaagacacagggcaaatcattgaccttctccatctccggctgattaactttaagctgagaatgagtacattttgtgaggaacgcctacaaatgcatagtgcatgtgaatgtgttttaaaaaattggaactactattttaaaatacaggcactaatataacagtattctgtaaatttctgagtaaatcctagtaatggaacttgatctagttatatgccgctgctcattctccaccccctcgctgttcctagaccctgcctctcattctaccctatctttggcaatttcttgttctaatcatgctttggtcaagcacaggaaactgcaaaaaaaaaaaaaaaaagccaaatcttgtacaaaacttgttctttgtatcttaacaggaaattaattactgttgcacttctacctttaggaaattttaggaatttttccttgaaggatattgcttgctacaatccactggatgcagaaacagtctaagaaatgaatctggtaggaattagaacttttgaacactaccagtattgctgatatagtctagatggtgaagcttagcaatatattatacttgcaactgaaacctaaggtttgccatgcctttttgaaattttctgtttgcaaagcattttgccaaagggatttatgtctcttctattctcagaggccgtggagctggacaatgccggtcccagggtagatgcagccaatacggttccttttctcagacccttcatgtcacaaatgcttattccactggtaattcaaaaatgaatctagccagttttcatatactgtatcactcaacataccatcgtttctacagtaaaataatgttataaccatcaaaattatttcctaagtataaaagagctgaagtagttaaccttattatgttaaaaataatatgatgagaaaaccaataacgagtcaataaaatcatgcagagtttaggttcacagtttcaaagtgaattaaaagtcatcctgatttagtaggagaacacatttgtgaaaactagtacttcataacagacttatga

SEQ ID NO: 50035 - DNA, 2429 bp, Bovine  19866880559395
  misc_feature (1)..(1): n is a, c, g, or t
nactggatttaaatggctagttcatcagggaatggtagcttgttatatccagatgcaccctgaagaaatgcctgctctgtctaaaaggactaaccactgtggtgatctgtctctggtgcctattttgtttgccactgttacaagtgttgagaagctttaacccttcagactcctcttttctagtgcagtgaagaccactcgccttatggtaacattctttattctcacggattgtacagtgtgcaactatgtttttagctttgttggttaaaatcatattcagtcttgtgatcctgagattatactccagttactttggatttgaatgtctccagatacccccggttacatatttgaatatatctggcttattttttaggttgataaatcctatcaagacttaaagtaactttattttcaacctttggcagctcctagcctaactctgcaagtcccgacaatagtcatatctgaagacagtggcactgttggtacaaactttgctctttggttgttccaaaacttaggaaggacattgtggttattgacacagatcacaactcagcccccttagttgttttgtcttaggttatttgctgagatattttttatgagtttcagagggctatataggcctgcatgtaaatacttaaaatagcatcctctcacttgagtatttggatggggacaatactcacgtgcagagtagtttagactgcttgctttgcatggaagcagctggttttgaccctctttccactactgttgtgaataagagtttttaggagtgttatcagtagacatttaggagtaaaaaaaatcagatgtagatttaagaatactttttcatgaaagagaattttgattgaaggcttagatattctatgactatttttatatggattaagtgtcaatttgcagaaaggatataaggaataagagaagtgaacatggagaatatgcaacatttcctccttttagaggaacatttcctgctacttttagagacctgtgcttttcttgatagatccatgaatttattattactcttctgttagactatgattttgttcatgagactcaggaaaataagaactgtgaagtattaaatagtgtttctactttgaagacattcaacataatataatctttgtctttctgtgttgttttaatcaagaaacttttgctccaatgtttattatacagtcaaaactcaagtttgatttatgttctgaaatgtaagactcaaggacccagaatatcctgggcgctcatcccagctccagcactaactccataaagtgtggaactctgggcctcgaccattgcgtcttcttaagtctcatttgtgaaataataatattatgtcatctttatcttctgttgtttttgttcagtcactaagtcttgtctgactctttgctacccccatggactgcagcacaccaggcttccctgtccttcgctatctcccagagtttgctcaaactcatgtccattgagtcagtgatgccatccaaccgtctcatcctctctcactcccttcttctcctgccctcaggttttcccagcattggagtctttcccaatgagtcagctctttgcatcagggtcatctctttggtctcctgtattgataggaggattttttacctctcaccacctgggaagccccttattttctatgatgctatgaattttaagattctgtacgaattatgtcttttgatgcttggtagaaaagaagaaaagatttctttgtcttctgtattattcagattaatgccttagacaaggatatatctctatttcaatttagaaataggcttcagaaatatgaacgatgatattgaattaacgtttcaatttccattttaattgacattccaaggctatctaaaatttatagtattttagaatttcttaaagtattattcttgtcagcattcgtattttgaaggataagtctttaaaaaatatgtctgtgctaggtacatttctaaataaaagaaatttcaggctttatttcaggcttattaacctgaacaaagttcactaaacaaaaagaacaggatataagaaaggaatatttagaacaagaacactctttgagaaattgcattaaaacttttggtcacagagtgtagcatcaatattccatagctggggtatgatttttggcttatagttctggtctgccctagcattttaaagccaaattcaacaaaaagcatgaaataatattttaaataaattatttaagcatctctattttgaacttttcctcctaattttctggtgttctgcttacgccctaaaatcagccttggactgttatttcttgacctggtctagtgttgataatgtcagcagaacactttccctgggttattgtatattggctgtactgttttcgaaagtacataatg

SEQ ID NO: 50036 - DNA, 2496 bp, Bovine  19866880612542
  misc_feature (1)..(1): n is a, c, g, or t
naagcccctgaagagaataagcaaagttataagtattgttttagggtgacaggatcatgaattttctttctattcactttcttcaaacgtattatttctccaattataaagaaactaaataaatctaaagaatttaaaaggtaataaaatgagacaaggagacaatacaaagcatgctatgttaaacagggaaaattttttactgccacgtccttgagttacaccatctctgaaaatcatctcccgtatcaccagcactggcatcctctcttacaacatcttgagaatctccccaagatcctcacatacactgaactcttcacaacacacagtagagttctggggaatgttcctataatgcacacagggagcaggcttctgccatactatagaaattctactattctgggaatgtaattccttaagataaactcaaaaatgaattccaagcttttaccatgctttgtctctaaaacagcattctaactagttttctattttcctaacacagcaggatcatgtttatggagaaagttagtttgacatgaaaagataactctggagtccatattcagttcattccttaaaccaagagaaatcaaaatgtaaacagacaagtggtaaaaacaaactaaagttcccaaacattcaggttctgtttgtttaacaggagaatgtttgttcaaagattattaaatttgccagtggggtaaggacttcacagtggaaaacaagttcattacactgagaatacagtataagaacctatcaacagtacatgaaaaaagaaaaaaaaaatccaatgagtccaatccagatggcgattttatatatagtcttttctatgaacatgtaatatttttatatattttttaaactatgaaacctctttaaaagaagatcatcaatggtggaaaggatgaagcaccaacatttggtcaacaaataccatccaaatgctacctctgggcatgtgtgaacagtgatggccacaaagatggtaggtcgtcgtctcccgacttgagagagcttactgcccaacagggaaaggagcacaccaacagtaaaagtacaacgggaaaacttctttcattcagtcaccaaacactttctgaaagactgtctactatatctctggcaccgtgggaaaggctggagaaacacggtcagagttttagaaaaagatagaaaagctgttggcatggagctagtaattcaaaaagagaggtgggctatattcaaaacatcatacaagttaactgcaaacttacaactctgtgaaatgctgagagagtaaatgaaagataactaaataataaggaaacggaaaccaagagacaggactgtcgagggtgcacagagcagtcagcatagactgagacagcgtaatggtgaagccaagattcgggggacaactatgacggaagtgggacattccaaaagacgcatctatttactatgatacacgagagacactcctgaaggcagacatagaccaggttataattaacgaagttaaattccataccatggtttttattgtgtgtgtgtgtgtgtgtgtgtgtgtgtgtgtgtgttttaatgagagaacctagaacatgtttccatgctaggttcaaatgttacaaagacataacaaaattttcacagcaatagggaaagtgtgtgaaggacatccagaactgtaaccaagcttgtaaataacctggaaacagaaaataaggggctatgacaagttttaacagtgtgggactatattcccatcaggcgcaagcttaccccgatgatgctcagccctttgaggtaatcctgacgaggctgggcttgaggaacacagccagcaagcactattttcttattctcctcttgagcttttctaaaagatagaagagaaagtagtgttaattcttttcctcacaagtgtaccctgggaaaccgatgttagtggacataagttccctagaactcaacaagcccatctagcacaaaacaggattttcttacagctgcttcaagaaagtacattataatatgacttctgaactaggcgtctatttatcacaccataaaggacaccatggcagttcaatctggtaaggtcattcattaccgcctcattctaaaagaaaaaaattttacttacatagaattctcaaggatataaatcattcttgaaagccacattttccagacagacattagccattcaaataagttatatttattttaaatattaatgaaaatgttcctaaaacatactatatgatttctgagtctttttgtctagtataaaagtaaaatatacgtttaaaaagttgaacaggaaagaaatagaaggtataatatccccctctcttcggagaattcacacagctcctcacttctgttcctcagagatgtctacaagttatggattatttatgcttatgtctagacaatccctctcaatgcaggtatgatgtgtaaatagacttgtgttcactataaatacacaaa

SEQ ID NO: 50037 - DNA, 765 bp, Bovine  19866880652230
  misc_feature (1)..(1): n is a, c, g, or t
ntgtcgtatttgtttgtatgccttgtgcgtgtgtcgagtttcttcagaagcaacaaaccacattagcctgagcaaatttcacagtccctcgtcactgtttgtttttgccttgtgaatcatttggcttataaaacaggctaatcctttaattgaatatgccttcagaaacattctgtgcaccctacaaacttgggtggctcttgctaactctgctttatttattttaaataatactaggtgatcccaaagtatttcctttcaatttttggaagactgttattgcaagcggtaatgtttgaagtcaggatcctttataacaacagtagcaaggaaacacagataccttttcctaaagtccaactgatggaaaataggatgcgatctgtcctatttttagtaaacaggttttccaacacagatgcttagttcctacagcgaccagcttctttgaatgcagcaatacaatgcattctattcttaattgaataaagaaaacaaattggcatagttactgcaggagaagtgggtacctcatgatgaataatttgtgagtccaactttaactacacttgacatttttccttaggtcgctgacagactgattagtgagttaactgctgatggtacctattctgtggagggactctttcagttctggggcttatgctgttcaatcaactaggtatcctctgtgatgagactaaagcctcagtcttgatcaaagggctttggaggaagcattggttgaactgattggctgtgaat

SEQ ID NO: 50038 - DNA, 991 bp, Bovine  19866880760936
  misc_feature (1)..(1): n is a, c, g, or t
ntgacacttaattcacactttagttcactggctcctccccagccatcttccaagataaggctgaaactgtattgctatctgacaagcagctacacagaaaatagtaaaaaattaaagagttatcattggacttcccataggaatctgtggtgagttaaactgatgtggaaaaacaaaacaaaacaaggaatgcacctagagaaacacagaattggacaactacaggctaggatttggtgtgcgcatgttcagtcggttcagtctcatccaactcttttgtgaccccaaggactgtagcccatggatagtcctctatccatgggattatcctggcaagaatactggagtggtttgccagttcctcctccgggggatcttcccaacccagggataggacccgtgtctcctctgtctcttgcattggcagcatattctttgccactgagccacctgggaagcccaggactttgcttcctggtatttcccaatcctattccctaccacttttgcttggatgcccttaggttgacactgcagtttcaaatccttatctaagaccagtaatcatggtgtcatacaattcacttcacgtctgccttcctccttagtggagcaggcaaacaacagcatctctcccggaactgggacagacaaccctttcaaaataactgcatgaatcatgcctacttcatatcctgatcaaatctaggttcacttccaacagtcgactaacataaccagaaaatacatgcagactagctccatcatgatctctcctgttaactgtttcaatctcagagaaattaaaatccatgtcagtgaaaaaaaagacaattttaaaacacaccccttaaatctgtagctttgtaagcttcatctacttggaacttatagaagacctcagaaatatgtaaaaatagaaagtctaatgagtattttaagattcaatgtctgttaactatttctttctctcaagatgtaagctctttca

SEQ ID NO: 50039 - DNA, 956 bp, Bovine  19866880782861
  misc_feature (1)..(1): n is a, c, g, or t
ntgccaagcccctcccccgggcttcccattggcttggaacccgatgcaataataatctccgcgtgcaatgagaagctccaaatctgacctcattccaatttacagagcaaactttttaaaagggctagaagtacagctgagatttctgctgcctcttttttccttttgctgtgcgtgcctgcgtgtgtgtgtgtggtgtgtgaagaggatgttaatgcatgaaattattaaggggagagacggaaatgtattctaaccattatgttagataacaaggggcttagaagagggggaagggtgaaatactgtaaatggaagctttctgcttaaaagccaagtgattatttttattagttcttttcagtattggaatagagaatcagcctttagtgcaaaatctgttcctcggctccttcataaagccaaggatgtaaaagagggagggaaagctatgaaaataaatcaatagatattgaaaaccattaagaaagtggtacctagacacctgtcatcactattattttaacaattccaggtacagcacagatgttgatgtattgtgttaatcccttcagagctattttggtgctgtttgttggaaggcagaaaagaggattttggggggcaataatttcttgctctcttaaccaaacaggggttaactatagttattgaatgatttaaactcccctttgaatcctggatgggcttccctagtggcgcagtgtggtaaagaatttgcctgagaatgtaggagacaagggagactgggttccatccctgggccaggaagatccccttggaggaggaaatggcaatccactccagtattcttgcctggaaaaatcccatggacagaggaacctcatggggttacaatccacagggttgcaaagagctagacacggctgagcacacagcacagcacacacagtcgtaaatcctgggtagcccaa

SEQ ID NO: 50040 - DNA, 903 bp, Bovine  19866880784456
  misc_feature (1)..(1): n is a, c, g, or t
ncatttgtcttcacttattttaatgcatacactgaaaatgttaactctttgcagttttgcattaaagacaaaatccgtgcctgtgttctaggagatcctatttccggagtcaccttcaacactcttaaagtcatataggtcaaggtaaaataagaccagagttgtatttcacgcattccttcggtaatgacactgtatcagccactaagtcatttccctgcatctacactgattcctggggctcagtggtagagatctgccttcagtgcaggagctttaggggactcgggttccatccctgggtcgggaggatcccctggaggagggcatggcaactgactctagtattcttacctggagaagcccatggacagaggggcctggcgagctacaatccatggagtcgcagagagttggacacgactgagacaacttagcacatccacattcaaacttcttctcagccatccaaagataaattatcattaatagcattagaaagtgaactagggagcataaaaagagaacatttcccatccttatatcccaaatgaaaaggagtcgatattgtgaacagattctaatttacactttgtctataacttaattataataggaaattcacttctaaactgcagagttaacattttcagtatttgcattaaaataagtgaagacaaaatgtctgtcctaattagctttcatagaaatggtaaaaggactttagtgcccaattaccattactgcttcacctcagtgtcattctcagttcaatgtcagagtcaacaatcagactttacattatgaagatgataatatatgttaatactaaatgtcaaaacactaagagttgtaattatacacacatttattttcaactgatattatcaatggcttgggtta

SEQ ID NO: 50041 - DNA, 1143 bp, Bovine  19866880789841
  misc_feature (1)..(1): n is a, c, g, or t
ntagcagccttgggaatctgttgcagtgttaattcctctaaattgtttcagcttctcccagttaattccccttccccttccagactcacatgttctctaaaagagtgggtgggggacttccctggtgggctagggattaagactccaccttccagtgcagggggtgagagtttgattcctggtcagggagctaagattcccacatacctcctggccaaagcataaaacagaagcagtattgtaacatattcaataaaaacttaagaaatggtccacatcaaaaaaaatccttaaaaaaaaaagtgggaagatattaaaggcagtgttcaaatgtagattcaaatacatattactaataaaactggcttaaagaatttctcaataccacaagcattttacaaatgcaaccttagcctcaaatatatagggagtaaaaaaaaaaacacaagatattttctgttctttcatgcccatctgcaaattaggactgccaactgctttcccctctttactacgattaacgattaacgattaacagagaccttaacaactgtggcgggctaaaacactagacctgacgagagaattgaaacttaccatgtctacccaacgtcagagtctggagaccaccgtggttctctaacatgtacacactcatcatagcgtcaggggaggccctcctgcgtttcccgccccttgattcccgcagggctcagtcccttgggaggaagcacttttgtctctctctctgcaccatctctgattcaagctggtccatctggaagtaatactacccgagcgtttatacccggagcctggctctccacaagtgactgcatgtttcctgcaaccaactattggcagctgttacacaggccttttctgctttttagatacctataattacaccaattatgccaatcattgatgtttataaaggatttaaaattttacacactctgaagagtctatcggaaagcaccatctgaggcagagggacaccccacagaggggcccatttgaccatttggattgctgctgtgtgtcccttaaattgagcatcagagtaagtgaggcttcttatgagcctatatgtctgaggcaagttaatcctgtcactggaataaaattctgtttggttaa

SEQ ID NO: 50042 - DNA, 5064 bp, Bovine  19866880849276
  misc_feature (1)..(1): n is a, c, g, or t
ncttcttttaggacagttttatattttttccctctaaaatgtaatttttattcaatgttataaatatttctattcctttgcataattgtttcccctaggttcttctgagaatggacaggtgaggttttccaaggggttggcctttgttggttacctggggtatgtgacatatcggagcatcctgagaggtgatcacaggagctaagtagaaaggttgcagtagaactgaaatttctcatcatctgattcctttgtcccaggaatactgatgtggccagtctgaggctagccatggacttttatagatgtagctgaaacaggtcttaatatcattcccagaagggacatgggtttggtgtggaaatcttataaaaactctttcagaagataaacttggaaaataagatgataaaatcacatgatttggtagttgtagagaaaagacctgcttcgtaattttttcctttgaaaaactgatcagatcaaaacgaaccaaaggtataactgggtaatgtgaaaacagtgaacaaaaggtgtggctgctcgggcctgtgctgctgagtggggcttcaggaaggagggaatgaaatcaggatgtgggagatacatcgcctagctgtgctccatacaggctcctaaccactgagaaattccagagcagactgggtgttactgggttactgccaactctcattggcaggtctgcatgtttcttcatcagaaagaaaatgagttttacccacatgctttcgcttataaactgacatcagggtctggggagtagagtgaaagaaagactcagagggattgactctcttctctgctagatggttgtctattttcaagtgcaagaaggaggctacaggagatgaaacaacagtctcatggaaactgatcagatccacaaacacctgtaggggtgagtagctgatggagaaggaggactgagacatcggtttagggaagttgctcagactggggcaagaatgccctggatgcttctctatgatttttcttgtctcctcttttctattttactttttaaaccaattagtgttaaaaattccagagccttcttcaccaggtgctaagtagaatttattagcaccttttatttttcattttttaaatggtgaccttctgtggatggcaagtgacacaggtttcccatttgtaataaatgttttcttttaaaatagataaacttaagtttccaaagtgattgattgaaagcaaactatttagtaagcaactctgctgatggtacttggctgtgacaaaagtcctgaggtttgggaaacgtcataactgaacaaagcctttatgtttggtcataaaagctaatatttaatcagcatgtattatggataggccactgtgtagagcacttttcacatccgatccttcacaagttgctcagtagtgtccgactcattgcaaccccatggactgcagcacaccaggcttccctgtccttcactatctcccagaccttgctcaaattcatgttcattgagttggtgatgccatacaaccatttcatcctctgtcaccccctttacctactataaatctttccctgcatcagggtcttttccaatgatttggctctttgcatcaggcggccaaagtatcagagcttaagcttcagcaacagtccttccaataaatactcagggttgattttctttaggattgactggtttgatctccttgctgtccaagggactctcaagggtcttctccagcactgtaattcaaaagttgggaaagtaacgtctctgctttttattacactgtctaggtttgccatagctttccttccaaggagcaagcgtcttttaatttcaaggctgcagtcaccgtccacagtgattctggaacccaagaaaataaaatctgtcactgtttccacttttcccccttctatttgccatgaagtgatgggaccaggtgccatgatcttagttttttgaatgttgagttttcagccagctttttcactttcctctttcactgtcatcaagaggctctttagtttctcttcactttctgccatcagaatggtattatctgcatatctgaggtcgttggtatttcctccggcaatcttgattccagcttgtgattcatccagcccagcatttctcagggcatactctgcatttccccttcatggatcacagccttgctgtggtgagggggcttgcctaactcaatgaagctatgagccatgccgggccaggctatccaagatggacaggtcatagtggagagttctgacaaaacatggtccactggaggagggaatggcacaccactgtagtattcttgctatgggaaccccatcaacagtatgaaaaggcaaagagattggtgttaggagccccatttgacagaaaaggaagttgaaccttgaagttaaattttgttgtgaaagataacacaataagaggagaagccaggactagaactcaggtctaatgcccaaatctctgagtcttctgttaaaacgcgctactcctgcttttcccttgcagggttggggcagaagagagcaatgaagacctttcagagaactctggcaaaggccgtgtgcttctgtgtcctttcccaggtcagggctcagaagttgcccatgttctcattcggtttatacaatagccagggcccctttctttcttcttcttcttctttatttttggctgcatcacacagcatgtgggattttagctccccaaccagagatcgaacccacggccccagcagcagaagcccggagtcttaactgccagaccgccagggaagttccccatttccattcattttcttcctagtctgaacacttcttcccctcccaagccctctttctgctccatcattatgaaaacacctgtcttctgcaatctagtgctataacaagtcatgctggaaggaggcagtgcccgctgacctcagagtgaattacaacatatcaaagagtccgagttttaaagttgtcagacctttgtttccatgaggaagaactctctttttttgcactcataccccagcaagagattagcagcctgaaatcactttgacagtgtcagttgctctactgcagaccacagggaattttaattccagcctgtgaaattgtaattgcatctcaaggagaagtgagggatcctgggtaatggccacagccgagctcaatgtcagagttgccagttgctgccacatcagatattacttgctgttattcaaaaatcactccagctttccatatgggaagttggactggggagcgaaagtaaattaacagaaactgtcagctgttcagaacagcacggacagcagtgtgacagaggggactcacctcccatcaaaaaagataactttttctcttttttggggggttaatataaagagtttcacaaacaaatttcattacttaaggtatgcagctaaatgatatcattattaagcaaaaaattatctggtctttggcatgatagattaaagctgccaatttctattcacttcttccaggaaggagttgggagtggggagggggggcagtgcatgggcaaagtggcccaaaagagtaattaaaataatgaagatagcaagtccatgtcaggttgatgtttgcaatggattaaaattacctgctatcaaagttaaactgtctgagaaattgcttcctgcctatgtttggaataaagggaatttagaactaccacatctgattacaaaacactgagagatagagaaaattatcagcaaaggaaaagacttgtcacctgccaccttctgaagacaggggaggttctgacgagtactaagtggttccaaaattaattttttttttctacagatggtcagaaagaaaagagaaggggctaaataaaattgcttagttaaatagctacaatctgtggcttttttgttctagatggtagaaacaattcatgtataggctttacttttcctcatttgatcatttttagagtaaactttagggatgacatttcactcgtccaattacaggaaacgtgcccttagaaggtctgtcagcagggataccttctggtaaaggtccgactgccctagtcgcctctctactgacccttgacttcaggctcccccaaactctactccgacctctctgcctggctaaatcccctcattgtttagaaacctgttttatactctgcttgccccctgatcttatgacatctgccctttcattgtacttagtatttttttaattttaattttttggccatgcagcatgtgggatcttaattccccaatcagggatcaaatctgtgtcccctgcattggaagtataggtcttcaccactggactgccagggaagccccttaacattctttagaaagcctttgaggacctccctagtccatgttagatgtccctcccatgctctgatgattccctattttctaccttgagtggctggattgcaattgctgcccagcttcccaaaggtaggatggtatctgtcctgttcactttttgcaattccagtgccaagcacagtgcttggcacctagcaccaaacaactgccaagttgtctttctccttcacaaagtcttcagcctgcatccagaagggattctgtttctcccagtgccctcaggttaatgtgagcacctcctgtatccatggtctcagtgtatctgtgggtgccctgcccaccctctagcttgagagcagtaaactggttgagaacaggctgtagtaccagattgcctgggctgtaatcttggctctgccatttacctgctaatgaccttgggcaagtcacgtctctgggtctcagtttcctcatctagaataattgcttggagtgactatgaggattaaataacctaatgtattcaaagtgcttgcctgagtctatgtaaatgatggctatgatgatgctgctgttctttactattactgctacatgcatcagaagtatgtctaagcttccatttgcttggattcttgtgccaatccaaccaatccttaagcatcatttctaaaaccaaaaatggcagggaggaaa

SEQ ID NO: 50043 - DNA, 1339 bp, Bovine  19866880878537
  misc_feature (1)..(1): n is a, c, g, or t
nagcaaaggtgaacttcagaagcatgttgaatctactctctgtatgcaaaagctgagactcaaattgaaattacaacgattaaatcaatttttccaattcaacaaagctatttttttgatttcaaataaatgtcttcacagcctatttcaaaagaatcccataatatgagcaaaactatactgtttattttgaatatatatggatatataatctacttacagtgaatctacagaaatgaaaaatgcacctgtatagtatcataattttggactatctaacattaatacatcagctgtacctacagtcgcccatctgtatccaggggtatggaatccacgggagccgaaagtactaagccactttatgtaagggacttgagccaatgtgaatatggaaagcagactgaaaaagaaaacccatggattctgacatctactggggctcgggaaccaattccccagggataccaagaaacaactgtacaaggaattttaacttgtttctatagtctccacttcataaaaaatgaaaaggaattcttagccaactctttacatgatagttggaagttggacacaattcatatgttcaacaatgaggaataactaaggaaagaagtgaatgttaactttctaaaatgttatataacctctaaaaatggacaacactgaatcatggaaatgtgtattcaaaagaatgatgtgagagaaatggatacaaactgatagatattcagcagtaaattcagcgaacaataatagttgaaaattaactgacattatattttttttctataaagttcttccatgtccataacataaaccaatgaaaagcaagcagatgaatgagcaagctgtcaggcaagtttgggatgaagctttctctctcttgatattaagttccttggcagctagaaagagtagcaagggttcacaaaatcagtttactatttatttcaaagagaatgattacagcacatatatattcaaagaattcccttaaagctttcatttccaaggcccagagaaaacaatagtttgaattcttttcattcatctccatttcactgctcatttaacagacccaaatctctgtctccaaatgcaataaggaagaagtcagaggggtggcctgtaagttctggagggagaggggagacaagaacactcatcctcctttgcatttctttaaaacttgattgaatttataacaaatataaacaagcaaaaccaagtcaagacaaaaaactagagcagacaagtaagtctttggggggaaaaaaaaaaactgaaagcatacagaaaagcaactagataagagcatgcttaatcagaaaaa

SEQ ID NO: 50044 - DNA, 6148 bp, Bovine  19866880894352
  misc_feature (1)..(1): n is a, c, g, or t
ngaacagttgttacgtgttaaagggatttaaaaaatttttaaagtgacagtgaaacctcttcttgtattggtaatatttatatgtatgaattggtctataaattctcaaattgtgtgaaagcaaattttataggaattaggattaagcccagtttcctttcctttgccaagctgctcaggtaaagagtacccaaagggatggggtgtgggaatggaaaaacctccgtgcggaggtaatatttattcttgctcagcaagtgtttgggttatgttgtaaaagctagtactgaatgtatggatagcgaatcagttatctggctctattctgaactgttactggttattttatttacttgtttattttaaatgttagtggctcaagtcgtgtctcactctttacaactccatggactgtagcccgccaggcccctccatgcatgggattctccaggcaagactactggagtgggttgccatttccttctccatgggattttcccaacccagggattgaacacgagtctctcacattgcagacaaactttaccatctgagccactagggaagcccttgtgggtaatgcatgacttatagctgttgattttgtcctttcctagtattttttctgcttggcaaaagaaaccggtgctgtccttccccatcctgtgtgtaacttgtcagggagaggagcagtctttgtgagggtgtagacatgctaacaaaaaatgttgtgtacatataacttgactcaaaagcaaagtcccgtggaaataagtttcaaattctggagtttttatgattatcatcttgaagcaacattttacggttataaaaataactatcaggcataaaattaatttgcattgacttagtaatctgtatacaaaccataaacaggccattcgttagcacagtcacttaataaacagtgttaatgccacaatgttaatagctagaatttttgcgattcatttagcaaacatttaagtacttgctgtctgtgtgcctggttgtggttaaatgtgattatttctccctgctagtttgtaagttctgttgagtccagtggcctcatctgacttgctttccagctcaacagtgatgagtatgaccccctgggtacacagtcaatgcatcaactgaatgaatcatagattctattaatagctgagggttttttaaaattttattttattggagtatggttgatttacaatgttgtattaatttctgctgtacagccaagtgattcagttgtgtatatatacattgtttttcatactcttttccattatgatttatcacaagacattgaatatacttccctgcgctatacagttacgacattgttgtttagccactctgtatatcacagtgtgcatctgctaatctcaaactcccactctatcccgcccccagcccccttggcaaccacaagtctgttctctagatttgggagtctgctttgtagataagttcgtgtcatattttagattccacatataagtgatatggtatttgtcgttctctttctcatttacttcacttagtatgataatttctaggctcatccatgttgctgcaaatggcatcatttcattcgtttttatggctgagcagtattccattgtgtatatgcaccacatcttctttatccatttatctgtcaatggacatttaggcttcttccttgtcttggcttttgtaaataatgctgctatgcacataggggtttagtaactaaattttaaagcttagagaggatattttaggtacagaggaagagagtgaaggcagaaagacttgaggaagctctgaggaatgaccaaggaatgctgcagtggctttggttcagagatagtacccaaattacccagggggcaagtgattggattaatgtgacacaggggagcaggcgtcacagggaaaatgaaggacaaaggaatatgcagaagccaaggttaccaggttgagtgttgtgttcatgaatcaagagcctgggggaaaagatgacctgggttagttgtttgaggctcaatttcaaaggatcagtgaaaattaaaccaaaatgatgtgggattatgggggtggcagcatttgttgggcagatcccacatgcaagtcactttctttagtaaaacattgtatacagaagtgatgaccaggacatggcttctgccccaaggaggcagtgacacacagggagggtggtgaagagatctgtggaagcccatggtttaaaagtttctttctgtttttctagggaggcgcggggatccagaacgaatttgaactgggattttcaaatggatataatatgtggaggtggtagggaaagcattccaggcaaacgacatagcgttagcaagatatggactcaggaaaaggcagggtctaccaggaacagtacattgtctttggtgttagtggggaaagtgggacgaagccctgatgtgatacttgaaacttgattctctgagtgatgggagcccttgcaggttctgaaagaggagagtgacagatgatcatgtcttagaaaattcactccagcctcaggacagacttgggttaagcaatggttctcaaccttggtttcacgttagcctcacctgcaaagatttaaaattccaaattccaagctgaaccccagatcaattaaatcagttgtgtgtgcttagtcgctcagtcatttgcaacccaattgactgcagctcgccagcctcctctgtccatgggactttccaggcaagaatcctggggtgggttgccaatccctcctccaggggatcttcccaactcagggacccaacccaggtctccggcattgcaggcagaccctttactgtctgagtcaccagagtctctaacagtggcacccagacgtcagtattctataaatcccccagtgattctagtgtgcaatgaggactgcacaccagtgactttgaacagggcttggcagactcttcctgtcaaaggccagatagtatttttggctttacgggccacaggctttctgttggagccatcccaggccgccttggtccacaaaagcagccacacacaatatgtgaatgaacgagtgtggctgtgtgctaataaaactttatggaagtctgaatttcatataatgttcacaggtcaccagtattcttgttctctggattttttttttttaatagccgttcacaaatataaaagcacagtgcagactgtacaaaactagcagccagtcattatttggcccgcagagtctattttgccagttctcgattttagagggtgaaaattggcctcaggtaggccaggaaagaaaacatttctacagcagttcagataagaggtaaggttaactctcttttgtggttcattgcaagggcagagtgaagataagtgatactgagtcgatatttatagcgactcacgttctcatgcactactttcgagcacccagaggttactgtacaaaggagcctggaaggaggaaccattgttcgtggtgtgtagagcttagttcccctttgactttgttctctttgcggggatttgttttacgttgaaaggctgtttcttttcccgctgcttgtgatggcttttcattcagcagcacccatcaccaccaaacagccaagtctccttcctttcttacgtgccagccatgactttgttttcaaagaatgacctttccttgcacacaaatgttctctttagaaagtaaggtgagcctgatataaggagatagggctacttatattttattttatcagataccactgaatttatgcagagtcccctctgcgttttcttccagcatttgttgcctcgttaaggacttgccagggcaaatggtgcccctgctcgtccaccacccccaccgtgagacccagaggctgatcactgctccttctttccactgttttaggaaacatgcaactggtgaaagtttcccactgatacccactgtgctttaaaatcagtggtgcatttccatgatggcctggttattttatttgagcaccattacactgagtgaacagattcacttatctgttttctgacttccactcttagaagtctgctatttcagtgttctctgagaaatgtctatcctgacccctttcctgactgtgaagactggtgaaactaaagaacacactgtctctccttggatttgctcttacaggagggagagaaggagatttaagactacagcgagcagcgttcatggtcatttccattttcttgcaaatcttactagaaaataagaggtcaaaaaaatctataaagttagagcagttttctttttttttttttaatttttcctaccatcctcacagtagagttatttctcagagaacacagaagtagtgaacataccatataaaggaaaaacagatgatattctgaagaatctgtttgttttcctgaatgttttggggtgtttttgatcaccaaacatacttcacatcactaatttttttccccaccaatttctaaatgtgggggtccattgtttaaattccaaagacttgtttttccttctctgcagtgaccttgaatgattatcatcattttagggacaccagccaaaaacatacaacgtaaaagtgaagttgtgattgaacactgataatgtcaagtgcttttaattaagcttctgacgttttatacgtcgataacaaaataaaggttcaggtttattaaattagctttcaacttgttttttcaaaagctcttaccacatagggaactaaatatataacagcagcctgttctctgcagtcaaagcctcaatgtgccccagaggaattcctgcatggaatccatttttaaggaaaggaaaaggtcaggaaataaggcaaagccacagacataatatggggattaagaatgggaatgtctggtaggaatcacaacccaggatggcagcagctgaaagacagtggggaactgaaatagaggaacagaggttaccagttggaggagaccttagagatcgtctgggatagtggctctcagctttggctgcccactggaaaactcaagagcatttaattcacacacttgcatgggtcgcaccacgccaatgaaatcagcatctccggggatgaagattgaagcgcagatttacttgaaagggtccgcagtgattctgacctgcaagcagggtggaacctaacccgactccttcatttcacactgaggtccagagcagatgccccgcccagtggtcagagaggtgttgtcagtctaggttcctcatctcagtgtagggcacccctctcccctcagctgtctgtgccaacaatcatggtgtcttcctctgccctcccccgtcttgtattcctgtctcacccaagtgccccctgtcctgcctctgggctgttgctcacatttatctcgcctcctctccttgcccctcgcttcctgtgggacggtgtcactttttggagccactgcacccgcctctctcagtcttcagcctctagccttgctcccatgctccatatgtaacgccgtgacaaaactctgagacacatctgatggtttttcacaattcctacaccacaggctcgaatcatttagccgtttctttggttcaacaaagcatgtccttttttctctgtctctgcgtgcctgtgctcgacctactttcttatggtttataaacggcacgatctatctatagactcaattcttttctttctgcttttatcaaaaactgaccctcccccccagtaggcgagacgattttccctcttcaaccaaacgttgtcctatttcagctgagtttaatgggccgcgctttgcctacagcctaactagaggaacctgccgatgcagtaagtataatagagggtcccacggtcaacatcagacctgcctcagccccaggccacatccctgggagtcacggccttcactgacctctgaaggtgtccgggccacttcctttctcttcctgacttcaatgtctgtaactactctgtgcttagtccttgttctcacggtggttctcccagttcctagtccttcaccaacaacccttcggattctcagtccttggttgttaccttgcaactcttggctctggctttctccacccttttgtctcaggacaggttctcggctctcctgggagcacctg

SEQ ID NO: 50045 - DNA, 1268 bp, Bovine  19866880916416
  misc_feature (1)..(1): n is a, c, g, or t
ngttgtgtgggtcccatcagtatttcaattaagagagtgcctcagtaagagtccagctcctgtcttcgcagttcagcgtgtttgatccttaatctttgctttggcactcctacactgaggagcttctggggacctagcaaccctctgctcctccagcacctgctacttaactctgcttatctatagtgattcccatcagtgcctccagctttctggtcttgatctcctgtatctcaaattctcttaatacacctgttcagttaagaattcacatgctttgttctcaacacatggatgagaattcttaaccaaaaagacacctgggataactatctcaggccgtgaccttagacaacagatgcttctgggttttttgtttctctcttttgggaggtttccatcagtatgatttctgcagtcttacctggagccatttgagatacaagggaagggttttgttgccacagaaccttcatggtccactactttccactccgaactccacagaaaaactctaaatttctgattattggcccatagaagtgttaacacatgccttgtccacaggacaagggaaaactaggctacaatttggtctcaactccatgctttgggcctgaggaaggagactcgactgtagcacagtctcttgcccgggaatcaatggagaatagtcaatgccatgtcttatttggttccatatccgataataaaattggaagttaaacagaaaataaaccaggagatggagcttgtagagtctgagtccccttgagagaaagtaaaggagcttttgaaattcagctttaaatgcattatatgaagaggcattcccaatgggctgagttttgtgtcattgaaaaggtctgctctagctgttgcccttgaccatttctcacctttgctgtttttatgtcttttttggtttctggttttccagtaggtttgcttcttacacatttctttcacatgtaagatctctaaccctattcaggcaggataagattctcaagcctccaattaagatccatcttctctttttccccttttaacacaacatcctccaagatttttgaggttagagaggttgaaagttccaaagcagtctgacaaaaagcacaagttggttggatcccagtctgaaaaaaattaatcttatcaaactggtttgccttgggcagtcagaattataccaactacgagaacattcactaactaaaaatgtcgtatttcaggtggagactatttttaatgccttggacacacaa

SEQ ID NO: 50046 - DNA, 1427 bp, Bovine  19866880953115
  misc_feature (1)..(1): n is a, c, g, or t
nacttactttagatcctgcaacttgcaagtaaaaataaactggtcattaattcactctaattttatttactgagtaagggagatgaaccctttaatttttttttaagtccactgtgtatctataggacttcactggtggctcagatggtaaaacaatccacctgcaataggggagacctaggttcaatccctgagttgggaagaccctctcagggagggtgtcatatcacatcttcttttttagattaattaatttattttaattggaggataattacaatattgtgatggtttctgccatacatcgacatgtgttcccctgtcctgaactcccctcccaccttcctgcctaccccatctctctgggttgtcccagggtactgactttgggtgccatgcttcatgcatcgaacttgcactggtcatctattttacatatggtaatacacatttcaatgctattctctgaaaccatcccacccttgcctaggagatggatcttgtctcccatgtttaaggtctacttaacataaaccacaaggccactggacttttaacaaaataatttgtgtaaacagttaggtcttttaattcataaacaatttcatttctgaagatgcagctatcaataggacattcttgcttgttccgttcacacattcatgtgtgaatctgaggactaagcagttgttttacttagcatcagaacacatgattgagaggagaactctgcatgttatcattttttaaacatgtatgacaatatacagttttcattggggagtgacggtaaattcaacacagctcaaatggggaaggactcaaagtttatatctaaggccccaaggtcctgggaaccctaattacaatctcctcatatatcatggtgaaaaattctctcattgagaggtaactctttaaaattacacgagaaaataaaagtaaataattcaaacattctgctttcttaaatcccagtattatgttaaaaagacaacagagaaaccagtaaagtgacagggaatgaaagtaaatttacaaggtatttactaaaaattattaaaacacaaatctcttgaaaacccgagttgcatctcatgctttgttctatatagtttccttccatatccctatatatcccatcacatctttcaagaaatcatcttattcatttaaataaaaacatcaaaggactatagttaattgtccaactagattaataaatttgaatagaataattttagtcagtgtctgctcatgaacagctgttttaaattagtatattaagtaattcagacacttttctttgcaaaggttgcatgatttaataaagtcccatatgccgccacacgtgccaacacttccagcttatcttcaatccagctgctgttatgatagtagctgccaactttcaaccaactgaagag

SEQ ID NO: 50047 - DNA, 723 bp, Bovine  19866880959093
  misc_feature (1)..(1): n is a, c, g, or t
ngatatactctttggtaaaatgacaggtactgttaactaccgaagatactttccaaaagtaaattaattctcttctgcaaatcttagaaagccactgccaccaaatgtctggtgtcaaaaaatcaagcctgtgtatgagacacagtactcaactgtgacggaagagcggctgaaactaagcaatatcccttgcacactttagaaatatagcttttccacgctatattttcattgcaggttccaagtcgcatatggaatttcatcgagcataatcaattcaggatagccaccgattcaacatttactgagcacctactaaacccaaatatggactgtcacccaggcccgacccgacccaacaccctcctggctcagtcttccagtgatctgaaacccagatggaagcagagtggaaacacgtgttgccaaggactaagagcctgcctctgagcagatgctcggcaagagtcttcattaagtactacaggtttcctccaaaggtcatcaacgttatcctttgcttatttgatctcaaaagcagacggatttgccctcaatcaaaacagaatatgggcaccttaggaccctgacagagagcaaaccctactcaaaccagatgcctggtgcaaagaattgggtttctagtggtaaacgggcaggctatttgttcctctgaatcagtggtctccatattttagaaaatcactctcctgaatgaattaa

SEQ ID NO: 50048 - DNA, 862 bp, Bovine  19866881063146
  misc_feature (1)..(1): n is a, c, g, or t
naagacttgcttctgaacatggtgggaagcttaggagggtggcggtgatgtgggaaggaactaaggagttagggctgtggttaggaccagaagaaggtagagttaaaacaagagcagagcatgaaatttgctaggtgctgcttgttttcaaagaatgctgtttattctgtgagatgtctgtcatgttccacatgatctacttttttctgcacgggaaaggcataagataaaaagatattttagtgctactgatagcctctaaactcagaactcagagaactaagtttctgtgattatcaatgttataatgtaatgaatggatacacttctagactgtttgtacaagtttacttaaaaagtcaaatataactcgtgtcagtgggttttcttatataaactgttgtgaaagtggttcaagataatgatacggtgtttgattaagtgaggtaatcacttaagatgtgtttgtcattttaatactacaaagctagtggtagtcagcgcaggttcctttaatgcactgttccccttgattgagagaaaatttaaaaacagtattaaaggtgattaagtatttttttttaatggctttgaaggcttttgataatcacaactagctcttgttaacgtaacacctaagctaacgttgggtttgtttccagaataaatataatcctgtagaaggcacattaacaattaacattgagaaaacatccaattcaagtgacatttatatatgtaaagactttcagtgaaagattacctactcttgtcaagcatttcactttatttaaatgttttcccctctttcatcactgtctcctagcaaagcaaaacaaagataaatagttcagaaacttta

SEQ ID NO: 50049 - DNA, 986 bp, Bovine  19866881096446
  misc_feature (1)..(1): n is a, c, g, or t
ntttgccatatggaggaatgggggggaaaaaaaaagttccagagatacagaataaactagaggagagaggaaaaaaaatgttaacagaaggccgaagccatttcactactgtaataattattcttgtaatgttttaatcaaaggaagcagccggtctctctcccctcatctaaattcaagccaccacactttgtaggtgttaatctccacgccttccaggctgttaggagggagcggaaactggcagcccctgctctgcagaagcctgtagcataacagtacctggcactgcccttaattatctcaattatgttaatatgtgttgtttgtcaacagctagaaagaactgagactgttacgcagttgtggagactgggttttagaagtaggcttgagtaacttggaggtttcccttgagttataatttttaagggattttatatttatgagagtgaaagaagaatctaaaaactcattccataatctcatctggtgtctgttttccgaaagtcatttgtcctatgtcgttacagtaagtttttattcttcttcttcactggtgatcaaaaaatatgtaaatgtgtaaagcatataaatgagtaaagacaaacgggatacccacagattgtaaggggatgtgagagatttatttctcaagagctaaattaactaattaattactatataaaatcagtagtacgtacttttcaaatacaacaggaaaacatttaagactattcgtgtaagagaaaacaatgctatcagtattcaaaaccctaacactagcagctctttttccgagcagcatggcgaagcttatatgcgagttctggtccattttatagtttcctggcataaacaacgcctggaacccagcccagtccacccatgtggagaccgcagaagtgaatcggatcaatggcaatggagtcattactaagtcaccaaacacacgcagggtgtgagcccgtatcaacaacagaaat

SEQ ID NO: 50050 - DNA, 1690 bp, Bovine  19866881115520
  misc_feature (1)..(1): n is a, c, g, or t
ngaaacgtgcccaacgtgtcacagctagtagaggagaaaaggcactttctaagctaggttcacctaaccttcttattacttgctctttctcctatttgctatgccgcccagatgttttgccaaatttcgattacagaaatgggaaaaaaattatgttcactaaaggatgggcatttaaaaagctttgggtgtggttgctgggttgaaatgttacataatggtttcctccaaactcacacacccgctgataatgttggttactatggctgagctactgactttggagaaattgttttcttttgcatgacaaaattgagatagcaataaagtatctacgcagatcttccggggttaagggcatcaagcatcatttgaaataaaaacatggccctagtaacacatttgaaagtgaattgtgaggagaacagggcacacgtgtatgttaacacggagctgttctaggaatgtttataaacaatagatgtggaatgaagagccgaagagctgtgatattaagactttccactcttagggacaatagggacaccttggcctatatattatttgattctgacaagcatcttcccatcttgtctaacctttctattaaccatacaagaagctttcctttcagtattttgtttttctgccatctgaaaaaaatgagctttaacagccatcatgctgtcatcgtgccctgtgaataggttcttttaatgaagaattctagtgaaattattgtttaggaaaagaaaaccaatttacatttttatgtgttttatcttttaaaaaagcctacatcataaaaatgaagacactttcaatagataaatatctcgtatatttagaagacttcagtctatttaccatttcaagactttttcatgcttaaactaccttttgaaaatagtttgaaaataggtaacagattgaaaaagaaggtaagttaagagtagttcctttctttaatattacaaatccacctttggcagtgaaggtcaagtgcaggttataaataattgaaataactcataactaatacacaggttgatcaactactatcgaaaacagctagctttttttttttaatagaaagaatgggtatcttcaatgtgaaactaaataattacagcaaactgggttaactctgacatgtagaattctacagagccaatcaatgttcgttccctattgtaaatgagccttgatgaccttttgttcacattaatgctgacaaactctgcatgatacatgactgtcccactctctagctcctcccaatagagttttcggcttttattccagtcagtgcacttactccacgtctatggatgtggcgcagggcacacattagtcgggggtgggggtgagggcgtggaaatggcagacaccggtctatactgtcaataaccttggagaccttggggaagatacaagggcaaataatctactgtggtagagaaaagacagctaggaagcaatccctcagtattatctttatgatttgagatagcgtcaaaagacgtaatacatgagagtatttcctccatcaaggaaaaagcactgggaagttacctgcacaggtaggtgttgcttctttggttacaatttaagctggatgtagaaacccaaagaggtacactgggaccattaccttcttggtgaatgaacacaagggccatgacaattt

SEQ ID NO: 50051 - DNA, 1673 bp, Bovine  19866881143329
  misc_feature (1)..(1): n is a, c, g, or t
ncttcccacccttctacaaaagtgctgtgtgtttgttttaaaaaatttcaaaaaattcagaaaggccaccaaaggagaaaatggaaaccaccccaggattctgtcacttagagataactactattaacgttgtggtatgtgttaccagttttttttttttttctaagcaaatgtatagtaattattattttaataaagttgatatcaaagatattatttccattttttacacatcagtaaacatcccccccaccattaaatattcctttacaacatgatttttcagtgaccttatggccttatcctgtgaatgtagagtatctattaactcattacctattattggatatttagggttttttttttaacattttattattacaaacagttctataatgaacattctcatagatttatgtttactcagattcacgactgtttcttttaacatattcctctacatacttggaaggccttgatacgtactggcaggctgtccttctcacagattttatgaatttaattccttgccagactaagtactaaggcatgggaaatgggtcttttgaacacagtgaataatcaccaacttgcgaagtgacgtataagtgaattcactaattcattcaacacatactcgttagccttctaaatgccctaggtactggggataaagcaagcagacacagtccttgttcctagagctttcattgtatcaagacagaaaatgaaggaagcaataagatgtaaaaagtgaaaaaatgggaggtcatgagaacagagaagaaagaccagatcggaaaagtgtctggaggtaaagggggaagtactgggattggcccgatgtcctgaatgaggtcggatttcttcatgttcttctcaagtcaggtccctcatcctttctgccgtcacaatttcccctgttctcccatgttttctatttctaatttgtgctgagctaaaacagaatatcttgtttcaaaagttccctcctagctataaaagaaatcactattaaatagtgtatctttttaaagttgtgcgcctacaacaccctgccacccctacctacacaatgattaaaaggcagaataattctggagaaaaattaggtaaaacaaacagctatttaggggaaaaggttttctagaagattacttagatataaattatagtttttcatggctaagtttctagatatattggaatcaatatggtaaaacagtttttacgaacttaaatggctaccaaaattggtcagtagtaaatggcctgaaggtttaaaaggaagcaatcaaaacacacagtaattacattctcaaaataacatcacccatccctgtagtttaatattttacacaggacagcatttagtaactgctgaagttaataacttctaccaaagtaagctgcttttccattttatgcagacaagagcccaatgattaaagctataaaagttatgtataatgagtcctagtcacaccattactttagaaacaaagcattacttctgaagagcaaatatatgcggattggaaaatatatcaagactttgatacgattttcatcttataaaatatataagaaaaaagaaaataaatacaagatgacatatggagccaaataatatatagataatatatatgatatctattttcaagatatagatc

SEQ ID NO: 50052 - DNA, 1501 bp, Bovine  19866881187164
  misc_feature (1)..(1): n is a, c, g, or t
naggagcctggcgggctacagttcatggggtacaaagagtagacgcaacttaccaactaaacaaccaccaccacctcaaatgtagtctctactggggcctaaacagggcatgttcagcctgggccttgtaaggctctcccctgttccctgaggacccggtgcccagcgtgagatgagtccacacggaacacccatgctggagccttactcccactcctgcttccctgcttctaacacaggcggtcagcctcccttgctcatcccttaccagggtggcccatactggcctgaagagccttcccaagccacaatccacagaaaaaaagttcacttctcatttgatgagagaagaacaaaaaagtaggaaaacccgcctgatattaagaaaatacgatccagggatgacccaaagaatccctctgcccctaggagcgtctctaacccagaggggcctatggcacctcctccttggcccttcccagggccaatggcccctgaaggaggcactgtctgctttagtcatttttgaactgcttcaccgcctggggaagtgcaaccccaaacactgaactagaagtctggctgctggtgcagcaaagcacgctgccttagaagggcagggactggggagccccttcagctgggcctcgaagaaaactctccacgtgaagctagtgtgatcctcactctggtctccaaagttgttcacacaatgtgagctgaatccaaggaactcttttccttttgccctcagcacttttcattatgatggaagttcttttttttttaaaaaggcaatacaaaaaaaataaaactctgaaactaaaaaagccaaccaacagacaaacaaccaaaagcctgttagagcgctgagacagggagaggaagtccccgcccttccaggccgatgtcgccggtgcagacatccttcctgtcccctggacagaacttttccctccacggtgccaggctgtgggaggctggggcagtcagaactgcctgtttcaaactccccaatgccaaaggctgctcccatcaaagacgaatgaggactaaaacagacttactcctttggatagaatgttttgtagatccacaaagataagccccacgttagcttggctggcttgatgctataaaatagccttcctgccacaagatgctatcaatacgaatctctgctactttaagtctcttttgcttaaattgatttactttcagaactctttctcattttggagaaatcctgagagtgtgggagtgtctcttacctgctcgtagaatcgattgtgcgcaacataaaacttggaatcaaaagattcttccgtgactaacacttgttgtctctgaccaatctgtggaaagaggggagaaaaaaaaataggagccatcaggcagatgtctgagaatccaaaataaacaccaacccaaagagttatggaccagcaagtcatgtctttttaaattgtttttttaagatttttttttaatgtggaccatt

SEQ ID NO: 50053 - DNA, 1232 bp, Bovine  19866881336556
  misc_feature (1)..(1): n is a, c, g, or t
nttctgtttggaaggcgcatggccatgcctactccttgattttggatttctggcctctgaaaccataaaaggataaattttatattttaagctacccagtttacttttttaaggttgccctacgacactaatacaaatatgtgcacagaaaactgatctcaattgtgttaaattaacatgcaattaattacacacatagcaacatatgaaatgttaccaaactgttaaaaaaggttatctctgagtggtagactagctgatttttatcttgttagctgtgcttcttccaaattttgtgaatcatttttcaataaacatgtttacatctttaaatcagaataaaagccaataaaggataactccataaaaaaaagtgtacaaacactaacctaatcaggaagcaaggcataaaggggaaaacatgcagaatcagaaaggccaagaaagaaataatcatcaaaacaggcaaattttaaaagtaagaaactactttgcataaacttatgtaaatgatttgaaaactttaggtaaaacgaattaacttctagtaaaatacaaattaggaaaactgatcccagaaaagatatgaagacaaaacacccaatatcagagcagacaatctaaagcattccttccaccactgagtcttgagagggtagatgattcaaatgctacataaactactccgaaacccagaaaaacaaggaaactatcccatacttttcttcttaaatgaacatgacaataattcagaaattcgacaattaaaccaaaactgccaccattcccaagaatatgggagcaaaaacgctaaaaaaaacactggcaaaaagactttagcatctgaccaagaagaagcaatagaaaatcatatttattatgtggttttgaatatataaaagagcaaaatagagaacaactgaataaaggaagaaaagagaatgcaatcatatactgctataaagttcttcagttcagtttagtcactcagtcgtgtccgactctttgcgatcccatgaactgcagcacgccaggcctccctgtccaacaccaactcccggagttcatccaaactcaagtccagagagtcagtgatgccatccagccatctcatcctctgtcgtcccctcctcctcctgcccccaatccctcccagcatcagggtcttttccaatgagtcaactcttcgcatgaggtagccaatgtattggagtttcagcttagcatcagtc

SEQ ID NO: 50054 - DNA, 1329 bp, Bovine  19866881345468
  misc_feature (1)..(1): n is a, c, g, or t
ntgactccttggactgtagccctccaggactcctctgtcctgggattctccagacaagaatcctggagtgggttgccatgaccccctccaggggatattcctgacccagggatcaaacctgcattcctatatctcctgcattggcaggcaggttctttagcactagaaacatccttgcactttactgcaattattaaacacttgccacaggcttgagatctaaaatgaatatgccaagaaccattaagccatacagcaggaaggcaggtgcacagaaccctattatcctgaggctctgaggcaaggaaaaggccagcaaacgcctcatgaaagtaagctctaaactgcattcagggcaggcagtggaatgaaacatgattacttgactccagtcaaaatcccaaagaatttagtaccttattcagatgtcctaatgtgtttcttctgtgatgccaagttaaagctatcagctattaaaaatgaggctgcaaggagagctgcctatttgatatcattccagacccacctcctacagagtaatgctattctgctttccacagctgtttctccttacctgaggtgaggcaggtgcaggacaaaagaagccaaggactctgcacctgctccctcaaatgcagcttaggtaaagcaggtagcctgaccttttccagcccatcaccaggagcagatgttcggtggagaccaggaggttctcatgcacttgactttgccgcatttgaattcatttaatttaaccaatctgatcagactctactgacagatgctgaggggaactgctttctaaaggcttggttaatcttgaaagatcttgtcagaaaatactggaacaaaatcttagcagttcaaggtagaagtggatagttactataaggtaaatgaaaactcctgataaagaatccattttaaagtaagaactgcttcattaattctggaggttgatgcagataaaggagtataagcatatatttcattttaactatttataatgaaaaactgcaaacgcacatacaagtagatagcatagtataatgaaccttcatatacttaccaatcagcttcaacgaatagaacccatagagacccaagcctcccattcctacatgccctcccttccgaccccacccagagatttttgtggcaaattgcagatacatcacttcactacagatatttcatcaccacatttaaaaaggtttaaaatattttttaactcatcagtattcaattttattaagtgtccatcttttaaaagtttgtttgaataaggacccacgcgcactccacaccccacaattttcttttaaaatc

SEQ ID NO: 50055 - DNA, 1027 bp, Bovine  19866881578339
  misc_feature (1)..(1): n is a, c, g, or t
nctcccagttgaacttggagcccaaaagaaacccagaggaaggtttacccttttagtgtaacttctgttatctccagttcgagcgtttggcctcacattgctggaagatgatttttttaaacttgccttatttaaagtgatttcatcacgctacagacccacctgctagtgcaggagatttaagagatgcgggtttggttcctgggtctgtaagatcccctggatgagggcatggcaacccattccagtattcttgcctggagaatccccgtggacccaggagctgggtggactatagtccacagggtacctgagtcagacatgattgagcaatgcactaacataaaggaaaaaatataggctcttctgagaggtagttttcatgctacctcatgtgaaattaattttgtggacttgtatagaaaagtgatgtgaaaattaactattgtacagtttggctgtttttaggttcacctcacagatctctgtagatacctccactgtatcgtatgccccattgaattccagctctctgtgtacttgcttgtctcctctaccagccagtaagctaccagatgattttggatgaataaataaacgtctgggaatggaaggcgagtaaaatcaaacaacgaataatgagttagagtgatcctttaaaaggcaccaagcactgaacagaaaggcacagtttagctcaggtgcagtcttattaagatgccagtataaaaacacacagaaatgtttgcatcttattcccccaaatttagttagggtccttttggtagtacatagtaacaagagtgggggatgaaggtttcattttccgcccatcagtattggacttgtccgttcagttcacagtggacccaccttcactcacacccttgccatctctcctgggtcctcctgtgacagcctcctgagtttgatctccctggcccctctttacagataatcttcgcaaactatgggggcctgaatgtgtcattcctcctttcaaaaccactcagtgtctcctcctcat

SEQ ID NO: 50056 - DNA, 1122 bp, Bovine  19866880621082
  misc_feature (1)..(1): n is a, c, g, or t
nattgatgcttttgaactgtggtgttggagaagactcttgagagtcccttggactgcaaggagatccaaccagtccattctgaaggagatcagccctgggatttctttggaaggactgatgctgaagctgacactccagtactttggccacctcatgcgaagagttgactcattggaaaagactctgatgctgggagggattagaggcaggaggagaaggggacgacagaggatgagatggctggatggcatcactgacttgatggacataggtctgagtgaactccgggagttggtgatggacagggaggcctggcgtgctgcgattcatggggtcgcaaagagtcggacacgactgagcgactgaactgaactgaactgaatgaattttaaacaatacattgtgtcaaaatgaattgcaattgacatattttaactattaatcatttttaagttctttgattagatattttaaatcatttgctgttagaatctgaatctttagtaacagtttctaatttgtaaacttgccaggcgtctagatccaaagagaaagcccagacagacatcttgcccatacaatagtccaaaaatgcagtagctgtggtgatctgcggtctgtttgtgtgagcttctttgcataataaggttttatgatgggtactaattgggtttattgacactgctgatctgttcttaagcttcttactgtttgcaatttttgcagggctaataccaggctagattcttaattcccacccctttgagtaccaacttaaaattttggaacttaccattcttgtatagtctcagggtgttatttcttcaattgctgtatacctgcctcataaactgcatttttcttcatgataaagaaacacagattgaaactttaaggagactatctttcaatagcaaaagggtataatgaaataaattttggtactttaaaatacactcagtaaatcaaagtaaatgagaaatcactccaagagcagtcctgcaatttggtcatgttttagtgcgtagataaaattcttcagaaattggctacaagcactggcttataattaatgtagccaagcagtaagaaatatgctgtcttcactaagttaatgtgtc

SEQ ID NO: 50057 - DNA, 1132 bp, Bovine  19866880748272
  misc_feature (1)..(1): n is a, c, g, or t
ncaaaatgagtttttgggagactagcagagaaattgcaatttgggacaagaaaactatggggaattgtagacaagtccagagaccaggaaaagagtcttgtttttataaagcgagaggacactgcagagggttgtggtagttcttgggttgcaggcagtaggcagcttgttgctggcttggagcaatcactcttcttgctgatatctgttagctactatgaaggccaggactttggccgctcccccttcagggcttctttatttaaataaggtttcctttattcattgtcagacaagactgagcgactaagcacagaattacaagaatactttcaaagcaccaagcagcttctattgggagactgaaaaataacttacatacattacagaagagcagttcttgtcttgcattccatgcatgtgagaaagaagtctgaagcccagaaatgcatgtagttggaagaccaagaattcgatgggcatgacattttctagccagataaaaatacacatgcatatgtctgtatgactcattccacacaactcaaaattgctagagagtgggtgtagctacgaatattactgcacaatgtagttttcaaaggaaaaaaaaaaaaaaaaaaaatttggcagcttccaatctccccgagtaactttagattaattgaaattttaattaataaaatgcccaacctaaaatatattaaagacatgtcaagtgctatagaacaaatgagggagaatgaataatagaaaaccaaagtggtaactgttctataaatgcacattctttggtctgtctgtctgactacattttaactaagttaggccatgtctcagccagtaaattaaaatagacaattgattcattttttgccactatttcaatttcactgtatttcatatttaaatggaaagatctagattgtccaaataatgttttcaatttcaaacatctctttgtaaattgtgcttgattattagttgtaaataagctaggtttaatagacaaaaaaaaaaaaaagaatagcaatgggcttgacagctattgttttccctttgtgttttcgtaagagtttccttatgccaggtactttgggaagtgacttaacatgcattatctcttttaaac

SEQ ID NO: 50058 - DNA, 2246 bp, Bovine  19866881018804
  misc_feature (1)..(1): n is a, c, g, or t
ntaaaactaatttaaggaacaatttagcaatgggaggcttaaagaataaaattaactttacttactatagaatttccaatgtgtaatagtttagcctttcagctataaagttaatattctgagaatatttcaaaagacatttaataaagatacaagaacagtaacaaccctaaaatggttttaaaagacatctattcaatataggcaagagtgacaaaaataaaatacaacattatgaagctatcaataatgtactttaaaagtcattcattttagaatatataatttaatttgtattaatgacaattttgagcccatacctgacatataaaatacatccttggaaataactcaacttttccaggacaaatgtaaaggaaaaatgcattcatgtacaatggtttaaaactacaatacccacagccagtaatcttgtcacataaaaactaaaatgaaatttctttatctctttccaagggctcataaataaaatattttgtagatcaagtgtcacatcaatggcatatcttatcctgtagatggcctgttatcagctccatgaaatgttcattcctacacaattaagggacatgtaagatgtttccccggagaaggcagtggcaacccactccagtactcttgcctggaaaatcccatggatggaggagcctggtgtgctgcagtctatggggtcgctaagagtcggacacgactgagcgacttcactttcacttttcactttcatccactggagaaggaaatggcaacccactccagcgttcttgcctggagaatcccagggacaggggagcctggtgggctgccgtccatggggtcgcaaagagtcggacacaactgagcgacttcactttcaccacatcttttgagcttcccaggtggcgctagtagtggtaaagaacacccctgccgatgcaggaaacataatgagacacgagttcaatccctaatttggaaagatcccctggaagagggcatggcaacccattcttgcctagagaatcccatcgacagaagaacctggtgggctgcagttcgtagggtcgcaaagagttagacccaattgagatgacgtagcatgcatgcaagcaccacatcttttaaagctaaaaaccacaaaccagctttcttctgtattaagaaaacaaagacttgaagtgtctctgtttggcgagcactatctggccttaataattgggtgttgtataagtgttgggctggctggcagtggcttctgcccacttaagtgaagtgactactcaggattagagctattggttgtctttgctgtgtacatgagataccaactagggattattgtatctgttgttattttagcagaagtcaagtctgtaccactgtcagctggccatgtcaagggtttgtgacccccattttacaggtgttgggaactgagacatttgctcaaggtaatactattagtcaagggggcaagggttctgatgcaggttgtcagactgcagaggccaccttcataaccagaattccatagggccctatcctcaaagggtaggatatgctctcatagtcccttccagccaccagcctaaacccaaggaacagaaagaagaggagctaggacaggaaatggggtacagccagagtgctactcaagtttcccttgaggatgcatagatagggcatcctagaagattcaaaggaacctgtgtagtgagatccaaagaatacccagatctggagatggagttagagggttgataaaaaaggatctcctgcttctaatgggctgatataggtctttatttttgaataatgtgtaaaaatgacataagaaatctggtattagcaaaaagtatcacaaggatgcttttcattagtgctcagtaattgacagaatgaaaggaagagatacagacgcttgccttggcaaggtaaaaggaacacaaattagtcatcaccatgaaatgtttgccatttgtgtcttgctaatataatcacactgaggaatacatgccaggaaatcatggtttctgaagtacagcttaggagatgctaagaaagtcttccactggatatttctcttgggactggctctgccctaccttctcctttcaaactttaaatagaaagtaactattctgtttgaaaaaatgatattttccctgaagatgccatgagtgctcacccagaagactgcaatcatataagaattctcttacagatgacagaaaattaagaagctcata

SEQ ID NO: 50059 - DNA, 1000 bp, Bovine  19866881115862
  misc_feature (1)..(1): n is a, c, g, or t
nctcccgcattgcaggcagacactttacccattctgagccaccagggaatcccaagattacatatgaagaagtataaaacaaaacaaggaaatacagtgtttctgagaaactacgagtagacaaattaactatagtctacattcttgtgacttttctttggaaattcacactcccataaatatgttgcatctcctgggtgtagatgtagttaaacattaacggaataacaacttaaggcatttctattaggcttcaaatcataattacatatgatttcttcaaaccttaaaaaagataacttttaaatgattgaaagtgttatacaatagacaatttttaagacttgttaacacaactactgtggaagatagaattctaagatagtccccacaattcctgctgcctgttttataagtcctttgtaatccttgggactatgaaggcaacaatcccatcattaagttttgttatatggcattttgctttaataaagggaagctatctgtgagggcctgacataatcaagcaattcagttgctcagtcatttctgactctgcaaacccatggactacagcacatcaggcttccctatctttcactatctcctggagcttgttcaaattcatgtccagtgagtcagtgatgctatttaacaatctcatccttgaatgtaatcatgtgagccctttaatctggttccagaggtcagagatggtcagagacggataagttggaataatttaaaatacaaatggaatttaatgtgaaggagattcttcactgctggaaagggccatgcagcaaggaatgttgacagcctctaggagatgaggcatggcagccagcaggaaatggggacctttattttacagctgcaaggaactgaatttggtcaaaagtttgaatgagtgtggaagctgatccttccccagagtatctggaagggaataccctaaacagagaatctaactgtgccaagctagatttactaaatagat

SEQ ID NO: 50060 - DNA, 4607 bp, Bovine  19866881244156
  misc_feature (1)..(1): n is a, c, g, or t
ngctgcccagtttcctatgtccatggaatactccagggcaagaatactgaagtgggttcagtatatttcagtatactgaaatactgaagctattcccttctccaggggatcttccccaacccctgcctgcaatggggaatgaacctgagtctacctcattgcaggcagattctttaccatctaagccacctgctgctgctgctgctgctgctaagttgcttcagtcgcgtccgactctgtgcgaccccatagacggcaggcccaccaggctccgccgtctctgggattctcctggcaagaacactggagtgggttgccatttccttctccccatatttattgtactttaaactaaagttaataagttttaaaaactccttaatgaaatctatatctttaaaatatgatgtatccaatgaattgtctaatttctgcttatatataccttctatatagctagatttactcttgaattatgctctttccctactgaattctcagaaaatctaagttctttttttttcagagatgacttgaaattttaggaatttgatttcaattgagtctatctatgcaattcaaaaatagataaaatattttcagtgcactcataaatccaagagaagtaaaatcagtgctagtcactgattttccttttcaagtacttctagatcctggtaacatatttagaggatagtgctatgtgaattaacacttctccaaattattttaagtccctctggtccagttatcctttctctatctatatctttttttttttttttggtgtatgttattcggtgtatatttaaacagtcagaaaacacaagtaccagtgaatccaataaaatcaagatgtaactcacatggagaaagaggatgaattttttttaaagaaatctttcttaagataataaaaataatacttgaaagaagagagaaacagggattagactgcatttccttttaaagtaagatctacttgatttgtaaaaataatctaattgtaacttcttttcattctcatttttataaagaataaaatttgtacacacttccctttctgatccgcatgtttaaacagaactgctcagaataccactggctttgaaaacaaatcagatgtcttgatggtatatacaatgaatgtacatagaaaagcatctgtcatatttttatctaatttttatcatattttattttctcttattcacaatgtgaaaattgttaatagtgaagtcgagttaatggaacacagtgagaaaagcaaagttgttcatattaatttttaagaattttgaagtatggtcatgctcagatagacttgaaagaatagcagaattaaaactgcccccatgataatgagcaggccagagcttaaaacatggaaatacccatgatacattttaatgaaatgatttattcttcattggtacttcatttttcatttatctttaaatgaatgtttactttaagaatatcctcaatatgcaatgttataaaaatgaaagcatgagcactttgtaagtgattatatacatggccaaagtttaatttggctctccattcaaaaaaaagcagtgtcggtggatatttgggcaatatcacttaattcatggttacttttccccaagatttataagcaaagtgaaaaaattcagatgtaggctgttgatacaaaatgaaatatactagactgaaaaaaaaccctatatattctcaaaacctaagtaataccatgccagagcataatcatgtattcactaaccatgtggtgtcaagtgcccaagggatagcttcctccacataccataagatggtcaggaccataaaacgctttgtcctgatggttgctgttgacaatggaaacaatttttaaaagctaccctcaagatcactctggtgattttccaaatgattaggttatggtgaatgaatagggagttcttataaataactgatatgccaaactagttacaggaatataataattaaagcctgagtttaactcgcctcttaacaaaacagacatttggaaactattaaccaacaggctctaaactatagtaagattatttttgttcctgtctctcagaattgagagttccatacactcattttcattagaggtatctctaacagaatttcacctttaatataatttctgtgcctgctcacattttctaaaaaagagaatgtcattacaatttgtaacaaactcataaacctgaccaagttgaaatttaggaactggaaaagacgatatacaacacagtcctgaaactgtgtttccagaatattactggtctgacaaatgttaatagcatgtacttaagacaatatccttaaattgaatttcaaatcaatttgctggataatattctttagccacatgagtaaatacaagccctgttcctcaatgtttgttgttgttaatttaaggaatataacacttttgtaaaaggttaagaaaaagtcataatttcaaggttggtagatctaaacatttcaatattaatttctttgttcttcataaatgctatgaaacaagaataaaatggttaaatgtaatatttttcatttattttcaccttgtatttaagtgtctttgatagtttccatcctagtttgcaagccaccaaacctaaatatttcatcaggaaatgaactagattaaaagtaagctaaaaactggctttttcttctttaaaaaataaaaattgtaaaactaatttgtttggaggagtaaagcttcttagaaatcaacccaatgaaatcatggttcactgttttcaactagttctattccaaacaaagcataaaaataaaaagcaaaaaaaaaaaaaaaaatcaaattaacaatattttctaggcaaaaacagattacatagtattaggcattagattaggctaccattacaaatgattgattaaacttaaataaaatttgtaataaattattccattttaaaaatatgaatcacagaactcataaattcaaactcctaataggatatatgtaaaaataaagaaaattaaagtacaaatatacaatactattttaataggctgaattttgcaataatctgttttatataaagtacattaaactgaaagccactactttatttacctatgaaagccataaaataggtaaaataactattcacatttaaaccattggtttctctgcattttaaattcaaacttcatgcagtattgaaggacagtagattatatgggatttagtcagacttctttttcattttttctagtaagtagaatttataagtaaagatagccaacccaataaaccagattgaacagggcaaaagctgttgggaaaaatattcgagaatacgaatcaattttggcaatgcgtatgtgtatcctcccttccctccaagatcctgttctgcagtcttcaaagcaacagaagaagctggcacaatctttgccctccaaacactggtagccataatcatcttctccttgtggcagagaaaggctattcattggaatcagagtagatccaggatggagtccagaggacatctgagtaagataataaatgagtgttgagaaaaaaaatagcctaaaaaagatcaatttgtcccctcaaggcaaactctaagagtgatatgcagtaaaaaaaaaaaaatcatatttttcaaaaatcaaacaaatattcaatcctaacatcttttttagactataatttactttgtagcatataccaatattattttatggtccaaagattttgagggaaaaatacactaaaaaatgaaatatatttttatacctttaaaaagatgatctactaaattattattgaccatgaatctaattctaaaatgaggataaactatattttctatgatattttacagtaaaatatttataatactataaacatctgttggtttgctgtggttatattctatactgtattttagtcataatgaatacaaataataaagattcacaagttggtattgattttcttatcacttaatacctgtatagcatatgttccaatgttaatcagagtgaaggtggttaaaatacaagattgttagtacctgattttggtaaagcagaaaattttaagaaggtgtaaatgaataaaaaatatttgaggtctggagttgtggataagcacaaagcattgtgtttgtgagaaagaacgtgcaggagttaaaaactcagcttggaaacaactgatattcaaaattttgctcattctaccaaaatttgtctcattccagtcttccccatagctggggaagaattatattaatgaatgctttaattaaatggcaaataaattatgaatgaaaattgccatctttagtaacccttattctttaggacatccacgtatttcaggggttattttagatgtgaatctcacaatatagtataatcagtggttttattttataaacactgaatacaatgctgagattatcacaattgttttatcctgattttcaattctaatgagaatgtttataaaaaatttttcatcctaaattctgaaataaatctcaaaactataaaattaaacactgtatagaaagattagaaaatcaagcacaaaa

SEQ ID NO: 50061 - DNA, 1136 bp, Bovine  19866881331325
  misc_feature (1)..(1): n is a, c, g, or t
ngactctcacagctctggatttttaaaaaaggaaaagttaaaatatgtatttaatgaatattctttgaaactgtaaaacctcatgtatgacttgaaatgtatgcagtgaaaataaatgtattgcaaatagtggaatgaatcttgagaaatcagtattttgacatatggaaatcagagttctgttgtacaatattctatttcagacatttaacaaataattatagaacttctccaaggtattcaacttgcttgactgttgaagggcttattctgacatcttattcagagatgctatattattcatgatatgtgtagaattccttttctttgccctgcgggattgtaaggaatcatgcatcacgattaaagagaaattaaacagttaaatccttaaatgcatgtgacaagatgtaagactacttctacattatccagactatttggctggttgccagtgatattcaatcagatgaagacttctggtaagatgcattgcctctaaattagaaggtccatattatagctcatgatgaaaatgcaaatgtcagttggaatgatccaaagtcttctacgttgctgacattacttttcctttatgattccagtaaaattaatagctcttcatccactcagttcggcattgaagactcttcttttatcttcaaaatgcctggaagcctgttatagactgaggaaattgtttttcttctcatcacctctgacccacctatctctctttttaggccaaattgcacccatcaaaatattttgcttaaacacaagtgctctgtgctcagtcgcttagtcatgttggactctttgcaaccccatggactgtagcccagcaaggttcctccctccatgggatttcccaggtaagaatattggagtgggttgctattttcctcctcctgggtatcttcctaatcctggggtcgaacctgtgtctcctgcattggcaggtggattctttaccactgagttacctgggaagcccttaaacacaagaacatttaacttaaaagtaaattgcactttccattagtcctgcaaacagattacatttagcagttttaaattgccatttttcttttttgcttcctttctccattgcattgctttttcataatccttta

SEQ ID NO: 50062 - DNA, 1732 bp, Bovine  19866881414802
  misc_feature (1)..(1): n is a, c, g, or t
ntactgtggtatgtagtttttacaatggattgaattttcctgggtaatggaacagaggtatagagatccccagaaaggttatattcaagcattgttagatctagcctttccttaaccagaacttccaattcatttctgataacatttgagattagatataaaccatgcaagatttcttggaagtcatctctcaaatataatagattttgactgatggatggttcttgcaaaagatcggtcttaaagtcgtaatgacactactaaattcttctgataacattaggctaacaagtcatgcctaagtgaagaatcaaatcacagcctttaagaaatctaggaacacagtagttcagccagatagataaagagtttaacaagtccagaaatccattctgaagagattttggacattagaagaacaggagaagaacccagttcaaggctttcctttctcttttcctgtgagccacattaaattatttctcaaagtaggaaatgaataactaaaataaatagcccaaggatttctaagcaatgatttaagcagttataatccctacatgtcttttgatttttttcttaaaccaccactagatgggactcttgcatccttggtctggattcttagctgctttatctacacatggggacttaaagaactcaaaaacaacagggaagctataaggctctttatttgtcaggttccaaatgagatatttgcatgtatcatttaaggttcaagttgtatcatagttcccattttagagataaagccactgaggctgagagagagaaagtgatagggaaagggagaaagaagggaggataatttaacatttgatggatgattttatatactgggcatttataatgcactttatcctctcaatgatccccccagtcctgaaaaataacattttcattttatggatggagaagttgctgaatcttagccaattcacatagctgctatggctgaagcaaaatcctaatctgtgcctgattctagtgcacactgtctctgtgcatagcatagtcacttctcgagcagtagaaacactttaatgcttgatatagctttaaaaagtgtaaagctgtaaggagctgaagtagtaaaacacaagggttagattcattatcctgaaaactgcataatatggacatacagttggctttgaaagagaagaccatttacggattaggcagtacaatttagtgaagagtgtgcacttttgaggcagtctgcctgggtttgtatcctacttcaaccacttgttaacagtgtgatctttagaaagatatcagctttacttagcctcagtttcctgaactgtaaatgagaatgataatgatatcaaactcacaggactgttatgagaattgaacaaattaatatataaaaagtccttttaataatgtttggcatacagtagttgttctgaagtgatattttttaatcctatctgaactaatgtaagaatacacaatttatgcatcaattaaaggtccgtctagtcaaggctatgatttttgcagtggtcatgtatggatgtgagagtggactgtgaagaaagctgagcgccgaattgatgcttttaaactgtggtgttggagaagactcttgagagtcccctggactgcaaggagatccaaccagtccattctgaaggagatcagccctgggatttcttggaaggactgatgctagagctaaactccagttcttggccac

SEQ ID NO: 50063 - DNA, 979 bp, Bovine  19866881543963
  misc_feature (1)..(1): n is a, c, g, or t
ngagaatccctaaggacagaggtgcttggctggctgcagtccataggatcacaaagaatcagacacgaatgagtgactaagcacatccagttatcagtatagtctaattctgtcacactctatgtaaataagaatatatccctatctctatatttaaaatttaaaaccaatttgtgataaagccatgatgatatttgaactctgttccaaaaaattttttggatattgtagttagctaggtgtatgggaaaagaatctgttgacacagagcttgtgagttaattcagtgtaaataatagattgtacaatctgattcaaattataaaataattgattgtaaaactaatctaattctgaatacagtattgcagtaaataatgttttgctatcttaagtatggaaaaataatagagctttctctttcagttattttatattctatttaagctgcttcagaatctttttggatagatgaaatgtattatttccttttaaaaatatcatggtttgtattagagtgctcgacagaaaccagattataacccagaggatccacgtttttaaagaactaatggtattttaattttaaagatgaaaagggggggaagggcctttgttttgatcgaaagaggctgtgagggcaaagaagtgtacaagagcatgagcacactagtttataggtgaaaagccctttatttttataaaaggccagttattatctctgtgcctcagtttccaaaacaggaagtaagggaactcttgttgataacctgcagcgccccttccttctagaatctctccatcattctgtgactcgtttcaagtcaaatagagtagaaaataaggtttttggaacagacatctgaagccaattttttcttcattgtagagaaatagagagacagagtatgggcctgaatacaagctagcagaataaggctgctaggcctcaaaagtgggccagcgagaacaagggctg

SEQ ID NO: 50064 - DNA, 1234 bp, Bovine  19866880388352
  misc_feature (1)..(1): n is a, c, g, or t
ngtagaaagggagttttgtgcacttgggagcaaagcatagtacaaatcctttctgcatttctgcaaccagaaaccatgcaaatgtttttgcaaatccacttgtggtcttgctggtagtttttgagcatagccctctttgtgaggcagtgatgttgacctctgttttctattcactgtcctgccccaaagtgagcaccctgttttctctgtaaccgggtgggcatactcgtctctacctaaaacagagaggcgccagcctagctttgcctgaattcttgcacagagtgattttggttactcctgctttgggatcacttatgtgtcagctccagcccccttaaaccctcagtcccatccctgcgacaaggaagaactttgcagggctgggagcggctgccacctggcttcagaagctctggagcaggttcccccaggggatccctagctggggccgttttggcagttcatgtctatcttgcctattttgtcagtgaggatttctgtgaggttatttttaacctgagtgtccttactatgctgagagatacctttgtcacacaaggaaaccatgcctcatctatctactccccaaagaattttgaacgagaagcctgaagacttactgaaggtgtggggctctggccttgaaattggctataggagtcctttgaaggcagaggcacagtgtcgcagggtggctccagccctttggcctctcacaacacctgttatctttgtagccatcagtcctgtgaaagtgaagtgaaagtgttagccgctcagtcgtgtctgactcttagcagccccgtggactgtgtctgactcttagcagccccatggattttacagccccaggaagcctgccaggtttttctatctgtggacttctccaggcaagaatactggaattggttaccatttccttctccaggggatcttcccaatccagggatcaaacctgggccttctgaattgcaagcaggttctttataccatctgaaccaccagagaagtcagggagtcaatcctatccatgcctaaaatgcccctgttgagagtggtgatctctgttccttcatccatcttgccagggggacctaaaaggcagtttcaggtgctacttctgaaatcttgttatcagagaacagctgccttgacacactttcacacagtggggaatacatttcgtttgacttccagggcctccatggaagcttctctgggtttataaacc

SEQ ID NO: 50065 - DNA, 1799 bp, Bovine  19866880555524
  misc_feature (1)..(1): n is a, c, g, or t
ncattttaagataaggtttctttagaaataaaaactatacttaccacaatccattcagctatgttttcatagagctctggactgaaaattgcttttttaagcctcgctagaggaccatcagcatctactaatctgcaccgcatgaaaacatcacagtagcctctaaaatcattgcatggggatccaggttgcagggtgatagttcgaccaaggaagtacttgttccactgcacagaccctgtactggcacaagttgatggctccactgtaaaagaagtgcccaatataagctgaagatcagattctctattgggctagctgggaaaaagggagaaactgcctaaaatcatcattgtgacatgctacataggctttcattagttagactggataatacccttacttaaatatcacaacataaacaaccagcaactcttttgacttagagcctacaatggcttaaaatccttctaacagtgcatatattaattattgcaaaaacattggcaggtttcgtctagttcatcatgttaaaaacactgtagggaccacaaaactggaaacacaatgctatactacatttaaatatttctcaagagaatcagttcagctggaaattatctgtcccaactgtataccaaagtttaacacttaacatttaggagaaaataaggtttttcaaacagattttatactcgtgcattttcaaagccttactcttcttcatacagcagacatggcataattccttatcatctttgccatcagaactggcacaggtacactcctccaagccatgtttctcacagatagaacctgcacattgctgaaagaaaaataaaagaccaattatttaatccctatacagtcaaacctcttgttcccagtaacagacagatgcctccaatgctaaaataattaagtaaaaatacaagaggtggtgggagcacagattagaatcagaaatggaccatataaacacatcttaaaaagagcaagtgcaaataagatagtaaatcttaaaaaaatggtaacaaaaatctagacaaaacacaaacagaggtgattagatgaacatccactttatgttggttattatggctcctttataagaaaagaaaaatcaaaagctcctcatgtagaggaaagtgattgtttagccaagaaagctttaaaggcctcaaaggcagaggaaataatcaagagtccttttatttagggtactaaaatattaatttataaaacttaaaagcagtacaaagttacatgcctagttacataactatttttctctagagtatcaaacacacgcagtagaaagttgaaagacaagtcaataacaaatcgaatgccaccaggcacttatgccacataatgcagtcacagctttgtggggaaatagatacggatgctgaaactgggactgagatgaattactttaactgtgaggttttaagtattctgaaaaagatttcataaaattaaatgaaaaacaaatcaaatgcttaccccattaatgcacacttgcgtatgtctattacagtctgtgaagttcggtttaggatcagaggctgggcagagagctgtgatgccattacatattccttcttttgcacagtctgaatcatcccgacacttttcagtttttgacttgaatgcacaatgtgctgtacaacagggaccttgacttggactaaaagaagtactgagttgagtaaagaaaatcccactaggacatttccgatacaatagatacagtcttaatttttaaataataaatattatcttttaaatgttaa

SEQ ID NO: 50066 - DNA, 1247 bp, Bovine  19866880573357
  misc_feature (1)..(1): n is a, c, g, or t
nctgtgtcccccactggtacctcattaagcttccccaaagaggggaagccctgcaaagggaggcggagcaacttcagcaccaggcctgctccgccaccccaccccatgttgccccagtgagaaaaggagagaaagaatacaactatcccctccccagtgcaaatcccacttccttggtgaatctagctcctaaagggaaaaaggaagaatgtcaaaaaattagatgatgaaattgaggctttagaataaagtgagacaaaggaaaaaaaaaaaaaaagacttaataatagaactgaccaaatgttaggaaatctcaagatgctattaagggatgaaaaagtatgactttacatggtcaaaggcatggatgggagcaatataaaactgtttcacatttgtattcctctaaattcagactgaacaataaatctgtaacataaagccttagtttttattgtaggtggtccctttgaacttggtgaattgaatcaaacacgtgtatagagcattgattctcaaactttagcacacatcaggatcacccgagggcttgataaaatagacagttggctccacaccagttcctgacttagtaggtctggggtgagattgagaatttgcatttctagcaaggtcctgggtgatgttaatgttactactctggggactataatctgagaaatcactgtggtatggattagagcatcacttaagtgtatatttaacacagccttgaaaataggctcctgaacttctgaagaagccaatacaaatgttaattttatttatttcacccatttactttccctggaggaagcaaggcttgaaagttgcattagggctccattgtatgaaagaatgaattgaaaacccatcgctctacaaacagctgagtctgtgaggtcatccaggatattccccatgttcacacagcagctctgccatggagatggctgctacagcacaactttgagcaggggctcgatgtgcatagtcaagggtgtgtgaggaacagagaagttgttctgcttgcccctgaggaagcaggagtcatctttgcctcccccagcatccttgtgattcacagccagtcctctgtggtcaggctgacatctccccatcagaggacgcaccctctcatgtgaatgctgctcagtcaggtttgagtagagctgcggatgtgcatgctaactgcttcagtcgtgtctgactctttgcaaccccatggactgcagccctccaggctc

SEQ ID NO: 50067 - DNA, 1066 bp, Bovine  19866880601199
  misc_feature (1)..(1): n is a, c, g, or t
nattgtgcggtagtttgagcattctttggcattgcctttctttggggttggaatgaaaactgaccttttccagtcctgtggccactgctgagttttccaaatttgctggcatattgagtgcagcactttcacagaaagtagtaaatgttaaattacatgttttctattttataggtattataaaatctgggaaaagaataccaacgaggctaataaatgcaaaatatgtgtttcatttcaaaaaagggatcgtgatttgcccacttgttagtttaaaataaaagagaactgtcattcattaaataagcatttaatgagcgtaaattataagccaagctcttgtctttcctagatataagggtgttaagtgaaacttaagagacaaagagaagacatccaaaagttaaaaaaaaaaaaaaaagcttagaggctaacaaagtactaaatcaagtctgagaaaataatcctataaaagaaacagacagatgatgttcaatacatctacttatatggccaaaagaaaacaaagtagaaaaatggagtcaaaatgacaaaatgagaggccaaaatttaccagtctaatttattatattctaattaggatagttttttatttaataatctaaataaacaaaaaggacctctaggataataattaaaaaaacaggcttcatccaaaaaactgtgagggggaaagagcaagacagggaaagagcaagacagggaaagagcaagacaaacaattaagtatcttcagacataagataatctgaactgatttttaagatctctagaaaaagtcaatcacagaatcctctcagtgcatttccagtgttaacaacgctcactcacagcaaactcactctagacttcctgtgggtcataagaccatgtggggcccacagttccttgtcatgatactaattatgccatcctgcatgagcagaaagcttcccttctatccttcagaagatgccattgtccagactctgactaaatgttcttttatccttcaaccgcatgcaccactcctcacaccaatctgccaagcagaagggaacggcta

SEQ ID NO: 50068 - DNA, 2127 bp, Bovine  19866880634843
  misc_feature (1)..(1): n is a, c, g, or t
naaatgttggtgctgggagaactccggtagctttttttcacactccacacatcctttaccaaagaaccatgtctcaagttcagcacagtctcacaactttattgtttctgagcctacttttcagttgtctctgacaactcacagaactcattcatcaatctcatgtgaagcttttgctctaggaccacttttgtgttggacaactagttgatgcctggtatctttgcacgcagcagacactggacagtttgggcagtgcacagttggctcacagaacttaggttattatctccagaggcaagcgagatcttagaaaggattttataataattcagttatgttggagaccaaaaggaatgctttcaagaaattctaaattaaggcccagaccaattatccttgtcttatcctggtggcttttggatatgactaaacttaggtgtgcttctgagtagacacaggtgaatattcaagctgctaaggcatctgaagtacatatttctgtcttattcttctttaaaatttatttttatttgtttttaactggatggtaattgctttgcaacgtactgttggtttctgctgtacaacaggtgaatcagccataagcatacatatatcccctccttgcacctcccctcccacctcccactccatcccacccctgtaggttgttgcagagcgcagggctgggcccccgtgtcatacggcagcttcccgctggctgtctcttttacgcacagtgatgtgtatatttcatggctactctcagtttgtcctgtcctctctgttcccccgccatgtccacaagtctgttctctacgtctgtgtgtctgttcctgccctgcagataagttcatcggtaccatttttctagatcccatatttatgcattcatatgctatgtttgtttttctgacttatttcactctgtataacaggctttaggtttgtccacctcagttcatctgactcaaatttgttccctttatggctgagtatattccattgtatatcagtaccacagcttatttatccattcatctgtcagtggacatctaggctattttcatgtcctgttcattgtattaataaatagagctgcagtgaacattggggtatacatgtcgttttgaattgtggtttcctcagggtatatgcccagtagtgggattgccggatcacacagtagtcttatttctagtttttaaaggaatctccatattgttctccatagtgcctatgtcaatttacattcccaccaacagcacaagagggattccttttctccacatcctctccagtatttattgtttgtagatttttcatgatggccattctgactggtgtgagatggtgccccattgtggttttgatttgtagttctctaataatgagagatgttgagagcatcttttcatgtgtttgttggtcatctgtctgtcttctttggagaaatgtctccaaagaaggtcttctgccacttttctgagtgtgttgtttgtttttctgatatggagctgcaggagctgcttgtatattttggagattaactctttgtcatttgatttgtttgcaattattttttctcattctgagggttgtcttttcatcttggttatttcctttgctgtgcaaaacgcttgtaagttaaattaggtcccatttgtatatttttatttccattagtcttggaagtgggtcagagaggatcgtgctggtgatttatgtcagagtgtactgcctatgtcttcctgtaagatttttacattttctggtcttacatttaggtctttaatctattttgtgtttatctttgtgtatggtgttgctgctcagtcacttcagtcgtgtccgactctgtgcgaccccatagacggcagcccaccaggtttccccgtccctgggattctccaggcaggaacactggagtgggttgccatttccttctccagtgtatggtgttaggaagtgttctaatttccttcttttacgtgtatctgtccagttttcccagcaccatgtgttgaaggggctatctttgcttcattgtatattcttggctcctttctcaacaataaggtgcccgtaggtgcgagggtttatctctacactttctatcctttt

SEQ ID NO: 50069 - DNA, 793 bp, Bovine  19866880663559
  misc_feature (1)..(1): n is a, c, g, or t
ncacgtctatcatcttcctgtttctaggtagatgaaaactctggaattgttttaattacttcaacgacagcaattccaaactccaaaaggcacttgtgtaaaaagctgctcaaaacaactctcccaagtcatttggaattaatgaaataaagtcccagcatcctagcacagggctacgaagacctctgtgtcaggaaggagagtgtacagatggggaagaggggaagaggcgcagatttttggtgtatggggtggagtgaaactcccatttcagctgctggattcatgtctgggcatgtccatttgcctggctggcctttaggcgggacagtgattattcgactggattattaaaggagtccaacacaagaaaccttgagtgatttaatgtgtgcagactattaggagtttcatgatcattaagaaataaagccagcagggcaaaacatcaaggtcaattatcagcatgagtctggaaatgagaagagactgtttggacattaggacttcaaccatcaaattcaagagctcctccctttggtgacccggagtcagaaaatcaggaaattctcttcacccaagccagagcttcagctcattccccttgcctcagcccaggttcctaggtctgaaaacaaagcttttacacccttgttttttttttccctaaaatatcagacttatttttggacttcacctccgtcttcttcacatgctcaagctgcaattccttacagatgttttgacgtaggagcctatgttgaaagaagcttaactagtccctggtttggct

SEQ ID NO: 50070 - DNA, 2521 bp, Bovine  19866880795782
  misc_feature (1)..(1): n is a, c, g, or t
ntgaggaaaggaagggcaattctgacagataaaactcaccagggagcttaacaattactccatgaaaactgagtaagaattctcttggaaatagaagcttccttctaaaacagaaggataaaaaagaaattgcttttctccaaaattctcacttatttattttaaaatggaacagaatccacatcacagatggttccctaagtgctttactgccagacataatctatggttgagataagatacaaaatctacataaatcaaagctactgagcaaacattcacttctctgtaaacgtggctttttgtcaaagggaatatattcatattcatccttgccagccttccagttcaccccctcgggagacactcagacagaaaaatgtctaactaggcattcaaggcattcagctgatattttcattactttcggtaagcaggccagttaggagcaacatgtaggctaaggtcagtcattctggcatgtcattatgttacaagaacatgccaaacacacacacacaaggccaagaggggtagggtaagcagtcagctccctctggccgacagacaggaaagaagtttctctctaaggtgccagatcaaagttccccctccagggtccacacatctacaaagcaaaacaagatgacaagacctgggatctagtctcctgggttcttcagttggggaaagaaggccttttgtccagtgcccaaagcaaagaaacttctccaagaccaaaagctgacatttccactttccttaggaaggcaacttgagttgagaactggattcaaaaattatcttatttatatccccaaggctcaaaaagaacttgagtcaaagggtaaattgaagccggacagttcaccactagagaaaagtaaaaaaagctcaaaaaggcagcctcctgataatgtgtgaaaaacccctatttccttggggacacagaacttaaatcaggaatgtcaacaacatcaatcaggtggcactctctattacaggaaagaaactcacaaatcggctggagttgttgttccggaccgtcttggcattcccgaaggcctccagcagcgggttggactgcaggatgatgtccttgacgtgctgttacagcagaaagaccaaagttaggaagacgcaaacacctacccggcagtgaaaggctagacttgcccgaggacctggttcctgaatatggtgagggtgagaggactcaaatccaagtccctgggatttccggaggatttactctttcctctcaacagacctggccctgttggtatggtcatgtcttccagctcccctggcttgatgcaggattccctgcagccagggtgccaccacaaatcaggatctatgaatgttcccagactgggtttccagattggatggtgcagctttatgctatgctccctggtatatcggggaacataagaagaaggggtatcttcttgtcttctgaccagattcttaatcatcacgactcctgctctactcaacttctgtcctcacctactgcatgcccctcttcactgcaaatgagagttaccttgagggaaatgaaatagtttctcctcccctaacaacattacagacaaacagacctgtgcttcccaaattttcatgtgtctgaatcacctagaaatcacatcaaaatgcaaatactgactcagtaggtctgaggtggggcccaagagtccatgtttctagccctggtgttcctggtgttgctggttttgtctgtatagagccccatttgagcaacaaggatccacactggattgggtggaacaattcctggcctattggaggggaacaatttggttttcacataccccaattcagtgtcaggctgaaaagtacaaaacagcccatgggcaagacagctcaacagatacgagttgatgttggagaaggttttgaaccagtgagtcattccttgtacttctaattattcacatgctatggttaaacatgttccagaaataacaagcctttggcttgtgctctttagctactgactaatttcaagccaagagttctgtatcattgtcctcataggaaaacaggaagagaaagatcaacattaaatgtctgcagtcgggccactaggtcgtcgtccatagcaaatcggacgagatgaaggcactaaccactgattgattctgcaacagccaaagtgcttctctggcaccccctgaacattctgaagatcaacgagaactggaattccatccactgggcacatgtcattagcaatgggcacagagagcaaattttgggtggttcctccatggaatccatttcagagtttagaaagatatttctaagcagcctattttcctttaaaaactcatggatttatatgaaatttgcttttgttcgtaaaataattttgactttgtgggttttcgttaatcttctgtatttgttgtttgctggccaaacatccctacaccatttaccaacgcttcactttcttgtagggacagaaaaaaagaaaagctcttctttgtct

SEQ ID NO: 50071 - DNA, 1380 bp, Bovine  19866880853079
  misc_feature (1)..(1): n is a, c, g, or t
ncataatgtgggataagtagtcaaatactagagatgtaagacaaaaaatatattccaaagcctaattctaatacttaaatctatgtctcattcaactacttactggacaccttgaaacatgaagtaagttactttacctatgcacactgaactagcattttacaggaagcagccaaatcccagttttaactgtctcaaatagcttggtatgtgtatgcttacaatgatgattcttaaatttgaggaacattcccagattcccttgagaatctattagaagtcatagatccttgcttcagaaacacacacacacacacacacaaaacaatttttaagtgttgataacactgtaaatcacagcactgttgattcaatgggattggtatgagaacattttcgattcaatgggattggcatgagaaaattttcctactgttaataaagactgatcactaacattaaggaatagtctttgaaagtacgagaaagttcaatgaccatatccattcattcatctgcctcttttgctagctctaatggtgactggttgatgcaaatgtgcctctaatctagcctataaatcttaaaaacaaaaatgtttaagttctaatttctgctagtcttatacatgtaacaattttcaagcattacaaaatactgtgaaggaaagactaatacaccactatcaaattccaatatacccaaaccaacaatgaaacgtctgaatatgtaatttgttgacttgagcaaaataaaaacataattgctctaaattcttttttactttcaaggatgcaaaaccagatctctaagaaatttttttaacagaacatttaattttcccccacagtattcaaagtaaacattttatcattattactcttggtataccaaactgaattccaggaatgtaagaaagcccaactgggaaatattacatagaaaaaggctgaattaacaaacacattatatttcttacttatttcttataagtatacattgacatttacttatctgatagcagtactgctggttttgagtaaattttttttccttcaatgggaatgcagaatggcagtgttgtctttggaataaattaagaagacagtaacaactaacagaggaataacttctacacatatgtttttcaagggcaatgaatagttaagaatatacttatggaaaagtatgcctcaaatacattttaaaaaatttctcaggatttattgttttgtttcctaataaaatataatgcaccgacactgtgtttcctcctttaaccaacagagtgatatgaagaataaacttggcctaaaactcaacttgtttgagctaacagagaactgtgtagcacatcttatatctgattacttgagcaat

SEQ ID NO: 50072 - DNA, 1660 bp, Bovine  19866880870098
  misc_feature (1)..(1): n is a, c, g, or t
nttactgaggcttagaatgtaaatcatgtaactacttacagcagcaatagtcttcaaaaatgactaaaccaaacttttaaatataaagcatataaaaaggactatcaaggatagttttccaaactatagaaatacaggaaaatatgtgttgcctcataataaagttcaataaatattctttctgaatcctagaaacactataagatgttataggttatttggttcttataagttagaaaaatctgattgtttctacataaattcctccaaattcttatctatcatcaaacagatttttaataatgcttttctactagactcagagattatctctgtctaacatcccttcagaaatgtgcttttttttgatttaataagtatacttaattttctacaaaataaacatgatttaaattttaaggttcaaggtaattatagaaaaaggtagacactgaactatctctttttgtacatccctatatttacaagggctagcatccactgtggtttcctctttatactcacttgtcacactgaataaatagtaactgtggtccaagtaacctatattaaagattttaaaactcctcaaaattttacaacactacaaagttattaagatctgattttgatgagtattagtgttacataattttgctactggaaaagaaatacaaatctatattttttttcctatctaaattaaatccaagttccattatcagtttctcaaggtatatctaaaatgtacattcctaaacaaaggtaaagctgttcaagggctgaactagtccaatatacaactgagggttatttattcttattatttttgtcttttttttttctttttaaatctatattaaacccctggtttctcatggatcagatcataatttaacattgtaaaaattaatttcagaaactattgtgctaatatttagatttgaggaaggaatcagacaaaatcaattatctctattcattgttagaacagaagatgaaatagcttactaactgatatgagttatgaatgtcactatgacacaaaatttgctgttatttacttatttggctacaagtgcattatttttcatgaataacaacacagcatttccaacttgtaacatgaaactccagctcataaagagtgtactctgtgatttttaaaagtctgattgtaattaagtaacaacctttcccctgataaacatgaacaaaatccattggtaaatcaggcacagacggtatttatcggtttttcttcctttcctcctatggttgtttttgaagacatacagatggctccaacagaacccacacttgttataaaatgacacaactatttttctccttttccttttctttatctttttctcgtggttcctttcgtttacgttcactgtttccagattgtctgccacttgatggagaagcttgcactggctggctttgctttaaggaaaataaacaggaagaaattatcacaatttttctaagatgcttaagcagagttacctaaaaagaaaaaccatgagagtgaaaggaatcattaatggaaaaatgactgctgctgctaagtcgcttcagtcatgtctaactctgtgcaaccccatagacggcagcccaccaggctcccctgtcccgggattctccacacaag

SEQ ID NO: 50073 - DNA, 1724 bp, Bovine  19866880895974
  misc_feature (1)..(1): n is a, c, g, or t
natataagtcctctttcagatatatgactttcaaatattttctcttattcgctatcttgtactatttttttttttcaaagaacaggacttttaagctgtgaggaccagtctatcattcctttcacgattaatgctttttgcattgtgtctaaaaatagttgcctccccaaggatgtaaagatttttatctgatgttttcttttgaaggtactatagttttaattcttaagcttctgatcccttttaagttaatttttgtatatgttgtgaaataatagtcaacattcattttattacatgaatgacagcattgaatgaccttggcacattgtggaaaacccactgaacatatatgttttgaactattactgaactctctgggtgttccattgagctatgtgtctatccttaaaagactgccaccattgtcttgattattgtaaccttatcataataaggtcctttacagcaaattaatccatagattcaacccagtttcaactaaaatcccatgctttttggatacaaattggaacactgattctcaaatgtatatggaaatgtaaaggaccttgaatagcaaaacagtttttcaaagggaacaaatctgggtactcaattccaaggcttattatagtaattttttaaggagttaggcaaggatttcactgtggtgtcgatctcctcagcttctttctcttcatgaaattcaccatgataatcattacaggtatgttattaagaatgctgcttactctcacacagggttcctttaatattatctcttaataataatatttgtttctagtttcaacataaggaagattcctgattcttctgacctatattaccttgttgatacttgtgaatcttgtagctgattgcatttccctattgcctttggctgaaaggaatctaaagctagatttgtggctcttgtctagaatttgtccaatattctatggtatgtatttctgtatcacaactatctctgggtaaattttcctatcatttatttttcattggttctctacagtctaattctatttaggtttctaccctgatattccatgtgttcatgtaaactcttgcaaatactattagagaataggactgggaatgtttaaacatgtaagtaaatgtaataaaatatggttcatttaaagtggcacttagggcttccctggtggctcagtgataatgaatctgcctgccagtgcaggagacacaggttcaatcgctaacctgggaggatcccacatgtcacggaacaactaatccctgggctaaaactattgagcactctgccctggagcccacgtgccacaactactgagtccatgtgctgcagctactgaagcctgtgtgccctagagcctgtgctccacaatgggacagccacagtgagaagcctgggcacccaaactggagagtagctctgctcacactattcagagaaagtccatgcagcaacgaagacccaggacagccaaaaataaaataaataattattttaaaaatataaataaaatggcacttatggcaaagaattagtgtgtatttcacattgagaattcagtttcaaacttttagattgcatcactatctcattgttaagttttgttgcataaaccaaaggtgaagcagtggaaaatatttttaacgtgaatcatcttgtctttgtgtactgcttaacacttaatattgaccacggtcaagtaatt

SEQ ID NO: 50074 - DNA, 1594 bp, Bovine  19866880911781
  misc_feature (1)..(1): n is a, c, g, or t
nctttgttgttaaggtttcaatagtgatgtccctgaggcctgttctatcaggcaatgaaggactctaaaggtccacaaccaccttccactttcaacacagcaggatttgctgtgttgaaaagtagaaaatttctgttacaagtctctttaaaaggagtcattatattgcagagactataaaaatggttcccaaactttagcatgcatcatcacctactgactcagcgggtccaggtgggacctgatcatatttgcatttttatccagttcccaggtgatgctgatgctgctggtcaggggactacacttttgacatccattagtctagatcaggcttagcaaacatttcctatcaaagaccagacaaatattttaggctttgtgatgccatgcagtctctaagtgcaaaagctgccataagcaatatgtaactgaatcagtgtggccatgttctgataaatcattatttatggacactgaaatatgaatttcatgtaattttcaaacgaatattattctcatttttttcaactacttaaaaatgtgaaaccattcttactttgtgagccatataaaaataggccgtgggctgaatttggctcatgagccatagtttgccaacctctgctctacatgaatgattggttctcaattccagctactcatcaaaattgagtgctgggagctttgaaatgacccaaacacttaggctctgttccaagagattctgatgtaactggtctacgttgttagatgattctcatgtacaacatgaataaaagtcaggtaagtgtggaaaacgaagttaaaaagatttcttactgcaggatgtctcacaatattatcacaaatctccaagatgggaaccataatatgcaatattttccaggttcatttgacaaccaaccgcataatggtttcgtaaaacacatggaaacactgctctaaatctttcataaagaataccatatacttaatactcaggttcataaaattacagaaaaataagaaattaattcaaaaatgagaaacacatttgatgtttgtcaaaaataataatgaaaagataaacttctgacaaatctgaacaaattaaaaagaaaaaagccaccaacaggcaattatcttaaagtgtgggggaaacacaccaataaaactaaaaaaatcaaggtcaaagatggttttctatgtcagattgaacacaaaaggtgcagaaaatgtgaattatggaagaaaacaaaaaagaattaccaatgcacctatttaaagaaaaaaagacagtgatacagggtcttaacagatttcctggtgaattttctccaacttttcatgaactaggtaactctctgataaatctaaaggatgtttatcattatctcctggccagacacacagtagacactcagcctactttattcaaacgttactatcaagaacaacttttccccagaaaagaaaatgtctttttaacataatttctttggtgctggtagcaggcggtaactcataccctaaactattaaactgttatggttcttcccactctaccttcaagagggaaaatgtcaccacaggataccaggaaaggagacaa

SEQ ID NO: 50075 - DNA, 1861 bp, Bovine  19866880919149
  misc_feature (1)..(1): n is a, c, g, or t
nagtgggcagcttcccccacctgccagggttcactcccccagcaaccttatgaggtgagtgcgcatgtaaaatcatcccccattttaaagatgaagaaactgaggcttacaaaagtcatcacaattattaaggatcaaatgaaataatatatgcaaaatcacttagcagagtgtccaacaagtaggaaataaatggtacctacactgccttctttagggggaagaattaggggaggagacatttagggagtttgaaatcaacatgtacacactgctgtatttgaaatggataaccaaccagtgcctactgtattactgcccaggaaactctgctcaatgttatgtggcaggctggatgggagaggagtttgatggagaatggaaacatatatatgtatggctgagtcccttccttgtgcgcctgaaactactacaatatttttaactggctatactccaatgtaaaaaaatatttttaaataataataaaaaataaaatgccttctttaaacagcagaacagagaataggagccaattagccttgctctcagtcacaagaaactggagagttgaaaaaaggcctcttgactcccctggaggacaaacaccaggcttcggactggccacacataatgagaaaactgctgaggagcaaagtaaaagggccatcgagaaagggcttggcagggtccaaagtgccccagcacaccggtgagggcagtgtgagctctgatggaggggtggcagaaataagtcactctgcaggcagctcagacagcagtggcagccccacggccctctgtccttcttagacggcccctcaccccaggctcagctggtccacatttcagctgtcacactccccatctgggtaatggagtgttatgaagcatgttggaggccatcaattagcgcttaactccatgtctgttgggtcgtatttccaaggatgctccactcaaattcatggcagaggtaaatcttgctccttttcattcaatgacttggagttaaaatgccgcccaacagtttctcccaaagaaattgagatttatgggtcactgtcaatatcaacacatgttgaccattatttgagagcctcctaggtcctcgggactgattgctattcactttgaaagatgactgtggctttataatccactcaggttgctgcattcgtttcttcccttggagacttttttattccacttcatgatgttttgcttggtggcataagccccattccccacaccctcaaccctatggatactctaatgtattcgaggctctgggacagacacaagaggggcccactcatcttcagtccagaggccggtgtaacaacagggagaaggcaccttagtaaaaaagtgctcctattttatgaactgaagccactagacacaatctgaggttaccgatgagctgcttgaggggcaataggtggggtcccctcattaacacttctggcctttggtgtgtctgggaagggtgtggatactgatacaggactgagtcacttagatcagtgatattgacattggttctcaaacatgagccaacatcagaaatgccaggaaggtttgttaacagagatttctgggccccactccagacttcttgcttcagaaggtcaagggtagggcccaggactttgcatttctaatgagattcagttcagttcagttgctcactcgaatccaactctttgagaccccatagactgcaacacgccaggcttccctgtccatcaccaactcccggaccttactcaaacttatgtccatcaagttgggggatgtcatccaaccaactcatcctctgtcatcaccttctcctcctgccttcaatctttcccag

SEQ ID NO: 50076 - DNA, 1782 bp, Bovine  19866880970871
  misc_feature (1)..(1): n is a, c, g, or t
nttcttgtttgtgcagaaaatttactccaaagtaacgtctcaacatcagcactcctgacgctgtgggtgtccagatcctttgttgcggggggtaccctgtgccctgcagggggttaaacatccctcgcctttaccccacagatgccagtgccacctcctctacctggtgatgagcatcaaaaatgtctctggtgctcaggccctaatccagttttaaatgtatttaaatgtcttctagctttaaatgtattccttctacaaactatgcttcctccagtcaccattcataccttgccttaaaggcatggtcctagttagtgagatcttgaaacatgtctggaataaccctttattaaatatgttcatcaaaagcatttagagaatgcatttaggaaacaaatagagcaaacacccccttgcccctttaaggactaactaaagtgaagcctatgttcatttgcttctgaaagaaacttaagacttcttctaagaggggccggactgaactcaacacagtggggctggctgttaggtctggccgggcctgttaacacctgtgggagggcggaggaaaagggagggtacttcctggggcctgagttctggagagaaaaagcacacccagttttgagcagtattctgaagaggccagagcctcactgtcctcgctgaggtcctgtgacaacagatgctacggggtgctgatgagcaagtcagatcatgagggggtggccgagggtaggggggtactggctgctagctgtccccagcaggggtagtgttccttgagtgcttcctgggactccctgtgtagaagggagcaaacgccaaggtaactcaggctccactcttctcacatcaacccccatgcccaccttcccacccccacaaggcacttttatggaagaggaaagacatcgtatagatcgttagcatgacatcatttccttcctagtcttggaaatccccatcacctgcttgagaaagcaggctggctggataagcaggtttttaattaagtaacctatatattagagatgtgtcagcatttggttaataagagccattagcctagataccagaagtcatctgacttcccagcaacaaggaatggggagtgggggtgcatttagaacaccctgggcgggaggaagcctgcagtctggcacctccagggagtggggctgggaggggatgtgcgcttatgcacacacgtgcacacacacacactcaccattcatagatggagagctggcctcttttttgtccatggggagaaacccagcaccattaatgcaggtggttggggtgtctggagcccaagagtactgggacttgggtgcattctctgggcagggggccctcttagcatagaggcaaagctgggtgactctctgaaaagaagggccagcctgcctgcagccttcccaggagtctccctccttgctcctctgcccacctgcccccagctttggctgaggtcacccagctcctccccttcatgccactcctgcccgttgctttctttcaaggctccctgaacatcagctcagtgtgttatcagtttacctcactcttcactgatccttctaacagcttcctcctgcccttggcttacgaagtccctgccaggtgcggccccacttgctccaagcctctcatcccgctgcaggccacactggcatcttcctacctctctccatgcagtccgggccctggctgggtttaggacccctgtccacatactcctagtctacatcctatttgctggtgacaaatata

SEQ ID NO: 50077 - DNA, 779 bp, Bovine  19866881032380
  misc_feature (1)..(1): n is a, c, g, or t
ntttggaaccactttagggaagtaagccccattacccccagaggattccagtacaaatggacagattttctgaatgccatactctttcataatcagatttcttgaaagaaaaaaaaaaaaatctgattcaagccagagttccaaggaagtacaggctaagaagaaagtttggaaggggaaaaaaaaaaaaaaacaaacacttttcagcaagaaaacacagcctctatttgctttctttgctggaatccacaaaaggagaagctgtagtctgaaactacaggatagccagcaagatcaggcagagtagacaaagaaaacagaaaacaccagacttgtgaaaacggtcttccttccatacctcatctcatcatcttacatgacaacagaatggtgaagactagaaagcaaaaacaaagagccaaaaagaacaggtgaaacaggaatgcaaaagaggatgggaagatggcaacctctaaaaggtataacttaacctcagcagctctagatctcaaagcttttttgaagacctgctatagagttggccaaaagtttgttcagatttttccatatgatgtaacagaaaacctctaacaacctttttggcctgcccagtataaaataaattcatttgagacaaacttaggaatgtctgctgagttcaaaacaatattctacagggaaatagagtcaatatcctgtgataaaccataatggaaaagaatataaaaaaaatatatgtataactgagtcactttgctgtacagcagtattacacaaca

SEQ ID NO: 50078 - DNA, 1319 bp, Bovine  19866881034887
  misc_feature (1)..(1): n is a, c, g, or t
ngaaaacttgaaagtgacacaggacgtcataaacattttgggcagagaaatcaataagcaaccaacatgacaaatggctcacaggaacattcgagactcctcttggcatggattacttttcacttgggaagatgtgttcatcgacatcacattttctgaagaacatcttaggagggaagtcaaatagggaaactgaataatgcagccacatctgttcattgcacatgcaaaatgctggctggttcgctgattatactcacctctcctccaaagaatctgtatttatgagcccactcaggaaagataacactggcatcttgcctttcaggcaaaagcctgtttgtgctttacttgtaagaaagcacaaggaaagaaatgggccgtcaataacactgcagctgggctctttgaggtgccccaagtcagagagagggaaacaagcattccattcaacactaaaatgcatgggctgccctccagagcaaagctgcctgtcctcagcattcaccttgataatgttgccacaaacactgaaattttggtggtcgttacacatctctggggtggcaaagcaagaagtcagactgcccagggcaaggccaggtctcccacagagcctggatgagagggaggtcagatggatggtaaataaattggcaagaagaagcctgaggggacttccctggcggtccagtggttaagactgaaccttccaatgcagggggtttgggtttgatccctggttggggcgttaagatctcacatgcctcgccaccaaaaaaacaaaacataaaactgaattagtattgtaacaaattcaataaagactttaaaaatggtccacattgaaaatatatgttaaaaaagagggatactaaagtcaatccacagagtcaccaccaacctgcttaccttatctcatactacaaactttttgaattccaatgatctctgtgatgaatggcccccagcaaacctcattccttccactggggctcaggataggctgccctccaaaatgccacaatggcatattggttattttggattaaagttacttaggaaatggccagtgcaagagggacacccttttgtacctccctaaaagcagggaataaatctctcctgtgaaggtgccctttctgatctgaaggtaggacggacactcttatcaccaaagaactgggtctgagaagcctgtataaacaaagcttgtcacttctttaatttactaccccaagaccaaactctgcttatattctttattaatggaccacccaaaacctaagtttcttcgtcctgtcaattcctcacaaatg

SEQ ID NO: 50079 - DNA, 933 bp, Bovine  19866881093941
  misc_feature (1)..(1): n is a, c, g, or t
ncctcgttttccctatttgtaaagagaagataatacttaactcttaggtttgtggttaacagcaaaataatgtagcacttaatccagtgtctaacatgtgctgagtattcaacaaaggttattagcacctttccacttttcccttttcccagttaaatgttgtaagcactggaaaatgtgactagggtgtttctattagttaaatctcattaaatgagaaaaatattctccttcttttatgtttaacagtaccatgttataactgttcctttgatttaggtgtactaggaagcatgatgtcttttaagttatgatgaaactttaaatatagaggtctctattaacataggtataacatttctatttctagctcaaatattgataactccaagcttaaaagttgaaacctaccatcttatggttagcttttcactgaagttctctcatttcacagaatacacatttcacaccgagtcctcaggttctttttccctccttttaaaatctgtttgttatagtatgtgtaataaaatcttggataactactatagtttgcctaaaaggtgtcactttctttaactttcccaaactttaacataaattgtcttcaatttgagtcttcaggcagtataatgctacatgttatttattgtttatttacttacaataatggatacattaattatatctattctgaatgatagaggcaattatgcaggtaccatataacattaaaaatttatataccagtagccttttttcctggagaaggcaatggcaccccactccagtactcttgcctggaaaatcccatggacggaggagcctggtgggctgtagtccatagggtcgctaagagtcggacacaactgagcgacctcactttcacttttcactttcatacatggaggaggaaatggcaacccactccag

SEQ ID NO: 50080 - DNA, 1354 bp, Bovine  19866881101154
  misc_feature (1)..(1): n is a, c, g, or t
naatgtctgtctggttctttggcccactttttgattgggtcatttatttttctggtattgatctgcatgagctgcttgtgtattttggagattaattcttgtcagttgtttcatttgctcttatttcctcccattatgaaggctgccttttcaccttgcttatagtttcctttgttgtgcaaaagcttttaagtttaattaggtcccatttgtttatttttatttccgttactctgggaggtgggtcacagaggatcttgctgtgatttatgtcagagagtgttctgcctgtgttttcctctaagagttttatagtttctggtcttgaatttagttcttcagcccattttgagtttagttttgtgtgtggtattagaaagtgttctagtttcattcttttacaggtggttgaccagttttcccaggatcacttgttaaagagattgtcttttttccattatatatttttgcctccttttgtcaaaaataagatgtccataggtgtgtggatttatctctgctctttctgttttgttccattgacctatatttctgtcttttgccagtaccatactgtcttgatgactgtagctttgtagtatagtctgaagtcaggcaggttgattcctccagttccattcttctttctcaagattgaagcagtgatttttaaaatatatttatttatttatttggctgcgttgagtcttagttgcagccagcaggatcttttatcttcattgcaggatctctggttacagcatgtggcatctggttccctgaccagggattgaacccgggctccctgcattgggagcactgagtgttagccactggaccaccagggaagtccttagaagcaatgatttttagtattagggcatttatatttataggttcctggaacctgggagagtctagcatgtaacaaggataaggaatagagtaactgattaggaattgtagtagacaagtaggcagcttggaactagggaatcaggaaaatctgtaacaaagggaagatgagataagatgatgagtaggtcagaagcccgggtctgttcagatacagttgaggagatgggtgattatttaagtgcatcagtaagatttagtgatagagttgcattctgttcctacttcttgaattttttgactggttgttaaagtataagaacaaatctcagttgagtaggttgagactgcatgtgggaacaggcaattttgtggtgtctgactgagctaagtagtgcaagggtaggagattggcatgggctcctgtggagtaaattgtgccaatttcaatcactagctgtggaaatcaagggtatacatacatatatatatatatata

SEQ ID NO: 50081 - DNA, 818 bp, Bovine  19866881116142
  misc_feature (1)..(1): n is a, c, g, or t
ncctgggtctcccacactgtgggcagactctttaccatctgagccccagggaagccccttaaacatagtaggtacttcataataaaaatggaaaagatgaataaattggataaagtggaaaatttatagtaaatgtgcctgtatttaaatatctttttttgtcgttgtttttctcatttttttctcttcccctttctattttcagaatatgagtgatgctatggcagtgttgcacaaactacagacaggcttggatgtaaatgtaaaattcactggtgttcgtgtgtttgaatatacaccagaatgcatagtatttgatcttcttgatattcctttgtatcatggatggttagtggaccctcaggtaagtacaaaatcttaaattatatgaacacaaatatagtaaaaatttattaatttggcaaaggaatctaggtttacattttctgatatttatatttttgtgtttttacatggaattagccacattgtgaggttaagagcacagtcccctagactgctaaatctgctcaagacttctgactataatttcatggagttagaggccagctacagagctgagtgcacatcctcagcaacacctgttattgtctatgtttttgattatagccatcctagtaggtgtaaattgtctctcacttgtggatttgtttgcatttctctaatgattaatgttgttgattatctttccatgtgcttattagccatttgtatatctttagagaaatatctgcaagtctcttggccatttttaattgggctgtctgtctttttgttacgggttctaagagtttttt

SEQ ID NO: 50082 - DNA, 870 bp, Bovine  19866881123416
  misc_feature (1)..(1): n is a, c, g, or t
ncccacggctgcgtaattgccaacttcccttgaagctgatgtttcccaggtggagaatccccgccactatctgtagtaccagcgcctgctcctccgcaaagatcccaatcacgttcatggcgtgctggaagaggggagagaaatgacccagacaagtcagtcactagctatggaagcacatcagaaagaaaccaaagcttggatggggttgtgcagttacacatggcttagtccgtgatggcagctggaagtcaccataagacattttcactggccaatgccctctcacacattcaagtctcaacacggtgctggaaaggcagttcagtcttaaaatttcttttttgtggtttggtcattcagtcatgcccaactcttctgtgactccatggactgtaacccaccaggctcctcagtccctgggattctctaggcaggaatactggagtgggttgccatttccttctccaggggattttcccgacccagggattgaacccacgtcttctgcactgcaggcagattctttatcactgagccaaaggggagcccagtaaataacctgccgaatgtgaacatgtaatcgtctagaaatacatgcgagaaggctctggaggaaagatattcagatgcagaggcagctgcctagtcaacaagtctgttcttatctcttaattttctccttgttgccaccgtctccctctaagggcaccagtctgctttccagccactccaaactctcacaaacatttctcttcattgggagggctgagaataaattgtacttgcaaaaggatcttgaaaaattccaggaaaaccaaataaaagaatcattataagagctttgtttctgagatccattaaattaaa

SEQ ID NO: 50083 - DNA, 1366 bp, Bovine  19866881241160
  misc_feature (1)..(1): n is a, c, g, or t
nagattctacctataattaagtcactcaggttgcttttttaggcccaaaaggtagaacaggtgtggtcaaccaacagatgttagtacttagaactgctgttaccagagccaaaacatcatccaaaatctctttaatcacatttcctactaaaccctttcaattttttttttgtatcagcagctagtttcttcttcttaagggaacacttcactttcttaattttaatttgtcagaagcagaagagataagcatcaaaaatttaaaagacaaagcaagtaatgtacttgagcaaaggggagagggtacagtggagcagttactttgaatttcactttaactttttctagcccattttttttagcacatgtgtcacttaccattttatattacccattttgttttttaaagtatgcaccacccaggtttacatcacaattatacacagaaacaacacagcaaaagttaaaatagcacaaaatacctcactttatttactccatgtgatcaccaatacgaatttaacattttttgacattttaagtactcactatcaaccaatttacttaattagcaaaaaaaattactgataattttttttgctgacatttcaattttccagaaactaaaaacctaatctgctcctgagaaacaggaggttcctccctgtatggttttgcagctgagaagtctgtttatttcttatgagtggagatgactgggaggctccagaagaggaggtagaggaaaaaactgggagaattccccaatttctcatgaatgaggctgacactgcagtttcaatacctttgtttgaaatggaatcctaaacattaaatccacttatatttaactaaaaacactgaaaaacattccagaataaaaaatagtatccaattatccacatccctggtcccctcaattggttgcaatcatttacaacatgagaaaatcctaaatacttaatttaaaaaaaaatcacagaccattaaattacgccactcttgcaggggcaaaaagaattacttatttggtacataaattttatcattagattttttttctccggaaggaactgcaattttaaaaaattaagaagaactcatcaaattccacatacctggtcatggtagctggtactagaagtactattcgctccacaaggtggttgtacttgtggaggtctttccacaggacaagtaggatcactaaaggaaggagaaactgggacagctgggtggggagtatgatgatggggggggatgatgctgaaaatggtggccatgctgctgaaagcaacttgtgtgtggatgtcctaatgcatggtgattctgcgatgaccctccacagggcgagtgctggggacag

SEQ ID NO: 50084 - DNA, 1025 bp, Bovine  19866881279261
  misc_feature (1)..(1): n is a, c, g, or t
ntctctccatgtctgtagaatgataaagaacttttgagtgtgatcaggagactcgtgtacaaactagagcagtgctgggtgagaagcaacagctcccttcctttgggctgggagccacccattcacctgaggccttgttaaaggcaacagactcttaggaactttcctggatctcaccagcttctctcctcacgttccttttccctggcaagtcttccctcatgtgggcttcagagaggaaagcactttggttttaagtatgtatttgtttagctgtgctggctcttaatttggcgtgcagggtcttgtgtcatgcaggacctggttccctgagcaggggttggacctgcgccccctgcattggtagcttggggtcttagccactggaccaccagggaagtcccagcaccctggttttatacaaatggcatcaggacagtggccaccactttctattacatctctccctgctcccaccactcctgcatatgtagctctatcccgccagttctcatgatcatagttcgcttgattggcttggtctaaagaggtggttctcccactttaacgtgctccagaatcacctggagaacttactggcccacttctggcatttctgattcagtaggactgggatggggcccaagaatttacatttctaacaagttttgagttgatggtgatgctgttgatccagggaccacattttgaaaaccacttttatcaaatcattttgatcaaaacttctatgtaaaggtgaattgaggggtgctattgcagcaacaggattcttactccataatccagacctacactactcagatggatgaaacgaaaataatcaaacaagccttcttgggcccagtttgagttcccagagtaggcaggggattaaaaccagtcagcaaaatgcaccaaatcccttagctctgtctgctagcttcctacttgcttttgggttttggcaagcaaaaccatctttccaggctgctttgcaagttacagacttgcaccccagccagctg

SEQ ID NO: 50085 - DNA, 1150 bp, Bovine  19866881280351
  misc_feature (1)..(1): n is a, c, g, or t
ntgtgtttacggacctgtttttgctctcagagagcaaaataggtcacagagtgattcagttgcagggtggaagggaaccccttttctagtgtttccaggataaggcctttgacatcaacttggctgtacttttcgagatgccaacctagagcctcacagccctggggctggatgaggctgggtgaccacatgtgggtgcaaaactcatcttgagaatcatccacagatgatgccccaagttcttgaaccctggtgtgactgatggagatggaggtcacaaggctcactcacaggaggtggcactcttacccggcagcaccctggtctgggaccttgaggaaatccaagctctccagcgcctgtgatgctcggtccgagccgatggactgctgctgtggcaaaggcgggcgtgccatggacgtgtacaggctcttctgatttgacctctggtttccagcagcatagggatatggcacaaactggtttttaatgactccattctgatgcaatcctagaaagaggaaaacagaagaaaacaaagctgaaaatttctgatcctgtgctaaaaggctcttcaaacttttcccctctattagccaagagtaagttacttagctttgccaggcctcagtttcctcatctaagggcataactgctaacatcatatattgtgaagaacagacccaagacatcgtaaactgcctggcaatgtgtggaacacagcagactctcacgtgtgcttgttgaacttgacattagaactaccagatgttcagggtttcaaagccgacagtcaaagaaaggtaagcttctgactagttggaaggcacatttttgggtctaagaaaaatgacgaggttatgattcaaaagggctggcaggcagctgtttaaacacctggacatcccttttcaagggagtcagtcctaggtgcactctgtgagagccagtcaggggagacggagagaggagtccacacaggcaggggaaatgtggccactggttggattaatctgaacagagcaagctctcctagtcaaatgactgctcctagtcaagatcacattatctggtgagtggatggattacggtgctgcgctccacaccgcacaccttgcctgaaaggggagctgttgctctgatcacacta

SEQ ID NO: 50086 - DNA, 1831 bp, Bovine  19866881303433
  misc_feature (1)..(1): n is a, c, g, or t
ntgtgggctcccttttgtttgttttccggggtcaggattaatgaacgctcttgtgcttctgctgcaaaggaaagagggaaggaaaaagatgtagagatgggcaggcctggggaagtgatgagccagagaatgaaatatatgaattaggattacagattctatttttatgtcacaactgaaatggctacagagctgggcctgaatagggatgagggtgtcacattaataagtgaaataaaaaaagatttgctttttatgttccagtcatagccacggtttcagtgatttggaaagaatggttcccattgcccaatttatattttttaccagttactgaattttttactctttagagttttgtgacgtatgtggaaggaggaagatgcctaaagctgtaagtcctacattccattaaactaacattgtatataacgttccaatattaatagtcctatgctttttctgagctgtactctaaagagcagcacatcattaaaaaaatcaaacaatgtcacctatttaagctgcccaataaataatttatataagaaaatgcaaatatatggccaacttcaattgcccatacatcataaaagccccaaacactgcagtaatttatgtggcatgtaacttaccgctccttggtacatttcaatttccttttccccaaaatatggcatctgtttgaaagggttgactgagattaatacggatcctatatatgtctgaatttaaatccagttaaggtctatcattaatcttcacagctacacatttttcaaattaagcaaccagatgttatcaagaatttataacgattgtcccaatgaaaagctcatgggtttgttttctaaaagattacaaataaagacaaaagcagttaccaagtagttcaggttttgttcttcaggaagagtagtgaacttaattaccaaggtgttataaaaataaatcattactttaagtgaattgaaacacattctctcaagactggtgatacgcatggctagggaaaaaacaaaacaaaaacaaatgatcaaggactaaaaagagcaaatattttttttttccttggttctcttaggtatactgagaacatattcatttacttgtttaataaacagagggatataagatgaactgaacagtcctgctctttagaagccatggagaacagagttgtatccataagtagaattcagagcagaaaattacaaacacatatagatcaggttttggagaaggaaatggcaacccactccagtattcttgcctggaaacttccaaggacagaggagtcttgagggactacagtccatggaggtctccaagaattggacacaagtgagcatagatcaggtttagggaagaaggtgttatttatgtatgggaaattctggaaggcccctcagaagaaaacgtgttacttatgtccccaaaatgaagtgctattataacattcaaaatgtttctatttatcatataacaataaactagttcaaattggatgtctacaacttgccaggcactgttacatacgctggggatatacagcagtggacaacagagagaacagatgtaaaataccattaaaaaatgcaaacatcaacaaaaaacaaaacatacacaatactcaaaattgtttcttttaatcaatgacttctacatgtttagaaagtttgcagttaagaatgtaaagccgggactttcctggtggtccagtggttaagactctgcctcacaatgcaggggatgcaggtttgatctctgaaagcagtgagatttccttccccaaagggacatttatatattaggacctgagtgtcaaaca

SEQ ID NO: 50087 - DNA, 1163 bp, Bovine  19866881331044
  misc_feature (1)..(1): n is a, c, g, or t
ngaaacagttgtttaacacagaataattgtgaaatcattttagaattagaataaaccataataagatattaattcaaactgtttattttttgtaggtcagtatggaaatcctttaaataaatacattagacattatgaaggattatcatatgatgtggattcattacaccaaaaaccaccagcgtgccaaaagagcagtatcacatgaggaccagtttttacggctagattttcatgctcatggaaggtaagtaaatttattgctgattatgtctgaagttccattgtattcaatgtatgttaagagaggaaatttatacctttcattttccttctctaatggaaaggtccccatttgtaaattcaacctacactggaatttggtgtgtacattagaaacggttttcttttaaaacagattggccttttatattgttaaggaaacaatcacatttaaatgtttttaagttcatgaatcagatcctcagttgtattattagaggatatgtctttaaaaaagagtctgtgtttgtgatttccaactattttttatgtgttttatggcctatatgtctattccgtggtgccaacagtgaaggtagctggttgtaggccattgaatgtcatttaatttctcattaactcaattttatcagctctaaaatgacaacttgtagacagatgacctactgtactgcttaattctcagtatcgttaaggaataaagagcaagggagccaagggagagaggtaaaaatcacaattatttagtgctgttgtgttccacgtacaaggacatagatgctttatatgtattttcttatttactctctcaacatccaaacaatgtaaatcgttttatatccaaggaaacttaagactcagagaaaatagcttctttaaagttatgtaggacgggggaggtctgtgctgtgattcacagggttgcaaagagtcggacatgactgagcgactgaactgaactgaactgaactgaaagttatgtagcacagggacttccctggtccagcaactacaatcccgtgtgctgtatagtgtggccaaaaaacaagttaatagcacagatttgacccagacctggctgactcaaaaccctgtatttttttctttgactgctcagtcgtgtcccactctgtgcgatc

SEQ ID NO: 50088 - DNA, 1491 bp, Bovine  19866881345013
  misc_feature (1)..(1): n is a, c, g, or t
ntctgaagaaaatgaataagacaaagttagcactgtatgcaacacttattttatttcaaattcacaaacactttaaagcctcattttaaaaaagagaaaggaaaactttgaagattaagaaaagtagaataaactaagaatctggaaattaggagatctaattgcaacagtggctcagtcactaactagcaatgtggccttaggcaagtcacttcccattcgggtgcttcagtttctcaatttgtgcagtgagggaatttgacctaatgctcccttctaaagtcccttccagaagtgacagtactctgtttaggccatgccacactgagctttattgaacaatgactgtactatttatagtacataactacaaagtaagtcagtgcttcatcaaccagaaaaaaattaaaccttttctgttagaaaatttcaaacatacagagaagtagtaaaaaagtaagtacaatgaactcctatgaaccaatcacttagctttaacaactatcaatgatatgctgtaaacaactgcatctaacctattcatctgctcttacaaattcatctaccaggatgaatctaacagataaagagtttttttcttttttaaatctaaccataataccattatcacttctaaaaaaactaacagatactaactaatagtatctaatagccaatctattttcaatttgcttcaactacccctttacatcagttcatttgaaccaagtttcacatacgctttccccaacccctctcctcatagttgctttttatgcatcttaagttcttttaatagataacagattccctcctctcttgtttttacactactagttgttaaagaaattgggtcattgtgtcctatggaattttctacattctatttggctgactgtatcctagtcaactagtaatttttttaatgtacattagttttgattgtcagctagaccaaaattccttaagggaagaaccatgtattatttatatcttttgtatttccacagagtctaacattaatgagtcaaatcttggttcattaaggttagactgtctggtctaagcatagtgagtaatttcagaaagactttccgggtctttttttatagttctttgattttgttagtgaagtttaaaattggaacaagaatgctactcttaataagaacataaaaatcacagaacttcagcatctgcagagaaatgaaaagaatcaaatgtcttcgttttagagacaagaaaactaacttttagagagtttgggacttgctggaaaccatatgccccagtatgggcaaaacacaagactaaatcaaggtctcctagacctaaagtctggtgctctttctgctacaccaaatcagtgtgggaaacagttgtagcacagacttcaaactgaaagctgagtaagtggaagagaacatacctcaagcacaggaacccaaaacaaggttactatagagacctagcttaattcagaaatttcat

SEQ ID NO: 50089 - DNA, 715 bp, Bovine  19866881346451
  misc_feature (1)..(1): n is a, c, g, or t
ntctctctaattaaacatatattagtccaagaaattcaaacacaaaaaatgtcttttgaactcacagcaccctcaatttttcatacttaatttcatcattattttacacaatacaaagtttttcctccaattagttctatcatggtaacacaaaggccactgtagagagatgagaaatctgactgacttaagcttgttttgaattgaggttgtcatcgattcaaggggattttgaaggaagaaacggggtttttgaagatctgactctatggtgctaacaaaaggctttccccatgcagtaaggccaccaagcggaagcagtctttgttatgcaggatgtgattaatattacctcatcatttaattttagaacttgaaaataaagttgcttgcatcagttctcagttcatggcacatggtttgaaacctgagcatatctacttttttttttttttttaattaagaagaaatacaggattactaaaagtttagaaaataatgaactgaaagaagtctcccaggatatcttttcctttaccaacctctgctaatctttttgtggttctagttctagccttttttgtttttttagtgtggtttttttctttacagttttttacatataatttgaatctgatttgcttcacgtaccgttgctttgtgtgcttgattccccctcgcccctcatgtttacagtcttgctgtcagttgtaat

SEQ ID NO: 50090 - DNA, 692 bp, Bovine  19866881346588
  misc_feature (1)..(1): n is a, c, g, or t
ncaagcactggcctcacccatatgcaaccgcctttctctagggtgtggaaagaggggtatttccatttccaaacctcaaaagccatttgctctcagataaacaaacatctccctctgcctctgccagctccgcccagctggaaagtcctagtgctaaattagtagcatttcaatcacatctgtgacaagttggcgacaggctggggtatgatgagtggagcaatcagctgttgttacaggaacgaggcatgtggacagaataataacagaatgctatagtaataatcatcattgtaatggtccccatttacataacatttttaattgccaggataaccaaatgcgcaagagcacccgtttgctgtcaaacagaccggacacagaaggcctgtgctgtggcccggagctgctttcttgacctttctgagcctcagttttccatctttaagaggataatgatctctgtttcgtaaggctgtttggaggtttgaatgaaataatgtctataaagcatttatacaacattacaagtatcctagttgtagaaatgttggtattataagtagtatttttattatttcaactagtctgaagtgttgtttcattttgcccttaacctcacacaggagagaaagttttaacacaatttggctgaaagtaaaatagagacccagaaaagttaaatgtctctc

SEQ ID NO: 50091 - DNA, 720 bp, Bovine  19866881367645
  misc_feature (1)..(1): n is a, c, g, or t
nggccctgagcacctttccgagagttccgaaaacctaacccggaaataaaactggtctcatgcaacttggcacgaattttccactcagtcagcctgcactgccagccctccccacctgtcctttgccctgctacacacctgctcacaacacaggcagtggcttcacgcctcctgcacaggctggccagcttcaccggccgctttatttcagcatctccacccttagcatgggctctccttgggaagtgacaccagccttcatctgctccagggacggttctcagcctcctgaaaatcacccctggttttgaacctccaatcatcccacgggttcagtcactcagcaaggaggtgtcagtgctctgcactagaggtagagaggaccctatccttagggtgctcccagcctagtggggtgggtggattcctaaatggtgctttgcacattcctgcaggaagagctaagatgagctgagccagggaatcctccagccacctgtctcaccctaaatccagtgttaactctgcaccatcccaaatctctccctgggggagcagggattgttctaagtagtggaaagagtgcctgactgctctgtcaatattgggacattttaatgtcttggagattagtgagtaaagctgataatgaaacctaagggtctgcatttaaattttgctccaaactggtacatcccttttatatatgggtttctatta

SEQ ID NO: 50092 - DNA, 2446 bp, Bovine  19866881389977
  misc_feature (1)..(1): n is a, c, g, or t
ncggtcttaccctacaacagtcctctcacccctgactttgtgctttgggggaagaaagtcacctctcattcaactccttccacagaggtaaagagcaagtcacttaaccattttttttctctctcttattgttagcaaagagattaagatagtgaggtttgtttgcatcccagctctgggattttagtttgtaaaaggtactcagaaattggtagttgttattagctgcatgaggtacatattataattcccatttgttcctaaagaactgagtctcagagaggaacagttattgtctgagccgacataggtggaagcagtgaaatcaagatttgactttaggtccagctgatgcagaggtcattggattctgtctgcgtattgttcttctcactgcctgtctctctgggaatccctcttagcctccctgaagcctgctgcaacattgacccacagaaccaacctgaaccgttgtctttcttagacttctagacccttcaatactagactctcactattcagagtgtgatccatgggccagcagcatcagcagcacctgggagcttgttagaaatgtagactctcaggctccatctctacctactgaagcagagcctacattttaacatgattcccagatgattcatgtgcacattaaagtttgagaaaccctgggatgaagcagatcattagtaaaattaacgcatcttattttcctaattaggtcctggagtttcttaatgcccaaagccacaactctgcctttttttggcattcttcccaatggcattgggtactccaaagacctataggaagcactgagttaaaaacttaaaaaactataggccccagatcccttccttccttttcatgatgtacctcttatagccctgaggaaagctgtgatgtgcatatatattcatttccagctctacaacactgctaggttaaagaaagtcagatcaatgggaccatgactaatggaggcggagctgttagaaactgcagaggcaacgaatgggcaatgggtcagacgaactaagtcagacctgggctcagacaagtattagcaatgtccccaaggtgtgtaactcctgtgagcctcaggctcctaaaatactacctgtttcaaagggtcactgggaagcttctgtgaggtgaatgctctggagcccctagttcaagcccatggtgcagcaaggctctggaacactgctctcattcctcccttctttccttctgcagagctgtgtgggtaagcaccaggggagaaggcagccctgtgttttatactatcattcgggtcgaggcacctagaactgtcatggcgagcggcctctaaaactgaggatttactctctagctgagagaatccggggagggttgatgcccagaagctgagctgctctaaagggccaacaagtcatgcaagaatagctaagcgctgaagaggagagaagcagtttaattttctcaaattgatcatgtggagaaatctgtcggctgactgcagagtatgcttttagtaattgccaggattttgtatcccagggagataaaatctcgcagtgcggttgtgtgagggactcagggggcataaatctgccacgggcggctgctagtagcgacaccccaggggtaagggaggagagcagttcagaggtgaggggcgtgctgctcttcagctccactggccacactccagagagaaagcgggctgctcaacagagggcagtaggaaaggagagacacatttcctgaatagagtggggaggagacagaagagggtctgcggaactgcagaaccacagaaaagcacggcagccctgggaaaatataccgagcatccctttgctctgctgagaggactgagggagccgctggacatcctttcttgccttaactccctgccctcaaacccacccctgccctcaacccccaccgtgggccaagggagatattcagtcacacagaaccatacctcctgagggtaacccgctggtccacaccagaatttcctagggctcttattaccaaatgtgtggtcctccatagaccacagccagtcagaagctcttcaggtgggtctgggaattctgcatgtatcataagcttcccagcaatcccttggcattctaagatttgaaaggtgccacttcagggtgagattttgagattgtgatctgctaaaagcatttctctgggtaaacaacaaagaagaaatgtcacttctaggtccttgctgttcaaaatgtggtccttggcccagcacgtggtgaaatctgaagagcactgggccagggagtggttctcagactctggaggcaggtagctgttaactgggggctggggggcacagaggaaagaggctagatgggaatcagagacctgggtgtaaatcttggtccttccacctgggctttgggaactcaggaggtcattgcac

SEQ ID NO: 50093 - DNA, 906 bp, Bovine  19866881425500
  misc_feature (1)..(1): n is a, c, g, or t
nggaaagtgacttactgttagtaagacaattccaatctgacacaaccaaacgttgcatcaactttcccatcaaaagcacattctctatcttttgaatgatccaagcaattctctattactcaaattggaaaaagtatcacatccttaatttcctatatccagttagtagtcaattcatcatttaggctgtgtggcactatcctcttaaaagaaaaggggtaaagaattccccatccaaaagagttaatctcatcaattcctgttgctacactcattacattctgacttctagtttaatctcaaatgaaaagatctctttcattatgtcattcctttatccaataatttataatagcttcctattatcaactatatataaagtctaaacaagcctagtgatgggtcctctgaaatctgacaattaccttcatacactgaaagaaagttaagtcactcagtcatgcccgactctttgtgaccaaggactctagcccaccaggctcctctgtccatggaattctccaggcaagaatactggagtgggttgccatttccttctccaggggatcttcccaacccagggatggaacccagatctcccgcatagcaggcagactctttactgactgagccaccagggaaaactttcatactctaattactatttttctctacaactgcatttctcaaactttttggtcccaagaccctcttcagtcctaaaaaatcactgaggatcctaaaaagctctagtttaaatggattctatcaacatttactatactaaaaataaaaattgggaaaaattttaaacacaagaatgcagaccacacattccattaaccgtcagggccaagggatgtcatcacacatcatacagcttgggaaaactctattaacactgaa

SEQ ID NO: 50094 - DNA, 1043 bp, Bovine  19866881472166
  misc_feature (1)..(1): n is a, c, g, or t
naaatagccacttacctgtgaagctcttagtgggattaaaaaaaaaagtgaatgagtgtatttgcctaatttagagtgatgttataaatagaaagtagcatttttagacttcctaaaatttgcctttccctctcgcagatagacctcagtagattcaccattgccaaatcaattctgaacctgaggttctgacaccagcaaagtattgtaaattatctcaactttcagtaatttgtttccttgtttttttgttttttttaggtgtccaccgatttagagaataatgacacgggagttaattctaaacctaaaagtcatgtgactatcaggcgggcagttttagaagaaattggaaatcgggttacaaccctagccatacaagtagctaaggtaacaactgtgagggctgcacctctgcacactaggttgaccctgtagagcactcagtggcaacacaggctgtcttgccctctttacatttctttttcatttcagaaagcccagaacactaaagtacctgttccacccaccaaaacaacaaatgtcagcaagcacccgaaacctactgcttctgtgaaaccagtgcagatggatgtgttggctccaaaggtaggaaattctgaatttacaagcatacttaacagagtagccagtttggggctatggtgtaagggcacctttatcgtcactgtcacttttgaagaacattgatagcaggagctctgctttaagacaacagtgtagaaaatgaacatctttgtagtaatggtaccttaacataatgttatgaccttgagtaacaaagttaaataccttaatacctaaataaatttcatgatctcagaggaaaatttgatagattttattaaaaataattcactataggaatgaacttgcctgtgaagggggtggaagcttggaattctgagatcttcactcatggaagaacagagcatactacaactgagtatgcttgtgtatgtgcgtatacacagtcactgctgcaaatcgtgaactctgactggaatcaacagtttttcttg

SEQ ID NO: 50095 - DNA, 1135 bp, Bovine  19866881491092
  misc_feature (1)..(1): n is a, c, g, or t
ntgtcgagagtcaaagcgggaagttaagtccagagggcaatgatcacctataacacatcctaaagtgccaagctctctgtcctctggcacctactctgtgtgtgtttgtggtcaaaccaggtacatataagtacacgtgaaactagagagagaaccacagccctgatgtcagttgcttctaattaacacaggggccaaggaattagatgttctgttgtttatctagtaatcctctgaagttccagcaagccccatctcctgatgcttaaatgccagttccaaaatagggagatttactctcaaaaccaacagatgtttgggctgtcatcattatgcttgttttttaaagtcatttgcgatttcactgtgaagtcctatctgtatgatttattagaaatcacttatataagattatttggaaaatcatactagtcatgaggtatctatctgtctcaatgatttgtctttttacagcaatgcaatctggcattctgtaggagcatttggtcaactttccatctcatcaaactaaaaatgttctagaaatctcccacactttttaaggtggccttaatcagataccttagtttcatgaaaggtaagactaatgttttccatcttaaatacaatgcattctctcattagttatggggttagcctcttagctctctggacctcagtttctcacatataaaattaatcaataaactacatccttgccatggctcctaagttctaaggatctagttattttaagtactgtgttagctatcttgaccaaactctcatcacaggagacaaataggctgcaaagaccaaaattcttctttggtttatactgtcagggagaaagaaattttcctatccttttaggttcttctggctagtctaagaattgaattgacaggagaaacattaacagaagaaaatcacatgaaagtttaataatgtgaacatgatagagacccaagaaaacagagtaactcaccaaaatagctaaagtcctcactttaaaaactgtctttaatcaaagacaaaaatgtatgttgggtttagtggtttgggacttcaaaggacaagaaggcaattcacttgaaaatggaaaagcaaatgtctggtaaatacatgtttgccg

SEQ ID NO: 50096 - DNA, 1325 bp, Bovine  19866881555645
  misc_feature (1)..(1): n is a, c, g, or t
nactggggcacctcccttaccagctattacctcccagggactgggcccccaaatgctccctctggttggtggctcagcctgtgccgtgcccgtccactgggccccagactggttcccgtgatccggtcttgtcttgtttttacaaagcaactccaggctggggtctgtgaataccactttctccctgcttctctcctttcctttgttaattccaatatatacgcttgtcacaggcttgaaatcaagttgaaaaaggagaactggggtccctggagtgcagggggctcccgggcaagtgcagttccaccaaggctttggcgacctggccatcctcaagcccagcaacaaagtgctgcaggtcagcatcggacccgggctgcccagaaactcccgtaagtgtgcacgggccccacgggtggggccgctgctgggctgctgggctccctgcctggcccctgctcaccctctctccaagctaaactcttttcccactaaatgctcataacactgcacagatctgtgggccaaagaactagtgccttgactgcttcctgtggttggggttttcttctgattgaaatgtttcagactaaaccaacatcagggcaaatgggcaggttaaacttttctgaatcatttagtagttacgtgtagtattgctggcgttacagtattaattatgtttaaaacagatctgtttgttggctttacgttcccagccctttccagtccagtcttgtcaacagtacagacttcgtcctttgtgttaaagcagctgaccacacttaccaactccttacaagggctcactcttacagtgcgtcacgtttaatctctccctactcactttaaagtgtttcattaggagacacacacgcacgaactcacactctgtagtttgactccttttactggcctaggcttctttttcttagatgccaccgttacagaatacagtccacatgtatgatcagtgaagagtatgccaagtataaaatgggcctttatggcttctgtctccagtggtatgcactgtataactcactaatacagcacagaaaagtagccactcagaaaatggtgtacgtctgagtatcagtgagtacttgcagaagacagcacatttaggtgggatttttgaagagacttttacataaaaggactctttacagagatgtgggccggatgaaggaaacagggttggggctcgggcagagaagaccaagatgctactattaccctaaggatgtaggtagaggagattccagaaatctaaaaaagaacatgtctcagaatcactttgctgtacatcggaaactaacaca

SEQ ID NO: 50097 - DNA, 1613 bp, Bovine  19866881600865
  misc_feature (1)..(1): n is a, c, g, or t
nccctcggtgtgagtcattttagaattctgctgtctgaatataaaaagcaagtcttcatagtcaacaaattttcaacaacacttaatataacacaccatgccaaaaatgatgtgggaaagaaataaacaatgcaggatggtgacatttttcagctaaaattaacaagaaggcacatgcatgtatacacatgtcttattgtttagtccaccagggaagcccatacatatgtctatatgtgattaaactggttagttaaaaatatattaggttaataggagcaaaccttatatggtgggattccaagggattttagtgttctcctttctagttaactgcattttgtaaatcatgttaaatgaacatttattgctttaaagtggtttttaaactttactttttaaaagatatgtaaaggacacgatccctgttcttaaggaatttctagtgttttaggggtaaatgaccatacagggaaaagcgagcctgtctgggttaatggactgctgctgataaccatttttttttttctaacccagctgatcaaaaaccatgtctacataaataatgagcccatgttctaagaacattccaataaataatgagttcaactacattcattggaaattagccttttatgggcttgtcaataaaccaatcctccctttaaacgtttctatggtaaaatgcatctgaatgtccaaaaagcaactttataattgagttttggaacataattcagaaatatgagagaacttatacacttgccttaatgtatgataataataactaacactaacaatgtattcactgcatttgttatttcatttcaccctaaacagcctcatgtagaagtttttatcatcacttccattttacaggttaggaaatcaaggaacacagatcacaaaacttgtataagatcaccaagctcatgcagattaaggctcaaagccaggctgtccagattcatcccaactctttctggtccatcatcagccagtttccatgagtcttgcacacaaaagttattaaaaccctttaatgataagcctagataaagtgagcatatttcagcttttttgccaaacaaaatgaaaacttagaactgcacacaactgcttccatacaattaaaggaagctctgcacaggtatctaggagtcagcaaatgttccctgtaaaggatcagagaatacttagttcaggctttgtggatcacagggtctgttgcaaatactcaagtctgccactgtagcataaaagcagaggcggacaataagtaaaacaaccagcagagctgcattccaataaaatcctgtggcgggtggggttttgtctggaagcagtgggcttccacacctgaccaagatgctattataatgtgcttaatgaatccaaatatatctattaatacttaaaagcaggggtttagggatttaactacccagataattggtaaaatttcctatggtaagcaagaaacagcatcatattggttagaaacatccaagtaccttggaataatgtttattagcataaatacctggtaagttgagctccttcctcatcagtgatggaaatgatgcaaaactactgctgcatatttatgggtg

SEQ ID NO: 50098 - DNA, 1370 bp, Bovine  19866881616305
  misc_feature (1)..(1): n is a, c, g, or t
natgtggctttttccttgattaggctatgggaagggcaaagatggtgctaaagtttttcttttttaaatttatttttaattagaggacatttgctttataatgttgtgttgatttctaccatacaacaacttgaatcagccacaggtgtacatatatcccctccctcttggcttccctcgtggctcagatgataaagaatctgcctgcagtgcaggagactgggttcatccctcagctgggaagatcccctggagaagagaatggcaaccgactccagtattcttgcctggagaatctcatggacagaggagccttgtgggctacagtccatggcgtcacaaaaagcggacgcgactgagtgactaacacacctccctcttgaaccgccctctctccctccccccattccatccttcaggttgtcagggagcactgggttgagttccctgtgatacatagcaacttcccactagctgtctgttttacatatggtaattatatgtttcagcgctatggggctaaagattttcctggtgtttttagtttaaagttttttcctgcatcaaaatcatgatgcagccaaggacttccccggagatctagtggttacgactcggtgcttccactgcagggagcacaggttcaatccctggtcaggcaactcagatcccaaatgccacactgtgtggggaaaacaaaaagatgaagctggtattctctatttcagtccatggctctgtacctttgatgtgctctagccaggcacgtggtgtctaaaacctgtgctcttcctaaagaatgtcctgatctgcagaattctatcggtaatgctccctaattacaaagcagagactgacaagtccagacttaaaaggtttaaaaaagattgcctcacgcaaaaaatgtgcccttttgcctgtttttctgcattcttatgttcactaaaagaaataagagaagcgaagatcaattactgaaaatgtctgacattcttgagttgtgctttatgtttcagtcttagcttgccagatgccattttgggtaggactggaaagcattcagaacggaaatttgattcaaatgtgtgttgacttcattataaacttcatagagagctatggtagctgcttaagttccttcaggattcaggagttctgtttggtgcgactatgtaaagttattttagtataattatcgtaggtcataggtcatagacaagcaggggtctgtgaaaatctgtatagtagtaccagcaagtttatgctcttggtggctcttggtggtgatgctgttggtggccttggagggtgcggtgttctggatggccattaaaagtggagtctttgcaaccattgtaaaatacattttt

SEQ ID NO: 50099 - DNA, 856 bp, Bovine  19866881759921
  misc_feature (1)..(1): n is a, c, g, or t
ngtgatggtggtaggacttctctctctagtccagtcactcacagggtctctcttcagccctgcttccatgttcctacagacaggaggaatttccccagctggatacaaaacctatattctccagtcatcatcttaacattttccttctcaatcatcccccttgaatcctgcagaggccacatccctaaatggcaggtgtaggaggaatgtgacgtaggactcctcagaagccagggaggatatggctcactgcttatatgcctcacatctcccttgggctggttccctccagcccaagagagtcactctgctcatcagcactgggcttgggggttacagagcctacagcccctctgcccacataagcaactaaacgacagatcattttttaactagctctgcagaaccccacctgcaaccctgagctcagcattccaggccacatcctgtgggtgctgacgagaagctgagtgcactaagaatgtctacacagggcctaaactaatctgaaaaccatcctgactctgctgtgctggggtttgctttcttttttccatttgcccccagactagccaagatcaacattataaatcgctaattctgaactgaagggcactgccaacatttcaggaaaaaacaaggaggggaaaatgatatatacataggcttcttcctgaagttaagacatgaagacataaaacacatctgaagacaactgaaactgctcctgcctggggaagaggccagatggcctgacttgagcagtgggaaaacaggccgaggctgcccttgatgttagctgcccttgacctccacctgtgcctctgccatacctgctttcctcccagtctttggg

SEQ ID NO: 50100 - DNA, 2109 bp, Bovine  19866880636997
  misc_feature (1)..(1): n is a, c, g, or t
nccagctggagtgcaggtatctctccaacttgttaggagagggcttcatgcaaggcacccacttatactggggcactggaaatttgctggtgatatcgtgattactcagaaatcatacttgagagtgatcttatggttacggcacagttactagaaaagatgacattttatgccttcatgtttcatgttctgttgttcagtagataaggcctgtccaactctttgcaatcccatggactgcagcatgccaggctcctctgtcctccactaattcccaagtttgttcagattcatgtccgttgagtcggtgatcctatctaaatcttatcctctgctgcccccttctccttttgccttcagtctttcccagcatgagggtcttttccagtgagtcaactcttggcatcattatatttgagcaacaatgttatttactaaagctgtggctgttgaggaggtgacaccaaaatcatccttttgagatattgtgacaaaatttgcctacttgaatgacactgtagacactcttcctatttacagactttagtctctcaataagcattcaccaatagataacttgttttgtttgcaatatcaaggatgctagcctgtctttgccctttctgcccaagttatggtcaagacagaagtggccttctcagtacctgacaaggatgggggcagattggggtatgcaagctcatggcagtgggtgggtgacccagccctgggcccacctccacatagctgtgctcaaagcccccagccacctaaagctcccctgtgtgtctttgtggccgcctcccattcacgttgtatatcagcctgctgttgttccctttttgcagccaaatctttcccaaaggcctctccccccaggcccagcccctgcacctcatcctcttctgcaggcttcgactacgcccacgatgcagaggccgcgcacatggctgccactgccatcctgaacctctccacgcgctgctgggagatgcctgagaacctcagcacgaagccacaggacctgcccagcaaggtgggcaaggcccctgctgggagctccttctgaggcagagaaggcgggtggggtttgcagtcaggactatatgcagcctgcacaaagcaggctcagcaaacccagcatctataaggggagtaccactctttccttttctccctcctgaccactgaccctgctggccaaagacattggatgggtccacctccctgagcaccacgcgctgtgcctaagggcgccaagtggctgtacacacctgttcccgcatctaccgggatgcgggcttccactagttttcacgtgttcctgtgcccagacaggtggccatgtgcaggggctggttttatgggctggaggccttgaggcagtgggtagagtgagtccactcagtcagcttcaggatactttcttctcagaggctcttctcttctttttggccctgttccctttggagggaaaataaggcacatgtgggaagggatggtgtctaatctagatgtcacctttgcaatgcaggccgcggacattgaggtggatgagaacggaaccctggacttgagcatgcacaagcaccgcaggcgggagaacactttccccagcgggagcagcagcagcagcagccctggcgtgaagtcacctgacgcctgccagcgccagagcagtaccagcgcccccagcagctccctgacctcacccccgtctagccacgcctcccgccaggatgagtgggaccggcctctggactacaccaagcccagccgaccacgagaggaggagcctgaggaggtgggtgctgtccaggtgggaggtccagagctgttggatggttggaggagaagggggttgagcaggtgcttggcggtcagcttgccttacccaagggttggcataaacacgctggaatctccaggcagaggctctgtgggtcctacccctttccacacagggttctgcctgctccgggcagctaagtccaccttcctggaggtgttttcaccattggctcagtttgtggccttgtcccctccaagagggaggtggtcttctcacctctggagaattattggtcaacaacagtgtggctctccaag

SEQ ID NO: 50101 - DNA, 811 bp, Bovine  19866880641006
  misc_feature (1)..(1): n is a, c, g, or t
nacgccagggcgcccgcagcatacttgggcctctcccatgacggcgccgagggctcttcctagatcggggctgcgctcggctggggcgggaggctggaggggaacggaaagtgggtctcagtatcacgacccccttttcctcccctcccgtgtcaagctcaggggttgcctcggtgttgcctcggtgccctttggcattaggcagccgtctgtgcactgtcagccgcagcggtccccaagctccgcgcgctcccgcagcaccctgaggcctcgacacgttcaaattgcgcgcgcagccgcagagcttccgaggtcggaggtcccgggacaggcccaagaatccgcatctctaacaagctgggagaggggtttcgggagcgccgagggtcgggaaccaccctgagcgacccccaacgccggctccttgttatcgggctcaggaggtggtgcggcacgccagcagctggcggaggctccggcggaagctgtcgtccaggaaggcgtagaggaaagggttgaggcagctgttggcgtagctcaggctggtgatgaagtaggacacggcgatgaccagcggcgtctgcgggaggtcggtggtgagcgccaccacggtgctcaggtggtagggcgtccagcagaggaggcacacggccaggatggccaccaccaggacggtcacccgcttcttggcgcggtccagggccttggcgtggctgtcgaggcgtatggcgcgcagccggcacagcagcgaggtgtagaggacgcagatggtggacactgggatggcgaagccgagcaccagcgtgtacag

SEQ ID NO: 50102 - DNA, 1363 bp, Bovine  19866880706037
  misc_feature (1)..(1): n is a, c, g, or t
ngggctcaggggcaactgggcaattcgaagtgcctggcaggccattttaggacaaagggggtcaccagcgagcaccacatcttacctgaggtcggctcctgtgggctccaggggagctgagtgagagaaggagaaacagggaacttgtgtgcaagtagaattgaaaaaggcacattgtcctacagcacaagtgggctgaagcgtggaggcaattccccttagacctgaatcccatgttccccggccccctggaatatcctctggggtctagtgaatccacggtcccccaagccggtgcccctgccagatcctccctgggggctcctggatttacagactcagacagaggccccacacaagacaggctctgtgggccatccaggcaggacagggtctctttcctaattgcatgtagaagtcagtgtctggttagaaaccccccagcagataaagccagacaaagaacagaaggtggcccaagaaactggtccctcagggatgggccactgggcaaaaacttctggagtctgactggcagacacaggaagctcagggcgcccagcccctccttgaaggccacccatatacaggagcagcatgtaccccgtggtgttggggaggtgaggcttgccaaggggtcagggcttgatccctgcagagcaagaagggcctccgccccctctccccaccccactgccagttcaaccaatgacatccccaccccctccagcacgaagactaatatcctgggagcagagagactggtgatgcaaggctggcggcctttcctttccaaacagagcaggtctaatgcagctttgtttccccctctggagagctaggtctgctcctcatttccatccccacaggtacctctggccctaaagcctccctggtagccctcttaggcagcccaaggctgaggagccctggagccaccaggtacctgaagccccaggtgcccagagcaggggaggtgcatcccagggccgaggcactgctccaggactctattctcctgaggacagctgctgggagtggcatttatagcttcaggacccgggactcttggccagagtcagctgggaggggagggcagcactcacctcggagggccttggatcttgtacgagctctcttttcatcattttctaaactcatctgcaagtaaaaacaaccgtgctgttaacaggacccagcagaaccactgctgtgtctgcagcgtggcctacgccatcgtctggctccagcgtcgctggtgcctgtgaatctgacccaggagacaaggaacggctcacagggcaggaacgagctgagaaccaggagcagcaggtgaggcacggtgcttctgggaaggagaccc

SEQ ID NO: 50103 - DNA, 1249 bp, Bovine  19866880706119
  misc_feature (1)..(1): n is a, c, g, or t
ngtgctcggcagaatgaatggcacagctgtcagctcgtcgacgtgagctcccagtgtgagagcagcccgcacgcatcctgcagccctctccattttgtgctctttgaataatttatctgcaggaaatccaaattgccaaggcccgctttaacccagcagaatgcttgccaatttccttgggaaaactgacaaaaaaagaggtgtagattgcatttcggctgagagtggctgggcaatcagagctcggcacctttgtgccgctgcatcggaagccactgcgccgggctcgcgcagacgacatttgaaggctcataaatgtaatgaagtccctttgacacctgctcctctcttcactttaaatgtgagccattggtccatggggaacctccgctttaaaaatagaaattatagtaattgtcttccgtgctgtcgggaggctgtaaatgcatggctctcagctctactgcctgcaattgacggctgcaagaattaccccaagttgagattttttgtccttaacaaatcacatgtatgctcgtgctgcgtgggggcaggggggctcactttgcaagttccaacttatgaactgggggtccatgggaaaggtccctctcttccttcctgggtgggaccttagatgctggacctgtgctggtttctggggacaaagcccctctctgctgctcctttctgggcatctggctttgctctgatggccatgcagtggcaggagggtggggggtggcttcctccccttcctggccacagggcacacctgctgggtaaaagtccctcctacctcctgcccagacccaggctgaggattctctgtgatgacctttgctcctgggggcatccctcccctcccagggttctgcctccactccctgaaggacagtgtgggcagcattcccatggaagtgggtctggggcagagaatggggggcgggagctctgattggctcgggtaggtggttgggtgacaccagggtctggattatgtcgggcaccagcccccctcgggggctccactcactctttcctgggggaattggcatctctgggagggtgacctgcaggttgggtctagatgacccctcagcctgcactcctaccccagcctggctctcacccctgactccttcccacccccagagccagtgccgtggcacatggctgatcaaactcagatgagctgtgagtccaggagatgtgcaggatctctaaaagttagcactaaacaaaaatc

SEQ ID NO: 50104 - DNA, 1502 bp, Bovine  19866880755477
  misc_feature (1)..(1): n is a, c, g, or t
nagagatgatacaaaccatttcgatacgctccctacgcggaggatggcagaggcctgagtgtttatcatcatctctgaatattttcatgctcagagtatgggggatgggacaaggaagcagcatgctgaaggaagttgacccccagatggtggagggagtgagcagtcagtgggggctgggcagagggaggactttgggggttccaagcagagttaggaagaaagaaagctgagtccagggcaaaggcatctggaggaagtggagagggccaggtgggttgtgctgagtggatcacatccaggtggaaagggcacttgggaacctggagcccaggcgggatgtcacgtgcccagcactgggagcagaggccacaggggccctgggagggatcagtggcttttgtccaggctttggaggtctggtactgctcagaacaggactgggcacagagagatgggtttgagagggctggagagctgaagaacgattgcgttccgaggctgagagggcccttaattatgcattgtacacaagacgtttcaccaagtaaacagagttttaaaggctggctcagtcatggagagctgtttcctgtggctcaacaagtttataataaacacagttaaacttttatttatggcacagctgctaattgcaccataaacattttttcatcaagcaattgctgtttactcacttgccaatcagctccctctccagctccctctctccgtgttcccaatatccctactttccgaatctgctgtttgaaatgtctgtctccaggcccaccggcccctggaccatgcctcccctgccccccaacccccgccatcctggtgggcagccttgcccctgccccagcccactctgtcctgccatccctgctctgagagtttctcatatccgtcgggaccaggcccagtgcaggaggcctacagaacggccatgctgacctgttctgacatttcccctctcctggttccctaacctcagagccccaggcagacctcacctcttctctgtccccgcccttatcacagtcccccagcgtgtcgggggtctccccatccacctctctacaagaccgggaatgacatagctgacacctgggtccccagggcttgccatttccttaagcagtgaccctagtgctcagctcctgcctccatcccccctccatccccccgggagacctgctcacacctctgtcccaccctgaccacctcctgtgtcctgggcaagctgaggacccttctctaggctggaccctcaggggctcaggtccccccttcctgtggcccctccataggctggccccagggtgagcctgtgtggtgctgaagcagagtggaactgagctgtagaccctctgggtggcccaggcctccccggcaacatgcagacatgctgacccctgcccccaccagatagacccaggcctcagtgtctgaacgctctgagtgaccttttgggtggggtttctagagtcctctccagg

SEQ ID NO: 50105 - DNA, 1923 bp, Bovine  19866880857711
  misc_feature (1)..(1): n is a, c, g, or t
nccatccctcagaggccagtgtgagctgagacccaggcaggccctcccctgcccgccactacaggttgcctgcgggatgtgcaggaagaactgccatggggaagaagcactaggagacttgaagtaacagcacatatccccttgcagacagcatcagccagaggaggggaaaaggagagctggtttctgagcccttggctgggagccccagaggagcatctttagggtcgtgggcagtcaaagtggaattctggtggtggaataacttgttaatacaattccccagacaggagggagctggagcacctggaggggatatgggggtgtttctgagaatcagcctcagggcacaggggctccactttttgaagggagtggcctagcccttccctgtcctctgcttaaagttgcttaagatgcccctggaagggctgctgcccagttaaggacaggcatgaaagcactgctgcaagcattcagtcactgttactggagctctggaagagctcagatttttaaatgtacaagagatggtgtggagacaccagcctccacagcccaggggccggggcaggagcgagaccagcagaaaagaaaggccatggggtctgtaccattccagtgaggggctcagagagaaggaaagcagaggaggcgtctagagtcaagcagtgacttcactctggaaagggtggaattaagaaggaccaatggagaggccccgaggtgccaggcactgtaagaatttgagcatgaccggaaaagaggagcctgttgccaagaagaccctggaaccacgataaggccagctctgaagggccttgggaaagcgaggccaccagagcacgagcaggctctcctcctccactctggactggccaatgcagctgagaagttgctggcgagctctcagctaccctcaagggaagatgaggcctaaacttaatggctgcgccttacagggccttcctgggacaaaagcccctctggtcctcatttctcatgtgtaggaaaaaggctgtaagccccctcaaccttccaggttccaaagagcaagtcagtcagttaagaggacaacagagtcacaacagggcttctagttcctctggaagagacagagggaacaatccgacacatatctgagtcactctgcagaaactaagacacttgcccagtggtgacgacatgccgaccacaaccctgtggaccccagactgttggaatcgtaaggttgagattcttgaaacatcacctaccacctcaccgtcagccaatcagaagaaggtccacaaactattatgcatctcgaaccctcttccctcacactgtctgtaaagacctcaccagaaagccagtgggaagttgaatgttctgagcaccagccacccattctccttccatggcttttgtaataaactttcctctgctccaaactccaaacccagttttggtttgttcggcctcactatgtgtcgggtagacaaacctgggtccaataacacccctccgggtctatggctcatgtcactcacctgaggatccgatccgaattggagctattcttggaaggctctcccggctgtggctgttgcttctcatgagatttggctaatttttcggcagcagcaatgggacacccagacaaactagagacaggataggaggacagctgagcccttccccaggccccgcccatctaagccaggagccagacaccagcaggtgcccagggaaggctgtcgttcctatagagggggctttcccccagctctgtcctcagccctcaaagcacctgctgctcactcagtttctgtttttggaaattctaagccaagacacacagagacaatgcatcctaaagttcttcaaggctctagacaaaggtctctctctggaggatctgggggatgggcctgcctctca

SEQ ID NO: 50106 - DNA, 1467 bp, Bovine  19866880931322
  misc_feature (1)..(1): n is a, c, g, or t
nagggagaagacccaccacacagcacccaggccaggcggacccaagcgggggacgaacctgcggtgggaggcatagttcccagtgatgtggccactgccgtcacagccaggggtggggcagctggacaaaagaaacagagcgtcagatcagagagcgaggcaccctgccagacccgcccccggggctgagtccactcagggagggcggcggcacctgctccctgcccgtctcggagcagacccttcgcctctgcctctctgactgcaaatttctcccgtagcactcagctcaagaaggaaaagggacccaaagtaaagctcaacttaaagtcgagatgctctgaagccctcacactgtgcatgcacacgtgtccacgcttgtggacagggggtggggggtgccttcctgatgtggcggggccttccccgaggacaaggccccagccagagccagctacagggcaggaggaagctggtggggttgggggcatgaagaggaatcccagggacaaactctgagcagaggtgagggctggatcacctgcagggcaggtgtcaggcttctcactgtcccctaggggaggtggtgttagccagcagctatcccccctccagtggcgtctggttaaactagctctggctgccagggctgagggcaccgactctgaggcagagctcgccgaggactggcactcagtgggggctcaggaggcgtccaccccccctcagcccttgtctgctctgtgggcccaatgaaggctcatcctcgctctttatcaccctgaaggagcgggttagaggccagcatggtacaggggtgaggggaacctcccttgctgtctggcccaggaaggtcctagtagaggcagctcagcctctgcccaccaaggtggccagggcaggagaatagtcagcgcagggctgtgcaggggccggcccggtcatcacaggctcccactagggtgttctcctttccagactatagaggtcccctggggggtcctgtcgttcaaggaggggacttacgtgagcagctccttctttatgtccttggagagaaacttcagcttaaagttggccagggtgacctccccggggtacttccgctcctcaaaattctcctccgacacttcctggtcatctgcttcagaagaagcaaaagaatgggctgctggctctgactgcaaaagaccagcaggggagatgttttaaccagctggcgggggccgggcgcccagcccggggctgagggagaggggcctttcagaacagggtccacagaggcattttctggagtctcctgtcttatgcatgcaggagtaagacatactcccaagatgcaggaagcagcacccagaggggcctgggggtgctccttcacctcagctgctgtgccttgagctgacccaggaacaaggagacaccggatgccacccaaggcggctgctctgacacccttgatagcct

SEQ ID NO: 50107 - DNA, 1408 bp, Bovine  19866880956825
  misc_feature (1)..(1): n is a, c, g, or t
ntatgtgttagtccctcagtcgtgtctgtctctttgcaaccccatgaggtatagcctgccaagctcctcagtccatgggattttccaggtaagaatactggagtgggttggcatttccttcttcctgacccagggatcaaactgggtctcctgcattgcaggcaaactctttaccatctaagccaccagagaagccctcgtccaccctgagaagagtgaatttcttatcatatcgggccctctggaagggggcctgatatacagttggaagagtcctctctgcaactcctgtcttgacctcagtgttccatggataaaataaataattctgactacttgattccaaagatcctaattgtaagagtctttaggatgttataatttgtactaaaaatgtgtttacttacttcattaaaccattgttttctgtgtccctcttaatctaagaccctggccctgggaatgcagtagagtcagtttctgcccacaatgcatttttcagttggtttaatgcagtgtgatgaggacctggatagtggaggagggtctaggaacagagactataacactccaatgagcggggtgagacgggggcaaggaagacttcctagtgtgtgaatcctcttgttatatactgccatgatattttagctttttcttctgttcttctgccttccctcagagtgcctaggataaggttctgagttgtaagtaatcagttagtgctactgactaaagtatccatgttcctttatgcctcttgtttcacagccagtgccccagcctcctgagccccgccccatggaggcaaataaaaatctgaatccagagctccatccgagaagttctggactcttggatctgacacttctttctcaaagatcatgaaattcttgctccttactgtctttctgatcctgttccagatgttgccaggtaaccagaaccaggaaagaaggaaaagagcgctagggtggggaactgcccatgaaaaggataatatctttctgtccattcagacagggttttcagaggcttctgaaatctgcttgaccttatcagaatttacctttcccaggacaagcctgaggttccatattaagaatatgtgtttggccagaatccccagagccatggaaaagggttgggtggtaccacatagtccttcggtactcaggtgtaaccttcacaggcaaaactgactttgatactttgcaccaatcaatgtcccaagggcccgactgagcagctgtctggtttcagctgtctttacattctctgccagatcatgggtcctggagcgtatcttagacattaagttctattatcccttcatgtgaaagcctgggatgataataatggagcagtcatgtggaagtgagcacaggtcctttctgctcctttccaa

SEQ ID NO: 50108 - DNA, 750 bp, Bovine  19866880971866
  misc_feature (1)..(1): n is a, c, g, or t
naatactgtagggattaagaccgaaaccaaacagacctgggtctgaatctgactctgacatttattacatgaggggcagtatggtcattcatctgttttagatgcctgaaatctgcattgacttatatttgagtaatttcctaccatatgagacaaggtgagaaaatacctctctctctctgcagctgggaagatcacagttttgtttcgtagtcccgctagggtaagggcatgtgatctctagcgccagtgttctctttgcttaagatcctagttccactcagaagatcaattcaccagttattgggttatggttttgtggttagcgagtccaagggaggcagttcgtcagagggacatgctgtacagacaaaaacagtttacttctacaacattctctttgaagcgaaactaatagaagaatcaggtgaaattttgattttttgacataatgaagactttcaaggaaataaaaatggaacacaaaaagaaccctctagaactcaaagcaatatgatcgatttaaaattgtattaaagtaagtcaagaatggtcacaagaactgaattggtgatctgtatgatgaaatagaagaaatatttcacagtgcaaaacaaaatacgctgaaatgaacattgttagctgggggatgcttcctgcactttcctcacgctttcatgaaaagacttctgctacacactccaaaaggggaaaagtacctctccaaataatgagctcaagaattagaag

SEQ ID NO: 50109 - DNA, 981 bp, Bovine  19866880974161
  misc_feature (1)..(1): n is a, c, g, or t
ngctgttgataatcctgttacagcagtcgaacccacaccctaactcactcacaggacccaggctttccccaattccctgtggctttcatttttttcaaaagccatggaacctccttttcaaatcatagctagggaagtaatcacactaaaaacagacatgataaaaatagcttcaggagccgactgtttactgtttactgagccaggcgctgtgctgaatgctttccactcatcacttactcacagtcctaacaacatgcttataagggaggtactacattatgatgctcattttacagatgaaaaaccaaaacaaaaccaaaaaagcccaacaaaaccccccaaagctcagagaggtaacagtgtgcacccagcggcagagtggggatgtcatcccagagcccaccttgcccatcacttgctgtaccggggagtcccagtatcggagagacaaaggggaggggagggagcgggaagaaatccaaggtatggccaaggcagggggtggcggcagcactgaccttccttgttctccccagagccctgtgtgaacagcagctggtactgtcggtttgggaagttggctggaaaaaacttattcatgagagggctgaaaggaaagataaagcaggttggcaaacagagcccctgtgggggtcccacaaccccagacatttgtttacaagctgttatctcccaacaacctcacaggtgccctgagaggtaggtgttattgtgcccattgtagagatgtgaaaacaggccctcagagggcaagtgactgcccagggttacatgggaaatcagtatcttgagctgatttgagacctgaacctagcctcttagttattacccaagaaacacaaaagaggcagactttcacataaaacagtttttaggacagcaatggattccaaagtctggtttatccacaatctgtatgagagtcccgtcaagaatgcatattctggcttaagcctg

SEQ ID NO: 50110 - DNA, 2137 bp, Bovine  19866881013878
  misc_feature (1)..(1): n is a, c, g, or t
nacatgtttgtaagaagggatagaggctcagcagaaccagatttcaagaagggatgcagaaaatttttggtataagtagagtgattaaaaacaagtttcattatttggaagagagtgttggtcttgggtttagcatgtacttgaaatacaatatatttagactttctactttctacaatatctgtagagggaaaattgttgtggaattctaggtttaaagcccagattcccatttctctggtttatacatatattaatgaaagaaacatgaatttaaagtcagaagggtttgtcccttgttccccatcactgctcagaagctgtgggatcttggacaagttctgcatgtatatgttcaactcagacaactctgaagtctagacttatgtattaaattacatatttattttgttctcttagatttctcaatcatttcagactcaaaacgtcctaagctgaattctgaatctgtttgcctggcttttcttttgtctttcatcttcagtaattggcatctacaatcccttctgttgttcagttcagaaacttgagagtcacttttgatcccccacaattcatctcaagtcaccatgtacaaaccattaaaatgtgtgtgaagtaattttctgtccctggctaatgggcatgtttctccttccttcctgaaaaacatttctaataaatggcaaatacatattttgactttttgagtctggtcattcttgtgcaaccatttggcatagttttaagaccctaaggaaagtggaggaggagtacagaatgtggactgaattcccacatggtccttccttgcttttagatcctcctccgtatctcccttctggatccagagattccatggttccacacctgagctcagagagcatttgtatttcaggtaggaattgagtttgaccatttttttttacctgtctgttaacccttattgcctatacctgagaaaaatcatgtctactgttttccaggattgactccactctgtgtggtccttactcaaatgatcaagcagaaagttccatcactgttttagcttattttaaaccactgtgatatcacttagtataattcagaattggtgattagattactacctctaatcactgtaaggcaagtgcagagaaaaagagagggagctgggcagtcaagcaagaaaaggaaatttattagtgggaaaagagagggtgactggctcttaagagaatcagcgttttccctttctgacagtccttcttataccccaccaatgaaaaattatctgaagggacggtcacgtagctggaggtctggaatctggtggtcttgcagctttgaaagataggcgccagtgagataacaggatgccatttgggcaatttggtcagtttcacagatcactgtgatttattctttgtttgcaagatcgacataatgagccatattatcaatgagaccccatgtgggccctatcaatcatcaattttcctgctttattctaggggaaagatgttccaaaatatgtaagacaaaaatgtggaaactttccattttggccagaaagtagtcacgatattatgggaagaagagacttacaaaaggaaataaaaatttgaaactctctcctttacagatatgtctatgagagattgaaaaatataatttatgaattctaaagggaaaaaaaaaaccttttcagatacacattgctcaaactcccctcaccaaaaaaccccccatttgtattgttgacttaaaaataagtccatcaccaaagtttctatattcctccagattttctacaaagatttcagaaactatgaagttgcttcaatataagattaagccctcaaagcattcttactataatttcttagtgtttataagaatacacgctagaaataataggaaatagatgttattccacttagattaaatacatcagagacttttcaccagattcactctgttttagggaaactgactcttttgctattcaaagcataatagatcaaaagacagaactctttacaaagtatgtctaggattaccaattattaggaattgactgtattttaaacaagactgaatctaaaagaaggcattgagtggatgcaacaagcctgtatgttaacatgtaaag

SEQ ID NO: 50111 - DNA, 1605 bp, Bovine  19866881073687
  misc_feature (1)..(1): n is a, c, g, or t
nctgctgctcccaacaagggtgatgtagctccttgctatcctggttccttgcacatacccccaagcccacaggacactggccttgagtgcctcgcagtcctggggagctgactcgcagggagatgggtgcggtgggccgagccctgatgagcggttcccagagtctggttggtggatagatggaagttgtggaaggagcaggactcctgggctcttgcttctgtccccggggtgtgagctgctagaggccaggcatcatcctcccagccccccgcccctgaggtctcatggcagctcctgggtcatccgccctcatggtttcacctcccttgcagcaggcttcaggctctggagtggggtctttgccaccacaccgcgcctacctccatcgggatcctgtgacttaggtcaaggctgcatgttgtggagttgttctgtctgtgggtgccgcctcagtgagccagcccagggcagccttggccaggcctcacagcctcgtgaaggccactgagaatcccatgtttatgctttgcccgtgggccagacttcgggtgctggttccaggagcacctcgagggccctgttccccagccccctaaaaacctggtggcagcttgcctgcagtggggagactgatcgtggacaaaggaatcctgccttgatctcatacacacagagctttaattaaacacactcatgaaactgtaatgagccattcatttatttaaatggggtgagttatttcattaattttttgcgaactgcaagcagccgtcctaagatgaactgttttggagacaatcttctactccccggggggatggtctggggtgggccctgagattctgaccctgtccccatgccacacggggccgcccccaggtgactgctcctgcttgtctcctcccagctgtcccacccctggatgcacaggctcggggcatatccgtggcaagtactccaggcaccgaaggtgaggagctggcgggccctcaacgggttcctgggaaagaggtttggctgtggagggtggagctcctctcctgctctgcgaccctctagaactgtagggatctagaactgtccccctctgctctggactgatgagctccggtggcctcttgtgcaaccctgagcctttctgggtgtctccccagtggggctgctctgaggccagaggaggccttgtgggcaaacccagaacagagccagcacatggtggggtgaccgttttcactgctgtcctcctgggggtcccagggtcccactggacctcaggggcctctgattgtggtacccagttcagggggtggatgagggtgggaagggtctggaggtgggaaaggaaggtctgagtgctcctgggggcggtgggcacggggcagagtagcctgggccggcccccatccccagccatcccagagcgggtgactctggcgtggacagggccccccgaggttaggggtccccaggcaagcaggaagtgaaatttaaaacacaatctggtgctttttaatgtggacacttactgtaaaatttcgaacacatcgatatgccagtctcgcttttggattttggtggagggaggtgatgagaggcaaagag

SEQ ID NO: 50112 - DNA, 1288 bp, Bovine  19866881116190
  misc_feature (1)..(1): n is a, c, g, or t
ncagccctgaagggacccatcttcatttcctctgtcctgtccctgatccccattatcctgggacccccagcccttctcaggtcactgtgcctcttgggaatagaggaacccagggccccaaacttagaatttgggagtttccattttgggcaggatttcagtttggctgcaggtcatggtggacatggatgcttgtctgtggggctggtagggtctgagaattgggagagtccactgtttctttataactgggacttgtggaactcagaattgcttcccttatgacaggaaaatgaagcacacacctctcgtccatgagaaactagcaaacttctcagccactattcaaggaattccccctcctatatatctttgtgcgggttatgccctgtacagctctagggggcctcattcacttcacagcctggttgaatgacgccccttagggttgagcagggcaggagttgtacaaaggttcttggcagccctatgtcccagatgacagggatttgactccttcaaccacagcccagcccagcccacagggtccctacctcccagctgttcgtggaggtccctttcttgcttccctgcaaagagactggccagactggtcttcccgacaccaggatctccgagcaggaccacgcgatagagggcctcccaagagctttcagagtcgctggattcagaggaccagccgttgggggcaggtgaaggttgccgggtaggggcgttgagggagactgactggcccagtcggggatgctgggtctgtgtagaaggtgctgtgcccagaaggccaggctggtggccccgggcggacaggggcagtggagtgctggctcggcgacgcaggggggtctttgcttcttgctgagtatttagggtcatccttgggaaggggagtttccttccttccttccttctgcaagaagtgggagtgggtggtgagccaggtgaggtgctctgagccccttctgtagtgtcctgatgaactgctgctcaggcttcctccagaggcctttcttgatcagatgggaggaggcagcacttcagatcctctagatgggggctttctggcttcaggcccagagtgaacttgggtcaggctaggaggggtgagtacgcatgaacacacacatgcatacacacccagaggtcacttcctatgctttgaggacgatccactccccccagacacacaggcagaagggcagcagggagacaggatgtccacacaagcatgcacacagagctaccccttgcattcagaacgggagaccca

SEQ ID NO: 50113 - DNA, 1257 bp, Bovine  19866881223743
  misc_feature (1)..(1): n is a, c, g, or t
nggatggctgggctaggctatggcagagggtgctgggttgaatagcacagggtccttgtgtcctgtcttcatgcttctcatctccatcctgcaccccaggcccatgtgcttcgtgaagcagcttgaggtccctccatatggaagctaccggcccagcgtggccccccaccacacccagggccaacctggccaaggagctggagaagttctccaaggtcacctttgactacgcaagttttgatgctcaggtttttggtaagcgcatgcttgccccaaagattcagaccagcgaaacctcaccgaaagcctttaaatgtaagttggggaaactgctctgggaggtgtagggtctgaggggcagaggaggaggaacccttccccaggagcatgtagggactctccatctggggccccagctgtcccagtctaccgtggtgactttctcagagtctgggtctcacccacgttgtggccttcacattcagcatcaaactggatgtgtctcctcactacacgttgaaacaaaaacaagtgtgttatggtgtgcatgtccaaagagttaagcccaacatcgctgacatggtttaccctgtgggtgtgccctcccccggctgtcctttcccaggcagtttattccagctcaagggtggaggtctagggagagccactgtgctgagcctggatacccaaaagatgctcagacagggaccatcttgctggatacagtgtgccatttgtaatattagcaacaaaatttctgggtgcttgcactaacaaaattcattcctacaaacctttgagaacaagctctcctgtctttctaaaaaactattcctatacttgggtttcactgggcctttgttgctatgcaggctttctctagttgtggcgagcgggggctactctgttgcagtgcacgggcttctcacttggtggcttttgttgcggagcacaggctctaggtgtgcgggtttccgtagttgcagcttagagcatgtgctcagtagctgtggcacaccagcttagctgctcctcagcatggggaatctttgatcccccaggctagggatcaaacccatatctcctgcattggcactagactctcaaccactggaccaccaagggaagtcccctgtcttcttttggtcgcttattacactaatttgtgagttgcaagccaattagcttgcgtaatacctacaaaatggaaaactgccccgatgtacataaaggttggaaccggcagctcatgatgga

SEQ ID NO: 50114 - DNA, 760 bp, Bovine  19866881568855
  misc_feature (1)..(1): n is a, c, g, or t
nccaggtcacacagccgtctggctccagagtccacatttgtaaccattattcaaactgtattttatacatagggacctttttaatgttaggatttagtgaagaaatttccaaaaaaataggccatgagaaagttaagactttgggtcaatatcccttccaagggtttttggtcatagcatgggggatgaggggcagctccttcgtttattcattcaacaaacatggggcattgggagtacagggacaacgtggccatgccctcaaggaactgtcagtcaactgggaaaaggggatgaaaactcaagcaaatatatacagtaagtaggagttgcagtaagtgtcctgaaataagtgatcagggtgctgtgatgcaattaggacaggtgtgggaagggaggagagaggaggaccacttagatgggcctgttacagcgctatttccagatatatgacccagaaactcagaagaactgaggttgagtgggaggtggagggggaaagcttgcctgcctgtctctggattaaaagacatcccaaggaatcctcccatgatcccctgggcctacccataagtgttattcagcccatcacgtcctgccaaggtagagaattttacaatgatacagagctggtatcaaaatttctatgaggcaaagaacccacattccgaagggggcatgcagtgcaatggttaacagtttggtgtgaacccagctcagactccctgggtccaaatactagctctgccatttcccagat

SEQ ID NO: 50115 - DNA, 934 bp, Bovine  19866881694484
  misc_feature (1)..(1): n is a, c, g, or t
nactggctctgcctgcctcagtcgtagctgggagaatagagtgaaggtttgtaagctttaggataccctggtgattggaggctactaatggtcaagctgtttgtaattccatacagtcttccagtccacctgtctctcaggagatgctggggagaggtatttagatgctacagtagatctaaagctctcttctattaccctctgctccagccactccagaccttccaccaactcctgaactgccgtgtgcagctacttcgctagtttcctttgcttcgaatgtcttctggctgaaattcaacctctacatgaaggttcgagtccacctccagcacaaagctgccctgcccagccccaggcgcgctcaatcttctccctaaacccggcagcactacttgtattacaatctcagatctagttattcctcgctcatccacacacccaaactccgtggtgatagggctctgacccactcatctttgcagcattcctctgtcctggacaacagtggaggttcaggaaattctgttgtttggaagatgttttctaaagagattagtaatccatgtgtagaaggtgctatggagaattactcaagtctggggagcccctcacatcaagtgcctagctcattccatgctgcccttcacctcctttgtcctgatctatttcagaatttctccctgcaccaagtgtttgtgtgtatggcatgacagggaggctgaaagccacctgaactctgcttagaacaggcagaacaataaggcaaacggggccatctaagccctgcctgaccaatcccctctgcatctgacctagagggaaccagcagcaagttctccgatcttgggaaagaaaggtggcaggccccagtcactgctcaagttgggtaatgtttcgagaacctgggttagagcagtttcaaaagcggcag

SEQ ID NO: 50116 - DNA, 1464 bp, Bovine  19866880467622
  misc_feature (1)..(1): n is a, c, g, or t
ncccttcccctatttatttgatttatgtatctattacttagaaaaatctccagcttataattacatcagtagtttttgtgtgcttttcacattacttttaaagcttttttcttgattcagatgccatatttcaaggagtttgatcatttttataacaggcaggatttttctcctatttcactgatttattaaaaaattcaccatggtggtctgtgtttatattgccttaaactaattcctctttatttgaattccaaaagtgtgtttacagtacatagttaagagtttatcttttaactttttaatttatgaggtataatattagttaggtgtaagtaacttttcatatggttagaagtttttaaatcatctgtgagatgttttaaaattaaaggagtaaaaaaaaataaaaaaaattaaaggagtaaaagtaatcatgggtaaaaaaaaaaaattccaaagctcagaatttaaaactttaaaatattaataaagttaagtgtcttcttttttcacaataacatgcattagtaagatgaataaaatatcttccccccaaaatgtttctttttaaacaggtgaccaagtgaaatgggctggacgctatagcctactgtacaacctggtgaaaatgtcatgggaacttcggggagataaagagcaggatggacttaggaacaaaatatggcaaatgttacagaaaacaaaggatcgtgagaaagatgggcgaatctgcaatgcagtaaatattgctcaagtaagataatacgctgggtaatcaataggaaattttatcaccaggaagcatttgtcctttatctctgaatatccataatcagtgtgtatcagtgattcacaattgagaacacaatttacaaaatttaatactgacctaattttagttaaagaagagagttggcagtcttctgattaagcagcttcaagaaaggagttaattttgggaaagagtaattgttctgctttggacttgtgacttcaagacacaactctaactaggctgcctgtacattctaatttgtcgaggttagcctgggtctatgcctaattttccagctttcttattagtagtggattaattcattcttaaaaagtgtctcaatttggataataaattatttagttatcttaatttataagtttacctttccagcatcagacaatataagtcacaaatttggactcactacatctaatgtctttttctttaaagttaaaaatatgttttacaaattcttggtttttccattctgtttgaatatatatgtaaaatcattttgaaactagctatccattcttcataaaatacgaatatgattttccagtgatttttttaatgcatgtgatacctatgatatttcaaaactccatcaaatttccccccccccttcatgtcttattttgaaacaggttaatttgttatcctaaagtatactgtttttctgt

SEQ ID NO: 50117 - DNA, 2901 bp, Bovine  19866880930122
  misc_feature (1)..(1): n is a, c, g, or t
nctcctgccccccagtccctcccagcatcagagtcttttccaatgagtcttgtttaaattagggtcacctggtcaagccaagaatttgagtgtggaaagaaggatatgatgtagcgacccttgaataaactggggacaatcactctaacagtgctccgcaagttccaaagcaagtgaccaaccgttgaagcccagtgaggacagcctagtcctcctcaaacggtttcttaagatctccagtttcataaaatcaccctttagtccctaagaccttaccttggtaacccacacatgcctttcaaatttaatgcctaatattgcccagtccaaactttcttcctcaactagagaaagtaagccaatgaccttctcttaaaaggtcctaatttatttttggctcataccatttccttatcttaaagatgtcctttgacccttcccctttcgatcatttcatgtaactcatcatttacgtttccagctcatatactacttaaacaataatgtgttcctcattaatacacgaaaaaagagaccaaacatctatgtgagcttccgtttatgccatgaacttttacggagccagtcacgcatagaatagtccttttgtactactccttatcttctaaagaataggtattctggatgaaacataaaatttactgtgtaaaggttatttattggacatccttgcttcttccatagaatttagtatgataaagttaatttagtaagtactcatatttgcttcatattttttactgttcttagtgagaacttttatataatttctcactttacatactcatatatctcaatattaaataagagaatcaaactaaattaagtgatatttaaccaactagatattttctaatttatcatttatatcattacttatattgtttaataattcaaatctgtctagctgtctctagttaacctatatatgaaacgggtctatagtaaattattccttttgttagactacctaatacaaattaagcttgttttatattaaatatgtattacacataaattgatataactgcttttacaaatctttaatttagatttttctgtagggaaagcgtgccctcctcacatactgactatttaaaatgaatgaaagcatcccttggaagtctcactaagcaccgaaaactaattagcacatctagcggttaagcttttgtttattcctttattctcagaactgactgcttgagtaataaggtcttcacttggatctagcatctaaaaaatatttgccatgtctgattaagtgacttacgaatttcaaatgtaattatccatagaaatttagtaaaattttgaagaaagaagctatcttacaccaagtgattggccttgaaaacaggcttataaatagaattctaattctagaaatgacaaatttgagttagctcattcatgtagttacaatataatccacttgagatatgaaatggcatatgaaaataggtacaaaaccagataagaacataagtaattgaaagaatcatggaagcaggaaaaaaagaaaataataagaccgaataagatgcattgatcatcctctatttctcttagaaaatggctaaaaatttgactatttttttaagcttcagtaagtatcttatacaaaataaaatcaataataaggttcagaaagcacgtggaggatttatttcctataacccagtaaagagaacactgggtgaacagtggtcatcactgtcataggcacgatgatcttctctgtttctctttttcctgtgttcctcactccaaaaccaaggaaaagctaaagcaacctgcataaaagcaagtccatgaaatccaaaacaatgtagcttaaaagggcagcaatttgattggctttttcctcggaaaaaaaaaaagaatattagaaatccagagaaaagaatggactacatgttttcatattgtcctccataaagatcattactccaaatcagatgtataattcaaaaacaaagagtttaaggttttgttttccactaaggatctggcaccccactccagtactcttgcctggaaaatcccatggactgaggagcctggtaggctgtagtccatggggttgcgaagagtcgtacacgactgagcaacttcactttcaccagttattttactccccttggtatgcctgttggcaagtattcatccagaagtttagcatttcattttaactcttatgtgtgttacatgttgctgtaagaccatatgttaagacatgacacttaggcagtcatcaactttcataattatacctgggtggggggaaatagccagatttatgttagtttggtgactgaactctacctgtgatgaattttgttcttgaaggccttcttttttctttctagcattgctgtatatgatttaggtggtggaacttttgatatttccatactggaaattcagaaaggagtatttgaggtgaaatccaccaatggagacactttcttaggtggtgaagactttgatcaggccttgctgcgtcacattgtgaaggagttcaaaagagaggttagttaccagtgtggttaatgtgtagacattgaaatagagagaatttctttggactgcggtttgctttgtttatgattttttctcccgttaatagactgttgcatagtccactgaaattgcatttcagtttcatgggcgctctgaactgttctggttattgtaacttcaaattgtgaacagacaacaatgaaaaggatacagtacctggtgtataatagtactgtggtattttatataggaaacctgaatgtctttggattggggtatccaggtttttggagagaagtgctagaaccaatcctcacagatactgatggacaactatataggttccctccacta

SEQ ID NO: 50118 - DNA, 4830 bp, Bovine  19866880489407
  misc_feature (1)..(1): n is a, c, g, or t
natttgcctatggtattggcctacacagtttgacccctagatgtcagatactgttttgggacctggaggacacatttcttgaaatgaaaaaattgccatcatcttttcctcagaaaccttgatgagaagttgttgttcagttgctcagtcatgtcccactctttgtgactccatggactgcagcatgccaggcttccctgtccctttaccatctcctggagcttgctcaaactcattttcatgaaaactcatgctcaaactcctgcaaaatgactctcaatagctcttcccaccagtccactaatgattggactactaatacacacacagagtccatactgattgagatacagaaggaactgtgaggttaatctacagatgaaaccccatgtttggctttttaaaactttccctttgctgtaatatctacagataataacttctttttatgaggaggaattttattggatcaaactgtagtcttagtatcaatatgaaactgatccaagcagggattgtcttaaatggactctgagaaagaaatagtagtaaattcattttaagagaacagttttactttctttacaagaacagtgttggaggcttagaaattagcactgatctcgcgcttaaagcaaagtaagtgagacttaatgaaataaaataacactttgagtaagatgtagatcctgttgaaaatttcacattacctataaatagaatcattaggtttaaaatgtagatcttcacactgtgtcttcaggatgctaaaacagccggtagattcagccagcacattattcaaattagattttcagtgttggagaaataacatatctaactttatgactttgaagacacactttatttgtgtatatctatctatctatctatctacatatatatgggcttcccaggtggcgctagtggtcaagaacccacctgccaaagcaagagacataagagacacaggttcaatacctgaattgggaagatcctctggaggagggcatggccacccactatgcctagagaatcccatggacagaggagcctggtatgggctacagtccatagggtcacaaagagtcagacatgactgaaacgacttatcaagcaagcatacatacatgcgtgtgtgtgtgtgtgtgtgtgtgtgtatttggtgtctttcactagaatgggctcccctggtggctcagacagtgaggaatccacctacaatgcaggagacctaggttcgatccctggatccagaagatcccctggagaagggcatgacaaaccactccagtattctttcctagagaattctgtgcacagtggaacctggcaggctacagtccatggggtcacaaagagtcagacactactgagcgactaatgctttcactagaatgtaagttccataaggtcaaagatttcatctgtcttgtttatccagcacttagtttgttgcctagcaatagaaagttcttgatatcatgtaagaggttatcaataaatatttttaatgaattaatgtatataatcttatctatcattgcactgatgtttgaggcttttaaggaataagttgtatttacttttgtgatgtgcaaaagaataagattgcattgacttttgcttttttggtcacaatgagcaaagattcagtttacctcaaataattggagtttcggtgaggctgtttttcagcaataaaggaaaagggcttctgtgtttaatttaaggatggtgagaagtagatctcatggaaactgaagtgggactgaaagaggcagctgtgtgggacacaccatgagaagtcatgaatctccagagcttagccacaaatgtgactttgcttcccttcagcaattgaaaggcctgctgtttaaatctgattgctttttactaccacagtgtttaatctttggtttattaagtctttatactgtctcatatcttctgccttctgctttactcttggtagcctgaataaatcctagtgttataggtagcccaggctaggtacagcatcacattctaagaaacatagtccagtaaccaacactcacgtaaaataatttaaaattttacttcaaaaaaattttaaggttttagctcacttttcacaaggttatttcttaaaacctctttcttctcttccactcaggtgttttctgtcacaatttgtcatgtcccacaagactcttctcaacttgcaagtctcaggtgtcttttcaggccatctgtactgcagacacaatgttgccatattgtattaatgcaaagccctcccactgactcttgccctcccccttggtaatcctggacctctagactcctcaactcctttgtgctacactccccatccttccccaagagaagctcccttgactacgttccagttatcttgagtatattccagttaccatgagtatgttccacttttactgtggacatccttgctctttaggtcctttcctttatccagccaacctggtcagtcttttctctttttttctttcttcttcttctgctgctgctgctaagtcacttcagtcgtgtccaattctgtgtgaccccatagacggcagcccaccaggcttccccgtccctgggattctccaagcaagaacactggagtggattgccatttccttctccaatgcatgaaagtgaaaagtgaaagggaagtcgctcagtcatgtccgactcttcgtgaccccatggactgtagcccatcagggctcctccatccatgggatttgccaggcaagagtactggagtggggtgccatcgccttctctgctgttctcctattcctgttttttttttccttctctctctccacctgttccctttcctctgtccctttccttctcccatttcctctctctctcctttaaatctcagtcttattcatgcaaataccctatcctaatatctaccccccccaacttatcccacacaatttggttaataaaatggcccctagagggaaatatctagcaaatattttccttagttaagaagtgaagtgttgaggagagaacaaagctaggaaaactcatcctattctatttattcatccttcagatcagatcagatcaggtcgctcagtcgtgtccgactctttgcgaccccatgaatcgccggttttctatttcctcaaaatcctgtggtctccacccttgcttatgtctcttctgtgtatcctctagcttcatttgacactgtatctttatttaatttattaggtcttagcccaaagcgaagctttgatttggggcataatatgctttgactttggccttgactttgactttgggcccaatatccagtcagcaaagggctgtgggagaaggggcaaggtcatgagacccacacagagcatctccttcagcagacttggagagaaaaggcagtgccgttgtgtggcaagattgacacatgaagcaggatgtagtttgggctccttccttgggaaattcctggaggctgcagaatacactaggcttgtgtggacttcaaagaggttaattgactaattgtttcctttaaatttatctatgaaattctcaagtctttggaagaactgttctctctgtgataatttgcagagttatttcaataattatgatgggaatttcatgtcagataagtataaaccttagtgagttatctaaattggatttgttttttatccttgacagacttcactttaaatagtctttattgtagtaaacattccagagaaagactttctctttagttaaagcacctctatatatagtccccattttttctctccttggaaaaaggtatatagcaaaagcaaaacaaaacaaaaaggctttaatcaaggaaaggaactgggggaaaactacacctgcatttttctgttattgtcaaaaactcttgacttatagatgttagtgacacatgggaagctgactctatgagactgggatttgattatcttccattaaaaacttaaaggaaatctaacagaaaaaaaaaaaagttaagttagaggaatatgagccacaatagtatagtgagctgtttgggttccatgtgacttttatatatcttttcaagatggtttcagttctaggtagtagcaatgtagagaattgatgacaactgaagttcctgatgtcaatgaaaaatgctgcttcactggtaactggaagatatcttattctgggaagaatactactggttccctttaatttggaatcctgtggagggaggaagggctgctgtttgcctgaaacagttcctccagcacaagtcattaggtcaagtggtcataggacccgcttatggcccagttaccttggtaacacaaatatttgaaatggtaataatgctgcctaggatcaaaagagaacgtcttcagtaaactgtgtacttttcgtgaatgcttcatacatgatgatcccatagtcttacaaaaactattgtattagaaactctagtatttcaggtcagtaatgccaatgtgaggcttttgtagatgtaattttgtttctcaaacttgccacttttaaaatgtagacattaaatatagatgtctgcaaaaaaataataaaaattgtgtgcttttcttgctatttgggcttaaataatgcttttcttgcttgttgagcttaaagctcaacattcagaaaactaagatcatggcatctgatcccatcacttcatggcaaatagatgggaaacagtggaaatagtgtcagactttattttggggggctccaaaaccactgcagattgtgactgcaggaaattaaaagactgttactccttggaagaaaagttatgaccaaacttga

SEQ ID NO: 50119 - DNA, 1833 bp, Bovine  19866880492439
  misc_feature (1)..(1): n is a, c, g, or t
naaaaccttggcacttactctaacatttgtatcatgtggttaatgctttggtacactgtctgcagaggaaatatgctcatattgatttattgaaaacaaaattgaacatgcagagcaaaattataaattttattgtgaatgtggaacaatggcagaatatgccaccccaaaatatgtcacttcagcataacgattattttgaacaaaagatacttgaaaaacagcagatacaaaaaatcattctgatctcccccctttcttcctgcaaacaggagataaaattagcttgtgaaagatgccctccctatactaggaagaaagaagcatgtttatgatcaaggatgggaaattaagaagcggaatccatatgaacagacttcattaaaataattcttatcttcctttagcctcttcataagttacagttacttttccacaattgtctttctctgatcagtttagtacaaaagtatttagattttgccacttcttcaggtcttcatttcccaagagggctcccatgtcacagaaaatttgtgagcttgtctcctattaagctgttttttcttacagagcccagacaaaaattttcctcctctacactgttcttggaaataagcatttcagcaggaacattatatattttataattgtgtctatatcaaaaaagcaaagtagaaaattagagcaggttatattcatatgaatataaccacattttggtgtcaactataattttcctttaatttatcaaaatgtattgctcagatctgtacataataccaagttatgacattctctaggaagattcggagaaggcaatggcaccccactccagtactcttgcctggaaaatcccatggatgggggagcctggtaggctgtagtacatggggtcactaagagtcggacacgactgagcgacttccctttcacttttcactttcatgcatttggagaaggaaatggcaacccactccagtgttcttgcctggagaatcccagggacgggggagcctggtgggctgccgtctatggggtcgcacagagtcggacacaactgaagcaacttagcagctaggaggattggaagactaaattttaagtcatgtccaataattataatattttccttagtatcgcattgctatttaatattgactgtgtggatttaggtaaaaatatcatcaaataaaacaatatgatcttaaaattattctctaaaatctatattggtaaagttgaatttcattgggacaaatatttgaaaggacttttttcttaaggaacagccattggcaaaaaagactttattcaaattattttaaattattgcaaaggaggtgagaaagtgatacttctaataactatatctgaagtattgaatactttagacaccatattcttgagagctatataaaatttttatgataagagaaatagtttacctttctatttgattgctcattaagtaatatttatttaaactctatcggtttaaatgtggattttttacacctgtgttggagtttcaagacgtgactacagttcttgattttaatccaccagcagttttgaagtttgcggcagcacatatgaaggttcagagccaagtggagacctcccagtgaggcagcttccaagctgaatccacaatggattcatctatagatggtgaggaaataatgggataaattatggaggcatttcttctgcatgaaattttggggagattttgaatttgctaacagctttaccaaaagtcacaaactaacatatgataatttgatgttttgtcttgtgatcacatgtcccaattcttttgtttagctg

SEQ ID NO: 50120 - DNA, 2335 bp, Bovine  19866880800650
  misc_feature (1)..(1): n is a, c, g, or t
nccagcaaatctggaatattcgcagtggccatggaactggaaaagctcagtgttcattccagtcccaaagaagggcagtgtcaaaaacagtgagaactaccatacaactgtgctcagtttgcatgttagtaaggttatgctgaaaatccttcaagctaggcttcagcagtatatgaaccaagaacttccatatgtacaagctggatttagaaaaagcagaggaaccagagatcaaactgccaacattcgttggatcatagagaaagcaaggggattccagaaaagcatctacttctgcttctatgctaaagcctttgactgtgtggactacaacaaactgcacaaaattattaaagagatgggaataccaggccaccttacctgtctcctagaaacctgtatgcaactggacatgggacaatggactggttcaaaacttggaaaggagtatgatgcatattgtcatcctgctattttaacttatatgcagagtacatcatgtggaatgcttggctggatgaatcataagctttaatcaaaatttttgggagaaatatcaacaaaatcagatatgcagatgataccactctaatggcagaaagtgaagaggaactaaagagtctcttgaggagggtgaaagaggagagtgaaagagttcgctttaaaaccaacattcaaaaacctacgatcatggcatccagttccataacttcatgtcaaatagatggggaaagaatggaaacagtgacagattttattttcttgggctctaaaatcactgctgatggtgaccgcagccttgaaattaaaagatgcttgctccttggaagaaggtctctataacaaagctagatagcatattaaaaatcagagacatcactttcacaacaaaggtctgtaagtcagagctatggtttttctagtaatcatatatggatgtgaaagttggaccacaaagaaggctgagaactaaagaattgatgcctttcactttgtggtgctgggagaagactcttgagagtcccttggacagcaaggagatcaaaccagtcaatcctaaatgaaaccaaccctgaatactcattggaaggactgatgttgcagttccaatactttgtccacctgatgcaaagacatgactcattggaaaagaccctgatgctggcaaagactgagggcaaaaagaagaagaagcttgcacaggttagatagcatcacagactgaatgggcatgaatctgagcaaactcagggagatagtgaaggacagggaagtctggtgtgctgcagtccatgggcctgcaaagagctggacatgacagcaactgaacaacaaacaaatgcttcttttacccaaataatttttaatgttctttttccttttggtaaagttttacctacttctaagataaactccaaaacttctcttaacttgtaaggaaaactggcagtattctattgtttattgaaggaaatcataaattctttaatattgaaagaaatcataaattctttaatattcctctcagagagaaatgtcaactttctgggatctgagattactttaagcactttatctttatatagacagaatgtccccaggcttcctaaaacagagtttacaaatgaggccacattaacagatctgaatttccttggttcattagtctccccctgctccctggagaaggcaatggcaccccactccagtactcttgcctggaaaatcctatggacagaggaacctggtaggctgcggtccatggggtcgctaagagtcagataggactgagcgacttcactttcacttttcaccttcatgcattggagaaggaaatggcaacccactccagtgttcttgcctggagaatcccagggatgggggagcctggtgggctgccgtctatggggtcacacagagttggacatgactgaagtgacttagcagtctgctgcctagcctccatcccatcccagaggccacctctgcaaactcctggtctttctccagggtgggactcagttgtgctcctccaccatggcctcctctcagagtggaagggaggagagcgcccctcccacactcaagcctatgttactttgttttgttttgttttatttttcagtccccaaagcagcacttagttatcctcaatctgataaagttgcctcgaagtctgtcagtttctgctatctgtctacaagccctatcttgtcctatgggttgaagaatagaaataaccacttttctccatttctcagtctctcgagcccggggaatctgcaccaatcttgcctgcatgcatagcatcaagttatgtggatcagtaatgggg

SEQ ID NO: 50121 - DNA, 2416 bp, Bovine  19866880921237
  misc_feature (1)..(1): n is a, c, g, or t
nttagaccacaaacttacatatgactgttaaaatattaactcaaccttcaacaggcatgagaagttgaagttgtttacaactagccaggaaaaggattattgagtgtctttcagcatattaagacctacgaagaaaaacaaaaacagatttctggattgggttctgggtttttgctcaaagtagtagcaggaaactttttcatctgacaatgtatgatgcgatttaaaaattttttaaactaccctcttgataaaagaaggaagcaggaaggaaggtagagagtggaggaagagaaaagcatacttatcttccaagacagtttcaagaattaagaataatgtacataaagtacacagtacagtgttcacatgtgctagacacactattgagagtatctgccatgatgacgatcatgtaaaattgcacgttccagggaatagtatctgcagacctatctacatttggttagcaagtcacctactttaccactcatgtacattcgattacttgatttcactgacatctctgagatagttgggaaatttcatactcctagccttgcaatcctagactctgccattgtcacaggcttttccactcactgtttcctgggccactccttggactttatgcccttctcacatgtatatgtgacacttctggtctctgtcactaacagtagttggatctgaggtcatgttttggttatgttgctgcccagctcctcccaaacttagtggtttgaaaccacctttttattatctctcatagttttgtgggttgacttgattcagatgggtggttcttatactccaagtaatgctggctaggattgcagttacatgagagcttggatggtctggtatattcaagattgcttacccatatgactgacagctgatgatggccatccactgggagctcaggtgggctgtcggctggagcacctgcccgtggcctctccatgcccaggttcctcgggcttctcacagcatggcagctgagttcctacagggagaatcccagcaatgagtgtttcaagacaaaaaaatcagaaacttccagtcctctcaaaaacttgactcacctgtgttgtgttattggtcaaagcagtcacaggccagctcgtactcaagggggtgaaggagtcagctccactctcgatttgggaatggtatacagggcagggaagaagctgatgagtgaccatgttacaacagggtaaacattacattcctttaaatttgccttcagtgagcctgtcctttaaaaggaccctcacaggctcaaggttcatgtcccggaagtaattgtggaaaaggtggtgagacatcattggcctaaacatcagaacctgttctgatttgttttgggtccagttgtgtcaatatataaacttgatactatgtaatctcttctgaaagaaaattgttatccagtctgtttgttcagttgctcagtcgtgtccactcttttcgaccccttggactgtagcacaccaggcttccctgtactttaccatctcccagagtttgctcaaactcatgtccattcagtcagtgatgccatccaactgtctcgtcccctatcatccccttctcctcctgcctttaatctttcccagcatcagggctcttccactgagttggctcttcgcatcaggtggccaaaggactggagcttcagcttcagcatcagtccttccaatgaatattcagggttgatttcctttaggatgggctggtgtgatctccttgttgtccaaggtgtcacctatttgggtgagaacaaaggcaagaggagtctcctttagtgtgcctgtccatttgggggcagtaaaggaactgattccaagtggttgccatgtctcaacacacagacagaagaaatgccaaatgccaccccaactgccaggttaagagattggcctgtgacgatggtttaagaggagacagggttagcagggcaccgctagcccagagactgcctctgtgtgactgagaaacaggggttcgttcttctgggtatgtgcagccccacacaggggtgcccagcttggcaggaggaggacgggtcctcaccccagccctcccagggcctgccaggtgccctgacacagccacccacgcagcttctgtcactgagctgctctgcaaggtacccgctctatcacctcaaaagaatgaagcaagcttcctgtctcatctgagggtggcacgctgtgacttgggttaacatgatccgttcctcttccccagccactgcagcttggtacacacaaggagttccagttcagcgtaggggaatttggaagataaaaatcagttcagttattagtttagtctcacatctctcagcttgtcatggttgaaatcttcaatcagtggttcccagttgccacttccttttctaatc

SEQ ID NO: 50122 - DNA, 1201 bp, Bovine  19866881094313
  misc_feature (1)..(1): n is a, c, g, or t
nacatgaatatacattctccatctgtgcaaaagctgagtttgggtattggaaggcctacacatcctattgaagagacatttttcttatagcagtttcttgtttacagttgaaaatctaaaacagaaaaataatctctgatcataagttctgatttccaccttctgtgaccctcacttaaagccaattggtctcatgtgatcttcagatcttaactccaaatccatagcatcatggggttcacacacttgggaatagacaggaacttttgtagaaacagttcctaaaatggatatttcaaggaaaagtcatttactttgctaaagtttgggagaggccataagtgttttatcccataggactcagaaggttataaacaaatgtaagactttaccttcagcactttgaaactcacaaaataattttgaagcttgtattggaaataattttgtacacaaaagaataaaatgctaagatctgtttatagaagtttaatttaagccaatgcattattctgtggcattaatcctaacaacctcactacaaactgcattcatttaacccctggagattcagttcctttacctaaaaatgagattgaaccagatgatgcctgaaaatcccattcaggtcaaagatactataatttgatatcaccctaaatagtaaacaatacatttccattttgattggttttatgctttttcaattctcttgtatagttgaggaaaaaaattacaaaattttaaccctcctactgttgtgcaatgtgtctactctgagttgattttactcatggaattatattaactctttcagcttttaaaccaaagtatcagacagaagagttgaactcccagcacagttaaaacgctttattctggaatgcataatctactgccaaggagtaactaggccttgggaaaaattatcatgtccttcattgttctgtaaaaatatttaactgtaaaggatcactttgaaggatattttctctattttacaaagatgctaatttgagaaagtcaagagtaaacaaggaaaataatactttttccttgaatttaaaaattacaaatgtcaaacatatgacttacacaaagtttaagaataataaaactacattaaagaaagaaaaaaatggatgggtaactcctatacaaggctggatttccaaatataatgcatttttagagatttagg

SEQ ID NO: 50123 - DNA, 1537 bp, Bovine  19866881351225
  misc_feature (1)..(1): n is a, c, g, or t
nacacatagctagagcatgtgttttgtaatcctaaatagtaatgggttgtattcttaccaatggttatggagtgccctaaggagaaagcattggttgtacctgtattttcatgggtggctgtactcttgtgaccacatcaaaattcttagaaagtggttggaaatacagggaaaacagagagaagctctgctgtttccacctgttcctgagctaatcccttttattcttatggcgggtgtttatttcatcctattattaccaacttgagatcctcaatttaagtctctggtattgttttttatgtttttcattaatttgtactggatttattgttagtggatcaggatgctaaaatctttgtttctcatctcatctatgttgtatgtatttcccgaaacgcatcaaacactagagtacacagcattggcttaaaagtgagacataatgcagtgtcatgcattgatttatggattactgactttcttatgcactctgatttaaatcattatacttgggtattttaaaattgcccattgtaactaactccacagcattaatggaaaaacttttgaccatcacatatagctttttttttttttttttttgagaaaaaggcacaggagttttcatttctaaatgtttgtgaagacagatttgtgaagcatctttgtattgctggatgattatagcagcatttataaagttgaatgtaattaagcaaagtgggttcttacactggaaatcaaaagacttggattactactttggcattaattcaggttaatgcaacctgtctggacctgtttttcaattaagtactagggattctagaagcttgaaagtggaatggggcaaatctttagcccctatcattggagaatgatgcctagggaagagtacctggtggaccttccctcctgaggatttaggtgggcattgcaaagatttttttgaacttcctgttttcctagttcatggtgaacatttcactttaacttcaaatgctgaaagagcatactacattgcttacatatatttcagagttagtgtgagggtgaagtgtattataaaaagtgctttgaaaaaatttatcattccatgaatatgtaaggaattaattctatgaagaagtgtttaaagataatgtatgttcatctggaacaagatttatagaataagtgttcttataaattgaataagcatcaccaaaattgaagttcaagggaaaaaaaaagcttgtaggccaactatagatagtagtacaaggagaattaacttgtacttcacaggataggataataatggcaaaagtcccctgatgaattacaaaaaaagagttaaagggaatgtaatctaacagttgaaatcagttcacaggtttttactttataaagctattgaggatctcctttgttggcaaagctttttactatgagaatacaaaaatgaataaagccccatgtgtggctctatgtgtcactttcatgcactggagaaggaaatggcaacccactccagtgttcttgcctggagaat

SEQ ID NO: 50124 - DNA, 1112 bp, Bovine  19866881392729
  misc_feature (1)..(1): n is a, c, g, or t
natggcaacattgaagtcaagttgtgtgaacaacctgaagagaagaaacatctcaaacgacaccttaccctctttaattctgaactttctgagaattctggtttaggcagtgggcattaattataactgtcttcataattcatgctattcatagctgaatctgaaaattattttgaacaaaagttaaagacttgctttttatctaaaagccttctccatgtgcagtcagtgtaatatggctttctatttattgctaagttggatgagatcatttaacacttgtattttttttctgaagtttaacagttgaacactataatgtaatttttagtgcaccattgaaggttggtgatagtctcttgcaaatgaagtgtgtccaataatcataaagccaaagacagtgaagacacagcagagtgacagcttaggttttgagccagatgcttgggtttcagtttcttacccatcaccatggttgtaatgactgaccagccactcaatgtcttcaagtctcctttccttcttgtgtaaactggagtggttcctccaactccaggaagtttctgctgctgctgctgctgctaagtcgcttcagtcatgtccgactctgtgcgaccccatggatggcagcctaccaggctctgccgtccctgggattctccaggcaagagtactggagtagggtgccattgccttctctgaggaagttgctaccaaaacaaaatgagatagcagtgggaatgcactttgcgttctgaagcacccaagttctgaagcattattgtggttcttcatgtcttggtacggccccaccctgtatctgttctcttttcctttctgagacttgacctcaaccctattcaacctttcacatgtccctgttttgtagctagtttctttcatcaaaagaagaatattcctgggatcctcattcataagttgactatcgtatattttggagaaggaaaaggcaagccactccagtattcttgtctggaaaatcccatgggcagagaagcctggtggactccagctcatgaggtcacaaagaattggacacaactgaatgactaagcacataatacatttaggccaatctagctatatcaaat

SEQ ID NO: 50125 - DNA, 878 bp, Bovine  19866881403091
  misc_feature (1)..(1): n is a, c, g, or t
ntttctgctggcaggcaaatgcagaaagtgaccctggaacattttattttaagcattaaagtcttaccaatataagttcaaggaagagctgaaaaaagcagagaaaactatcttaaagcaaattattttattccacttgaaaaacctccagtgaaaaaattgagatcacacaaatttgcagtaatgtgcttgcagggaggaaaatgattacaagtaagaggggtggaaaaacatttcaacactgattaccaatcccagcccccagtctacctcaagtcgttgcacatgccacatgggagctcccacgatgatggccaccagccagaccagccctgtaaaacgttaagattattagaatgcaactcagcaaagcaaaatccacctgcgcttaattctctaaccataaagactccttatgttcaagggaccgcatcatattttccctggcgcagggcagtggtctcctcacattttccactctaccctccaaatcgtcactggagcataaagaacagacttttggacacattgggagaaggagagggagggatgattttcgagaatagcgctgaaacatatcggtaaaataggtagccagtgggagtttgatatatgcatgacacagggaacccaacctggagggaaggagtggggagggaggttgaaagaggggttcaggagggaggggacgcgtgtatgcctatagccgaagcatgctgatgtacagcaaaaaccatcacaatataaattatcctccaattaaaagtaattaagcaactaatttaaagaataaaaaagctgttgctggataaagcgcaaattccttaaaagggtccccggaggttctctacaatgtcgcttgcctctctgtgtcctgt

SEQ ID NO: 50126 - DNA, 940 bp, Bovine  19866881824875
  misc_feature (1)..(1): n is a, c, g, or t
ngcttcccagttggctcagaggttaaagcatctgcctgcaatgtcagagacctgggtttgatccctgggttgggaagatcctctggagaaggaaatggtaacccactccagtattcttgcctggagaatcccatgggtggaggagcctggtgggctatagtccacggggtcgcaaagagttggacacgactgagcgacttcactttagttatacttagagggagagctaaaatatgttgttcaggaatatctgtatatcattagtaatcatctatatagcctgtctgaggaagaagtgtgctattttgttcctattttaatcatcttgaagacagtaaatattatgttgttaggatagatttctgcaataaaatctcatgaagcattctactttctcagctcagattttaacttgagcacacactcctcaaattctacagtaattgttattactatagttgatactcagtgcttgcgaaatcttgaaggtaacagtgctgtgacttgaaagctgttgcatcaattaatttgagagagcagaggaaccaaagtaatgaagcattaaaagggctatattttcagagtagttgtatgctctacacgacaatacaaagaataccatctccagtgagtttaattaagccaaatgggcataactacaaattgctacccatatttttgaggaggagggaatgtgcattcttgctgtcactgatgaatattttgcattgatcttattgcttgactcctgactgtccaccaggcatagacctactgtttcttgttcacgtctggcctctgttctctccagggggtgatcatccttttggtggagttcacacaccatatccttagcctttgcctttggctccccaggatctgggtttttggctctatagcatccacatcacttttcatgtctctgcaagatagcactgta

SEQ ID NO: 50127 - DNA, 1252 bp, Bovine  19866880556374
  misc_feature (1)..(1): n is a, c, g, or t
natctcctttagaagggactgcttggatctctttgcagtccaaaggactcttaagagtcttctcccaacaacacagttcaaaagcatcaattcttcggtgctcagctttcttcacagtccaactctcacatccaaacatgaccactggaaaaaccatagccttgactagacggacctttgttggcaaaggaatgtctctgcttttgaatatgctatctaggttggtcataagtttccttccaaagagtaagtgtcttttaatttcatggctgcagtcaccatctgcagtgattttcttattaattacctaatttatatatattgtagtgtgtgtatgccagtgtcagtctcccaatttatccctcccccagttatccccttggtaactgtaagtttgttttctacatctctgactctacctctgttttgtaaataggatcatttgtaccatttttttaattccacatataagcaatatcatatgatatttgtctttttctgtctgacttgcttcactcagtatgacagtctccaggtcatccatgttgctgaaaatggcattattttgttcttttttatgattgagttgtattccattgtatatttgtaccacatcttctttgtccattcatctgtttatagacatttagattgtttccctgtcttagctattgttaatagtgctgctatgaacattgagggtcatgtatctttttgaattatgattttctttggataaatggccaggagtgtaattattgggcatatatccagcatagtatgaaaggtagcagaggaccttggacaagtaaaaggacaagaaagatcctctgtaatggcatagaatgaaagagatagttaaaaaacaaatcagttgtacttttgtgtgagaagaaattcaaggttgtagcttaggactgcagtttcctaaggaagtttttattcatttatttttacttttatttgcatttattttttgcggcatttattcccgggccataagtttttgtttcttcagtttcttctgggatctttttcttctgtgcaacttcctcttctggtttaggaacaatctgttctttttcagtaaggatcctctcaatgtggcagggagagctcatataagggttgatctgaccatgagctctgttaagtcctgcaccacatcctgggggctttgttcacatctaagcccttaagttcaacatcagtctctgcatttttgagcctgtgtagtaaaaattcaggactg

SEQ ID NO: 50128 - DNA, 1224 bp, Bovine  19866880584540
  misc_feature (1)..(1): n is a, c, g, or t
nccaagttcagtccaaaacttaagaagtagcgtggaactttccaaactcagtaaacgaagtgaccacatctcccccagtaagtgcagcgttctccatcatcctcgtagacacggcctggcacccgtgccgcttcagcaagagccttcgagaagacatgacacctggttagtatcttaccaggcacctccccagcccaagcccagcacaccctggcctccaatgaagaaagggctactcaaccttcccccaaccccaagtcagccaacacaacttgagatcattgtttttgtccacattgggggttgggaggcagctccaggtcccacctgcagctcacatgccatccagaccccaaggggcacatgtgatcccttgacctaaagatgcagacttgggggcactgcaggaccaggctggggctagtcccagcttgtaatcatctctcctgattgaccacactagaggaggaaacaccccacccttctgtgcctagaccctcactttgacaacctggggcctgagtctcaccgtccttgagagccccccaagtgattcattaagattacggggcccagtctggccatgatgctaaagggtcacagagcccccctcacttacctttggctgcctcgttacaccctgccggtcccagctctgtgggaagtcgggttacggcgggttgcaccgttgcccctgccccctcgaaatccaccccggaaactacggcctcggaggaacctccctgacactccgaaggtctccgtgttgagcttcctctcctcagcccacgtcgtccgcctggaactgaaccacaaacaaagaacgtgaaactgactgcagcaggcagctcctcacacagcctggggaggaaggaggacagatggtgactcatcactggagccatggggggcggcggcaatccagtcaggaccttggagccggagcctctgcactgcaaggattcccaggcctatttcctactggacgggtctctcacacctgcaacctcttaaagccagcacaagactgctgtgtgctcagggtgaagggcaacaagagcctcttcctttcctttctgctgtacccccagcgcccactactccactggagtaacgaagggacctgagtgtccacaccatgctcatcctacagactccatttactgtctagcatgttcctgggcagcacctaggcatcagcagttgggtactaaaaacaaagca

SEQ ID NO: 50129 - DNA, 2508 bp, Bovine  19866880590862
  misc_feature (1)..(1): n is a, c, g, or t
ntttcctggatagaaattagaaggtataagtgaaaaactcttacaaagcagactgttatcatagcctttggtctaactaagatgctgtgtatcatacaagaaatgtgtatttcttctctaaaatgtctttcgggaaaatgcagttactctcatcgcctgatgatgggagtataagccaaaacatgtgctcccaaggcacagatcaaattcacagctcactcagcccagcaactctttgagaaatgtaactgataaatgcaaaaagacaatctacaagacattcactgtgatgtttcttatcgtaaagaaaaaccgatacctaagtgcacaataaaaggaacagaatcatgacacagctactaaaaaagatgctgaaaaacactcagcaaagaagcatgaaaaagttttaaatcacaaacagagcacaatccccctggtttaaacattcatccgcatgtaggaaaatcgctggaaataaacttgaggaggacgccgccactgctgtggcaggctacaactgctgtgcaggccccgtcatccctggatgcagctggtctgggcttcatcacacagacattcccacagcccgaaagcctgatacaggatgctgggcccttcctgcggccctgcagaggccactgccctcagaccccgtcatgtacggggccatggagactccaagggctccccacgtgcacgctggggcagcatgacctcaacacacagccccgtggctcccgagaggtggctctcaccgtggcagctgtcgaggtggtggtggcccctgggaccgtccgctgaggtgtcgccgtctgaacagctgtcgctgtcccaagtgaggttgtctgagcagtgccacccaaaacaagttgaggctacgagaatccaaagcatgaggtaaacagatggccttcgtgagactccctgcaacggggcaggccccacaggacccgcgaccttgagggaccgtttcagccccatggctgaccgtgtccccgagagctgccatcctgagcaccaaggaagcaggccttcacacctgcagcaaaaactgacagaagcaaagccgcggccagaaggaacctggccgtcaggagccaatccagagtgtcccagtgaggccaggacaagtagcttttcacaacaacccagatcacatttcagaagttaaaaggaaaaaatatgaaaacagagaaactgaaaagctcatcccctggctcgtgcagggaggctggtgataagagagccagtatgtcccagggcagcactgggactcactggggtcctgggctcccctccgctgccaaaacacccttctctgctctcccaaagcgagtcacatccagaaatggtttttgaccaggcaggggccccatgtagtcggtgctgagagggaggggtgactttgttcaacaaatacatttaaacaaacgaacaactagacaccaaacaacaactgggctcgtcaaactctcgcgagttctaatcccatgtgagcaatcgtgcaaatgtccactgcttctctatcgtaaattagcactcttccaatgtaaaagtctagacttctccaatttctcaaactttcgtatgactttggaaggcagggggcagtataaccctgagcatgacttgcatgcggctgctctcagcaaagcaggtcccggtgcctgcctgctccaggaggtgctccgatagcgctgctcatgggggggcaaagggacaggggggccctgggcagacagctatctgcaacctcaggctgtaaacactggtttcccaggagaaacgtcagtcagaagagatggtgggctttctttatcattgatgttttctttcacttgtaacattaagcacttattacttttgtaacaagaaagtagcaaataaaaaacttcagaaagaaaagggaaggaaccaaccagtaggcatagcagagctgcttctggacaatcagaaacaaccaagggcacatccagttcttggaggttttcatttccatcaaaatgctcccctcacacgtgctcccactagccccataaaaacaccttccacctggattaatactgagatggcagacagaacctgttctgataaacctggtgcaaaagctcacaatgaacttcactaccttctcagaaaaggctcttctctctacaactgaagctcaagacactccaaccaagctgaacttggtcagacgactcccaaccccaggaagcaccactgccgagcagctcctgtagcgggaagagactaccgagtctacttgggaccaactgctcctccagctgctctgaaagcagtgtcacggctgcgggcaccaagagacagatgaggacaaggtcagggcaagcaggaagaccaaggcgagtgaggaggccaagctggatcagggccagaagcccccacgccgcgctgccggcacccaccagggagggcactgtgagagctacacactaacacacacacagcgaggacacgccctcctcggtgcagcacacaggcacg

SEQ ID NO: 50130 - DNA, 1749 bp, Bovine  19866880785949
  misc_feature (1)..(1): n is a, c, g, or t
ntttctgttgtgtttgcaacagaaggtagactgtcctgtgttcacgtgtgctgggctgctcctccgaacatagttactctatagttaggattcattctgtctcagaagtctgtgcacctccacctagtcttcagctgtctgctgcaacagtgcccacaggaacgtgggaggggagatggcctgacctccccctctggcctcctcctgtggctaagcccctcccgtgagctgggaattctgccaagactggcttccgaggcttctcttctgccctcaggcctggggatgcctcggggtggggaaagattcctgcagtgccggctccaagggcagcctgggaaccctgggctcttacaatgagccttcactgggggagcacaggctgtcacttctctgtagtcagctctcattgcttcatccttttttattttattgcgccttaagcaaaaatgaccatgttctagcattttgtggaagatgccagactgagatggttcttgtccaggagggcccagagtgaaacacattctcagaccatgaattcaccagcatctcaggactgtcgagcccccacggggttagagcttatgtggtttgggggaagcgttttctaaggcacttgagaggtgttcatggtggtaggggtttccctcctcggggtgccctaactaggggagcctgctggctttgttgctgcctagactcagtgcaggggatggtacaagtcagggctgtgctgcgtttggtagaatttctcaaggcagttgccttcctctcctgcctcattcgccagctgggagacaagtatcggggtgtggggtgtgaggcttgctccttttctccatttttaaatcctcttcttctcaactcaggagccagctttccatctgtctcagtcagcaagagccccatggtggagcaggccgtccagactggatctcttgataacttaaactccaagaagctgttacctggcaagggcactgtgggcatgcagctcaatgggcgcccggccccacccggcaccaaggccaccgccggtacttaactgctctctcccctggtctttattcatgttctcataggcacagtgcttcctgggggggtctctatttttttaactagatcccccggcccctcacctcacaagccctatagattttgcagggcagcctcttgccacatgtaccctgggggtgccgcctatatcccttgctgggctttgcttctgcgggtactggccttaaactctttccttttgcgccttagatatagctcagccagcagctgtgcaaactcaagggcaggtgaatgacgagaacagaagacctcagaggaggcgctcaggtaacagctattgccatttagagttctggggagctgtgctctgctcactgctcctgcctgcttctcgtgggtgacagtttcagggggctgggttcagcggtggcttccatgtattctgtccctcttggtctgctgtttgacactgagcaatgttgggttagtggcttaccagccaaggccactctttcttctcacagggaacagacgaacaaggaaccgctccagagggcaaagccgtccaactaacatcaaggaaaacacaatcaagtttgaaggtgactttgattttgagagtgcaaatgcccagttcaacagagaagagctggacaaggaatttaagaagaaactgaattttaaaggtctgaaaatttgccctccccccaggagtgtccatagagtggg

SEQ ID NO: 50131 - DNA, 1169 bp, Bovine  19866880904012
  misc_feature (1)..(1): n is a, c, g, or t
nttgcccaggtttcaaacacaaacttacttccagaagggccttgataaccagcttaatagtcagatcatctgtttcaatggcttcgtcagtataattcttctccaggaattcacgcactgacttggcaccccgggcctatggcgttggcctgaaacagggatgtgcgttacatggcacagaatgcaacgattcagagccagccagtgccaccctgctcctgcgtgctgtggagaggcagctgggctgggggaggccttgccccatggcttctttttgcaaagggctatttggagttggtgctcatgcccactaagaatgggattctaaggaaagacacacgggcatcttatatacgccacgtgtccttagagctcactgtcctttgctcccaaacatcaacactgaacaacttcctggcttccacatcacaagtgtcatgagcacacaacgtgtgtatgcacacatccctctacaggatgaagccagctcaaggtcccaacagcctccaaaactgcttccaaaggcaaagcagccccaagcccctttcttgccagggactcaccttccaggcatggtatgtgcccgaggggtcagtctgatagagtcggggggtgccatcaaagtcaaaacccacaatgagggcagagatgccaaatggccggcgcccgttgctctgcgtgtagcgctagcggagaaagagacacagtgacactgcagcctccacatggaggctgcccaaaacccactgcgaataaaacacaccatgttccaaacacagattacaacaaaaggatgaaaataaattaagcccatgttcaggttacttgtaattcaagtgaaaaatgaaacgagcccatggtttttcagcattcctccttcctgtgctacattttcattcttagatcagaactgcatcacggaacatggctggggttccttggagttactttgacagcagacacaatctggctacagaccaggttcacaagtgactaagatttcaccaagggcaggagtggcttttagccccctcacaactgtctggtgactggtcattcagaacaagacaaaaactacatcgtgtccctccagaaatgtgaatgtggactactccaggccactaaataagaacaccacaatgccactgaaaaggatacacaatagtaaa

SEQ ID NO: 50132 - DNA, 1935 bp, Bovine  19866881211649
  misc_feature (1)..(1): n is a, c, g, or t
ngtaacaacagagactgatgcaaactacagaaaatgcctccccaactccccggccttgaggcccaggaagaaagaggctgccatccaggggcagtgcagccagtgagagacaagtttacacccccagtacaaacatgagaggagagtcatgacctcaggtctgtgcataagagcacgcagactgcggcctctggtaggtttgtcccatcactgggcagagaagactccaatgatgaagggacccctaaagctagctagaaacatggaggggaggacaaaaagggacaacctctccattgtatggacatacaatactatacacagcaccaaatatgtcacaccatcaaagcgccatctggcaccagcgtgcacgcttgctgtcctaccccgcatgaaatgtgcgtgcttcacaagcagacgctgcgtgaggcgaggggcagcctacaggtcacagcccctcagagctgtcactggcctgtccatcctgggcggacatgccgcctcaggattcctcatagacgcgggtccttcactgctggtaatttccgtactggccctgcaagagagcaagacacagatcataccccaacaggcctgagtaggagggtccacacctgaggatgagacagatcccaccccagcccacgcccaggatgagaggtggatgagcatggttggccagcgaccaaatgcctcagcctgtgtcctgaggcaggtgggtagctgatgttctggaagccaccatccaggctgagatgactgacttaggtcagtgggtggaagaggttggctcacgtggtcacacagcagctgaccgcactgggcctgggctaggtaccccgtcacatccccccctgaccctgccgtaagcaggtttgggacgggctccccaggcacactccccttggcaccgcttcccacgcgctcactggaacattccaaaagccaaaaagctttgctcccctaataactctgccctgggcttgtgtacctcctgttgaaaactcattctctacgtacaactggctcattctttatctctctttaaggagcaaggtgagaagtatttaaaaaatgagatacaggaccttacctattcaggtaccaagagaaaaacacccctaatccacacagtgccttaaggttttattagccatgtaaattgtcattagtgcctcggacctaccatatggtcactgatagatagtcacctctcgcccgggactgtcctccaaggagactccagagtgcccaggacccatctcctcccgcccaccaccctgctcctgccccagacagatccaactgtgccatgcaagatgcaagctctacaatctgcctaggtgccgtaacctgcaggcacgcaacagacatgagggaaacaggcatgagggagacatccaaggtgtgaaagacgagactctaggcgagtttaggacataaagagccagctgtgtctgactgaagtggaaatttttaaaaaccttacaggctcagagaattcatgttctggaggaacctagggagccagcctgtcccattttattattcctcacggccataggggaaacctttgtcacatgtgatgtacaaagtgaagcgtgggtctggaaacgggcagaaggcttgcctgctcgtagccataaggccgctgctgctgggtggacgggcccgtctgagatgctcggtagcttccgtactgctggccttgtccctgctggtagcctggagtactgtgagggggcaccctgggcgggtcctagaacacagcaggatcgtgaagatcaccccccaacaccctctcccacaggtcctcccaagcccctggagacgtgcattcctgctaattcagtcgtgtctgaaccccacggaatgtagcccgccaggctcctctgtttatggaattctccaggcaagaatattgggagtgggttg

SEQ ID NO: 50133 - DNA, 978 bp, Bovine  19866880209990
  misc_feature (1)..(1): n is a, c, g, or t
naaaagacgcttactctttggaaggaaagttatgaccaacctagatagcgtattcaaaagcagagacattaccttgccaacaaaggttcgtctagtcaaggctatgttttttccagtggtcatgtatggatgtgagagttggactgtgaagaaggctgagcgccgaagaattgatgcttttgaactgtggtgttggagaagactcttgagagtccctcggactgcaaggagatccaaccagtccattctaaaggagatcagccctgggtgttctttggaaggaatgatgctaaaggtgaaactccagtactttggccacctcatgcgaagagttgactcattggaaaagactctgatgctgggagggattgggggcaagaggagaaggggacgacagaggatgagatggctggatggcatcactgactcgatggatgtgagtctcagtgaactccgggagttggtgatggacagggaggcctggcatgctgcgattcatggggtcgcaaagagtcggacaggaccgagcgactgatcttgtctgatctgatctgataatcaacacagtttgactctttgggaaattttgacatcagtttaaatagatgcaagacatctctgaaatatgagttgctgggctccaactttagctatgaaataaattttaagccagaaacgtccttgccaaacaaatcatttaataaactcctggatatgaataaacatgtatgttggtattttcaatacatgtaggtgtattggctgcctagcactaccataacaaagtaccacaatttagtagaaacaacagaaaattgaaagagggctaaaatgagcaaagaatagaatcattcctcttggatagatccccgggagccgaatggctgtgtcatatgataaagtcatgtttaactgtttaagaaaccaccaaacaatttcaccaaagtaagtgtgcagttttaaattcctgccagcagt

SEQ ID NO: 50134 - DNA, 940 bp, Bovine  19866880502599
  misc_feature (1)..(1): n is a, c, g, or t
ntttcgttttctccttttctctttcctattgttccctccccaatctgttttccatttcaggtttaaatgtcctctgccttgacattaccatgtaattcattatttgcattggggtccaaactgcatcagatttttgtatttcacttttacattgcctgactcattttggctactcattagatgtttgttcatataacacttaactcagtgtttattatacagcagttacaaatataaatgacaactcaggatttgcaaaatgatgtttaccagcagttgcaaataactggatgttatctatgtgtaaaattggcaactaggacccaaaagcagaggctcaaaggtatcaaatactttcacattctacagagaattaaaaaaatactggggctagaggcattttccaggacttattaggaggtggctgaaccaactctgctaccctgaataatcaccccagcctcaggaaactccctggctgtcccagttaatacaaggaaataactagaaaaaagagaagaaggaatggagagagaatcattaggtttgaaattaatagcttgccagggaggtctttctgctagccatctgagaagctgcccacaccagctgtgataccaggtacaagcttggagcgtctagatgcatcaagctgaggtagagtcttatgtcccaccccagagaactgtgcagtagggtcttcataggtcaccccaggtattcacacaccattcctttgagagaacacccagtggccacctgccacacagaggttgttaatggtcagcagtagtcaaaggtctgatgggaaaccccaccagacctctgcaaagcaaaccccaattaactataaagaagtatgccttcccccaagtcactccttctttagcattagggaatttagagtcagaaaagagagaggtaccagtcccttggggga

SEQ ID NO: 50135 - DNA, 3174 bp, Bovine  19866880533300
  misc_feature (1)..(1): n is a, c, g, or t
ncttttgaactgtggtgttggagaagcctcttgagagtcccttggactgcaaggagatccaaccagcccatcctaaaggaaatcagtcctgaatattcattggaaggactgatgctgaagctgaaactccaatactttgatcatctgatgcaaagaactgactcatctgaaaagatcctgatgctgggaaagattgaaggtgggaggagaaggggacgacagaggatgagatggttggatggcatcaacgactcaatggacgtgagtttgagtaaactctgggagttggtgttggacagggaggcctagtgtgctgcggtccatggtgtcgcaaagagtcagacacgaatgagcaactgaacggaactgaactgaaagctattggatatatctgagataacattaaaaatagtaaagagagaatcaactgagcttgattgaaggcaggattggaaaaaaaaaaagtcccatcagtttctgcaaactgctcagaaatctggttactcctatgagacaagttctcccgaccaaccttaaggaggcaagtggggaggggagggaaacagtcagtggaaagatgagaggtggggcaggctgtggggcagggccacagagcaagtgtgaagagaacctgggaatgagtacattgatgtgtacggggcagcattcattcagtcactcactcgttaaacatttagcccatgcctattctgatgaatgttgtagaagagcaggaaacaaaacaagttatagtctctccctcatagaaattataaccctatttaaaaaatatgcgagcagatgaccaataaattatgaaggctctgcacacctgaagaaaggaagctattagtgctgaaagaagttacaaaattaacttgacacgtatttaatgatatgcagaatggttactgtgctgcacaattatttccttcaaagcaattctcccatctgttccctcacttctgttcttcctgccactgctctgtgtaggtccttattggtgcttataaaaccaatgcaatagtcttccacttggcctcccacctttttgatccagcttatactatgatgctacatcagtctccaggcttcttaagtcaacccttgcacaaaatcctatagaagctccttcttgataaaagcccaaatgtccttttccagcattctaggacaactgagaccaagtacagagttatcttttcaacctcatctcatactactctgctgtatgtaaactcacacatataattaaacacatcagtttgtctaaacagtatgctaaattgctagccattccatgaacatgaactgtgtgcaagacacattcatgtctttgcaaatatcattttccgtgttttccatggaatttccatgcatgcatttccatgcattccatgcagaatgatttctgcctttatttctgcagtgtttctctaggactggcttcttgagctctaagatacaaatttccaactgtttgtaaaatatctcatatagatgtcctatagtatcaccaacacaagcaaaatgtgtttcctttggctcacaagtgccctccctctgccttccccaactaagtcaatggggagcatcacaccatatgcagttccatgtgtgacagtccacggggttgcaaagagtcagacacgactgggtgactgaaccacaactgcacaccatcgcccaagtagaggcttaggagtcatctttctcttttccattttacctcatatctaattaggccaacaagtcttctgcatttgatttacaaagtgtctttcaattcaattctcttcttccaaaatgaactttggaatgtgacagcagtatctactgccgtattgtaaggatcataagacacaaggtatgcatgctgcctagcgcagttttgaatatatgtcttcaacaacttagtttccttccctccttagtgccctaaattaggcccatgcttattttgaaactgtatatgttgagtcttttggctgctaatcttttcaacttccaatcaaaattcttctttcctcttgcactgcttccttttcttttctaccttgttttagaaagagtttatgtctgctaacctctttataccctcctttccacagttgacaggtccctcaagttgattgaatcatttctaattctctgctttcttcctggatgagaattatacctctgtgccccttgccaaggaatctgcattgaatcctgctatagctggacttactaccccatcccattgatgttggctgtgtactttcttggccagtggaacaggcagaagtatcagtgtggcggtctctagatgaggcctctgcactcttgtgatccaattatcctattgtattcctatactctattataagagaaacaagtgctgagtagttacacaactgctagccctacgagaaagatgaagacttgtggagcagacctaaatctaggctgcagcttggagtccacccgagctctctggagcgtgggtgagtccacctgaagttagctgaatcatgaggaagaaaaaatatacatatattttgttgctataaaccactgatattttgacatagaggggaacatggactaataaagtcactgcttatttcaaaactcttggtgtttgtattagtctgggttctccagagagacaggatcaataggctgtgtatatacacacgcatgcgtctgaaatctggcaagtgtcaaatctgcagggcaggctagagactcagggaagaatttgcagctcaaacttgaaggcagcctggagaagaattcctttgacttctttgggggacctcagtgtttttctctgattggataaagttcatccacattaaagggtaatctgctttactcaaagtctactgatttaaatgctaatttcacctaaaaaataccttcagagtgacacctagactggtgtttgaccaaatatctgggtactgtggcctaaccaagtcaacatataaaatattccaaactctttaatttatgaattcactggcaaatgactgagagagacttggaaagctaagttaacatgagcatcctgtccaagctgtgtgactctcatctagtaaacatcagtgtactgtattttcactaatcttaaactaagtaactctttattttatgagtacgattgttggggcataatctactgta

SEQ ID NO: 50136 - DNA, 1189 bp, Bovine  19866880571612
  misc_feature (1)..(1): n is a, c, g, or t
ntggcatcaccgactcgatgcacatgagtttaggtggactccgggagttgatgatggacagggaggcctggcttgctgcaattcatggggtcgcaaagagtcggacacgactgagtgactgaactgaactgaactgtgcacctgatcttcacaagctctaaatctatgttgtgttgttcagcgtctgcctgacagagctcagtccaatagtagaataaacacatcggcctcaccctggcgtttgatggcagcaacccccttcctacctctctgtattctccccatggtcttgtccttttcctgcagcctccagaccccagcagggggccacggggaattgcagattagcacactgtgctcttcctgttttgtgtgcagctcctctttgcattttccctattcaggtaggcaacactcatcaatcagccctgcagctccaccactgagaattctttataaggagcaagctttctttagtcatagccacttgtataagaagagagatgttttctcccatgagttgtttgatatgcagtacagtcattcttcttgttctgaaaagctccccctgaataagttggtataattccaggatgctcagaactataatatctttaattttgtctttccaaaaacaaattttatgtttgtgaaagggactggcgtggataagtagcaagcagtggagactaaaagcttatctgtatggaactgttgctacagaaaagagctgcataatcttccctgtcctgcacctactaaatcttccaaagggttgggaaaacaatatttcatctgtttttggctttctggtaataccaaacagcatatcaaatggaacaaatcttatagcttctttagataagcatcttccaaattagtggttattgaatttttttcatgggtgaagttaatatgtattcctggaaaccagaaggatttccatggtccaatacatttaaaaatcttagagtaaataaaaatagatttccttcctgcaggaaccttcaattcctgaaggaatctttactaatgctaatatgttgctttgatcttctcagatgcggaagtggtagacagtcttgactttggaacaagcacttatatcttaagaagctagagttcagtgaaagagtttttgaaatgaagttttagattcataccctttaacctaaataatagttaaagg

SEQ ID NO: 50137 - DNA, 2552 bp, Bovine  19866880624960
  misc_feature (1)..(1): n is a, c, g, or t
ntctcgtataaggacgcaggcttccggatggagtgtggattgtctaatgtgcagctttccttcaaactcaaagtgacacactttgcagtgattgttttcacttttattttcagtaaccttacttaaatatgatccaggttcacaagttcctcttagaagtcttattagaaaatcttgccttatgttttagaaaataataataagtaaaactaactttaaaaatatacatgtcagtctggttccaaaaatcgtctcaaattctttttattttaatgaaaatgtagttgactcatatcaaattcacaatcctctgtgaaatttccctttaactcctccagttctactgtctttctacttcacaattaaatgagatctcagatgtcttcgcccaaagcagcctgggtaaattcccacggtgcagactccaggcagaattcccagaagagcagatgacagctgttccttccccatcacactggaaaagtggcacaaggacaggttgctcatagaacaccggacaaatatccatccacccttgagagggttccaaacccaaaggcatggcgtgagcatcatcagaaaaattgccttttccttttaagagaaaagaaacgtggcctaatctaagacaaatgcaaattccaaagaactttgaaatgaaccattgcaacaaaagaaatttgggaaatttcaatcataattatatgaatacactgaaaagaaattaaaattaaaagattgaacaagagtatatcaatagttttctgagatggtaggaataataaacatcaagttttttctaagtgtttgttggttgcttaccatatgctacttcagtgtgaaaaacttgtcatcgataggaagcttgtaatttctaatatttagttttattttcatgaagtaataattattatttcagttaattcaaacaatgcagaaatgtatggaatacaaagttaaaggatctccttgccattttcttactcccttttacctaaccaattccagtccccagagaaagaggtaacttctgttaaaaatagtttggtacacattcttctggtaattttaaatcgctcttggcatatggttatatgtggaacatttctggtatattgatggctgtattttggggtgaaattttatcatgattttaatatgattcttctgaaaaataatataaatatattatgtatattattcctagtccttatatttacacacaattattttaccaaggaatatgctattattgtattcatttctccaatgtacatttgtgatttaagaaaaattcattaacttaaaaaagctgcacataattaatatatacaacttgatgagtttgaaaatgagtcttcacccatgaaactatcaccaccaataggtttatctgtgccataaacctattaatgacttctgaaagtgatatacttagtattgatcgtatacattattgcacatgatattgcttttattattatattattaataatacattattatttattatatattatatcattatttgttattttgtgaaaagaacatgtcatatgaggtctactgtcttagcaaatttttaaatacacagtacagtagtcactataggcattatgctatacaatagatctttcagatttattaattttgtataactgaaactttgtacctttcataaatacccctgcccaagccctgggaaatcactctgcttctatgagtttaactagattcatcatgtaagtgacatcttgtagtatcttttcttgtgtgtatatcttttttcacttagcataatgtcttccagattcacttgtgttgttgtaagtggcagaatttccttcttttttcttggctatataatgttctgttgtgggcttcccaggtggctcagaagtaaagaacccacctgccaaagcaggagacatgagttcatgatcccagttcatgaactgaggagggaagaaaactaagtaggcagagtttatagtgggtctaatgagaaaaagagccaggaactctcagaccctaatatttcttatcctgtcacctatattagattgaaaattttaattctgtacattaaaaataaatatttttatcttatcatggtcagagacattgaaagatttcacatatcctcttattcagattcagagtttctttgtgattttggcgataaatgataaatatttatttccttttatctttaattttttaaagctttatacatcattccattctataggattgaaaaatatcaggttctattgtctaatttttatcttttaaaacttctccatgcattaatttttaaatagcagtcataatactgaatctttctgaatgaaaatattatcttgtatttgtaaaagatgaagtctttaaaatttgctacacagcagaaacatgaccataaattccttttggtaaaatttttacacttctgtgtatttcaggctccttccagagatggaatcttagtcttttaaagtagctcctgaacttgagcacatatccgcattatacgtatatgtcagtcactgagt

SEQ ID NO: 50138 - DNA, 1013 bp, Bovine  19866880650461
  misc_feature (1)..(1): n is a, c, g, or t
ntcccttgtccatgggattctccaggcaagaatactggagtgggttgttgtgccctcctccaggggatcttcctgacccagggatcaaacctgcttctcttacacctcctgcattggtaggcagggtctttaccactagcaccacctgagaagccccagcataagggaagggcagtgtttattccgcctgcacctgacgtgtgcacacatgtgcgtgcacacacagatctgtgaaagaggcatgattatcatcttcgtttcacacacgcagaagcagaagctgggaaagaaggatgcctttcctgagatccagccttaactgttagagctaggaatcaaacttgggtcaaccttgcatcaaagccagggggaagtgactaatgttaacgcttgtaaggctcatatatatgactgtggtagattattcatagctatattgggtatgcatcataaaaatataaattagtcactaaaccatgatgtatcaggcttcacatatgttcccaactgctgagataagcaccttgcagagcatcgttcactgaagcattatgtaatttatgcttgcaaccttcatctgaggcagaggacacttcatggttcagaggagaaagtcaaggcccagagaagagcagatgctcccccggagtcagagcgatagtctcagggcatcactccaccccggatctgtgtgtctgtgtctgattaaccatgcttttgagaaacacagtccatcagccagtttgtcttgaaggggcaaagttgacacttccccagttaaggattccaaacaacagactaatttggaagggatgccaggttcatatgacaatgccagttgtaaaaagaagacagcaaaggcatgttgcagttcaaaaatatttgaagaccatatttaaaaaaaatcactggccaggagccagttttgaattctgaatccctctttcccaaacttttcccactagttttgtatttatgtaagtgggcccagcttttaaaccctagcaattcta

SEQ ID NO: 50139 - DNA, 1125 bp, Bovine  19866880659400
  misc_feature (1)..(1): n is a, c, g, or t
ngtattgaccaacttgcttttaatagttaacaaaaagcagaaaattaaaagtaattttatttaatttcagccaagaattaatgtaccaaaaatgtccagatctacattttcatcacatttatcatcatatttcctattgcagtagagaaaactacatcaaaacagataagtagtttgtggaaagatgagaattcactgtaattgtcagtgaattcacagctctgtccccagtgctccaaagcctgtttataactgtctcttttcataagatccgttcatttactcgttcattcattccgcaagtatttattaaggacttacagttttccaggtctttaagtatatgagacatgaagaaaaagtaaatatataagacatgaaataatagaagaggtcttatgtaaaatacactgctaagtcaaagctcaaagcattctagatacttggagtcaaaaggactcaaataggccattattgcatccagagttactgccaaacttagccacattcattctctgtgggagactctattctttctttatgcacagagctcagagaagaaactgcaggtgccatttaatcacatagattttctatgcttttaatttctatagaaccattgaattcattaccaaatagtcatctagtgtctcctgtgtctctcacctatgaatagaggaaatgaaatgagtataatgaaattcaaaaactgtgccacaaacaagagcagtgcaccagctagaattcctttctgcaaaaaatttaaaagtactaagcagacattaactcacaggcaagtatgaggacattagatcatcacatcaagtgaagcatactttgattactgtaacctagtttggaaaaaaagtgatttgtctgaattctgagatatagtgacacagaaatttttctcaacggataagctcattttaaatatcttttaactaactgtttcccttaggaaagcctattggattggcattactttttagtatagtatcataaaaaaatttgaacatagctactaatataatgcttatttttcttctagtagtttttaaaaacaagtttatgttcatatcataaattaatttatttttagtaatttttgtgcaacatatgcca

SEQ ID NO: 50140 - DNA, 1321 bp, Bovine  19866880690165
  misc_feature (1)..(1): n is a, c, g, or t
ncttttacttgcagaattcctcccatagttctctgtacccatcatgggggataatgagtacaatgatagttcagttctctggtctaaataataaactattccaagataaattcacttaaaataacacattgaaaatcctccatctttagctcaggaagaatgctgcagtcaccttcgctttctgagatggcataaaaaccttgaaacagagcatccataagtgagttggggctgtactgctctcacatctggtaggtatttggatatctatctagctcaaacagctatagctattttgtactttgtatgtactggactttctcatttcaaaaggctcaaagaactttataaataaaatggtcattccctctcccaatatattcctgaataatagactggttatccacttgtaaatagaaagcacgaggcatggtggagaaggtctatggaagaaaatgcaggccatcagggtatggatattatattcatgaaggacctgccttacttctttgtaaaacatttaaatataaaggtgccaagctgggaaatgtcctaacctgggagtcctatcctgacctattcaggactgacttctaatctgcactcttgtttggctcagtccaatctaacaaatattaactgagcattactatgtccaggtgctccatgcttaaaaaatgaaaatgaatataacaaagatcctgatcttgagtgagagagacaaactagtcaataggcagtcttatcaggtgtaatgggagcacagaagactaaattagcatgctagcccagaaaaaggatgtcataaaaggcttctccaaggaataaatcttaaggaatgaacatttgtgtgaagaaaggcagcagtcaaggtacagaaagaaaaaggtgtttttaacacagaatgactagactcttaagaattccattagtacttcctgggaagggagactgtattttttggctagttagtgagagtcatgaaactcatctctggtgcatcaaacgcagactaaaataaatgatgcacttccggagcctggcaacagaacaccctgtgttattgtccatgttcctctcccctctcccttctccccttaagatagttctcaaagaactccaagatgggagagccacatgacagaatgagcctggatccccaaggttctgctcggaggagagctgcctaagccgtcactgacttagtgtgaataagaaacaaatctaatagtgtgaagccactcttaacaatactgttaatagtgttaacagtggctgagttcattatctgattatataggctaagaaataacaagataga

SEQ ID NO: 50141 - DNA, 1768 bp, Bovine  19866880701039
  misc_feature (1)..(1): n is a, c, g, or t
nttctgctctaagagatgtcttgtataatcggctaaatttaaagtcgttgttgacaacctgctacttgccaagcgaatgctcaccttgagctgaaacctgtctccttgttaccatctctctatctgcactctttctgacaattatagtgattcttctgtttttcaagtacttgtgaaatgtgtttttcctatcttttctcctttaatctttccccatattacatgagtttgatactcagcactttccttatccatgtgcagagaaagtagttcctgtggtctttgtatctcctcaaacgtcagcccccgcaccaagctgagtgtgccaggtgtggtttgctgcagtgctggttaagctgctttgctttcccgtatgtgcttaagaaagagctgtatttaggaggtaagttcaagaggtatcttgtcaaaattgtctagaaaagcctctagatcactttatttctgatttaaaaaaaaaaaaacctacatcattgatattattaagaaatgactatgcccatacgtggatccctgatcattgctaaggtttttcataagtcagaggccaagtatccttcagcccttttgatgaataaaatcttgtcctcctttgcaagaacttccctcagagcttagttggtaaagaatcacctgcaatgcaggagaccccggttgggttcctggattgggaagatcccctagagaagggataggctaaccactccagtattcttgggcttcccttgtggcttagctgataaagaatctgcccacaatgcaggagacctgggtttgatccctgggttgggaagattgcctggagaagggaaaggctacccactcctgtattctggcctggagaattccgtcaactgtgtaatccatggggtggcaaagagtcagacacaactgagtgactttcactttcatcttcactcctttacaaaggatggttaatatcatacagttagcctgtcttttacaaattcctaaaccagattattcccaattctaattagcacagaggaagggaggactgtcatagtctctagtttaaatatcattcttgtattaaatcagccagtgtcacattatgtctttagctgatacattacactctgactcacactttcagctgtaactcctgtttcttttttcatggtattgctaatctatatgcccacatcctgaatttttaaaactcatttctttactaaactataggacttcatatttaatcaccaataaactttgacttgttagactgagcccacccctcatgatcttcaacttttataggaacacagtgcaaacagaaagtgaaagtatattactattgtttatttttcttggggaagcgtaatattaacttacttggtgctctcagtatacatattttaaaagaagcactatttggtccacgcattgcacaactaactataacaggtacagtaaaactgactaagtaagtctaaccattaacgctggtcattcaggaactgtgaagttaggcagtatagggccttagagacgtgtttagaattttgggacaaaccagtagtccctcagacctcagaaaagggctagcaaagaccaaggcagagaacacagtcttaggcatgctaccattataaaaattcaagctcagaaataagtctggggattcaggaaccaggcatttgaataaagatagaggcaaaatatcaagaaaaaagcaaaagctgctaactaaactggagccaaattctgctaggctgggtacaatgga

SEQ ID NO: 50142 - DNA, 865 bp, Bovine  19866880764604
  misc_feature (1)..(1): n is a, c, g, or t
naaaattggactccaatggaaaaaatacatctttttatgactcaatatcttaaagatagtaattctttcactctcatttaaatttaatgtgagtttaagtattaaatttaatgcagtagtatggaatggtttccttcccacatcttttggatcttgacaaatgatcctaaagtgcatttagaaaaataaatctctgacaatagttaggtattaatttgaaaagagaaaaataatggagggggtggagatcaacatttatcagatatttaagtaaattataaatggttctggtataataattgaaaggcaataaaacagaagagagaacttaaaagaacaaagattcaatgcttgtgcaaatttattgtattatggtatttcaaatcagtagtaaaacaatggattatataataattgccaaaaagataactggccagtcatttgaaagaattaataaaactgtattaatactccattccttaaataaaataaattgcagctaaatatttaaataataagtaaatatacttgcaaaataatcttaaaataagaatgttctttgatcagaagccataaccagacacatattcagaggtgtagagaaaaaggttgataaatttgagtacctacaaacatgaaactttcataaagccactaaaatacaaaatcaaaattaagaaacgtaacagaattgggaaaattctttgatatgtgtgacaaagatctaatatctttattatataaagagaagtacagattgggattaaagagatcatcaacctaaggagaaaagtcagcaaaggataggtgcaattcatgataaatagctagaaatttcttctataagaagctggttgatctcatt

SEQ ID NO: 50143 - DNA, 1015 bp, Bovine  19866880770932
  misc_feature (1)..(1): n is a, c, g, or t
naattgggtattattaaaaataggcacatcctgcctatgttaaagcagattttaaataggccattgaatctcttgtttctttctacttggtgttatatttcctattgtcttcactggatagcaaacttcttgggagaaatgatcatgccttgagcaccttttgcacctctatttatcatctgtctgctatgttttgaataaaacaaaccttgaaagaataaagcaattaagtaaaaatgtcaagtatagattataaaaacactctgtctacagatcactaaatatgtttgtaggaaaggatttaaaagtctgaactgaaaattctaatatttaagatgtttgattttttttttttccctaattgaaggaaagataaagatggaatttccggtacacggtaacaccaaaatgttcttaggttcttttttcagttttgagaattctcatgatttgattttcatccagcactgtcagttgagacatctgataatctaaaagcattcagagaattaggatcccatatggttcaaaaatatttcctatccggcagggaaaaagagaacatactgtgaaaataatactagtatatccttcaacttatgtgtacaaggagcacaaataaatataaatcattatccatgattataatgatcatcagaattgattacaatgaacaaaataagaatatacagttgccataaccactctgtattataaaaaacctgaggtatatttcaaagcaaagatagccatggagttatggcttgtccttcagaagcaacaataattggaaatgagcactgaatgaggagtcctgacttatcactattgaattgtgtaaacctggaaaatcatttaacttccttgggacttaatattctcaactaaacaatgataaagttgggccagatgttcccttctaacacagcatctgttctgaaggttctagcaggaagtaaatctattcatatattgtctgaagaataactgtccttgtttagggggaaataatttt

SEQ ID NO: 50144 - DNA, 2122 bp, Bovine  19866880813326
  misc_feature (1)..(1): n is a, c, g, or t
nccttatctctcttctatccaatactttgttgttgagctgttttataaatttatatgttacacctaggtgtgacttccttggtagctcagtcagtaaagaatctgcctgcaatgcaggagacctgggtttgatccctggtcagaaagatcctctggggaaggaaatggcaacccactccagtactcttgcctgacaaatcccatggacaggggagcctggtagtctatagtccataaggtcacaagagttggacatgacttagtgactaaatcaccaccaccacataccatgatggtctttgtactctcgaggcttggactaccacgtatatgtcaaagatccctagtaatatatcattaaccacagccttctcttgagttccatatttatacttccaggtttaccctggacatgttttcaggcattcagacttcagcatttctaaaacctcattcaaactgtcctgctcttcctcagttaattctaactcagtatacagttgtgtgaactgtgaactgtatacagttgtgtgaattagaaattttgcagtattctatattttctcttttcctgtgtgtaatcattttgctaatttactaatttatggttctaaatactattttttttggcagaagtctgcttttcattctttccttgtgattcctatgtgatagtgatcttttggtcagaatctagtttttgttcccatttgttattgcttatctttgtttcatgtaaactatgtgcttagaagactattttgttttttctttaatttggcttagaacacacacacatacaaacacacacacacaacttatgttatgtgtacatgtgtacaaatgtgttctcttattttttaaattaacttgattttatagggtaatattttttgttaccctcacatttgtcctttcttgtgaattacagtatgctttcatattagccagtggttttcttatctggcatgctatatgcaggccagaaacagtgctgttcctaaatctgattcctggaatatttcacagaggtataaaagtattcatatgatagtattcatgatagtatttattattataatagtaaccggtatttttttaaattagtgtcctttatggaacttacatttaagagggaggagagagaaaataaaataaaaatttgaaaatagtatgatagaagataaatgctatggagaaaaagagagaaggaattaaggtagaataagggatttaagcttctgtaagctgggatgctcacagaaggtcacactgataagataatatttgagcaaagacctgaaggacatggaacaatcagccaaaaaattcctcagggatgagtattccaggcagaagagaaagcaagagcaaaagtatctatcttgagtgagagcgaatttcccagggtattaaagtaataagatattaaaatgggagtttcttttaaagatccaagataatagacgccatactccaaagtgaggttcaaggccacatgattttgaagttataaagaagttagtgtgaaataggttagacaatatttatagaatttatacccctaaacacatataaagtatcaaagaagtccaggacattgacagagaaatgttagagataccataatatgtgaataccgtctccaatttgattgatggaagtagtccctaagttttgcatgaagtcgaggggaggatagctgtcttagaccacccagagaacctaatatctgcccttacagttgaagggatgtggagagttggcatctgtctgatgtctacctgggatctcagctgtggtactctatcaaatttccccattgctgcacactcttttttcaccttcagcctcatatctccaaagttgagcatacttgtggaatctcgctgattctctttacttgcctctcagataaattacttcttaacaagtaaagagtcttacttggggccaaatccttccttcagtgaagtcctgttggcactattccttgcaaacattcttcaattttgtaatatgatatgccattcttttgtggtttccaataccagtttttgaagtttcactgatcattttgattgaaattttaggaagtggagaagagaactgcccatgtgta

SEQ ID NO: 50145 - DNA, 572 bp, Bovine  19866880838323
  misc_feature (1)..(1): n is a, c, g, or t
nacatgaaaatattttgaaaaacataaagccattctataaaaaacaaggtgatattaaaaaaaaaaaaacaagaagaaaatgtttagattcctgttaaggaattctagaaaagtgcaaaatataatggcatctggatgctgtattaagaccatatgactggcaaaggcatcttttcaaccatggttcagagaacttgttgtttttctgtctttacctgtcaattttcctaaaatatgaaaatctggatttgagatattggaaaagaatgaattttgccttccaaagtcagagagtttacaactgttttgttttcaatctcttgtcaaagaaccttggttctgagtaaatcagtattcataccactcaaagagccttggttctgggtaaatctatattgataccacgccaagagctttggttctgagtaaacctatattcacaccactggtgtctgcaaaattccctcagggcctgggtaatgtgctcactgggtggggagcaagtggccactgggtgagatgtgctatgttcttgtgctggacaaagcctttgcacaccatcaagggcctgt

SEQ ID NO: 50146 - DNA, 2104 bp, Bovine  19866880865040
  misc_feature (1)..(1): n is a, c, g, or t
nttaattagttcaagtagtcatcctattgcaggcttagtgagttaatggttgccttgaccatcacataatggcagcgcaatgaacagaaagtaaatgaatggatgaaactccttgtgtgccagaccctgacccccatgccgcagagcacggtggggtagcaccagagacagacacaccaaagacagaggtccaatccacagtttcctacctatgtgcctggggaagttatcttctctggatctttagtttcttcctctatgaaacagagataatgttgcctactttgcatgattgttttggggattcaaaatgtgtgtaaatgataaaattgctatttatttatccatttgtctcccttttaaatagggaaagcagaggcatagagacgtaaggtggcatgactaaggtcactcagttgggaagtttcagagtcagcatcaaagtctagatagttgtcttcatgtttctaaccaacacactaagtcacgcacagatgctcccatctacaatgagcatgaccatgaccaggaatatgttagtcccccacactggtgaaacactttgattcttactaagatcactgaaccctcacagcaatcctataagaaagagagccagccctgggcggtactattttttttttaatcttttggtcactccatgcaatatgtgggatcttagttccctgaccaggactcgaaccctgcactggcagcacagagtcctaaactctggactgccagggaagtcctctgtgtggtactgttatccccactttaaggtgaggaatgtaaagcccagagatggtaacttactggccaaatgctaactcgatgaattagcatcggaacatgaagtcacatgcagatttgaaccataaacataaatataagaaagagagtcagccctgggtccagggtagattcccacatcactattacgtatccaggtggtcttttttgcaatgcttttaaatcattctcacagcaaagttgaaacctggctagatattgtcagacagatgagaaactgaaagtgaagacatgagttcatgaatagatttgaactctttattgccggggtaccggtcaattatctcttactgagtggtgctatcagtccaggataaaacaaattagatttttaagaaggtgcaaaattaccaccataaaatcagataagcctggtgcagttgggaataaattctatcatagaaatacatcctgcctgatatcaaaggcagccaagagatcatgccaagagtctcttggatgaaaactgacattttctgctgtggagacagaagtggaagcactgactggagaattatattatgaagagttctaaaatatttatcatcattctaggtcatttattcatttacccttttaatgctcatttcttttgtgccaccaagtcaagcataaattaagcaaagaataaaaattcattttgtttttatacactaatataaagcaggaagcttctttgttccttggtttaaaaaataatagcatttctcagaaatattagaacactaaaatgttctttcagaaatatgacttttatcagtaacgaggatgctgaatttattcaagtaggttatgaatttttacttttgagggggcagcttcctttgacttaagcgattcaggagggggaaatgatttaaaaaaaaaaaaaactcaatgagaattgacattgcttcactgtattaattaccccattatgcttctttctagactcaactcaggcacctctttctccaggtggccatttttgactctccactcaaatgaagatgtcctttctctgttttccaggagcactctgcacaaacctccattcatccctgcccgcagcacagtgtatggaacctctctgcccacacatctgcgccctcagaagatgagcaggacaaggaccatgtcttacattcacctggtgtgcttagcccctggctggtagccagagctcagaaagtgtttactgagcagcaccgaatttcaaaaacaacctgactataggagtgtttgctccctttgctcacataaaattcatttcaaattgtagcaaggataccaaatacaaaattttctaatg

SEQ ID NO: 50147 - DNA, 1171 bp, Bovine  19866880876709
  misc_feature (1)..(1): n is a, c, g, or t
ntcttgcctggagaatcccaggggatgggggagcctggtgggctgctgtctatggggtcgcacagagttggacacgactgaagcgacttagcagcagcagcagcagagtcccctattagaaaaaagacaaagaggaaagaagctgaattgtattccttttttcctgtgtgccagatgctatgcaacttactcttgtgaacattcaattctccaaataagtcagtggtattatacccattttatagataaagaaagggtaacttgttaaagtcagctccttcaaatgtagattgatttcttcctgaagttcatattcctttcaataaaatatgttattataaagaacaatggaagccagccctttggttcttcctctttagttcaattcatatgcatatgtactatagagagccaacggaggtgtttaagtgtaaaaccaaccacttgctcttagcaaaacctaacttggtatggaagactttagctcaaaccccaaagccctcctaaagcacaaaccacatggtcatatattaaaatgaatcatagacctgaatatctcctgcctcccaaaagtgaatgcatatgctaataatgatttgggtttcacttattttcagaggaagaatttccttgcctccggtaatattcttttttccatgaactgttaaattgtacataaaatcctctctgtgaaatgctgtgcaacaggcataatttatttttgatttttatttctctttgcagcactatttttaatagagccaactgggggaaggtgggtagtagaatacgttagcttacaagcacactattttgtctaaatcaagagagaacttatttttattattattttatataacacttcactgagtaactcgtttttttcccccagatagattaaatctaagaaatccctcaataatagaataaccatgtagcaatatgaattaagtgagcattaaactagcctgagttcactaatctctatcaagagatagtatttaatcaaccaagcaattgtgtccttagcaaaatagaccctaaaatttatttaacatcttttattctaaatagtcattaaaaactaaaatagcctacagtaagtagtagattttgatcactagaagtagggctgagattctccggttttgaaagtacaagtaagtattca

SEQ ID NO: 50148 - DNA, 802 bp, Bovine  19866880988092
  misc_feature (1)..(1): n is a, c, g, or t
ntctatatcaactatcctcacttttcacctgcaaattcattccttaatgatctacaatttggctttcccttctttgaactttaccaaaactattctctcaaaagacaccaatagtttccaaattacccaagtaaatagtattcactcagttatcatcctaatcaagcccctctgcagttttaaatgacactgtcaactacaaacttcagctccattcctccagacctaactgttcctcattctaggttcccaattacggttactgttactactatccattcattcattcaacctagaattgaaggttaacttagtctcttccttctccccttccacatcatactcttaccatctccagtattccaacccctattattacttagttcagctctcataatttatcagctggattattcaaaaagtcttattaatttctggaatcaagtcttgtaatgcattaaatccaccttccatgccttccatactcctaaaaataatctttcagcaatacaaattttatgaagtaatacaaactctccctcccacatcttgccccccaccaggtttaaaaaccttcagtgggcattaagtgggtatccattgcctagaagatacggacaaaatgcattattagggaatacgaggtagtttcatgactccttctacagcagtatttcctgatcacctccctataccatatcctttgcaacttacatttcactcggcaaaactccttctagttttcaagcacaaatcatgctgtttaatgccttagtgtctttggtggtactgtcctctctgt

SEQ ID NO: 50149 - DNA, 1034 bp, Bovine  19866881020018
  misc_feature (1)..(1): n is a, c, g, or t
natttgtccccataggttggtagagggtataatgatgatcaatttgtggagtagctgtgtttaagttttatttgctatacatgagaatattggcttgagaaactcagactttatttaggtataatgttaaatatgtgagagcttagggaacaccaatattctcactaatgaacatcccaggttatttaaaacttctgtggaaaacctatctgtttatatttgttctgaaacatattaatccaatttgaaatactagtacaaatagtataacaacagaaattaaatctttggtaattggggctctcttattgtctcagaccattcattgtgggcacaaattctcacatacagaattgaaaacatagataagtctgtatcagagatggaatttagtgtgtattagactaagaccaaaaacctataaatttccttttttgggggaataaatatgtaataatattaaaataggtagcaaaattttaaattaaggttttagttgggaggtctgggtctggcttatttataatctttcaaatgtgtgtagatgttctatggatatgtggatatatgcctaaggcagtcaactatatttatatgtatgctaaatttctattctaaacatccttgtttaaaaaaagatgtatccacatttattctgtttaggaaagaagatatgcactggatatgttttccccatgctcctattataattaattccttttttaaaatagccaggaactgagagggtataggtaaatgaaatctacagacctttaatcttattttagttataaataccagtatcttcccctactaaatatttataaggtctaataacatgcaggaaatttgaaaataatttgagttaatttacagtattttctcatttcttttccattctttgccaaaggtattcctgggcaatatagtatgctagtcagctttaactgaaacttgactttccccaagggacaccagtgcccttgcagtcctctctaatgaagatatctcatcatccatgcatttcactcatg

SEQ ID NO: 50150 - DNA, 1500 bp, Bovine  19866881036742
  misc_feature (1)..(1): n is a, c, g, or t
ntgttttgaaatgcaaaacatctgactcatggtagagatgaagagctgtgtatgacccatgagagaaacttatcttattgttcacacacagggcagagaaaattcaaaaccgataaggcatcaggcatctcgaagcaaaactactttaatgagggtgagtcatggtgccacccagggaaatgaatcaggtgcccacatgccaaatcttcttcataattacagtgtttttttcccttttaaattaaaactaaagtcaggtaacaactaatgtccctgtagaacaaatttagccaaatggaaatgtacaacagcctatgaagtaaaatgaaaatatgaaagggatacagcttctccagcaaggaaagaagaaagaattatcattaccttaagtgtaatgtcatgcctgcaggccccgaaggacttttaaaggcttttattgtgtcctctactccagttgattttgacatcttcccaccatgtaatgactccagtagctttctctcaacattaaagtcttagatattgtacccaagactcctactgtttcctgctcaagccaggagagtgaagagtatccttgtcacctcccatacccttctcttctaacttctataaccaatcacaaacgctttaatgtctagatcttaagcatctcactttttttcacctccacagatacaagccctaatctaagccgccactgactcactcatgcccattttgaattattgtgtcacccagtttctaagagtagctatagcacagctagaatgaacatggagagatgcaaatcagctatcactctactgtttaaaacttcaggattgttttcccactaggacctcagcaagcatatacaagcatttgtaagaaatttgggaaaaaatgtagtaaccctcctctttctgggatgaacacagaacaagtcagttttcagaccctatttccctactggccagactttttatgtagtgtagaaactgcaataccttttgtccctcgaataaaatccagattctttaagatggcttgtatggccccttactacctaatctctgccaaactctacagagtcacccctggccattctttcactcaggctctgtgatcctgcattctgggtcagtttcagtcccttgaacagtaaccatgttgtcatttacatctttgccaaacctcccactgtttggaaaaatgttctctcttctctgtccagataactcctgcttactccctaggtcttaacaaaaatattacttccccacacagcacttcccagacctcctagattagaataagttttcttgccacacattccagagaacctaatgtcccagtgcatgacactcatttatttattgaagttgttggtatgaagtcagcttctctgatggactcagctgaataaaggaagtattatttgttcttcactgtattatctgtgcacagtaacatgtctgatacgagtagaagttcaagaaatgtttatcaaaattaaag

SEQ ID NO: 50151 - DNA, 705 bp, Bovine  19866881071356
  misc_feature (1)..(1): n is a, c, g, or t
ntgttgacagtgtcttagcccatagtgaatgacctatgagtgccgagttcctcagtgaaattgtcagggacaggtgtgttgtatattattgggggaaaagaaactgacactcaccagtaaataaaacatacttcctctttatgaaaagttatttccagaaagcactgcatatatgaaaattttctttgagctggcacctttgagtccctgctaaagacattacctaccctgggtaactaattatctctagttctgttagtagtttcaaactatcacctcttactggataaaattgatggaaaaaatctaaaaagagtaaagtggaaaagtgttcctttccaaatgggagaaataacaaaaacaaaagcttttaagtacactgcagcataggatgcttttctgcaagggagaagaaacgtttgaggagaactaaaattagaatgaagaaggtggtgtggaccttttgtgctgctcagggattgccagagaggcaaacgaaacccttccttttaattagctcacactgactggaaatagaactcctgaaactgagttaatcttactccagcagccactggacacaagcagctgaggaaatctctggactccagctagcatgaaggccaaacgtgggctgctgagagtggtctttgagctccaagctgaggttcaggatgggctgatatgaggaaggattaagggtta

SEQ ID NO: 50152 - DNA, 2002 bp, Bovine  19866881144346
  misc_feature (1)..(1): n is a, c, g, or t
nctcacattcaagaaaatggccttcccttttcacatttccagctgttttcccactcccacgtgttttatttagacatcagattcactgatttcattaggtggtgcatgctatgcctcctgcattggcagggggattctttaccactagtaccacctgggatttcattagatggtagggaggtcaaagtcacatttccagttctcagtttcttcaaaacaaagcacgtgagttataggataggtgcagcttattcacacttcatatacttcaaccactgccagaatcaattttcatatgatctgaggctgtggagctttatggcttatgttatattattctgaatttcatctgaaaatatttccaagtgcttcagtttcacaacatagaatatttataatctaggtcaaacatcatgcttggtctgacttgccaaacagagaattccaaatgaccattttctcctctaaaaatatatatgtatgttttttaaaagataggaaaaagcatttctgtctcaattttccccatgtagtgatttgccttctggcctggatggctctattctttctaattcaagatgcaataggcttagagaaagattagaaacattcatgctgtaatattaacacttacaaaatctcactgttcttatctgagcttttcatttttgttaagatgcttaaccagaatggaagctgcccacacaattcttgtatgaaaattatacttgctcaataatattcatatctccacctacttttgagtgaaacagaacaagcactaagttatgcctgtacacatttgcataagaatataccatacacaaattcaggtttgcatgcctaatttcagacataccatcctagaaatgcacattataaaaaacataaactttccacgggccagaacgttttcctctccaggtgttgaattttgttttccctaaaagggaaagataacgatagccttaatttatatagtaccttttcccattctcctttccctataagatataggagtagctatttcatgggcacttgaaaaggcacaaatcctttcttccttaacgtatagatcctagtcagggtatcccagaagactggctctttaggcaaattctagaataaagtgaaatttgtcagtatagtttctctttgatgattgtctttccctctcttaaagttaacccagttctttgccagccccatagcttagagatctctacacagacatctgtcaggctattccctctattccttgttccatagtataaaatgtttcaactcacaaaaacgggcttgcactatcctgtctagtcttcatagtggtctcacagtttagtaagctaatagggcagatattgttcgtgatcactagttttcattttcaacagttctaattcccttttttttttcctttttactatttacctctcatagttttatatcttcctattttgattaacaatttattgatttttctatataaaatttatctcttcaagcttttaaacatacctattagaatggttcaagaaattaattgatctgaaatgataaactgatcgttgattttgttggctgtacttattagttttaaatttcatgtattttcttaattttggattttaggtattcatccttctgacccttgctttgcccttgaccctggcttttacctttggatcccactttcagttttgcacaaaatacttttagcccctctgccatacagaaactgagctactggatcagaatctaacagcccccagccctcaaacctgtgtactatctggggttctgttgcatttctggtccactgaaattttatctggtttttgaactggacttctctttcagatttttagccaaaaaaaaaaaaaaaaaaaaatctcattgctatgtattgtgaacttatgggaccatcttgatcagaagtttgtggtatccaatgtaacagctacaaataactaaaaagacattagctgccccaaatagaaga

SEQ ID NO: 50153 - DNA, 774 bp, Bovine  19866881216294
  misc_feature (1)..(1): n is a, c, g, or t
nagaggttctgtcctttctcacctgagaagaacaaaacagcagggttttcctgcagctctgcgggaccccagcctctgtgacctctgctgctaacagcctctccacaggcaacagacaggagacaccaactatgcaaatcagagtcctgatgttcattatcagctacaaaacccaaatggccctgaatctgagccaagcaaggcatttctgtgtgctgtgcctggttaggtggggatgctgattagtcagattacggtaataaacttttaattcccttatgaggcatataaaaattatttgttagcctcctttttctaaaggagggattgaataatgtatgttggtatataagttcagtattaggagaaggaggggtagggggcattcttatatataaatgatatttgttactcttcatgtcagtttggttgacagataaaaaacatgctgttttttcacatcaactatggcccattgagaactaaccagaatagaaataaattggtacattatctattgaggaacaaatgctaaagatgtaactggtaaaattcaacaaatattagagaattatcttttcatgatcatcttgatagaaagttaattgtagatgatacaaaaggaatagatatttatctatttatatttatgtaatttatttaaataatctatttaaaatcgatattttatctatttatctgctaacattctgcatcacctacacatgcatgcgctgcatcagatttattttaaacatgaaaatgcattcatat

SEQ ID NO: 50154 - DNA, 1910 bp, Bovine  19866881282625
  misc_feature (1)..(1): n is a, c, g, or t
ntatccatgggtttgtgactttcattccaagtttaggggtgagggaagtctagaagaggctacactctctgactcctgaccagtaaatgtcaggctagaactgtattttcattttaggactagagatatcaaatgattccaggttcttctccagtctgcaaaacatacttcgattctttttgaggttgagtattcccaaaagggacctaggaaggagaaggaatagagactgtgcacagggtgtcttctttccagaatcatattcctcagctctccaacagaaattatgttctgtcttatgtgatttttttctgaattaggtatatcatagaataactaatggagcatgccaaatatttccctctattaaactgtttctatttttgacaagttaaggttgttttagagggtaatgtttaaatgaactttttctttggtgtacctatttaaaaacagagaatttattcagagtaacataagctgctaagtatttgactgggtcattggaattttccagacaagaatactggagtgggttaccatttccttccccaggggatccttcctgactcatggatcaacctgggtctcccacactgctggcagactctttaccatctgagccaccagggaatcccttttgatccctagtaggagttaactacaattcagcagtattctcagcagcagagtattttacttcaaagtcctagcagtttcagtagagaatctgatataagatactttatggaaagtttttataagttatttcccactggtgcagttttaaatacagtaatcacatttacccccacagtctccactaaattatgtatcaatgaggctatattacttgttactttgttgagtatccttaagggtaaaaaacatttctgaggggcaactgatactgtttttaagacccaactcaatgccagttttatgataggaatggctctcctgaccacacttctttctagctgggtctagagacaaaatgggactggagataataggccatgaaacaagtaggtgaggaaaggttttggagcaaggtatctttagaaaggaactaaagattcacttttataagctcttctaaatattttgaaaacatttaaaagaatgtcttaaaattattttttaatgaatgtgtgctaagttgctttagttgtgtccgactctttgtaagcctatggactgtagcctgccaggctttctctgtccatgggattctccagggaagaatactgcagtaggttgccatgtgctcctcaggggatcttcccgactcagggattgaacccccatctcatgtctcctgcattggcaggcaggttctttaccacaaatgccacttgggaagtccctatttttaaatatgtgtcattaacctaaacacatgcgatattgagtttgcttagattcattcggcatatctgttaataagagtaaagacatacatataaattcttttggtgtattctactgttcttacaacacattctcctacctacactttcctcttaaaattgtgtctttttataattctacatttatggaacaatagtcttaagcccctttggtacttcttgccaacagtaagtattacattttcttgtttcttttccagattttaccttcagagtagctgtatggcactttgaaatggaggtatatttagtaatcatgttattttaacatttctagcagcaaaaggcctaaaaagaaatgagaaccaagattatatcttatataagctcaagttagaaaagatcattatctgaattgttcaaattaatgcaatttgtgttatttatcttaattaatataatgaaattaagtcctaaattattttaaaagtggaaattgtgaagatattaaaatttgaagttgcttaaattcttaga

SEQ ID NO: 50155 - DNA, 848 bp, Bovine  19866881298993
  misc_feature (1)..(1): n is a, c, g, or t
nggaggaaaaaaataatctctttccactctttgtggattttgttcataatatttggtctttaattaggtggatttatttgctttcattcatatatgccagaattatgtgaagtgtatgcttatgccaaattcattttcctcccatcattaatattggtaaatttggaccattattagatagaatttatggattgaattagtagtcacttgtcacagtcttttaaactaaaagtcaaaaggatattttatactgtcatggacaaaaggtatctgtctagcattgcacttttgtggtagaatggctgtaattagtctaccagctatgggataatcagtattatggtacagtttcctttatagcaaagaaatatcacaaaagataatgttgggattcaggtttgtcttaaaagattttgtttataggacggtgacataagaaaattctcagagaatatttgttcacaagttattttttgatgacagaagaaagaatgcattctatagaatcagaaaacacacagacaaaaacgagttattacctttctgttgggagaactcaaggtaaccctgtctttacaagtcagcatactaggaagctagtttatatagaaaaatagtttaacatggaaaattacactttaataatacctactaattaaatgcctttattcagtaaaatagagttctcactgcctgaaagctataaaagcctcctggaatgattgattactctgaatttctgtagccttgagtaaaccacaggcaaggcatacattttattgattctgggactgaaggtctgagctatttacaagacaatttaacaataatttatttaactctttgca

SEQ ID NO: 50156 - DNA, 1376 bp, Bovine  19866881320227
  misc_feature (1)..(1): n is a, c, g, or t
ntccctcttctgacctgtcttttgtgttctttcccgaaagcctctttgttgttgttgttgttcaactaaaaattcagatatttctgggaactgtggcaaaaccatatcttcccatatcttgaacttgcacagttgatttccttcagcaccttagtgtaggacactgcatttatccatgttaaattgcatcttttttggtgtcaacatggcctgtcagcctgttgagggaattttgaattttgcattggcctattaccatattcaatatcctttaccacctgtgtcattgaaaattctgatacacattcctcttaggtctacttggatgccattaataacagtattgaatagagcagaacccaggggcagaggtctatggcattctatctgtggtcccctacaggctgaaacagaattttcaagcctcttagatataaatttacaaccagctgggaatccacttaatttttctctcctagaacccaccatcttatagataatgaaagacttcatcaagagctttgttgaaatcaaaaggcactatatctatggcattctcctggtctgtcaacctcatactaataaccctgtcaaaagaggaaattaatgtagtgcagcaagaacttatttttaatgagaacactgaagtttgaagagaggctgatggcgcaggtgtcgttttggagaaaagatgcctggccagttgctgagtgagccatttccagtggtgacgtgacgttgatgcgtgaccaagttccagaggctgggctcagcccttctggttaaaaaaactggactaaatcacacactgaatgaatttctatttattgagaatcattctgtgctgggcactgggcttaggtgcttttcatatatctcgtttaatgccaacactaaggtaagtactattttttttttaactcccattattgtggatgagttaggtgaagctgagcgaggctaaataattgacccaaagtcatatatagtaagtgccagaatcgcggctcacactcagtcaccctgacactgagccctgctctcagtcactgtgttctcctgatagaatcttgtgtgcttttgtggtgttgatttagttgacgtgagaacagcatagcagcaaaatttgcagtctgttaatgtattgtgggaaggcttccctaactgtgatcaaaggctccccacccccaatctttcacacttcctttcctggtatctgggaaccgaaaaaaaaaaaaaaaaaaacctgattctgtgattgcttcctgatgcacatggtattggaggaagaggaattttgagggatatcttgcttagatcaatacgaagcctgacgaaatagtctcttgagtgcatgctaagtcatgttagtcatg

SEQ ID NO: 50157 - DNA, 818 bp, Bovine  19866881330824
  misc_feature (1)..(1): n is a, c, g, or t
natgtataacgttttcctcttaaatttatatcaaaacaaaataacatcaaagatgcagttttagaatgcttaaaatactggggaaaggatggagaaggttctgtaaataactcccgctagcacatagaagttatattattttaacgacagtttggcaaatcctctagagctttttatggaaactgttgcaagctcaaatgttcaaaacatttacttccttgttatatttttaattattccccaataattttctgtactcgacagctgaattggtccaagagtgactaggactgggaattctttagagaccagcaagtgtctctgtgccatggccatcaccaacaatcccaggtgaaaagcaatgatttgttaaggcacttcttgctcacagaaagcaagaggatgaaactctccccattactttaaaatataatttattttcactggggaatccagacataggctcatgaaattaaaaaatgcaagtgtgacacaccaaattaaatagataattcataaaccgtcttagatgtgtccagagctcactcttgatttagtataatacgtaaggtggggtttgaatgagcatctcaagaataagccagctcctgaaagacagtagtctgtgggggaagtcttctgaataggctaaggtagtatgagtgaacactgaaatggagacaaaacatcagttagcaagaatgacaagatgcattcattctctctaatttgtcccctccttctttcattcattcactcatacatctaaaacatttatttgggagcaattatgtatttggcattatgttttaggataa

SEQ ID NO: 50158 - DNA, 1541 bp, Bovine  19866881344456
  misc_feature (1)..(1): n is a, c, g, or t
naaaatagtaattttggagttaagcagcagaataattgaactgaaaaatcactgagggaagacttaacagaataaataataaggaaacttgcatataagtcaattgagattaataagtttgagaaacagaaggaaaagaagaatgaagaaaaataaacagaatgtcagagactggtggaaggctgtcaaggatgcaacatagagaggcttccctggtagctcagtggtgaagaatccacctgcaatgcaggagatgtgggtttgatccctgggtcgggaagattccctggagaagaaatgacaatgcactccagtattcttgcctgggaaatcccatagacagaggagcctggcaagctccttgtccatggatacaagagtcagacatgacttagcaactaaatcaccatcatttccacatatgtacaatgagaatctaagaagagacaaaaaagtgaaaggggcataaaggaataatgactagaaacttcccagttttgatgaaaaaaattaatctgcagttctaagaagttcaataaaagcaagtaggacaaagttaaagagatccacacctcgacagaccatagtcacactgcccaaagacaagacagaaagagaaccttaaaaataataagagataggtgactcatcaggttccagtgaccctcaagaagattagcagcttatcaaaaagctagtatctagaatgcaattgaagagataataaaaatgctgaaagaagactaagattatcaacaaaaatttttatattcagcaaaactatcctttgaaaaacaaaggataaattaagacatcatcagaattcatcattgggagacctgtccagcaataaagagtaaagggtgatctttgggatgaaactaaagcacgctagactgtaactcaaatccacatgaagaaataaagagcaccagcaaaggtaactatatttataaaaataaaagacagtttaaatatattaaattttttttcttgtaactattttcttcttcagtcttatttaaaagacagttgcatagaacaataattacacaaatgtgttgatgggtttataattatgaagtctagcatgacaataacaacacaaaggaggagaggaggaatggagctatattagtgcaaagttttatatgtaactgaacataaattagtattaatccaaactagattgttttcagttaagatgttaattgtaatccctagggcaaacactaaaatcataagtttaaaaatatagtaaaagcacacaagagaattaaaatggtatactagaaaatatgtatttaacataaaagaaggcagtgatcaaggaatcagatcagatcagatcagtcgctcagtcatgtctgactctttgagaccccatgaatcgcagcacaccaggcctccctgtccatcaccaactcccggagtccacccaaactcaggtgcatcgagtcagtgatgccatccagccatctcatcctctgtcgtccccttctcctcctgcccccaatccctcccagcatcagagtcttttc

SEQ ID NO: 50159 - DNA, 770 bp, Bovine  19866881374203
  misc_feature (1)..(1): n is a, c, g, or t
ngtcccttggactgcaggagatcaaccgtaaatccaaaaggaaatcaatcctgaatattcattggaaggactgatgctgaagctgaagctgcaatactttggccacttgatgtgaagagccaagtcattggaaaagaccctgatgctgggcaagatcaaaggcaggaagagaaggggatgacagaggatgaaatggttgggtggtatcacctactcaatggacatgagtttgagcaagctccaggagatggtgaaggacagggaagcctggcatgctgcagtccatggggtcgaataattggatacgactgagagactgaacagcaacaatattacttttagaatttttaagcaaaggaaaaaaataccctaaaatgccattaaaaatcaagaatggtacaaaccttcttaaacagaagctgcctttgtccttcagaattataatgccaagtctacaaaacttaaagctggaaatacatcagtaaacaaagtccaggaaggctgtctgagatgtaaataggattaaaaggtgatgaagtgagagagattgagaacattttgactttttattaaagctctggtaacttagactcaatcttaacatgttttaaattgtctaatcatgtgtgtatttgctagagagagctgtcccttaatcctttataccatatttgtaattttttaaaatggtagtgatacaaaaatacttctcattatgccaagatttatggaatgcctataatctcaaatactgagttgggtgctcaggg

SEQ ID NO: 50160 - DNA, 918 bp, Bovine  19866881573379
  misc_feature (1)..(1): n is a, c, g, or t
natacagggactgtaactgaggacacaaactcaagacctagatgggaggggtgagttaggatgccgaggcctatgaggacaagtcgtgtgcctggccgtgcttaactcagaggctacaaagcttgagtgtctcggttgtaactggcaatgtcattcgttggtatggaagatgtattttctcagaaaatcagttaagtatggatgtcagtttcctttctgtggtcacttgttaacaaatttattaactagatgatctagtacaaaacaggtctcatctgaccataggaaaaatgtttttatcacaccaactggtttaatttaaatatgaaatcaacttgcattaaacaaaattatataattcaaccagaaaagaaggattctctgcaagaagcattttactcatgccttagtgactaaagatttatatggaataaataatattgctctagtactaggctcattaaataaagattaacagaagtccagtccttgcttgacaaatttgctaagactcatgtttattcagtcagtattgaatctatttatttcccttaatgcatagagcaaagggccttacataatcgtagtggtgactcagttacataaatgaatgaatcattaaatgagtgaatgaatgaatgaatattatccttaaaagcaagtggctataatggcagaaaaatcccttatgaaatagtcacatgccatcaaagataatgttttcttatctgcctttcatttaattttaaccttcacaggggaatttttccatttttctggttactaggcaacctgttattttgaatcacttagtataggatttgctcgctatggatgctcaataaatccattttgattaatgagccatttacagcaacaccagtgagaactgtttccaatcctgttgcaggagaatag

SEQ ID NO: 50161 - DNA, 972 bp, Bovine  19866881580348
  misc_feature (1)..(1): n is a, c, g, or t
nccctctcttcccgaatatgcctatctcttttctcatgtcggggccttgcacctcctgctccttctgcttggaattcccttccagcggctctcgtcatgtctgactgctccttctaatccttcatgtctcagtttacatgccacttcctcagagaagctctctttaccagtctttttaacttaggtctttcttgtgtttttttttttttctgtagcactctattaatgacctttagagtagtgttgactaactgggggaccttgggcaaattgttagggtctctctgtctttggttcttcatttgcaaataagggtaataactttacccaacctcaggagttgttgtgagtaatcaacaaggcaaagcacttactagtgtttgacatacataaaactttgctagctaataattacttgcattatttttattaggttatttttctgttttccccaatagattataaactctgaaagtagagggatcttgcctgtcctattcacagtatatcccaggacctggcccagtgcctggcacatagtcagagctcataaaatattaattaaatatatgttgaataaacaaatgagtggagtgcctacctcagtggtggctttgactctagattaaactgccagtttgtttccagtattaaatggcctcctttctaagctgccaaattcagcaaataaaaatacacgatcccagttaaattggaatttctatattttatctggcaaccctacttccttcactaccaccttcacccttaataagcaacactttctatctctcctcctccctctccctgcctttctcctcctctttgcttctctcctttaaagtttatttggctatgtctgaatatagctcccagtgtcaggaaaccctaccatccttaaatctggagatgtctggtctttgagggactaatgagtcacctttattatatgtctccaattcccagagggct

SEQ ID NO: 50162 - DNA, 954 bp, Bovine  19866881597656
  misc_feature (1)..(1): n is a, c, g, or t
nactgatgttattttggctggagattcggaaaggtctcatggaagaggtggagttctgtcaggagttctctgatgggttagtaaaacttagaaagaaatgagtgtgaaaaacatttccagagttggaagtaggaggagtaaaaggtattgataaaaagatgggaaagaggcacatttagaaagagttagtttgaatagaatagaatattcatggaggtaatgctaagaaatggaggacatacatacaacaaatttgggctctagaatcaaacaaatctaatctgaaatcctgccgcagtcaccctcagtttcatcatctgtgaaaaggtgcctttctcatggtgtttttgtaaggataaataaaatgtgtgtgtgtgtatgtgtgtatttttgcctggcacatagtaagtgttaaagtaattgttgctattactatcatatacatgccagataataataactataagtagataggtggcttgaggtattattgtggaaagtcttgaattaccaagtaattaagtaactaagcaactatcaagtaagcatttaataattattagtgtaacaattcatgaaatataattttcaattgttggcgttaagtcagaaatttgcaaagcttttctgtaaaggtccagattgtaaacattttaagctctgaaggctaggtcatctcttttgcaactattcagctctgccattatagcacaaaagcagtcatagacactatgtaagcaaatggctgtggctgcattacaagaaaactttattaaccaaaacaggaatggtccagatttagttaataggccatagtttgtaggtcctgtcataagtatttcccatggaagtgttctccctctgatggagacacctagaattatatatcatacatctacttttccattttcacattatatatgaacattcttctcactatgcaattaaaaacta

SEQ ID NO: 50163 - DNA, 1147 bp, Bovine  19866881728357
  misc_feature (1)..(1): n is a, c, g, or t
naccccatggactgcagcccaccaggctcctctgtccatgggattttccaggcaaaagtactggagtggggtgccattgccttctccgatacaaggcattaatggtcagcaaatatttattgagcatctatcatatacatttagaattatgcgtaatctctggaaatgtttaaaaaatgagtaagatgtaatccttgcgctcagaaagtttgtagtttaccagaaaaggaaaacagattatctgcattataaatttaacaattaatcagatttacttttgatatatattacctttataaaccatacttcattatcaaaagaaagaaacaaatgaaaaaataaactcattttcaaaaaagcttccaatatatatccaaggattggtaaagatttagtacaagctcctattttttttctttaatgacacttacagtatagtagagtaagtattcaaggtcagagtaattgctttcagaccataccagaccctcgcacatcagagtcaattatgttcactctactctattgaaagcaggaaattgggagtaatttatttctaacaacaaagggtggcaaagttgaaagcatccagaggaaagcaatcaggatggtatatgatttaaaaaccatgtcacagaagaaatgatgaaaagaactgcagtgttctatcccagagaagtcgtatagcagcgtaatagctatctcaatatatttgaaaggctatccctcacaagcttcccacagagtgggaaagggtataacaggctgtggtagatttattctaaagttctttgaggcagaataaagaaaaatgtttatcagtcaaggagggcaaatttagatcaacacaaaaaacaattttctgtgaattaataatattgcttatcttctaaaatagatgtgcactgataaaataattagctaaaagatagcactagaaagcaacacaatgaactcctcataagtggaaatgcttagttactgataaaattatgtataaaagacactgtacaatgactataccaggtgactgtaagctccacgagagctagaatttttctcattcacattctatccccagaatctaatataactcctgccacataatgggtcttcagtaaatactaattgatcagctgaacagtct

SEQ ID NO: 50164 - DNA, 662 bp, Bovine  19866882083820
  misc_feature (1)..(1): n is a, c, g, or t
ntaatagttttgtgcttggaagcatgaatgcataccctcagtaattttaaatgatacaggatttatttttagccatatgcccccacctgaaaggtttatgctgttaaacattgatattccttgaaaagttatgcccaaggcatattgcttcttttttccaagctaggaattgaaatgtttgtgaaacttactgaaaatttaccagatctgaaatcagagttcatatctcttattcagtaactaataaaaatagatttatttgatcaaccatccaatatttatttgcattgcattattatggctactctgatgacattggactatacaagatacactcctgtggctccaattgtgtctcaagatgttgttactgggtacttatggggtgacatggagaaggatatggcaacccactccagtgttcttgcctggagaatcccatggacggagaagcctggtaggctgcagtccatggcatcacacagagtcagacacgactgaagcgacttagcagcagcagcagcatggggtgacaggaatcacattaataagactcagggctcaccttcagagtccattcacagtctatctgtggaaacaaattcatgaaagaaactccaggcgtattaacacaatatggtaaggtctgtagaaggtattaa

SEQ ID NO: 50165 - DNA, 1608 bp, Bovine  19866880425933
  misc_feature (1)..(1): n is a, c, g, or t
nactgaaagcaatgataggactgaaggaaagtttataataaaagtcaccagggatatcacttcataaacctagaaaacaacattagaaattgaaatgggaataatgaaaacggcatttgaaaggaatgtaaatgggaggcaaggaaagaattgttgagacacatgaaaggaagtcattacttctgttgagttcctataaatactgaaaagtgttctccgttaaaggggctggtgccacagcgaacgggatgggatctttcccctctgcacacgggctcaggctgtggttgggcgactctccgtgttcctatgccaggtgcggccggcctcctgctcgaccaagagtgcggcctgagaggctcccacacatcaccggacctcagcagctgtgcggtctgactgacagctgtgtctggtggaagaagtggggacagggcactggggggacacagtccatatggactgtctcggccaagtgcaaagcctgtggccttccctgcacggagaagatagtcctgcaaagcgttaaccatctgcggatggttcggtatctgcatcgaggtgcgttccaccgtgattcgtgtgtgcgagttcattagtatctggacattttgcagactgtaaaaattcaaatggccttgacagttgctctccttctttgcgtgcctttggtgtctgaatttgggtgccagtgtgagtccgtgtgtcgcacagtgaaagtgtgaacgacgacaaatggtttgggaggaatctcctgtgcctttatgatcgtcacgtgcctctaaacaggacagaagaatacagcagccaaggtagcgcacgtttagtcctcccaatgtagtcggtattccgcagctcgagccctgagcaggactcgatttcatcaagtctcaggagcaaggtggcagaagtctgtctactcaggggccactgagcttataaaaacagtcgttcaaaggaaccaaaaggatgctcagcattgtagaatactggaagcacacaagctttggagcgagacagattccacactcagctacttgtccactgtatctccttgagcaagttatttaatctctgtacctcggtttctttatcagtacaatagtgtcagtcgtgtccgactctgtgcgaccccatggactgcagcccacaaggctcctctgtccatgggcttctccaggcaagaacactggagtgggttgccatgcccttctccaggggatcttcccagctcagggatcgaactcaggtctgccacattgcagggggattctttaccacctgagccaccaggaagtcctggtgatgcctacatttaagacagagatacctacaaggagatcccaccagcccatcctaaaggagatcagtcctgggtgttcattggagggactgatgcagaagctgaaactccaatactttggccacctgatgcggagagctgactcatttgataagaccctgatgctgggaaagattgagggcaagaggaaaaggggatgacagaggatgagatggttggatggcatcaccaactcaatggacatgggtttgtgtggactcgggagttggtgaggacagggaggcctggcgtgctgcggttcaggg

SEQ ID NO: 50166 - DNA, 2076 bp, Bovine  19866880515588
  misc_feature (1)..(1): n is a, c, g, or t
ntgggcttccccctgttgctcagctggtaaaaatctgcctgcaatgtgggagacctgggtttgacccctgggttgggaaggtcccctggagaaggaatggctacccactccagtattctggcctggagaattccatggaaggtatagtccatggggtcacaaagagtcagcatgactgagcgcctcccactctcactttctctaagctttgtgtctttcctctcaaatgccacagcccctcacaggatgcagagcacagactggccctgccagggtagactagctccacgcaggctacctctgggcctccattctttcatcatgaaatgaacagccttgccggatcagctctccaaaggattgggtatctaaagctccttaccatgatgagtctgacccatattggttctgtagcagtatttttttttttttttctttagcaagatgtctcaagctctgaactactcacttatgaaaaattagaaacaaatccattgtaatctgggtattacttgcaatgagcaagggtcttagcacattaacattgattcagaatcaacttgtagcacaaattcgttctggcactcctactgaccttttttttttcttttaaacaattcataaacttcccaaagatctgattcattttggatttttaaaatactattttagtaaaatttctccttaatgaagtggttatacattacacataattcagtgcattatctctttcagctccagtaagaaaacaccaggaaagtaatttcgtttcctcttctgtatataatgagtcttttcatgtttcttctagttaattccttaaaaaattaaaacgaatgacagcctgaaccattttctccacattcatctgtgatgttgtgtggttaatagtccagtctcatatttgcgtgggaccagctgtcaaagatggcaccgtggggaatgcactataattttaagacccgttgcagagtcacatatgtccataaatctgcatcactagaatgcttatgggaagacagtcatcaccagatttgaaaataaatcctttattgctttcattttgaacttcactctttacttgactcaaattatctttatcagataaaggatgaggggccctcataatgagtgaacaagtttttagaagccatctcatttgcacaacttcttaacattcttgccagaccccattttgaacacagccagtgcaattatctccattcccttggagagatatcttcttgacctagtcaaatccacatcttgggtgagtttttcaatacacagaactttgagggaaaatattgggcatgttctacaaacctctctgagcctccaggacttcatctgtgggcagaaaatactttcatgtgggaaaattagacaagatacaggaagaaaggtggtcagtttattatcccttcagcgtgagttccttctccaagcgtggccgtggtatcgctgtttaaaatcggtcaccggcagcctcctctcactcgctggcttccgccccacggccctcctcagaggctgcttcccctcgctgtgccaccacagcggtccaccgtctccagttctccacaggccctcagggaggctgaagacacccccgggctggagttccaggcgccttgtgctggcctcaggacagccgctcctgtcagccttccgcccggcgccgagtgctctgtggccgttcgccgtgggctggttcccgcattcccctcacggtctctgccatccctcaccagccttccctctctcagcagacggcctttcctcccacgacgctaaaacctagagactccaggcagcgctcccgtctcagctgctgctgcgcgctcacccaccggcactccgcgtcggggacctgcagtcttgcgctcctcactgacttctcctcagcacagaaacgtggccacgcccttccagctccggaagaactgtctgtcgcgctttctccttagttgccttcaccccccagtcctgctaatatttctcgttcgctgccagtgtttctgaaagcgtacccggccttattgccctcttttccatccagtctgggtggctctc

SEQ ID NO: 50167 - DNA, 1105 bp, Bovine  19866880537301
  misc_feature (1)..(1): n is a, c, g, or t
ncataactcctaaaatgtccatttccctcttaggaagccaacagaggtaaactttattggtgatactagaatgtatgcacaatataaaaaagtaaacactgtgctcaatgttttgaaaacagaaaactacgtatagggaaattttttctgtcttttagaaaagcacctttagaaaagcatgcttgaactaacagatacgtggtgagataaatgagtatctcaaacaggtagtaattcaagtgttttgagttcgttataccaaaaacacttattctgggacactgagtcaaagaacaaactactacgagagctataattacagcaaagcattgaaaataatcaacagtgactccagcttgaaaaatacctaaataacggttgtcgtaaatagcttttctctacaaactgtatcttccaactacttgcttgccttcttcttggttgaacacttttaaatacaacataaaaatacataaagaggaaagtacagtttctgtgcacaataattcaaaacaaatgtttctctgaaacaacactttttgttcagagtttgcccattacaaaataaggatgtttctgaaatctctgaattcttgtgtgatacagaaatttagaagacaagccattaaatttccctaaaactgagcttttcaaagactgaactgcaagtgcaagggaaaccttaggcagtttccattctgaagagcctactttctgcattttttttaagtttcccagttttcccaggccagttctacaataagctctacagtaagaatcatgcagcagccttttaaaaataccaattcttgaatcccatgaccagagactctgatttaataggtttggaatggggtctcacttcagtattttaaagctctccaagtaactctaatgtgtaagttctgctataacaaaacatttgtgtctctaaatcactgtgacatgcaaaatcacacagtaaaaaccaaagaccttatgggaaacccagtgttaaaggtacaatgctcaaaagcgtcttcagggatattaattgactataacttttttaagattaaagaaaacaaagatacaacaataaaaactttacatgatcttgcttgca

SEQ ID NO: 50168 - DNA, 1139 bp, Bovine  19866880557404
  misc_feature (1)..(1): n is a, c, g, or t
nacattactttggttgcaatgtatttcagatttatgtttccaaagggctcagttatctgacgagaacaggagcatattaaatctctgcataatacatttctgaaatggcttgtatctaagacaccaagcagttattaaatcttgcttttaacccaccagtcctctaaatcttctctccacagcttgattcccagtagagaaaaaagtaactcaaacaaaaatcttcctgtttactgtaataagctatttacttatctgtgcacaaggttgagaaattatggaatagggattcatgtatttgcccagagagtatcttgcatagacattttgtttaaattttcatttatattttcaattcataaaaggattatatactttgacccacttataaggagagaaaatagagcactatgttcccacttgctatttactgaggttgacaagtcactctaagccctctgaacctcatttagtttatttgtaaatggagataacaatactgcctggtagagcaaatgatatgatgttaattaaagtgctttgacaactataaatattatgtaaatataaaatactgtgtattgttatactactttaataagaatgaaaactagttggttatttccccatcatgccttttgtaaaataaggacaggacagaaagacactattttgaataatctaattgttatgagaagtctcaaataaaaaatttcttaattaaaatattatagatcagagctaaaatttagaagccatttaacccagcaactttagttttagatataaggaaagaaagacccatgaaggtaaatactaaaaacatacacacttacgttggggtggaaagtcacagtggtggaaaggggagaattaaacacaaacgttacgtttcccaatttgctgtcatgtcacacttgactgaagaaatctagggttagggttagagggcagggcagggcaagttccaaggctgtgttaaagttctgccagattataggagtcattttaattggtcactttattttattggccaattataaaatagtaacaataaaaattataacatgatgatgagaatacacaggagtagttataatgggttaagcaactcactccaatattcttgccaggaaaat

SEQ ID NO: 50169 - DNA, 877 bp, Bovine  19866880559045
  misc_feature (1)..(1): n is a, c, g, or t
ncgtctgaggagaagcagtgcgcggtttaacctctgtgccggggttatggtttctttatctacagatttcagtttctttattggctggtgagcccagtttgaccctcttagtttcaatttctgtcagcaaagggaaataatatttttctcggatggtattaagtaatcagtaatgatgcctggtgaagcttttcactgtgatgtgtaactgtatagttcagtactacttttaccatcagttcttgtgttttaattcagttatctggaacacagtagtattttaggattttagtgcctgtcatttctatgtaagaatggggttccatcttaagtttgttagttaccgcatatgtttatatgctcttttgcagtttaaatttaattgcctgcctcccgtaagttgctcagttaatgaccctgtattttaggctgtcattcttccagattcgctacattaagaaaagtaaattctggccttcagataagaatggaaaatgtccaaaaggaacattcaatgattttgtagcttcatatattttttcttttatatttgaagagaatttaatagacataatttctgttttaatgttacaaaattcgtagttatggtgttctaaatactagtgtcttagagtcattgggtaagtaccatttataagaatcatttcttatatttgtaagttttatgttaccttgatttaaggagtcataaaaatgttagaggatgtagaatctattggtgtcatcctgtctaatctgtcattttatatataacaatgtctctgaagaccgagataattagtgactcatgtagctagctagtgacttgtacaactgtaattttctgtagactttaaaataaagtctcgcttccttc

SEQ ID NO: 50170 - DNA, 1059 bp, Bovine  19866880632646
  misc_feature (1)..(1): n is a, c, g, or t
nttcagatgaaaaatgaattggaagatattaatgtctacagaaagttatacaaccttttttcaattaatagtatactaataggaacagaagtttataagtaggggatttgagtagacatgaattaaaagtaagaattgtttccctttgaaagacaaaagtataccatacacgaaagtattttatgaaacctgcagatataataatgaaatatttgctaaggtgacaaatagaagtctttcccaaataaccattgggagcaaagaacttttgaattatttagcattaatttgtagagtatttaaacaggtattcaattactaaaagctattcaagcggagtccatagtggcagacttctttgcatacttgtcaatgaggatttttattctaaagcaaccctgataactttaatgacaaagctgatcaaattctgagtaatccttggactctaaaaatacgccgtggctgtgaccttgagtggaacaaatgtgctaagcaggccgagcaggtaatgaagcagacggactgaaaagctgtgtcgaagagaaaagtagagaacaattacttctcagtatgaacagcagaaaaactacagactctgacaatcattttatgtcctgtattgtggcattctgttaattattcctcctaaagatcatagttgggcttgtggcttcaaaataaaagctcatgttgtcaatatgttcagaaatttatctgctttaggtgttcagtaaattgtaaattgtgaatctaaattgtagttagttttcttcttaaagtctgtgttttttgccttaaaaaacaatccattatcctggatggttatttccatccacttgaccatggatgggtaaagcttatgttttcactgttttgggtaactaacttcttaagttggacctgtattacttggctcttgcttgggaataggttgtattactgtattagtgagttgtcctgtaattggttaaggtagaagtcattactaaaaaaaaataaaagtgaaaatatagctttaaaatttatctcttctccaccctaggaagaactcctttt

SEQ ID NO: 50171 - DNA, 691 bp, Bovine  19866880704350
  misc_feature (1)..(1): n is a, c, g, or t
ntatatacatatgtgtatatgcatgtgatagaagcaagaaatactacaatttttttttaatgacttgaagaatattcactgttcttagcatctggctcttttgactgtaactgctaattgacctagagtctcatttcaaaagagaatctttctgttttcagactgcctacttttgaagtgtctacttttgaagactctgaaagtacctatttctaattcatcaaatcataatttaagatatcttcaaacttacattttaatgaatcacttttaagtagtacatattaacattattttaaagaactcacttggcttcttgtaagaattttattttcagttcctgaggaagatcttctttacacgttttaacagcaacagcagttttatcctttaatacgcccttaaatacttcaccaaaatttccctgaaaatacaaacatatttatcatttggtgtgtaagacagtcacataagtctttgcaaaattccaggcaagcatgtaatgatgagttttgagttagagtactctgttggctttattcaatttcaagtatagataaagacttggcatgctgctctttccaattctccaactttaaatatactattcaacactccagccattcgggagactgaggcttgaggggaatgggaaaggaaagggaaaaaactgtagtaggtaaaaggaaag

SEQ ID NO: 50172 - DNA, 1102 bp, Bovine  19866880833821
  misc_feature (1)..(1): n is a, c, g, or t
ncccctttagcctccctgcccctcccattccccgctctaggtcatcacagaatgccaggctgggctccaggtgttatgcagcagcttcctgctagctctgttttaaacatgatggtgtctatatgacagtgctactttctcctggcctttctactaatgtctgttgacgagtttccttttgttctccacgtgtaggtcctccacaaagtgggacatgtagcctggtacccgcacagtggggttcataaggtctagagctgggctgatgactgcctaattatgcagggaatctagcaactcttgaagaacagtggaaagtaaggtcaagtctaagtaggcctcttctttctattctttctggagctgatattttatgtggcagattcaatgattgcatggatgtcatcagggttagacagagactagaaatacgtgtcttaattgatcatcaaacgtttctggatgtggtgtcagaaaggacacttgtgtgtccacaagttctttctctatgtctgtgcctccatctcctctctgtacgtagctttgtcagtactgtttttctagataccatatatgtatgcattaatatatgacattcatttttctctttctgacttacttcactctgtataacagtctctaggttcatccaccttactacaactgactcagatttgttccttttcatggctgtagctcagcgtcctttgggttccaaaactagtagatgatggaacagtctcctgacagcaaaaattaataattaaaatgattaaaatttgtgcacaaaacttattgaaaaaatatgcatttttaaaatgttactacaaagaaaagtaaataattctaaatacatttctataactgcattttatgtaattcctaaagaataatgcatataaatataaggctttttacactatagatccagaatcatatttttatcactgtactgggcaaagcatatttgtagttcagacgagggtagatatttatataagtatcatatcacttatgattacatgtaacagaatccttggctagttatttctgtatgtttgataaaacatcctatgatctatttagtaaaattctcccccaa

SEQ ID NO: 50173 - DNA, 1426 bp, Bovine  19866880871938
  misc_feature (1)..(1): n is a, c, g, or t
ngaatcgagaagcagaggaagcgtagtgtcataatactgattctgatgaagctgtgcccccttcagtgccaaaacatactgattatgcaacatatggagtttcattgtggctttgtcgtaacgttccttagccttttcagtttctttccctgaaaaaaaaaaaaagttgaataaagttaagagataatttaaaagttctatcttcactatatgcaaactgagttaccactaattcatgttatctcacacattttatgaataatcaaaaggctactgaacacatgtttatttgtcagtactttgtacaaaggatgctctgaagccagtgtaccctgcaggagctgtttgatgaataaaggtcaatatacaattttttttgaaaaactgtacagatatacgctccttctcatcttcaaggagcttacaccaaatggaatgacagtgcacgtgaaacagcattgccaagagaacaagaaagtttgtaaaaatgttaaatttgaaggtctacttttgagatgtaagtcaagaccagggaagtcagaggagactgtggagaaaacagaccttaaaagataaggcaagtctggaaaggtaaaagaaagacaggagagacaataatagttccttcacctcactctctttctccatttcttccttcgtttcattcaataaatatcattagctgctcatccccaggaactgtgctagacattgggaattcagcatttggcaaaacagagtctttgacaatagcccatggtctggtgatttggaatattgagtgaaaacatggggagaataagcaatgttacataggcaagcaaatcaatagctcaaagatagcaagttttgaggaaacgaaggaaataagctgcatagctcagatagttttaggttgtgaatgacttgaagatcaagcagagaaatttagacttgatacagaacaagtctagaagatgacaaagtaataagaaatttctatgattcccttactaaaatcattcagaaaatatttacaggttgacaatataaatgaatgatgatacaaacaaataaaaattttaagcagatcttcaatttttgaagcaaacggaaaaaatatttcttgtcaattatctagacttcataaaaagtttttgccctctatccaaggagagctcaccaaatgaatccttcccccaaaataaatcttatgttgagaattcttgatgcaagaggtttttctctgcttccactctgtttagactcagcacccatttgggtattccctatagacaggagtctgaaaagcatctcctgttggagacagcaatcctactgctgggcatacacaccgaggaaaccagaactgaaagagacacgtgtaccccaatgttcatcgcagcactgtttataatagccaggacaggaagcaacctagatgtcc

SEQ ID NO: 50174 - DNA, 3000 bp, Bovine  19866880921647
  misc_feature (1)..(1): n is a, c, g, or t
ntgttttgtattgtgaaaacagcaaaaacatcatcaatctcagataaacttctactgttcttaataagaaaaaatcaataaatatctttttcttatttctaccttaagaataacaccctaccttcctgctgtatcccaggaataaaaacaattgcagtctttgttttcagatttaaaggcaagagaagagctttttcctctgactctacaggtggtttctgaaagtgttctccaggtgacctgaggtgaccgacaagtttattttgcatttacacacaagtttaataggacctgcatattaacaagagtaataacttgttatagcaaccaaaaataatttttgtattcacttattacctgtatacaactctttcaactttctcatctgtttacgctttggcttaccatagatgtaactgatcgtgcgtcttcttcataattgactactggaggtggctctttcccatcattttcttgcactttttgctccagcaattctttctgtgctgtaaactttgcctcggtgcatctcagctgctggactgactgtttcagctcttcaagtgtctgtttttggcttagcagaagtacaatactaaaagagaacacatttaatataaattatttcaactactctaagaaataaagactgtgaaggaaatcatatcctgtatatgtgtagattatgttcctttcttcattttcctctttataagagtctttcagaactataagaattaggaaactaaacggattttgagtcatcacagtagttgttaaacattagcatttacaaaattaaaggaagtttttggaagcaaaaaccaaattcaaaatgctttcaaattattacgatccatggcactcattttattttacagtaaactgtccacctcacaaagtacagatatgtcggtccagaaatgcagagcctaaatgaattaacatgactgaagcagaatcttaatttattttaaatctcaaacggaatatagctaaaatcagatctctgcctagagaataaatcaaatcaaggtgacagctggaagcaagctgtgtgcctattgtgaggatcgtgtgcttagagctagggcaagttttctgacaaggactaccgaatacgtgtaagccctcaaatcttccaatatacaccagtagaaagatagtagacctcttcattcctcctttagagttttacccttcaaggctgtccctaataggaatttcaaattaatttgcccatcttaaagccacaagaaaacaggtagcagcggtgagaaacatcttgaagatgctgtcatatttagtatattagtatctgaaagaactgtgccacgcactgttgaaagcaagttaataatagattacagacagtttggaaaaagacagtctctttagcaaatgcttctgggaaagctggacagtgcatgtaaatcgatgaagttacaacacgctcaccacacacaaaataaacttaaaatggcctaaagacttaaatgtaaaaccacatgcttaaaaatcatagaagcgatcataggcaacgtggtcctactgcataacatagagaactatattcagtactctgacaaaccaccatggtttgtcagaagagagcatttttttaaagtatattcgtgtataactaaagcactttgctgtataggagaagttaatacaacactgtaaatcaattatacatcaatttaaaaaaattgatcaaatacatgagaagataagccacagactaggagaaaagatatacaaatgacatatctgataaaggactgttatccaacatatacgaagatctcttaaatatcagtaataagaaaataagcaaacttctttaaaaatgagccaaagaccttaacagataccttacagatatacagatgacaaataagcatgtgagaaagtgcttcacattctatactatcaggaaaatggaagctgaaacaacaatgagacagtattagacgtttacgaggaaggccaaaccccagaacactgccaccgccacctgttggcgaggctgtggcctggaattactgacgggcacgaacaatgggcagccactctggaagacaggctggcagttccctgcaaactaagcatacttttaccatgggatccagcaatcctattccttggtatttacccaaaggagttgaaaacttacgctcacataaaagcccacacatggatatttacagcagctttattcataactgtcaaaactgggaagcaaccaatatgtcagtcatcagaagaaaggataactgtacaagagaatacgtttcagaactcaaaacaagccactagaccactgaagacatggaggactcttaaaagtacatcattaatcgagagaagccagtctgaagggctgcataacgcacgattccaaccacgtgacactctgtaccaggcaaaactatataaagagacagtaaaaggaccatggccaccaacagctggggctgggggatgcactaatgtgtggagcacagaatatcttagtaaaaaatgccctatatgatgccataatgatgggcataggtcattatacactaattcaaacccacagaatgcacaccaccaagagtgaagcccaatgcagactacggacttagaatgatactgatgggtcattccagattcgtcagttgtaacaaatctgatgctctggtgggcagtgctgataatgtgggagactatgtattgtgggagaagtatatcggaaatctctgtaacttcccctcagttttgctgtgaaatttaaactcctcaaaaaaagtcttaaattttaaaaatgatgtatctgtacagatttaatagaatggctcggataaaaagtaatgacaagatcaaatgctggtgaagatgaggcgagattatcactaatacattgctagtgggaatggcatgtgcatgcatgctaagccgattcagtcgcatctgactgctttgtgaccctagggactgtagcctgccagactc

SEQ ID NO: 50175 - DNA, 877 bp, Bovine  19866881005592
  misc_feature (1)..(1): n is a, c, g, or t
ntatttccaattggaaaggctgctgggccagaaaaagtgacctttggctgagtgaccacttgttacttggtcagcttcaaggctgcctgccattaggaagaaccaccaagtaataaactattacagtgggcacttatctagcccctacaggacactttctggggaggacaggaaagcaattgattttctctattcgatagtcctcatctcatactttggtcatctaactgcctagtatcacttctgttcaattctcagggtaccttatgtaacaaggggggtaggggagggttttttttggacagatttaaaaagcctagagcttttgtatggcataaactaatacctagagccgtagacaggtgaggcacagagaaaaggaaccccggaagaggtcttcttgtcctaaaagatctcatttgaaccaagctataaaaggaatatctaagtgctctccccatccactgaaccatttttattctgatgaattaagaatcatttccaattctggaaatttctttggaaaaatgtgtttttttttttttttttaaaagcaaattcacttaatctctccaaatcttggtttttatatctgaaaaacaggaagttatttttgcttctgcaattgtctaattttaggaagtagatatgcacacacacccacagctggaagtttcaacatactatagccacaggtgaaatgcttgatagcaagttgttcagaatggtccaaacagacccaactgtagggtttactgacctaaagacttcaaggcaaacttttcaataatggaacatattatgtcgtctctaaccatttatagctcctatgcctggaataacaatgtttaggcagtacccagcacatctaaaatca

SEQ ID NO: 50176 - DNA, 1743 bp, Bovine  19866881103200
  misc_feature (1)..(1): n is a, c, g, or t
naaaaatatttgaataaaaggtcaaaagaaccaggttctctcaaagttaaaggtcttgctcacaaccaaagtttcaacttttgaaaaatttgacaattaaagagaaaacatacacagctataatgggctggatgtgagcccccgccaaaggtatatccacccagaacctataaatgggacccttcttggaaaaggagtttataattaaggagtttataatcaaggatctcaaaacgaaatcgacctggattgtccgtgcgggtcctgaatccaaagataagcttccatacaagaagacaaacaggagaggaaaacacacagaagaaaaggtggtgtgaagaaaggggacataggctggcatgacgtgcccacaggtcaagaaatgccagggtttgccagcagctacctgcccgaagcttggagggaggctttctcactcagaaggaaccaactctgggggcaccttgatttttaacttctggcctctagaactacgagagaataaatctatgttgtttttaagccaccaggtttgtggtcatttgtgacagcagtcctaggaaactgatgcacagctgacaaagagtcgctgaatatttaccttgtaacatgatcatcagctgccctaagcgtcaaaaacaaaacaaacaaaaaaaaaaccaagcttacgtgagttctattaatcaggaaaactggtccaaaaattgcattattctcataaattgtatacagtgagattaaaatgtacatacatgcatttttattgttcactcttaccactccaggttttagacacttatctcaggccaaaacaacaccgtgccctcaaatgcactatcagaagtatagctgcagtctcaaagacagtttttcccaacaggaaccctgattactccagaaactatacagcaatacgcacagctcagcagcagcaaggtcacaggacctttttattcatttacagtgcagcaactggaacagtagctaactttttatttgctttgctagcatctattttcacactaattagcacacgtggttttcacatttttggatacagtattgtttccaattataaggcgccagcaaagaaaagaggaatttcaaaggcaatcaaccactaatcaaaaacataagttgatataagtttatacatatagagcatgtagtaaaaagattaacactggaagtaagtataaaattactgggccatagtctttattctatcagatctttttcatggtttatatagaaatggtattagaaggacttttccaagctagctatttttctacttcaaacttttcacttcacgtagttgagaaaaatggagatcagcagtgagatgactcaactcatgacacaagtatgatgacaaagccaactcccttttctactgtaacccctggcttagattacatccacaaagtcaaccaatgctgggcattggtcactcattcagaaatttagtgtgaggtgaggagaaaatgctctaatgacattaaagtagaaatgttacatagaaacaatgactgcattcaaatttagaacacttagtgtaaaagctgttgttcatttacacccccaaaagatgcactattttgaataccatatctcaaaaatgtaataaaaacataaaaataccagtaaaaattttaaataattataagactaaagaatgctgctaataagaacatacactcaagcacacatacacacacacacacacacagaggcactggg

SEQ ID NO: 50177 - DNA, 921 bp, Bovine  19866881144901
  misc_feature (1)..(1): n is a, c, g, or t
natctgatactgtcaatgattttgactcatttcacaagccaacctagtgtttgcgttgtctacttgcttagccaagtctaagttgagagatcagagccctaaaagaggcacaaaaaagtgcttgtctggccttggatatgaatatataagtaaagctatatccctcataatatgaaatattccgtgaaatgatcatagagaaatggagtagatgccctggacttttaacatggccagttattcttttcctctcaaacccccaactctggctgtggagccgattatcccagcattttatagccttagttatgaaaataactacactgaaagctataaaagattaagtggctacgtatgattgttttatgaggtagaaatttgaagttaatctagttgactgttaacttgatctaaagtactgatatttgaaatatgcaagttattatctcaatttatggtaaatattattatgcacttgatttaaagaatcatatcactcttttaaaagaaaatcacaaaacagggttatgagaggaggtaattttcaatcatgagtggggaacaattttcttatgctagttttatctgttacgtatcttctcttggaaagttatttgtcgtcttataaatggaatctctttcctgatttaatttgtgtaggaagttaatgtctttgaccatataatgtgctataaaacatctaatttccatcttgccagacttcatttttagcctacataaagaatgctattttggtctcagtataatttctgtttatagtacctcacgcctctctgcatttgtttccctcttactcatgagaatatacgtgtacatcatatgtcagagtagaggacgtggcgaccagggtaatttctctcttattcccagaggcacatgaaactagacagcctgagttag

SEQ ID NO: 50178 - DNA, 1350 bp, Bovine  19866881406336
  misc_feature (1)..(1): n is a, c, g, or t
nataaagaaagaatggaaaggaaaaacggagggagaaagaggagaaggaaaaaataggagcaagagtggaagaaattaactgagatttattacagttctaatctagcaattacatttcctattatacttttagacaaccaacatttatatttgacaaatgatgcaagaaaatacagttctctgcacacagattttattttcaataagcttttgatctctcaagtcagttgtcacccttatgggaaaaaaagctttttagaattttcttcctctcctacaaatgaacttgcgctgtaaaccaagttaactgctagaaaatcctcttgaataccctgatgatctttagttcaagtaaagaagggaaaatgtgcatgtggctaggtgggtagggtgtgtgactagtagaattgaactgattagccacaagtgatggatgagaacagaatggaaggaatagggaaggagtgagaccttttgagtatatcttttaatataagtcttacctttgaatcaaatcagtgttttatatatttaaaccagtataattataacaacaaggaggggaaaaacctaaaatgggatataaacagaaacaagtgaacctaaaatttttcatatcaaatttgcaacatgaacacaaaaatgcatcaattcaaggaccatctgaacacggtctattgtacgtacacaattatgtgctcagaactgcaaaggaatctggggttttacttagctggtttattattggtagtagtataagtatggcggctcagatggtaaagaagctgtctgcaatgcacgagacccaacgtgacccctgggtcaggaagatcccctggagaaggactctaaaatgattttatttttattatagaataaataaatacatcaatgtttggaacccgagttctcactgtgggagtgaaaacaccataaaaaatggaggtggtgttgaaatggaatagacaatgtgcatatgaactgatgattaagaaaaagaagctcatattttttctctttgtcacgaaatggtctagacataatgacgcatgtggcaatgagcacgttcagtgctcggctttctcattgctgctccccaggaaaagcaaccaaatgtccatggagaaacgatgtgaccccaggcctcaggcaacgaaaacacaaagcaagcctggacgatgttatgctagaagaagattgctcaaggacaaatgacaagccaagaaaaggtcacaagggccagcttgagggcatcgtaccagccaaattgggaatttgggacaacttgagcatcagaaagaataactgtgaaagacaagacattgaattgtaacaatagagtgagcttcg

SEQ ID NO: 50179 - DNA, 1618 bp, Bovine  19866881546080
  misc_feature (1)..(1): n is a, c, g, or t
nactgcacggaggcctcactgggccagcagcccagggggcacaggggcctctcctgtcttgtgttcccagcatatgagttctccgtggcactggagaggacctatttcatgagtattaaaaagaaaagagaacttctccatattttgaaagtataaattaaacttcctttctccattttcgcacaagccatgttgatgatatcctgtttcatcatgagtatctaaagtatttattagaaataagaaaaattcacagaagtttcaggtcataacataattgcggataaagataacatttttttcctctgcattggacttgatagaagcttcactaagccggaaagccatcagaggtcctgcagattgactgcaaatatcagccatactccagtcatcacaaaggacaggaaagttttacctcctgtatcagttagggcaagctcggttatgctgcagtaacaaatagcatgagactcttaggaacttaaagcagctgaatgtatttctcatgcagtccatcacggatcagaaaaggagctctgctcacagtcgtcacccagaaacagagcctctggttctaccgtcgcaggggcagggaacttgcgaagtcgtggactggctcttcaagttgttcctagacgtaaccgtcttcacttctcacgtgtactgactacatcaagtcacagggcagtgcgtgagctccacgtggtgggcgtgtataaccctcctgctgggaggaacactgtgtattcgtgcacagtagcacagcaagcgcactggcggttctgcctgctgtgccagtggagtgtaggtgcctgaaaagtttgcttggtttattgtggttttaaaagccaccagcttaggcgtctagacacacatcaagtggacgaggccttggacttcatggaatgctcgctccagtatggctactagagcatggattccaaggttattttggtcctaatttgttagcaccagtgaaatttccatgaaaagtatctcttcgaccatggatttcacatagtagctttaggccgagggaataaaagcagtaacaagcatctctgacaggagactgaaaatagaaggagggcacaagaggctactctaggaacctgtttcctttctgttagggacttaatgggctttctcactaggaacagctttttacctgcgtttttgaaaacgttaaatgcgttgtcagtgaaccgcagtagagcatttgaaaattcagttccacttctttgtttgctcgacttgtaataatctgaccccaactcccttctcagtcgttttaattatttagattatatgcatggcaagtgtgggtatcttgtttaatggtgagtcactgagcaggtgtgggaattagacaaacaaggaggcttcagtccgggacgttttcataaaagaggtagatctttagggactacaaagtggtttggagtttttaaattacaagaactatacttaagggaaataaaaaaaatggcatggcttcgtgaagcatttattaaataagtgctatagtacagactgtgcaaggtgtccggggatccaaagaagagtgagaaatgatcttcccatgaaaggcattcaaagcctttccgagcatacg

SEQ ID NO: 50180 - DNA, 1899 bp, Bovine  19866881627482
  misc_feature (1)..(1): n is a, c, g, or t
ntatgtataaagatgttcatcacagtactgagacataacctaaattttcatggtgggagatggattaattaaattatggtctatttatacagtgggatactatgcagtctactactacataatatcctattaaaggggcttcccttggagttcagctgctaaagaatctgcctgcaatgcaggagacctgggtttgattcctgtcttgggaggatcctctggagaaggaaatagcaacccacttcagtattcttgcctggaaagtcccatggatagaggaacctggcaggctaccgtctattgggttgcaagagtcagacatgacttagtgattaaaccaccataactttcatttttttttgctgagattgtttcatttgtttcaagagaatttgtaattattcttgaagcatttttataacagctgctttaaaattcttgtcagatattttcaacatctgactcacctcaatgtcagcgttgtttgattgtcttctctcattcaagttatgcttttcctgtatcttgaaggtatgatgagtgatttccagctatattttggacattttggataacatgttaggagactcttgatcatacccaaatattttattttagtagcagtcactttatttaaacttagagtgtaggttctggccaacttttgtgagctatagttgcaatgacaatttgttttcagagctctttcaatactgatatgggatactttattttggtattatttgggctcttgctttattattgggcttccctggtggctaagtggtaaagaattcaccttcaatgcagaagacacaggttcaatccctgggtcgggaagatcccttggaggagggcatggcagcccactccagtattcttgcctggaaaagttcatggacagaggagtctgcagtccatgttctcccaaagagtcagacaagactgagcacctaacactttaactttcactttattattgtaagtgcctcctgggctgcttagtcagtgtggagcaggtgatgaatccctagccaggcaatatttggggggaaaagtaatgtcaggaaggaagtctaataatactagatattttaaaatgtcacaacaattaaatataataattaaaatactggtgcaacactagagagattatggaaaagcactgaagcattcagaaatagatccaataaacctgtcaaggtagcatttcaatctagtagaattgggactccaccagtgaccaccacttggaaagagtccactttttaaaaagtagccaattaccccaacacagtttattgagtagtctatcttttcccttactgatctgaaatgccaattttttcatataccaaatcaatttcattattttttgagttttttattctattcaaacaatttattctaggaataagatcacactattttaatcactttagctttataatttgttgtattatctgggaaagtaaataacttctcaaacactgccattattacatatatatatatatatatatatatatatatatttatacctatatcaactaataggatatttctcagtcatgtctgattctttgtggcctcatagaccatagcccaccctctctgtcctcggattttccagcaagaatacaggagtgggttgccagttccatctccaggggatcttcctgacccagggctcaaacctgcatctcttgtgtctccagtgtcatctgcgaaacttatttattttatttggctgtgtcaggtttcagttgcagcacttgggatttcccttgcatcatgtgggacgtttccttgtggtatacagactctcgagctgtggtgtgggctcaatagttggcagtgtgtgggctgcagagcatgtgggttccagcagttgtggca

SEQ ID NO: 50181 - DNA, 1322 bp, Bovine  19866880454607
  misc_feature (1)..(1): n is a, c, g, or t
nattggatgatctgaatgggatgggaagaaaggatatgagtattggtaacatgtctccacctacttaaacgcttgacgatgaagggatgatacactatcaccgtggaaaaacagccctccaccttcggtctgggaggtggaaggagcaagactgaggaagacagagaagtactctactttgggtgtcgctgtcttcttggctattctgaaactaaatctggctctcctttaatcactatataaattcactgatattcttgccttctccaggataaaatctggccactcaacaaaacaagaattctcaaccactggttcaaaacaaactttattttctatagtaaaatgtttttatttctaaaagtaaacttctctatataagtgtccttaagagctagtgtctcttctactcagtttaagaaggtggggagcacagtaatctctgtgggaaaagccaccatgtatactcagtggcactgctatgtactcactagatcctgacagaagtaaagtttaagagttctcacctctgggggtactaagtgatgagacgcttgtgcggcaaacagaaggatcttcgttacttctaacagtgtaagagatcagaaaggcacggtcagtcagtttacagccccgtctcaggaccacagcaaacatggcgagcacacacaccggccttagcgctcctgctgagtactctgcctggaacaccccaactctcggacgtctgcatggctcactgccttgcttcctgctcagctgctgcctcatcaaaatgtctttcctgaccacataatccaaacagaacccacgctggcactttctattccccttacctgcttccttttttctcagaatacttatcttcacctggacatattatatacaacactctgtggatctccttctaggatgtaagctccatgaaggtaagagcaatactttatgttcactgatgtctaatgcagtgctcactaggaatcactaaataaataaaaaaatataaacatacacatatacatactctctccctttaaagaagcagtatatataaagaatctgcctgcaatgcaggggacctggggtttgattcctgggtcaggaagagtcccctgaagaaggaaagtggcaatctactccagtatttccttgcctggagaaccccatggacagatggctacagtccatggggtcgcaagagtcggacatgacttagcaactaaaccatacatatataaagaacgaggcctttggcaaacgaagggagggatcttggtctttcttctttctatacctcataggactgaagtgaggataaacaa

SEQ ID NO: 50182 - DNA, 1486 bp, Bovine  19866880479887
  misc_feature (1)..(1): n is a, c, g, or t
ntaacaccctacccccactccagtcatgaccatcaaaagtgtctcaaaacatttccaatcgtccctataaggagagcagcaaaattgcttccagctaagaaccactaatcaagtgatttagtgtgatcctccttgggagtttaaagtggatggcaggccttgggtgtctttgttgtaatagtagagaataggcgtccttgaaagaatatcagaggaaatgaacactgaaaaccagactgactcactaaagtgacttgctctctctggtaagggtccatctcactggacgagttcaggcatacttggaagctattcagctctcatatgaacattgacatcacagacgactgcatctgtgaccttgcccggagcattgacttcaaccaaggatggccacattgacatcaatgaattcctggaggccttccgccttgtggagcaatcctgctcagggggtgatgtctcagattgcccacaagtcacaaacagtagtaacagggactgcagcagcccaggtgcacactaaggccagctttgtccccatcatccaaggtgcctcagaagcaatgccgagctcgttgctggaatgtctttcttattctccataaattcatggaactttatgctgagaatttgcctaccaatatgcaacagaatcacctgtgtattcaagcgaattctaccaaagaacttttaccaatctttctcaaacttttccaaaagactgaagagggaaccctcctaaagatcattctatgaaaccaccatcaccctgataccaaaatcagacagatatcaccaaaaaagaaaattacaggccaatatctttgataaatatagatatttgtatttataatgcaaaaaatttcaacaaaatattgtcaaactgaatgcaacaacacacaaaaatgatcatacaccatgaccaagtaggattcatcccaagttcacaaggatggttcaacataagcaaaatcaatgggaaacaccacatcaacaaaagaaaagacaaaacccacatgatcatctcaaaagatgcaggaaaagcatttcacaattcagtatccactcatgataaaaattgggttggggaacatatttcaacataataaaagccatttatgacaaacccacagccaatgtaatactcaacagtgaaaagctgaacaccttcccgctaaaacctggaataagacaagggtacccactcaccacttctattgaacatcatattggaagtccgagcaacagcaatcagacaataaaaagaaataaatggtattcaaatttatttatttataaatttatttatttattggaaggggagaggtaaaattgtcattatatgcagacaacatgatactatatagagaaaaccctaaagattccacacaaatactagaactgataaatgaatctggcgaggtagcaggatacaagattaacatacagaaatcagttgcattttatactaacagtgaaatat

SEQ ID NO: 50183 - DNA, 910 bp, Bovine  19866880549303
  misc_feature (1)..(1): n is a, c, g, or t
natgatgctaatgcaggtttgtctttctcttcagactctgagtgaatcagaaaactttgaagcagctgtttacaaactggccaagactccgcttattgctgatgtttattacattgttggcggcacatccccccaaggagggagtggtcatcacaaggaacagaggtggccctgcagacatatggcctctagatcctttaaatggagcgtgagtagaattaaaggctctggtcattttgtatcaataatctttttttttaaattgatgagcctagagatactgtttatttttatatgtgcttttttttctttagctgtgtcccagttgacctcaggtaagacaagatgatgtgctttgttgcaggtggttccgagttgagacaaattatgaccactggaagccagtgcctaaagcagatgacagaaggtaggctctgcacactgcctggtttgcagtgttttcttgtggtcaggagaacatgcccctcctactccaggaaatggaaaggactacagatgctgtcccctcccagaagatgtacctgggcccccggccagtgcctcagccaggatgggagagtgtagtatgtggtagacagcatgacaggaagctggttgggagttgggaggacaaggttgattctggcctcgggggcaggaaccctagatttcaccactagctctgctgatgactcactgggtggcctcttgagcctctgttgacctatcttccccacccccccttttttattttttattttaaaacttttttttttgtattggagtatagctgattaacaatgttgtgatagcttcaggtgaacagcaaagggactcagctgaatgtacacatgtatccattctctcccaagctcactcctatccaggctgccacaaacataagcagagt

SEQ ID NO: 50184 - DNA, 820 bp, Bovine  19866880885633
  misc_feature (1)..(1): n is a, c, g, or t
nactgcaggtggtacttctgtagcaaccgctctgtcacattaggcccaaaataacagccgcctcctcgaacggtgttggccctgcagccctcctgagccatggggtcactccacagtatatccaccacctggagagaaaaaaaggtatgtttcgcgaaaggagagacttgtattttaaagtttcaattctaagtggatgttgaggtcccgatccataactcagtgtaacccaaactgaccacctttcttggaggtttctagcctcagaatcacctgcgattcctcctctttctcaccaccctccatccagtcagccaacaagttctgctaattttaactcttaagtaattctgtattctctccttttcttttctttattcaatgaactataagaagctgccatttttgtagatcaaaaatggttggaaaaaacgagttcaagtaatcctatgaactacatgagatcaccagcagcagcatctcccacctagattgcagtctccctgccacagtcttgccctggtgaaatagtccatttgactgccaaagtcatctgttttggcaagcactgtgccttcctcctcagtatctattctcctccctcttccttgctaacagaactcttagactggggtatttggcctggcactgtgctggctaaatacgagcttttccattcccccttgcagcttggggtggccatgggaatgcagttctgaagattctggaacaggttttagttgcctgcaaacacggaggacggaagcttctgatatgatacttttggccttgagctgcagcagtcatctgatacatatgt

SEQ ID NO: 50185 - DNA, 1758 bp, Bovine  19866880904485
  misc_feature (1)..(1): n is a, c, g, or t
naggcgcctggcgggctacagtcctggggttgcaaagagtcagacacgactgaatgactattgttttctgagaggttggattatcatccaatttttacagacaaggagatggaggcttggagtgggtgacttggccaaagttgcacagctggtatgtgccagaactgctcctctgtcagagtccagaaacaagttcctatctacatatgctgtggccctcttcgaacttaacccctcaacatttcaaacaggattcctctggctttgtcctggtctacttttctacctcagtcccttcactccctccacacaaactcaagccatattaattaaggttccctgagcacagtgagctctcttatgattctagtcttttttttacatgctgtccttaccctcccagtgaactacttatccttcaagatccaaatcaaatcacctgatatgaaaagtcttccttaacaccttcttgtccccactcctttggcaaagttaattactcttttctctattatcttcaagattcttgtacatacctttattttatattttccatgttgtactataattaattgtcagagaatctgctacagcaggaagggactttatctcattaccttttttttgttgttgttttttggctatgctatgagatagttccctgaccagggattgaacctgggccctggcagtgaaagtgttgagtcctaaccactgggccaccagggaattccctatcctcgcgatctaccattcaatatgtatgtactatattggataagaaagacaagctccctacccacatggaacacacattctagtggaagagacagacaagtgataccataagcaggaatacaattccacattgtaggggaaaaaaatggtagcacaataacatgaatgaaaaatgtaaccttaaaggcactccataattctttgacttccaaagttaatttctaaaagaaagaaaaatttgtttctttttcacccacctgtttctcccactctttaatcagttcttttacttctggtaaatctgggtttaggcaggcttcattcccattcttcattgtagcactaccaaagaaacagcaacaagttttttttttttttttacttttaatgattcaaatgctttctcttatccacagaattcaattccccaattaaaatatatttgtagcatctgggacttcggtctttttcctgccttttcatttttttaagtgactggggggacttagatacatttctaggatagcacataaccctaaatttaaaaaatccaacagatgtatgcaatgggagaacttatatctaaagataatattggttctgttatgctggaaaaagctatttatgtttaaatgaaaacataaaatagaaaagttgtgaatatatctactttcctcccaaacaaggaaaatgagcatgaattttactaaattttctagtaaaacaacttaaaacataataaaatgttttcctaagacaagattaatggactggttgaatttttaaaattccatcagactccccaggaataatttaacgacttttttctttaatttctgactaatctaagaataaaaggagtcattctatacatcatccttgatttaggcttcaaaaaaatttaaaatatgcatatctttaacctagcctggaattctaggctccctgtatctcagatggtaaagaattctcctgcaatgcggcagcccaggtcaggaaaatccctagttctccagtatt

SEQ ID NO: 50186 - DNA, 1706 bp, Bovine  19866881139420
  misc_feature (1)..(1): n is a, c, g, or t
nctgttttaactctgcaatttgttcgaatctcctgctgttgctgaagactgttcatttgtgccaggtgatagttgggaagatttctacaaagagcagagagataaactgtgaaataaattcagtttaaatagtgaggaaaaaaacaaaacaaaactgtacacacataagctatgcctggtacacgcacaccaaaaaattccacactgacatttaaaattttatgcccaaaataacatttcaacatagcacatcttgtcaacaaaatttccatagctaatcaactcataccaagtcatttattcaatctaagcacttaactgagctaatataaagaaaagagcataaaagcaggtatttactgagtgatttccatgtattaaaagagtttgatatggagtacctcatttaaatctcacagcaatggaacagataccaccaccaccattttatagctcaggacacaagtttaaagaggttaactaaattgctcaaattcagttagccaggatgcactgatgctttagacagtctgactccagagctcacgttctaaaaccttaaaatgataactttagcttaagggatccagaaatagaaacaagcaggataatgagaattatttttgacctcgattttataacattcacttaccaaattttcaatcaaagagtctttttcagccagttgactttgtaaaagttcccgattactttttaattcttctatctcttctcgcagcctactaatttcttctggctgaacgccattcatctgagccccatcagtgtaaggaccttgatgctgactgtcttttcctattaggcataaaatttgagaagtcaacatgaaacttttcattttttgagctgacaattcaagtgtaaaaaaatacataatttcctgaataattactttggaggcacttttgtatgcacatttcatctttgcaaaacagtgcactgacaaaataacaaactgatgttttcagggtttctgggaggaaaaacagcacagtcttaagactaaactggctcagtgatctaaaattaagaattatagtagcttcaattccaattctatcacttaatataagagaaaataaaatctttttagaaatcttcacaaaagaatagctttctacacagcctaaaagaactgacgaattattgtcataaatagaggaagtaaaagttattttcttctgaaaattttggtcaccttcatataaataaactatgtttctaagcagctagcattccaatcataagcagtatagaatgaagactatttacaagcatttgagcccttagcatgtgccagacaccaaactagaattttatatatattacttcatttaaatctcagctccactttgcagattaaaaaaaaaaaaaaggaaaggctagaccagtcattcaaaactggctatacattagaatcacctggggagcttgtaataatcactgatgcctggacccagtccctaactaatttaattagaaacttcagtgggcgtctcagtatcagtattaaaaaaaaactcaagggatctcaatgtgtaggtagctaaggttgagaatcaatggatagcagagattggacttcaaattctgacttacacttctgtcacagcgattaaggttaaagaaagagtgagcccacaagaaatctcctcttggggacactacaataggaaggccagcta

SEQ ID NO: 50187 - DNA, 1024 bp, Bovine  19866881526326
  misc_feature (1)..(1): n is a, c, g, or t
ncgcagctgaagcctggatgtaacagtggagtgtccatacatgtgccacctgtgggcaaggcagaacgaggctgaaggccaaagccagctctccctcctgccacggaggaactcagagggatctgagaattttaaatttaaacagcctcccacagtgttttcagaataggaaagaacactttgtgtggttgcttgaattataacttttaattattctgatatacgtagatctctatttgtattcttgtccatgatcccaagtgttagggggaaggcttgggattgttttttcctctttggatattagagaaaatgatgtgtatattaaaattcctctctttattttcagctatacaatctatactaccgtaatgagtgctgccaacccagacaagtacatgactaggatcaggaatctgagttaaaagcagaagagagagttcacctattctatgaaggtttgctaaagttgttattttgtgtgttttccccaaggggtggggctaggggcaggtagatgtgtgttggtatttctcctggaagacagtggcatcctcaacattaatacatacataatattttctgacaggtatctggtgtatggttgtcatttgtgtcaggttattgttacaattgggctttcctggtgactcagctggtaaagaatctgcctgtaatgcaggagacttgggttcgatcgctgggtcgggaagatcccctggagaagggaatggcaagccactccagtattcttgcttggaaaatcccatggacagaggagcctggtgggctacggtctgtggggttgcaaagagttggacatgactgaggtgacagcatgtactcattgtcacaattaggtatttatttttaattgtttgattgaaagctaatcatctgatgcccagtgacctttgccctttattaaaacctgctttcagggcaaagtgttacctcttcacttacggcagaggggcaaatatctgtaagacttctgtgtgtcccaagtaacagggaggcaagc

SEQ ID NO: 50188 - DNA, 961 bp, Bovine  19866880926902
  misc_feature (1)..(1): n is a, c, g, or t
ntgtacttcttcctctcctacctgtcctttgttgacatctgttttgtctacaccactgtcccaaggatgctagtgaatattcagacagagagaaaagacatctcctacacaggctgcttcactcaggtgtatttctttatggtttttgctggaacagacaatttcctcctgactgtgatggcctatgactggtttgtgaccatctgccaccccctgcactacatgatcatcaggaacccccgcttctatcgtctcctggttctcatgtgtttatcattttattcagctccctctttcatgtgctactgatgatgcagctgactttctgtattggaactgaaattccacatttcttctgtgaactgactcagactctcaaggcagtatgctcagacaccctctcaataacatctctttgtatgtggccactgccctgctgtttatgtttcctctgattgggatcctctcttcttactctcagattgtctcttcattaataaagatggcctccactgaaggcaagtacaaagcatttccccactgtggttctcactgcactgtggtctccttgtgctatgggacaggcctggggctttaccttacttctgctgtgacccagtcttcccagagaagctccattgcctcagtgaggtacactgtgatcaccctgatgcagaaccccttcatctatagcctgaggaacaaggatgtgaaggcagccctggcaaggctcctgagtctaggcaccccttgtctgtgatgagtcactgacctcagaactaagtggatattgtgaaccccaaagacaaatgttgtagatttaaatctcctggttccttttctcccttaaaagacatgttcatttcttctattcctaaaacacctgtgacttcacttttttgggattgtcttttaagggtttttttttttttttttttttatgtaggccattttttaaagt

SEQ ID NO: 50189 - DNA, 815 bp, Bovine  19866881104481
  misc_feature (1)..(1): n is a, c, g, or t
nggagattgtgagatggctgagctgaggtacacatccagggctattacataaaataagcaaacaactgccaggtgagaaccacaggtggcaaaggctttgtacatcccacctgatgaggggactctcagaatggagacaagaattttatagtaagagaaaatgattcctgagatagagagaaaaccagtcaaggcaccgatagtatagctgactatgttattggtgaaagtatcagaacaagcaaggtcgagcagttgagaagggtcacagaagaaactagaaatttctacatccttgaaacaggtaacttgtaacacaatcacattgtgcacctgggagtccaaaagactaacacaaaaggacagcaaaactaaggagcaacagaggcgcgggttcatgatgaccgtgtagtgcagtgggtgacagatggccacaaacctgtcataggccatcacggtaagaagcatacaatccatacatgcaaaaaggataaaaatagacatctgagtcaggcagcctccgtaggagatgattctgctgtgagattggatgtccacaatcattttgggaactgtggtggagatgaaactgatgtcaaccaaggataggttggagaggaagaagtacatgggggtgtggaggtgggggtcagaggtgatggctaatatgatgagcaggttccccaacacggtgaccaggtacatggacaggaagaggacacagagcaaaggctgcagttctgcatcatctgagaggcccaggaggaagaattctgagacacttgttagatttccagttctgtgtatcttggaca

SEQ ID NO: 50190 - DNA, 1125 bp, Bovine  19866881147218
  misc_feature (1)..(1): n is a, c, g, or t
naattcagttcagctgtcccagctacaactgtctcacctgctgtatcagggatagtgacctcacaggttaccaattctgtggcacagaccagtacaacttttacaactgtgactgattctatgtacaaatcagagacaacagcatcaggggtcacccatactgagaaagatgcaagttcagcaattccaactatgactattctccctgggaagccagatacaacagtctcactggttacccatcttgaagagaccagcaaaagtattcccaggacaacccccaatgtttcccagagtgaatttgacaccacaccttcaatagccactagtcctggggcagaaggcagttcagctgtcccagctatgactatctcacctggtgtaccagagatgatgacctcactgattaccagttctgttgcagaggctagtacaactattccaactctgactgattccacacacaaaccagagacaacagcctcagggatcatccactctgggactgaaacaagtccagctgttccaactatgactgtttcacctgggaagccaaatacaacagtctcagtggccacccatcctgaagagacaagtccaactttacccaggacaacccccagcgtttcccatactgaaacagacaccacattctcaacagccaccagtccttggacagaatctagttcaccagtcccagctacaactgtctcacctagtgtatccaagttggggacctctctggttactagttctcggaaagaaattagtaccactcttccaacactgacttcttctccaggtcaagtggaaaccacagcctcatgggtgactcattctgagccaaaagccagtccagctagtccaactccacctgtttccactagtgtaccacatatagtgaacccacaagccaccagttctgagacaaaaactagtatggttattccagctctgacactttctccctttgagccaaagaccacagcctcattggtcactcatcctgagatgcaggccagttcagctacttcagttgtcttctctactatgccaaggttggtgacctcacttttcacaagttctgggacagagacaagtacagcttttacaattccaacgatt

SEQ ID NO: 50191 - DNA, 1294 bp, Bovine  19866881211944
  misc_feature (1)..(1): n is a, c, g, or t
ncttcctgatgccctggcctcatgggacactgatggagatgagcctgtgatgtttcaggacccagtaaccttcgaggaagtgtcagtggacttctcccaggaggagtgggcccagctggcccccgctcaaaaaattctgtaccaagacgtgatgctggagaactacaggaacctgacttctgtgggtgagtgtggttggccacctctcttcgttagtagattttgtttttcagagctatcagtggtagcttacacgtctgggagtttacatgtctgaagtaaggtcctggagcaacaccccccaacatgtacacaatgggcaggatgtcattcatatttttttttttttttaagcagatttattatttttaaaaattatttatttattttatttttttggctgcactgggtctttgttgctacgtgtgggttttctctagtttcagcgagtgggggctactcttcattgcagttcacaggcttctcattgtggtggcgtctcttgttgcagagcacaggctctagggtgcaaggattcagtagttgtagcgcacaggcttagttgcccctcagcatgtagaatcttcctggagcagggatcaaacccatgtcccatgtgttggcaggtggcttcttatccactgtaccaccagggaagtgccattcataggtttttgctgcaaacctttctcaagcacctgctgtgttgcaggaactattcttgctcttgggaggagcatgtggtccatccttaagaagtgatattgtagggactttgctggcagtccagtgattagggctcaacacttctcctctggaaggggaaaaggtttgatccttggttggggaactaagctcctgcaagctttgcagcatagccaaaaaaaaaaaaaaaaaaaaattgactgtgtagaatgggggtgagcactctttttgttaagcggccagggagtaaatattttcagctcagtggaccctgggtctctgttgcaactgctgaatgctgtcactatggtgccgaagccaccgcagatagcatataaacaaatagtcagggctgtgttccaatacaacttgacttacagaagcaggtggctagtgcctgggctgcagtcaccagcccctagtctcctgtcttccttttgagagtgaagatttattcattatatcaacctgattttcttcatgatcggaagctttcatgccccttctgtgtgtctctgagcttgggtctgaggatccctgatccctggagggcatgatgtgagacagagttttgggtcttgggttatta

SEQ ID NO: 50192 - DNA, 1745 bp, Bovine  19866880430360
  misc_feature (1)..(1): n is a, c, g, or t
natgaatttattctctgtctccctttccattctgttataccactggcagtgatgtcaacataacagactctgattcccttcattaaggtacctttcctaataacagggagacaccccactgtgtcttccaagtcctattcccgacactgcaggagattcagccattgctcttgggatccgatccccacattcttgcctctgcaggtttcatccaaatacaggggaagagaagaggcttcccaggtgtctcagtggtaaagaatcctcctgccaatgtaggagatgcagaagactcaggttcaatccctgggtagggaagatcccccagaaaaggaaaatggcaacccgctccagtattctggcctgggaaatctcatgtacagaagaacctggtgggctccagtccatggggtcacagagttggacacaactgagcaacacataagaaaggcagggggaacgagaaggcccagacagcagtggcaatcaacgaaacttcaacatggatgctttctgacactccttctttaccccaaattcagtactgttttgacctttcccacatcattagtttcagttgcttgttacgccttccttgttcacaggttagtaaaagcccaactggaaggagcagtaaatcaaatccgagcatatgggaaacagcacatacccctgtaattcacacaacatacgaggcaataaggaacaggagaaactaaaactgctgtgatgcacatctattcttatgacagctataatgaaaatggaaaatagttttagcatagcattccagttaagtctcaagatggttgtgttgtggtttgcctgggctcatctgcccacagaaaacaatggagacctgaaatttctttaggaaataattacaaagattcacaactcccaaatgtccatgaaacatgcatcagaattttaagacaatttaaagggacagttctcatacgtgaattcccatcaccgtaagcaatggaaaccaggactacatcctacttctctagccaaaagccatagaaaaatatttcccaaaagaaaaccaatcttgtgcatcctgtttattctttagaatgatggggtcttgaagctagaaaagatcttacaaagcagctgctcaaacaccttgattttattcacaaggaaactgagatacaggaaggttaagaagggtttcccaaggtgacagtgctggttggtagcaaactcaggtcttggccccaggttctctaatccccactcagttctatctgctacaccctttggcctcttcattctagttctatttaccatgctgctgctggtgctgctaagtcgcttcagtcgtgtccaactctgtgcaaccccatagacagcagcccatcaggctccaccatccctgggattctccaggcaagaacactggagtgggtggccatttccttctccaatacatgaaagtgaaaagtgaaagtgaagtcgctcagtcgtgtccgactctttgtgaccccatggactgcagcccaccaggctcctccgtccatgggattttccaggcaagaatactggagtggggtgccattgccttctctatttaccatagttacagtgttaaaccttttaaagcttcttttcgttttagaatgaagcaatcagttaatactttccatctcttttcatgggggaatgactggcacaacaaagacctggtgaaaattgctcaagattacttgagaagtttacagaaaagacagaaa

SEQ ID NO: 50193 - DNA, 4747 bp, Bovine  19866880471196
  misc_feature (1)..(1): n is a, c, g, or t
naaatggaagtgatataacaacacctacaccattggactattatgagtccaataatagtgtattaatagtgtgttaacacacatcaagcacaaagatgctacaggattatatagtagttgctgtatagatgtgtaaactcatcttattatagtatgattgttttattttgtaaaacaagctccccaaaacactttttaataataatgtgtgtattcgagggccaaggctggacaggagaacagtagactccactttaggtgcaaaatttaaggggtgccaaaaagtctagtgatcaagataaataatatttcaatgtaatgttttagaaatcaaagtaatgccaaaaaaatccaagaacagaatatcaaaatgttaaacaaagtcaagatgaatatcattgatatttttttgcctcaggcttcagtatagagtctgttcatatcacagtaaactatctggaaggttacacaccaaacttttatttctagagtgggaaattatatcgaatttcactttgcttttcatttctgtatatttttaacttcttaccatgagaatatatataataaaataaatgagccttttaaaagtttcatttcttaatgaaaactagagagaaaatcacggggtgatgcaaaagtagatccaggcaatcgactgattaaaagacaatgaggccgcataccccacagagaacccactggcaaaccattcccctgcactgcagagctcatttgttaaaactacaaaagagaaagaaagaagaaatcggggatataagaaataagagtaaaattcatgtaagcctgctgggcttcaagcttaagcttgggcccaggctggggctcaagctgccttccgtaaaaggaaggggttggggaaagacccccagcagtaccagtggagggtctaaccagcatctcccttgggttgagtgaggatctccccttgtcttgtgtccaaggaaagggcaggccttgtccggctgtcctgctccatctcaccatgccccaaagcctggaagctggtaacagaaagtgggctgtgattaataataggctatgtctaaatccctaaagcagatcaatagaatgtagatacgagttgatagtaacctctttttttcttttcagtctatttgtagtaaagagaaggtataacattttcctaaaataggtaaacttcaagaaaactttacgaagcaaaacaataccagaaaagtggggaagggaccatgggttatgaaacttcatagaagtttttttttttttttttttctaagaccattgatagatcacaacacactgaaaacaatgaaagttcaccataaaccactaatctttccacatacaggccgcccattatcctttgggtttttttttttttttagaatattttttaaatttcaatagtatttatgaagcttttcattgaaaaaaatataaagcccaaagttacagtgacgtgtaatgctactatctgggtatcccttgtcagcatttgaataagaaaataagaagcaatgctcaaaaaagaggggatgtatgtatgtgtataactgagtcactttgctgtacagcagaaactaatacaacatggtaaagcaactatactccaataaaatatttttaataaataaacaaaataaacataacccactgaagctctgccaaggtagtaagaaaatagaaatgaaagttttaccaaagtatttcttataattttatttttgtcaattccattagttttcttacagagcaactttgcttctgcatgattaaatattaaatacagaaaagtataaaagtaaattaggagtttaccttcaaccacacttcagattcatccaatttttcaccacaaaagaaagtataagaattctttggagagctttacagacagattttcaatgcatatatcagctcttctacatcttaaattgcacattaaagattatactaatcacaaagcaacacatctttctttctcacccaggttatggtatgaattgtgctccctccaaattcctatgttgaagccccaactccgaatacctcagaatgtgactgtatttggagatgaggcctttaaagaagtaattaaaacaacactgcaaagtaatttcccaccaattaaaaaataataaaaaaagaagtaattaaggtaaaatgaggaccttagaatggaccctaatccaatctgactggtgtccaaagagaaaacgaagacccacaaagagacaccagggttcacgtgcacagaggaacagctgtgtgacgaggcagcaggagggtgactgtctgcaagccaaggagagaggcctcagaggaaaccaaccctgccagcaccctgaccttggacttgcagttcccacaactatgaggaaacacatttctgttgtttaagtcacctagtctggggtattttgttatggtgggcctaacaaactagggtaacatatcagtaaatgtttgtgatatttctgtatcagtgctcacagattcacatttcataaaatcatcacagcttctttaaactctgccctattgattggcactgacattgactttgggtttttgactaattcaaataatgttgcagtgaatattcctgcactggtattttggcagaattttataaggaagtgaatttccagaagtggaattgttggctcaacgtataaaagcacacatacttaatttcaacagatattatccaattgcccttcaaaagtttccacttccaccagaggtgtgtaaaaatgacattttccccacattctcaatatccctagctttttcattgttatcaatccaatagctaaaaattggtgtactgttctggtttctacctgtggacaagtctgaacatcttagagggctgtcaagagtacaggctcagggggttgaattctggagctgtcttttcctagctgtgtgacactgaccaagttgcctaacttctctatgtatcaagcttctcttctgtcaaatgaagcagtggtggaaactaccttgtcacagccttcctataagaacttcatgagtaaagagacatcaagggcttagaacaatgtttggaagtatagtcatctccaaattaatgtgagctattattatttctacttaaaaaaattatacgtgttttctatttgtattactcttaatgtgccctgtgttatggactgaacatttacatccctccaaaactcatatgttgaagcactaacctccagtgtggctgaatttgagacgaggcctctgagaaggtaataaaggttaaatgaggtcataagggtggggccctgatctgataattagtgtccttataagaagagacaccagaaagagctctctttccatcatcatacatagatgggaagagatcatctgagcacactgttagatggtggccacctacaagccaagggaagaggcctcagaattaaaccttaccttgccagcaccttgatcctggacttggcagtctcctgaaatacaagaaataaatttccattttttaaaataccaagcctgatattttgttacggcagcccgagcagactgatactccctgtttacatcttttactcatatttctgtccaattagttttttgcttattgatttgtacgagtttctctcatctatactaccttaatttgatttgtaaggacagacgtgttgaccaaaagaccgtgattgggtgatatctactagggtcttcccaccaggaaaagattgaaaacgtgaatcaggcagcatttgaggtaaaatttgcatgctaaacagtgtagatttaaggtggcatgtgaaatggtgttcttgacaccagcacaagtgtggcattccataatctcctccaaagactaagtaccagggcaccttcacttgactttgatttttttaaaacacatctccctctcttaaagaaaaatacagagggtatcagttacttcttaccattgttcatttccacattaaaaatcttgggactgaaatgcactttttcaaatttaaatccaaaattgtaacttaatgcagagcaattacaagtaacagatgctggaaggttagcactttttgcttccacaagaaagatacacattgcatccaaattttgggatatgatatccaaactaacttaggatctggcagtgagagatcgctaaatgtaagctcaagcatataagcattagagctggaaagtatggggcaattgggaaaccagacacataaaaactgcactgtatttgacagacagccccctccacttgattggcacatcagaccccaaaggtaaggggatagaatgtcccagtagaagcataaacctcagaatggaagtgcggtggattcaaaacccagacctaccatctaactagctatgtgatcttgaccagggtaatttaacctctaggattcagtttcccctgctataaaagaagaatgatgttgcctactttactgagttgtaaagattctataagttaatgactagaaaacactcagtcccttgcctgataaatgctaaaagtcctgcaaatgactaaatgtctctacgactctctcagtacctgaacccttttattttctgagtttttgtgatctgtccaacccaattccgtattcaccaattgactgttaagtgattatggagttctaagtgcccaataccacccatacaaggaataaaagagtaagaccctcgagaaacttccagcctcattaaggaagccaaatgggta

SEQ ID NO: 50194 - DNA, 1215 bp, Bovine  19866880570512
  misc_feature (1)..(1): n is a, c, g, or t
ntctttataggatttatgtgccgaatcagttgcaggcttttttccaaaggcagaatccaaaatctgaggctgccttttagtccaggtcaatcaaacaatgtggtattgtatatatgctcagtggagtttttctttctgctttttaaaagaaaataatggatagtataaagtttacagtcagggcctcatttattacaaattttcttcaggaataatataagtccataattatgacatgcgttcctcccctgccccctcttaaaatattaatttggtgaggaggttagaaatctatcataaccaatgacaggcatcagggcacaaaaatagcaaggctcgagtgtaatattttattgccatgttttgaaacaactggttaggcagatgccactgttatcttccagttacttctcatttttcccgagttttaaatgcaagctgtgacaaattaaattcctatatgcttttctaaaaaaaaaaagacaatttcagaaaacactgcaaaaaaaaaaaaagttgaaataggaagaaagggatattggcagcaagcaagatgagaaatctactttcaaggtctccgatgagttgcttcaatggccccaaggcatgtagatacgccttccccacgctggccatgcagtctccatccagaaaagactttgcaccctacaattggcagttgctaaaaatgcactctgccggctaattttataaaggtactgaagaagaaatcccatcaccaaacgctgaatttttctcattctctggtgtaacacttaaatatgacctattatatcaactctcaaaagatataatgggtcatatttcggagctattagctcaaacagaattgtgcatgatttcaactgaccgtggagagagtacacaaggtggttattttttcccccaacatcaatatgcttttcatcatcaactatggggtcactgttcagtaattatatttttgctagaaaaatatatttgaatcacattaaaagaaaaaaaaaatctgactccttgaccctaattagggggagttggggatgaaggtagaaaacagattatcacaattcttttgcttcctgctgctgggattaaaaacagaattcagtcacccagccttcactcaggttcaggacgttaggtggcacaggcttgtttctctgaagtgttaataccactgcctctgctgccatcgggagtcaggtaaacaag

SEQ ID NO: 50195 - DNA, 1486 bp, Bovine  19866880587190
  misc_feature (1)..(1): n is a, c, g, or t
nttcaccaagtatgtagtttataaaataaatatatacatgttgaagttgtgtgctcaaaatctattttatgtttggagtgagggattaaagaattttggagtacaatgcttgtattattgacgagcacatgtctgaagcacgccccccagtggcggggggaatggtcacagcctcctagcctcagcttcagggcaatacttccactacttccggacaggaagtaagggaacagcctgtgcccagtggaaaaccccaaaggggtaaagcgacgccaagggcaattatgccaagtggaatctgtccaggaggctaatacccctcttcttgtagaaataccctgggactcagagaggaggagggagggagaagaacttggaaacctatcaggaaatacaggaaatttaattttaaaattagagaaagttttcatttaatgggattaaggagagcattgggtaagtactgtttaaaaatgtaaaaacgtgcacagcgtggctgcctgccaacaacctacagtaagtattctcccctcccccttatctaaaatggctctttgtctttttttcccctctgaaatattaaactgtttggctagtttatccattttagaacatgctttcaaatgaaaaagatataaaatgataatgtgattttttcttcttcttctttagactatagctttagttccaagtactgaggtctggttagggtttgaaataaaacgttcccttcctcagttaaccagggtgtttactaaggaaaaaagaaattctgaggaccaaaaaccagatagggatgtagctagttttttgtttttaatctctaatgctagagtacttactgcctatgaagcgccttgataaagcagatgtgtgcagtgcatccttcagaggatcgtggagagggatagagttttcaaagagtatattgtatttcgttgcacggtgctcttcttcctcttgggaaatgtttgattatcatgcaggcagtggaggcgggagagacagagattatacagggcgcttcaggtagcatttctcctccaggacctctgtgcgtttaagtaaaagcaattgaagagatagaaataacttctctcatgcttgtctttatatttggcagatggtgttacacaagtcagagtttgaacctttttaaggcttattttttttcctccgagtctgtttctcaggctctctcagccgtgaggactgggtgaggggcagcctagctctgcgtcccagaggaccatagaaggggccgctctgcctagagcatggttgccgattaggaagacacggagaaacattggttatgtcctggagggttgggtaaaaatcaagtgtagaatttagtctctttctctcagcttataggtaatgatcaacagactccttatctctaccttcaaaatatctccagaagccaaccattttcaaccttccaccattacactgctgtctggatttattttattttattttt

SEQ ID NO: 50196 - DNA, 1632 bp, Bovine  19866880697246
  misc_feature (1)..(1): n is a, c, g, or t
nctggaagggcgctagtggtaaagaacccgactgccatgcaggagatgtaagagacatgggtttgattcctgggtcaggaaaattccctggaggatatggcaacccactccagtattcttacctggagaatcccctggacagaggagcctagcaggctatatagaccatggagtcacaaagagttggacatgactgaagcgacttagcatgcaaaactgagactaatgaggacttccctggaggtccagtggttaagactctgcgcttcttgtcaattcatcccaccttctccttcccctactttttccacaaatctattctctacatctgcatctccattccttctctacaaataggttcatcggtatcatttttctagattccatatatatgcattaatatacaagatttttttctttctgacttacttagctctgtatggcagactctaggttcatccacattactacaaacgacccaattccattcctttttatggctgagtaatatttcattgcacacagatagctagtgggaagctgctgtgtaggacagggggctcagttcagtgctctgtgatgacctagaggagtgggatggggcgtgggaggaaaactcaagagggaggggatatgcttggtttggtccagcccctcagtcctgttcgactcttgcgacaccatggactataacccaccaggctcttctgcctatgggatttcccaggcaagaatactggagtgagttgccatttctttctccaggggatctttcccactcagggatagaacccgggtctcctgtattgcaggcagattctttaacagctgagccaccaggaaagagggaggatatatctgtatacatatagttgatccccattgttgtacagtagaaactaacgcaatatcgtatagcaattatagtctaattaaaaaaaaaaaaagatttcatgtttccattgctgggagcacacattctaccccagattggggaactaagatcccacatgctgcgaagcatggacaaaaataattgagaagaatgcctaccacatacacatttggagtgaaatctaaaagagataacaaatgtcaagaccctcactgtctttctggtaatccataaacatccctccagccagtcgccatcctgaagttcaacctggacacacaaacagatgtgatcacatgcacccagcacatcttctccaagtccttgtcgcattccccacccactgtgagccttttctcctgttcctgtcctcatcctgttacaaccagtgtttagaccatcctgtcttcccttatacatctagacgttctctccttttcccccttccctctctccagcaccccgccatctcctgtacccacacctagacactcatcttccttctgaaaccttccctccctcctccagtaacaactgccttattcaagagcctcaacctccttccctgcatctgtaatcatcactgaaatgctgagcacagctggattttcaaagccaatggttaattacagggagctgagggtaacccaatgggcggtttcaagtatttagagtgtaaaataatgaaggtactagtgagcagacagctgaaaatcatcgtacaaccccctgaacag

SEQ ID NO: 50197 - DNA, 1721 bp, Bovine  19866880732397
  misc_feature (1)..(1): n is a, c, g, or t
nttgtgaagacattgggacatttagagcctcaggcctgcaggagatcaccccctgaagaggtagtgtagaccaagaggagatcaagagttgaggctgtaagagagctgggtgtgctaacgtatggagttcagacaggcatgctgagaacatgccaggcaacgtgataatgcttggcaggcatcattttattcaaccacttaagtctccatttgtcctataataagaccaaccgtcacctctctgctttgcttctcaaatctgaccataattggataatctagtccgtgctgcccatgcgtttcttaactgttggctgtatcaaataaaggatggcccttttatgactgtgagttttcacacaagagggctgcttcctggaacttactatgagaaaaaagaaacaagattggcagctgggggagagaggaaagcatttgactaagaggaagcctcctcacctcatctgatagaaatgcttggcaacgaacccatgaagaaaggaaagccaagagtgttactgctgctggaaatattaggagcaggctgcctcattctaaatttttgtctaatttagtcactgatcttacaccagtatagagagaatgggtcacaacagtagagtgtgacagatcaaaaagaagggttttttggtcttcctttccttatcttagctccacgttctacttccaaattaagatggtgcctatggatataaatatataacatcgcccaagctaattgcatagatcagaaatcacggagcagatcgtcttgaggcctaaggggatgcagattagaagtgaagttgacagtgtgtccttgaaggagacctgcatagtgatgactccagcaagtgaaatacaggtgaaatcccttgagaacagccagaactgtcaagtgctgacatcagtgagaggttagagaatggacattgacactcagattctgcctctgttaagaatgtacctacatgtgggtgggacttcccaggtagcactaaacctgctaccaaggtaaagactcctttaccttggtaaagaactcgcttgccaaggcaggggacataagagactcaggtttgatccctgggttgggacgattccctgggggagggtgtggcaaccccctccagtattcttgcctggaaaatcccatggacagaggaacctggttgggtacggtccatagagtcgcaaagagttggacagactgaagtgacttagcacgcacagacacgctacctgtaggtggagagctggtggtaagaaatactggagttcccctctcccacctgttcttttcttatatatttatatttgtgtacatttaaccattttaataggaagatatatgtggtctatagtttacatcatggattagctgaattctgtatagttttcattttcctttttcccaataaattctggactcataagtagaaggcccatgctctagccttttctctcttgctaactgatgaccctggataagtcatttagccttactgaggtttctgcttctggaatagtggctaacctttacatcaagcctcattaatcccccactttttccctgtggaccacaggcaggcagcctgtaggctgggtgaactgcaacagcatcactcacctgtctagggcttgacaggctgtcagcaggatctcctggatattccccagtgtgatcctccatgatatgacctctgataatctcctcagta

SEQ ID NO: 50198 - DNA, 1177 bp, Bovine  19866880752417
  misc_feature (1)..(1): n is a, c, g, or t
nctcctcctaaatgctctttaagcttgatgctagtgattgttctctgtggcgggaggaagctatcagcaggtaggtgtaggtaaactatgaatatgcagctgctgaatgaaaaacaaggtgtgttttcttaaagcagccagcttggaacagaagctcaagtattcatcagatttttagttatcccagatagaagctttacaaaagaatatacaggctttgtgcttcctcagtataagacaagtgaggataaacccggaagcacagtgtgcccagtgctcttgtccatgcaccaggacgggtggggctgtggttgaagaaccaccttcccattgcttgaactcatcacagagaccattagaaagtctttacagaggaaggagatggaaactggatggtaaacggagtgctaagtaatacagccaggttgtaaggctcatttggcactaaagagtgtactgtttgactgcaaacatacattcataatagtcctttaatttgtctcttttagaaggtcatatttttcttgattgctttcacaaacacacttggcacacctgtatttaaagcactgagctaagaacctttttcaacatgcaaggttacaatttgatgtattaagtatatagttatataataattttaaatttactatgtgaaagcttttgcttatataatttatgtctttaccttttcccaagcttcctttattgatcatacaaaacaagtacagcccttctctgctttcccattaccagtgagctggtctgcaatgtctgtctgtccaaagcagcatttataatagccaagaaactgttcctagttcaccatagcaactaagatcaggacaaatatttattttattatagtttttatcttctgtattttatgtgaaataggaaaaggcctttgctttccatgtgaagctgtttaaaagggtaaattgctattcctttggggagaaaaaaagaagcaaccctgaagctgtgcttatattaatggactgctacattgacccgaattgataatactaatttaaaacactgaaataaatgtaaccttcatgcctctcagattttaatttctaacattagtagcacgatgatgttaatcatcatttgccatacaaattttttctaagaaactgcctcagaaatcattcgaagagctccataaaca

SEQ ID NO: 50199 - DNA, 1247 bp, Bovine  19866880758669
  misc_feature (1)..(1): n is a, c, g, or t
nttctttacccccgagcaacaggggaagcccattgggaatcatacaaccccccatatatccatttttttttttttttttcctcttctggggaaacaagggcataaaaaggcagagaaattgctagttatcgaacagaaatagtgttagatccagtgtttccttctcagaggcagtgttagctctgtatctttccaagtcttgctggcttgacagaatgctgctaagaaatgaacagtctgtatgcaggcaacgctctagctataatcttgcatttagtaggaaaataagaaattgcttttgcgtgatttggtagcctctgccatagtatcgtattactgaaaaacatggtatagtttccttttcatagccccaaattgtcttgtttaacaatttaaggaggaatttaaaccaggtcttaactcaaagttaaaacaaatattaacctagttatgatttaaagccaaataatctgtcctaatgcatttcccttgtggggaggtacagggcaatttaaagagatcttacaaaaataataaattctacctaagggaaacggaaatctacgattcttttaaaaagtgatttccatttccaaggagctgagtgatggagcctccctttggcagattccattagcgacgggacctgacatggtagaagcaacccaacagaatatgtatatttcttgttttgatgtaatctgagattttttttttttgtctttgaacaataagcgaatcaagtcatgactgaatggatatattgctctggtattttaatgtattacaatttatggcagtgtttacttcaacccttggcttgctgacactaaaattatcttaaagaggaattataaaattagattagatatacttcaacaagtttatctctaacaataaatatatacaaattctgaaatgaaataccctgcaattttcagccagtgcttaaagtaattacacattctgtggtgataacacattcctttcttttattgtgccacaagctggtgagatacctctacagtgcatgttaatgctaattagcagataaagtgtaaatgtgagggagcctcgaattctgttgctttgccagtttgctcctgattggaaattgcggcccgagtctcctctcattccagctcggtccattcaggcatcgcctgagctgtctttctgcagtgtgttttaatccatcagatctgttcgccattgaatgccctcgatgtttggttttcaattcagca

SEQ ID NO: 50200 - DNA, 2872 bp, Bovine  19866880819210
  misc_feature (1)..(1): n is a, c, g, or t
nttccagaagggctccagtgaggaatgagaatattcctcagaggatggaaggattttatctgaatgtcaactcctgggagtaggggaggaactcagtgagctgtgagagttagggagaataggctgggaagctcatgagtttggggaaacataaacagacatgtctgggtagattggaggatatgattagggagacatggaaagacagattagaacagtaagttgaacttggacacttgatccagacccagaagccagaccaagaagtttgggttttgtctcacattctacttattcagtaaaattgggcaccttgtctttagttcttatgaaaaatgttttaactcaaagtacattttcctaataaacccagatacaatcatgaaaaaacatctgtttttcccttcatattgttcaggagcaaatcccagtttgattttctattcagaagcttgttcagtcctaatgtaaaaaatacataatggcactcaagtgctacataaaatgatttcaaaggaattttcatttaaaaaatgtttaaggaagccccttataagccccaaagacaccaaaggtaagtgaattcttagccttttcttccactttccttccaagataaaagcttttctaaaagagtaagttggagtgtgaggcttattttaatctaacgggtagagatagtgaaggacagggaagcctggcgtgctgcagtctatggtgtcgccaagagttggacatgactgagcgactgaacaacagaagtcatttagagttagtgaaacttctgaacttttcagtatttttaaagttaccttaataatttctagaataatacattaaatcatagattgtcaaagtgtttgccaggtggacaccttaatgaacaggtagtcactggtaatgcgtcttaatgattagatgtaaatgtattctgttacaatgacttaaagaatgattggaaaggttctttctccctttaaatgcaatcagacatacaattagtcagtaacaggcacaaaactgaatgagatggactccccgttctccaagagatcatagtctaatgtaagcaaatgacaatatgcttcaagaggctacaacgggaagtaaaaccagagtcttatcaacagaatacctaagaaaccatttccttggttcttacatatggttactttgtgtaataaatttcacttgagaacagtagaaggtcctgttactattcaatttaagatttaatttcactctcattgattccaaattggcagattccaaacacattaaaatctcaatgcgtgcaatatattacacccatcttcttccaaaatcttcccaaaagaaagtatcttttgctccaaatctacctctttgccctttccttacttgaaaccctgatgctgaaacctttggaggaaaataagcatctgcttacgtgtcactaagctgagagcatcttggtgatgaggactggagatttagttgttgttttttttttttactccctaggccttaagacatactaataaaaagtgagaaagaaaatgaccgagtgaatgaataaatgagtgaatgagtacatgagtaaaaggatattttaagaaaaaagagctttgtccagagaacagtcattctattgaagaaatttcatctaagaacatactgtaatcataacataatcactgaatgctcaccatctgctacattttgttctgagcgctttgtatttgttcatttaatcctcattgtacaagggattgtctttatttattaaataagaaaaatggactcaggttacataatgtagggagctggaacatgtttaaaagttcttcacttgggtacatggtctcataggggctttcgggaatctgcacctaaattcacctgataatttatatacatatatatgtatgtgtgtgtgtgtgtactttaggcaagatgggtcatatttgattcagatacccaaagtggacatgccctctcctccaaagttaaaatactttatatttttcagtctcaacttagatattaatctttaaggaatgaaggagtcacactaaattgactataaatctagtagtaatattttaaaataagggttttccacgctccaactcaatttcctccaggttctctcttaaaaataaatgaacacgcaaaaagacctttagagcaactaattccaccaaacttcctaaatgtccatcagacatttccataaaagagacagaattaatagtaaaaccaggaaagctcaacagtgaccacatgcttgccatctcacagcattttctagggtctcctttatcttgggggtggtactagatacactccccacctgcctggaaattggactcctcctcccccttctaactctactcctgtctctcattcttcctgtctcctttgttggcttctccttgactgatgggcaatccccaaatctcattcctcaaggctctgctgttccttcttctcacactttgtcaaagttctcattctgtctcatcacttcagcatgaacctctaaccaggcgactccccagtctttgtaattcatgaccttcccagagggctagttgcacttttaattgcacctcggacatttccaatgcatgtcttgttgtcctctcaaattcagcgcatctgaaagttaactcagcatcttctccatcagctccatcagactgactctattaactgttctctagttccatcagtgataccaccatgattaagagggtctgtgtttaaaatcaatccaccacttggtgtgactttttctctcattaccctgtagccaagatctacctttcacaatatttgcttcctctgccccttcaattccttctgcacacatcttaacctagaactt

SEQ ID NO: 50201 - DNA, 1098 bp, Bovine  19866880823863
  misc_feature (1)..(1): n is a, c, g, or t
ngagctaacttgtttggaaatgtgtcagtctgtgaaaaaatccattaaactatacctgtaaggtacaagcacttttctgtgtgtatattttacttcaatgaaaagaataacacttgtcatgacaagggaggaaggatagggtcttatgagcacaaggagccctcaactgctgtaacttggggtagtgtggaaagctgaggctttagactcaggtctacaatcccatctctttcactgattctctgctcttctgcagattacttgagctttttggttaggggcttcctcctctagaaaatgggagtaataatacttgctgcccaactggatgtgttgcatatgtgaaataacatatgtgaaaacaagtggaacataacaagggctgaggaaatatggcttcttctctcactttgttcttaagtctttctttcaacagagcaaatacacaacattaaaaaaaaaaggaaagaaataaccccctcagaagctgcacttttttttcatctttcatgccatgtttaaaaatgttcgccaagaactttatgaaaagttgctccacatcctataaaactgattttaaaaaatctttgtttctttataaacagtgcctatttttttgtaaaactgccagtttcattgtgaaggttctttaacaaaggggagccacttgagatcatgaaagcatcaggtgtcacttccacgagtcataacttcttcaggaaaaattccaggagcctggtggaaatagagccactctgcacttcttcctacgaggcaaacacggcctagagcatttcacttctatccttgtgatcggaaagaatgtctagagaccaaaccaaactcacacgtcactgggcatatctagtcttccttgcactgcagcagggcacgagaaacaaagatgaaataaacataggtagaaatggtttcccatgaaacacaagaacatggcatagttgaaattgggatggaaatctggagcctgagagaccatttaaagagtttggggctcttagaattactgtgcttggtcaaggtcactcagacccacacacagtctggtttacagtcctcttcccaggggtttttaagtca

SEQ ID NO: 50202 - DNA, 1270 bp, Bovine  19866880852909
  misc_feature (1)..(1): n is a, c, g, or t
naacagaagaaattactttctatttctcagagatccttgaagccaaaatcggtgaactctcaatctcctttctctctgacataaaatttattttttatgttcatccattttctgctcacttctcttccttgtttcagagtttcatcacctttcagagtcaagtccatccatccttctctggattccatgagttacagtcttccggcggggcactggacaacaggcgattttctgctacttgccagccccactcccaccccttgcctcatgtcttaatctctcctcctcccttagctctttctggtcaagcttacatcaggctcaaaactctccttccctgaaaatatttttcttgaccctgcttttctttcatgtgacttccccatctctctctccctgtgattgctaaaattctgaaagagcagcctgttcttatggattctttgcattgatcatttggactgctcttgttttcatgggagatagcaggagctttgaaatcagactgccagggttcagtcccagtgaaagactgtcctcatcactactctgctgttgactggggaaaactgatcgttcctttaatactgccttttcaagcaccaatttatactgtttcacagtttataggagcttgacttggagagatacttcgtttgcttttattttcaaatttgagctcctgtctgataagaagacttgtctttcctataaaattgagcttgtattaatgtactgttaaggagaatgacttacagtttttaaatttagattttaattggggatgaggaaaagaacaaccatcatgcaaagtgaaaaacgtatctatgcataatggttggttaccattcacagctcttcagccttttctattaaaaatctctgtataaacagaatgggatggtcactctatctgccaggaagcaatttttctgatgttaaggtaagaataaggcagtcgtacttcaccagttaccctgcagttcttccactcatttctttcctatatgtggcttaacatcactgacttgacagatgaaagtggtctaatgtatcagggaaatggttgtacagtaagaaatgtgctctgagtaaggggagagacacgaaagagcaaagggctaagaataattactggtattagttttttgggcaaataaagcactgtgatgttaaaaatgaaagcacttgtaacaaaagactgtttgaagataccaaaaaaaaaaaacaaaaaaggaagaggactttctcttcttgctgcctctagctg

SEQ ID NO: 50203 - DNA, 1389 bp, Bovine  19866880949407
  misc_feature (1)..(1): n is a, c, g, or t
ngcaagtagcagcaaccaaatcccaagtctttatcggcaggtgatttcgtgctgtgacgatatatgaaaggtgatgagcagatagacggtgactgggacgtgaagtcctgctgtcttatacagttgatcaaggaggttgtttaagatgagcagacatttcaacagaatagaagaaaggcagggagatgtttggggaaagttctccagtaaacaaaaaaatggcatgcaattggtgtgttggcagtggggtttcagggaaaataagaactttggctaaactcataaagctaataggaagcctaaatatacttggctggctccactatggtgtattctctcttattgaatgtctccagagtatcattatctgaaaagacccatgtctctgtatgcttgatataggcatatagagacaggcaagacctgtggttaatgtcatggcaaggctactacattatatcccaggctggaacttttgtttgaaatgaccagctgaggttgttcttttggatgtatgtctgactcagtcacttcaaatgaaagtcacggttatataactcctgatgctcttcagagagagaagaggaacagacagagtttccttgtgtcagctgttgtccatggtgacataattttgaaactgccattgatggagtgcttgttatggtctgtctcctagctaagtaaatgacccagattttcctcctttaaaactcattttttgtttttggtggtgatcagagtatgttaataccagtatgtgagccccacagggacagcaattttctctcttgtcacccttgaattttcctggagcagtacttggtaacggtagatgaacagcaaacatttgttcaatgaaagaatggaataatttctgtaagtcatacagctagcaaataacaaatcttggggttgaatgcagtttgtgtgattgcaaagctttaactactatgctgcgctgtgagttaacctgaatggaatgtggggaagagatgaaaataggaggttggacataagaagggcctgtgtggaagaagcaaccccgctgaagctgttaataaagaaagcagaattagcaggtctcctctccacatggctgaatgtgtcttaggctttttggggctaaacagaaaactatagcaatgccaattcactgccctctaaaggagcacattggcaggactctcatggaataattagtcagcagtacaataaatgaagtgtgatggcatctcatttcattctgtctactccagagcttgccctctttggaatcacagacatgaaacttgaaaattacagatttccatgttggaaactgaaattatatcagtatgacaatggccctcatgctagttttaattgggtttcagttaatccaaatgg

SEQ ID NO: 50204 - DNA, 934 bp, Bovine  19866881056742
  misc_feature (1)..(1): n is a, c, g, or t
ngtgttacagagcatgttgaaacaaaatagaaagaatccaagtgttaacaacattacatttcaagccagtaaggactagttcaaaaaatgaaaacctgcaagatattaaaactgcggggaaatcaattttgccttaggaaaacaagaccacatcagtgtatcctgaacgacagatgaagatggttagtaagaagagttatccaatatgcatgcatgctcagtcactcagtcatgtccaacttttttgtgaccccgtggactgtagtctgccaggcttcgctgtccatggaattctccaggtaagaatactggagtgggttgccatttccttctctggggtatcttcccgatccagggatcaaacctgtcacttgcattggcaggcaggttctttaccactgaggcaaccagggaagcctaatgccagcattataaataggctctatgttatattttaaaattcttcactggagtagaaacatttctacttaaatagaaaagttaaaagccgaagatgttcttccaggagttaattattaagcacctctcagtagatatttatgattcttggatgatggaatcaaattttgtctttctaataactactagagattatgaaatccagtagaaataatttattatattaattaagagatactgtagagacaggtttaatagtaataggaatcagacagtattattaaggttggggtggatatataaaataatgcttttcatgactaaaatttatcttgattcactttcttaaaataactcttaatgtatttcatttctctgatacttttattacaattctctatgaatatcatttagcctaggtagggtatttcatcaactaagtgtaaattgtattatgtcaagacaggaaataataaagttatgtgtgagtgttaacatatctgagactaaaaga

SEQ ID NO: 50205 - DNA, 1291 bp, Bovine  19866881093421
  misc_feature (1)..(1): n is a, c, g, or t
ntaaattttggggggaatgcaggtattcagctgcaaacaatgtttctttaagcaccaaaaagcagaggaaggagatagtaatacagaccctgaatataaagaaactatttttctggacatgtggcgagatgtttaatagtttggagttatgtttctacttttactaaattttaaaggaaagaacaccaagttatatctttattaaagttctaatgtcttttagagaagaattttgaaaatatcatcaagaaaaaggaagaaaaaattatctctagaaaacttggcacccaaagagattaactgctaagactttggtgaatatctttctagaattttcctgttcaaacatacacatgtgcacatacacacacacacatactaggcattctgtctttcactatggattcatgttgcatttgcattttagaaatctgctctttccctctaccaatatatcttgaatatttttccatgtcattaaatgttcttttataacatgtgtttccatttttttttaatgaaaaaaaagtggtttctgctgcaggatttcatggtcaacttgtttaaatttatggcaagaacatttttaattgaaagtgtatcagaatgacatgcccagtcctggagaggaagcagagcagtggggagggaaagagtgtaacccgaggacctggaaacacgcagaggaccaacaagcaaatcaatactctgagatgtgcaaaagtcactgtgccccagtttccagcaaaattcatcccgtctcttgaagacattatttgcaacatgcctggaactcaataaactttgtgttcactgatgggatatgaagttgatttaataaccaaggacctggcaattgactcagcggacataaaaaaagctgatcctgtagtataacaaatgtgtgaatctgttggattatatgggaaagtagcaatcagctgctgtttaaatacttgtagggattacttgtcatctcttaaaatcagtttcataaaatcaccttgtaaatttattttctgaacagcccctgtgtgtttgatgcaagaacgttgattcggtgatggaccagtaagtgacttggtaggaatgtcagtgacaagagagcagacaagttgaggctaaggctatcttttggtttagaaagtgtgaataaagacattaaaatgtaggcaaaagagaaaaccagaggtgaaggaagaactgggagtctggttagtataatttaggaaagatgacacccagtgggatctccagtcatgtgtctagaatatcttatccatttggcagg

SEQ ID NO: 50206 - DNA, 1360 bp, Bovine  19866881149274
  misc_feature (1)..(1): n is a, c, g, or t
ntatttccctgttcaaatttgagtacacttctttgttcctgatttcttttacttgggcaatatataggtaaaatttaacccaaatgttcacttaaactttatgagggaactattctagtaaaacagaccgataacatcacgctgctgatgttgctgctgctggtcctctctaggaacctctggattttcaaattctttgaggaattcatccaaattatcagcctctcctcctttcctcctttttcgaagatcttctggtactagtggtgtaagacagcgtgtaaagagctataaaaaatttaaaaatcaattatataatctctattacaaatcacaagaaatgaaaccctaccactaacattacaatgttttaatagttggtgtatatatatataaaattgagcacgatttctacttaatgttacaccatattcacattccattctataatttgaagtcctgtaagattttcattgcagcaattttagataatttgaggatgaaatttttttatccattgtttaacttggggatttagttttaaatttattgacctgcagtttattttcacattcatacacttaaaactcaatctaactgaaatcatacccaatagctttacatagtacccttttcacttaatgatatagtaattttatattatttctagtatgtttaatgactgaatattccactgagtggaaatatatatgcttgtgcatatatatgccacgcttgaaagattttttaatattttaaggttctttagaaaaatttaactgtaaatataattatttaacatcttcatagagttttttcccccatattttaaattatctcaggaaaaattactgaaaatgaaactactaagtcaaaaaaaaaaaaaaacttaagaaccttcttccaaatgactatgattgtgcaccgaaaaaacagcagttttaacaaagcttgctgctttaaagactttgtttttaaacaatcggttctaagaatatttcaactctagaaaacggcttgtaaattaaaagaaattctcataaagccagaaatctgtattgtgggaaaagcagaatcaagccatgttttagccagaaagcatcatctaaagaatggagacttgaaccacggtacacagtaaggcaacagaactaataatttatcataggaagctgaggaagaactattattaaaaacaccagtggctttttagaatagtgaaaattcattccacatcttttagaaatgtaggtgtcacttataatcttccagatcaggtttatgttcagtatactggggtttaagggagaaaaaagatgccatatggctggctgaacaatacctgatcaaaaatgattta

SEQ ID NO: 50207 - DNA, 952 bp, Bovine  19866881277259
  misc_feature (1)..(1): n is a, c, g, or t
ntttttactgggagatatgtgaattagtattgttctaatgtaattggttttgtttatttttgtctctccaacccagattttaaacttttaagcgtagaaaacaaaatttcttttataaccttgtctcttttccctatcccagtcatcagtaaatgcttttaaaattttgcaccctacagaaataggtgctaaataaatgttcaataaataacttgatagatttgtatattcagaaagcaagaaaataaccttagaggcatagtctagttccaagtaggttgagtcttagaaaccaaaggaaatccaaaaaagagcatatatattaataggtatatgtatagctgattcactttgctgtatagtagagactaacatgacattgaaaggcaactatactccaacaaaaatttaaaaaaatgaaaaacagttttgaactgttgaaggatattgatcgccaagcatggttcctctggtattccccattcccagaagaggtgtaggtgtcagaagaagcatgcttagcagcatgaatggaggtgatgggacctatattagtgagtccatagaatagatgttctcccaaaactctttcccctaagtgtctcatgcttttacttctgacatttcaattatgcatttttcaatcatgccttgcatcctctgttgacttttcattaccatcttttctactgtcatgttcttatattagtttacatctgtggaaggttgtcttttttgtagtgtgccttggtgagaaagtgttttcttccaatcccatctcaggggtctccctatggttttggctttcccctggaattatgaaaagtgcactctgagaatgaagttgtgtattttagaatgcatacaccacacatcttccattccttgttaaagccacccatgccatccctccttaaaatgagctcttcccattttcagtaacttctgggta

SEQ ID NO: 50208 - DNA, 875 bp, Bovine  19866881606815
  misc_feature (1)..(1): n is a, c, g, or t
ncaccaaagggcagccctggtcctgagatggagctgatgaaatagctgttgatgccgtccattctctgtgccagggaaaggtctcttcacatctgtgggagtctgaatggcagaaaggagaaggaaattaagaaaactgtgcccgtgccttcctaatttatggttagttattaaaaaaaaaaaaaggcatggagaggaggctccatggtgccaaggtcatagaataaattggtgaccgggataggaagagcctcagacgactatttactcagggagctctttcaacctgagctggggggctctgaatccaaggagctgctcagcataagcacagggcagctttcttgtcagcctcagccctttcagggaaccagaactgcagtcatattgaatcatgaactagattagccacattagaggtttagctacaatatatttcaaacttaaaacacaggctgtggcagtggtatcaaaacctgtaatttctgatgcaaatgaacagcatgaaaaatggcccctggctactagggtagacagaggaatatgtgagtgaaataacatggcagttatgtcaaaattggaagaataactatattccagaatagtaaattattatcacgacttgactggtagagtaacccagaaggtaagagaatgtgtgtgtgtgtgtgtgtgtgtgtgtgtgtgtgtgtgtgttggtacctggataaaattacattgtcagttttgtttagtccctctttaaaacctgaacattcatttttgaaaatacgtgtggaacataaggtgacatttgggaaaaaagcataattttcaaagaacactgatcccattagttcttatattacagatgccgagaatttaacttttatagt

SEQ ID NO: 50209 - DNA, 2256 bp, Bovine  19866880506580
  misc_feature (1)..(1): n is a, c, g, or t
nattaaattgttttctatccaagatatcattataaacaaaacaaagcagactttcctagtgattcagtggtaaagaatctacctgccaatgcaggagatgccggttcagtccctgagagaaggaaatggcaactcactccagtattcttgcctggaaaaccttcaccagagaagcctggtgggctacagttcatagggtcccagagttggaccctactgagcaattgagcattcatgcaaaaccctttcacatttcagattgcttctatctcttctgtctttctctctctttcatttttaagggcccatgtgatttttaataccttggtttcatcaggataatccagcataatcgccctatcagcataaactacatacattaaagtctttaattctgtttataaagttttctttctgtataacagcatattcacacatcctggaggttagaacatgaacatttttggtttgccattattttgcctttcataccaatgcttattataatattcttttcaatccttttctgtaatatgctgtgggaaagggacgtgtgcagtaatatctaccatatttaataagaggcctatagtgaagttcaaactaaatatgtaaacaatataaagtggtatttaagtaaaattcatcatcctaatgcttcaacttagcagccaatttttttgaacatgaggtatttgttgaattaaaaaagattcattgaatggataaaatctgcatctatgatttgaattttgacttctctaattttatcctttcaaactgtctttaataaatctatgtttcaaccatgatactcctttagtccctggaaattccaaatctctcaattattaggcaatgctatttatgatatctgtaacacacttatttcacttccttggcttttcaaatcctactcctttccctctgccatcctattcttgctagtcagaaattcccatttatctttacaattattaaacttcacttttggttacaccaaacccctacattaaatcaggtccccttgctgtagacttcatatttattgaatacataaatgagttatttattttctatattctcatacttcattctaaatatatattttaatcctatctttttcactcttaattctagactctatgaaggaaggaacattgtctgtcttattcactactgtatgcttaacacttatcacaaggcctagccaacaatggatgtttaataaatatttataaaatgaatcagtcaatgaatagaattaatggataaggaaactcagcattttcctgggatcagtattcaacttagtggccttaaatacctggtgtgattctccaacattttctgatattctgtatcagtttttcgtatgaggtacctagttcacattttctgccttactgaatttctcaaatattccctctggacgagaaatcctgtgcttcccgcctgatccattcagcctgtctcatctcaacttcttgcttgacaaatagaagatacctgtcaaaactgtcttgcacagcaagagttctggttctagacctttctaattagtaatgctgaattgtcccacacttcactcagtcctcacaggataatcttaaaaataacaacaagctaaagcaaaatttacacattgccatccagtgatagatatctttattagagttcttatttttaaccttttccctttaggcatttcaactcctttacactacatcctattatatcctgtggttgcaattgcccactgaataaataaagaaaatcacaggattgtccttaatataaacacaatgaatatgtgttggagacagatgtaatctctagccgtgcagctgaaacttacactgctcaacatggggtgaaaagatgccagaaagatccagtttcagggaatgactgacaaaatcacaaataatcattgcagggtaatcatagctcaggagctgctccacacaattgttggcatgactgcctgtgaagacgtgattacaggatagaaaagtccatgcagctggactcacgatagagtggaattctttgcagaaaattggtgaaccactgcaagctcttaggttgaaggtaaatgataacaggaagaatagattttccttttagactctcatataagcgaactatgtttctattgttgatggagttagatagtttgataaaagttcagatttctggtttccatgtgtctttttgctcaaatacatctggtgtgaaaataggtgtccccta

SEQ ID NO: 50210 - DNA, 888 bp, Bovine  19866880561463
  misc_feature (1)..(1): n is a, c, g, or t
natagtcatgctggctaaggaacagagggcaattacaagcttcctggtgtttatatggatggcagccatctatatttctctgcgaagggtctatggaataaaagtgtgcattgcagaggcagttaagtgagccagatatagcaaactaaggcagataacgatatggcctcaggcctaacatggctcaagtcattcctccctgacaagagtaacggctcttttgcccttaaggccctcaggcccacggagctccgggctgtcatccttctctccacagaacacgtgaggtcattaagagaaatgctgacgccactctcggggccctgatcttccctgacaccaggttgcagctgacacagagatgacattcctttggtgtcaaatccaggcagagtgttgtcctacctgtcccaatatctgttggaaatcagctcttggaaataatttaattggttctacctcaattcagataagactgaaaggcaaggataaagttgccacacaagggcaaccctggattccaaatgaccctggaagatccctggatacaatgagcccggtacacctgtgggaactctacctggctagttaaatcctgaagtaatgtgtgtatgagacaacagatttatgtggattgcgtatgtatgcttgcattcctggatgcaaagggttcctggatccagttccaaaatgtgtgtgtgtgaaggcatccccatgccagcaaggaatttcttggagaccagcagagtgtccagaaatttggctcaattctgacattatctacccagagaaagaatctaccccgattccacagctaaagggctccatcccacaatacttccctccatttctaacaccagatgcaagcccaggtttttacctgtgttt

SEQ ID NO: 50211 - DNA, 2597 bp, Bovine  19866880619806
  misc_feature (1)..(1): n is a, c, g, or t
ngcctccctgtcctctaactcccggagttactcaactcttgtccctgagccgtgatgccatccaaccatctcatcctctgtcaaccccttctcctcctaccttcaatctttcccaacatcagggtcttttccaatgagtcagttcttcacagcaagtggtcaaaatattggagtttcagcatcagtttttccaatggatatttaggactgatttcctttaggatggactggttggatctccttgttgtacaagggactctcaagagtcttctccaataccacagttcaaaagtatcaattccttggtgctcagctttctttatagctcaactttcacatccacccatgactactggaaaagccatagccttgactagactgaactttgttggcaaagtaatgtctctggtttttaatatgctgtctaggttggtcatagcttttcttccaaggagcaagtgtcttttaatttcattcctgcagtcactatctgcagtgattttggagccccccagaaaaattaagtctctcactgtttccactctttctccatctatttgccatgaagtgatgggaccagaaaactaagaccggatcttagttttctgaatgctgagttttaagccaactttttcactctcctctttcactttcatcaagaagctctttagttcttcttcgctttcagccataagggtggttatgcatatctgcatctgcatatctgaggttattcatatttctcccaacaatcttgattgtaacttgtgcttcatccagccaacatttcgtatgatgtattctgcataacttaaataactagggtgacaatatacagccttgatgtgctcctttcctgatttggaatcagatttggaaccagaaacatttggactggttcaaaatgactatatcactttccatccctaccaacagtaaatgagagtcccatttggttcaaatccttgccaactctccagactgtctgttcttttaatttttataattctaaagtatacatgctggtataacattgtgattttcatttttattttcctggtaagtaattatgttgtacatattttggtgtgcttaatggccattcattttttttcatctgtggagtatctaatcaaactatttgcccatctttattagtttttttgtcttttttaattgaattgtcggagttctttatatatcatggatacaaatcttttgttagatataaatagcagtggtcaaatgtgattttaatttagcaaattttaaatatagcaacactggtcatagaattctagaactataaaataaatgtctcaataaacattggctttaaggaacctctgaactctcagcttcaggacaaaagtccccattttttgtatcagtattttcctcttatactctctgtttaatttttctacaaaactatgtgtttggttaaaatcttttgccctaatgaatttgaccttgatatactgggataatgagattttcattcaaattttagtgtaatctatagaaaactgtgtgcaagagtttgtttgtttgtaggggttgctaaactgtaaagagcctgatagtaaaaatttgggcatggaggatcaaaggtctcttaaaattactcaactctgcctctacatggcagagagtgtattgccatagacaatacatgaatgaatgcatgtcctcatgttctaaagaaaacattttttataaaataagtggtagtctggatttggcttcttgactcatgttatagtataaatgtgctcacatacacacacacacacacacaaatatgccaaaaataataaaataaataagaaagttagtttattaatagttttatgaattatatccctaacagttatctccataccactgcaaaattggccagactctagcactgttgaggtaaattttcaggttcaacctcagtgtcattcagttaaatttatagagaaaacatttctactgcaaggtcacaaaatgcggtcttatctctgatcagctatcacataaatctatgccagtcatcacaagggaaactggtggatcaattcaaacttaccactcccttcagaaaagtaattctaaatgcatgtgaggctgaagaagcagaagtaacaccatctaaagaaacactcagaagctgtaaaactattacatcagactaatgtgtatattatttagggtgagcctgtgtgcttataagcaaattactctaaaatgctcactcttttaggacccagatattagcgactaagtatttagcaggtggctcagtggtaaagactctgcctgccaatgcaggaaacgcaggagacgtgggtctgatccctaagtcagaaagatcccccagagtaggaaaatggaaacccgctccagtattcttgcctggaaaatttcatagttagaggagcctagtgggctgcagtctgtggagtcacaaagaattggacatgactgaacaactgagcacacagtaagagactaaataacaataacaattcttcttttgttctacccttatgcaccatagtacctagagtgctcagtaatcactatggaatatacatcctctattttca

SEQ ID NO: 50212 - DNA, 1635 bp, Bovine  19866880645533
  misc_feature (1)..(1): n is a, c, g, or t
nctaaatccaagggtcagtgttacctgccaagggaatatcgcagaaaatggactgcacatagaatgtgaggcaagaggccctgaagggatgaagtgtggagagagaccaaattagccaagatggagtgttcaggctctcttgccccgcgttttgtaaataatgactccataatggctgaggtcattaatagcactcagcatgcacatcacgaggtgctctcttggacatgggctacttttgttatatgagttccacctaaaaagcgggggtattgctgctgtatcatggctgtttatttgggtaagccatgagaggagagaatggagcatgtctactgttacagttgcagcatcagccaggagagaatactgttatggctgctgtatcagccaggagagaggttgtgttgtagtaggttatgctaggggtgctgcatcagccaggagccaacaaaagcatcctcagttcctacggctcctcgagcctccttccagcctcttagctcatgccttgcctaccctgggttcagggaatagtgcacacagtcagctgtagcaagacagtcggtgtcatgaaaaggatcagcaagacaggtgtcaagagtcgagatgcagacctggccccaacgtgtgatttaagcggtgaaaggcggtgactgctgagctcaggtgtctctgggctgtgatgctgcctctcctggactgaaatggaggcagaacgaagtgtgcatctacattactgtcacttggtattgatttactgatggcttctaaaaatgtcgcatttgaactgtcagtgaatttgccgactgttggcacgagtgatgaaagcaagtgtgaaccataattgattaggcctcatttgcttatccatattatgctaattagatctgcaatctttccctttgtaccatcacccagtgacagagtaaatcagggtgattgggatgcagataggattagaggcaagatggaacagggccctccttatcagagagaatgtgcatttctttaatacacttccctatagaaacagtgccatatatgactccttttcttggcattttttctgtgagatgacttaattgaaatgaattttagctttctaggcctcgaacttgaaatatttttgtataagcccaccctctgtttagtaataacaaggtatagaatagggtcagaaagaggaattctttaggatcacattataggcaccctgggataactcctgatagaccagcagaacctacatttattctccttgacctcccagttgcccataaaaagtgaagatgttctcctatttctgaagacgttagctggattccgcactgtattgtactggagtctaaaattttacatgaaatttttagtgccatacttatgtatcttcaccaaagcacacagacctaaggagacagctaaagggtatccattaatcaccaaacatatgttgaacactcactaagtaccaaatgacagagtatcttctttttaattgacatgcaacattgtgcaagttaaaggtgtacaacatattgatttgatgcacttatatattgcaattcattgctataggtagtggtagctaacacctctatctcatcatataatcatcatttcttctagtattgg

SEQ ID NO: 50213 - DNA, 1066 bp, Bovine  19866880662232
  misc_feature (1)..(1): n is a, c, g, or t
ncgccaggcctccctatccatcaccaactcctggagttcactcagactcacgtccatggagtcagtggtgccatccagccatctcatcctctgtcgtccccttctcctcctgcccccaatccctcccagcatcagagtcttttccaatgagtcaactcttcgcatgaggtggccaaagtactagagtttcagctttagcatcattttttccaaagaaatcctagggctgatctccttcagaacggactggttggatctccttgcagtccaagggactctcaagagtcttctccaacaccacagttcaaaggcattaattcttcggcactcagccttcttcacagtccaactctcacatccatacatgaccacaggaaaaaccatagccttgactagatggacctttgttggcaaagtaatgtccctgcttttcaatatgctattaggttggacagtgctatatgtcagttatatcccagcacagctggaaagacaaaaatagagataaaagaatttgtacatcctgaaaaagagagaccatattgaagacatttaccttagcaacttctgatagagagacagaactgattttaatttactactgatttttatcaaacttttaagttttagtttaagagacaggatcacaattcttttccccagttactaacactttgattgtctcaaattcccaaaaggaagtccaaaatatcatgctgtagaatttcttatgacttagaatctatactgcttttttgcaaaggagccagtatcaccccaaaatgcctctcttcactcttggagtcataaaaattatgcttttcagtatacttttggacaagatctagtaccaaatagtgaatgctctaactccttttgagggcttgctgggtctttgtgaataagatgtcattggtgatccattcattcaccagaagaatgttgttctgatgttttcacagaacatctgtttcacagatgagtttctgaacaacagttccagcctgcgtaatacttatgagctcatactttcttacaatttgggtgaaatcctcattcttccaca

SEQ ID NO: 50214 - DNA, 1949 bp, Bovine  19866880688334
  misc_feature (1)..(1): n is a, c, g, or t
natgcttgtaatgtctatctttatctagtcaaggtcaccaggtaaaggacccttctcttctctattgatacttttgttagcatcccagtgccctttccccagatgttgtttttgtcagtgatgtctgattctctgtgaccccatggactgctgcactccaggctttcctgtccttctctatcttccagagtgtgctcaaactcatatccattgagttgatgatgccattcaaccatctcatcctctgttgtccccttctccccctgccctcagtcttttcaatgagttagctcttagcatcaggtatccaaattattcaacttccaatgagttagctcttagcatcaggtatccaaactattcaacttcagcatcagtccttccaatgaatagtctaggttgatttcctttgggattgacagattgaatctccttactgtccacaggctactcagataatatgacttaaatttctatcccttcttgctcagcaactcactttattctaatttttacacataattatctcagtcattgcttattattttataagcttttgtttctcaacaccagttgcattttagtactgaggcagcacattggttgtcttgatcagcatgagaaatactgtggtcttctgtctggctagttttctcaattcccccaaatagaaactggagagcatcttagttttatcattacatcattatcatctcttcagaatcagttacttctgccaatagataatttttacctattatccatggatgcttgttagcttacatttcagaggctgatttctgccactctgtcctctatttctgaaacgaaactacagttcctgtgcctgtcattattaggcatgccttctagaaatagctgccaactcagtctaaatttgcatagtgtccgggccttggcagtagaaggaggatagctctacaaagccaccttcctaggtttctacatgccagaggaaagatggtccctggggaatggccctataatagattcttgagaaggatacagcttcagctgctggcaccatgaggaatatcctagtttgctttgcaaagtctgcccaatcttggctcaccacgctattcagatagccttcctaggaaagctggctgtgcttcttatgttcgtttattctaaacacagtgtcttctcctcatccctcgatgcttattgtgtggtttaattactaccctttgcctagtggttgccagcgtgatatgctgtgagactaacgcatacaatgcgatgtgtgcttggagggactgacaagcccagcttctaaaccagagtctcaaagggaaagaccaacaaaacccgtcgtcgagaaagtgatcatttctgtgccatgcaattatatcctttaaaaaatatacctctggtgcactaccctgccaacagtttactgacgaccaggaaacaaaaccagcagttgatgtgagaatggctatggaaaccctgtaatcatcttaaaaatagatttatacagggaacctgattgttaggaatgtagttttacactctgtctcaaaagaaaaaaaaatttcttcacactttggccattttaatttctacaacaacactgtggatatttggggttggaggagaggtgggaggagataagggagagaggagggaccaaatctcaaaaatgcgtgagttttttatttttttttttatgtcatatgcttaccctcaacttaccacccgcagacacccccatacacaccacacccctgtcattatgggaacatctccctactgatcacacccaccaagaagccataaaaataaacgttgttatcacaaataaccacttctctagttctactttacctcatccacatcctccacatgcacactcttcagtacttcctttcccaccatgaggcataaaatgcacatgtagatcacagtcttgctcttcagga

SEQ ID NO: 50215 - DNA, 1038 bp, Bovine  19866880774591
  misc_feature (1)..(1): n is a, c, g, or t
natggtttgagatacctgtctactttatggtcaggcagaaattatctgctaggtgccagcattcatagagacctccctttgtttcatctaagagatcaattctatgatctttatttccttgagcagaaatgtcaagagtggctaatgctgacattgaagtccatcaaacacagtcactgaatcacttcctgctttcttggtcatgctatagtttaagctgaaattttgactacctacatcagctgacaagtcttaatatttgactattgtaaagacaaggggaaaactttctgctttcaatcatttatttattaaaaactcttaagcaccaggcaaagtgctaggtgctggggtcatgactggaaatgaaaagcatggttcatactactacagaactaaaaatctaggaaagaggacagaattaaaaacaaaaacaaagttttggacacttgatgttgaagaagaaggggggaaggacttcctgggaaaaaaacatttcaagttgagatggaggatgagacgatgtagttagatggaaaagaggaaagaaaagaggagtgatttattgacatgagaagaaccttaaataaagaaagagttatagatttgctccctagaagaatatcagtcatactccatatgttattaagtttctggatcaaaatagctacttaaagagttataagttactatttttaatgtaatatgtatataaaatataaaatatgaaaatacccagaccctttaaccttagctggaattagtttgatctgcctgattttttttacagagtttatagggtgacaatgacataccataagctcttactatttatttcttgtttttattacctatgccactcactgtgtgcttaatacatgttacatacaaactcagtggagacttaaggatgacattctgctcacctatgtggaacatatatacacacacacatatgtgtttgtgttaaattactaaaaatgtcttaagctatgtcagctagaattaaagttagtgtgcaaaaattagagcatctaa

SEQ ID NO: 50216 - DNA, 1610 bp, Bovine  19866880828982
  misc_feature (1)..(1): n is a, c, g, or t
nttggctgtacagcctcttattggcaattctagagttcagtaacaatattcactctgcctcatacttcctctgctctggtatgcatagatagttttactcacactttccaagttataccttttgtttgtcctctagatcatcactagcaaccaaagccttttattttgggttaaaaatgaaaccttttgctatttcaggacaaaatagttctattgctgttaagtgtgtgtgtaattttatgaaaactacttctggtatacttagctttctctcttattttagataaaaccaaaataatcctcacaagttaactttgttacttgtcttttttttttccctatctgctaacatatataagttttcactcaataaatattcaagcaatgccagactctgttctaattgttatggaagcaatactgaataaaacacctgccctcaaggaacttttattacaataaaattatattttatggaaaaaattctgagatcacatttaaatttaaaaggctaaaacatatgaaatatatatctatatctatgtttatgtttgtatatacatatatatgtatacctatagccatctataggggaggagaggggtgtttgtgtgtgtatgtgagtgtgtgtgttgcctataaagtttgagaaattaactctaggtcagctgaagaatgtgctttctgttaaaaatatatgaaaacaaagaagaggagaaatacaagaaggaaagcatattgagtactttttatataactcttcctcttcacaaagtagtgaaagatattactaagtctaccagaggggtttttttcattcaaactccacctaggctttgagtcttgaaatagaggaagagagagagagaatcagaaaatatctgtggtgaagactgggtagtagaagagggaacttgtactatataaaacatttcctaattggaaaaatccatttgctttctcctcgcctagttttgaaactttcatgtttagatattcttgaaataagacatggagaaaagaaatggctggtccccaagagcaactgtacatctgagttctgctttaggaggaggtagaggtcatgcaggacagaatggttagtttggaccaagtctactaagatctctgtcagaaatcatgctggagttctaggctacagaggctatgaagttctctaatagaattcacagggtccctggatgtaaatgggttaactattatatcttcatttttattaacttctaactagagtttagcacttccttctattatgaatgtaggaaagaaatcacattaggattagcagaatttatggacatcatcaatagaaatcacatatatccttataccacatcacagttgttgcaagtgtctacaaatcacgtttgtgctcatcagtactttgagattatggtggctattagacccacactagaccttgttattgaatatgtcaataaaaacatatatgatcttataggatatttttcccttaattgaataactgtctcaataaaacagggtttcttttgaaatttacctattttgcttttgtatttaaaagctttattctaagggaggaatttacaggcttcctcagactttca

SEQ ID NO: 50217 - DNA, 1905 bp, Bovine  19866880890387
  misc_feature (1)..(1): n is a, c, g, or t
ngtaatatgagataaatcaactcgcattttattttgtctcaggatattgtgatttttttggtgtagggaagttctcctgttcttttattacttccccaagttggtcactgatggctcagtttcttttcagagaaaagaacaaaattcaataaacattgtctgactcagacattgttttaggcactcaacattcataattccattatatatttgtaacaacactgtgagttagatactattactcctgttttatgagcttgccttgtgttgttcagtctctcagtcatgtctgactctttgtgaccccatggactgcagcacaacaggctgtcctttactatctctctgagtttgctcaaattcatgtccattgaatcgatgatgccatccaaccatttcatcctctgtcacctgcttttcctcctgccctcaatctttcccagcatcagggtcttttccaatgagtcagttctttgcatcaggtggccaaagtattggagcttcagcttcaatatcagtccttccaatgaacattcaggactgatttcctttaggatggactagttggatctccttgctgtccttcttgtgttgctgttttccaaatgactttttatacattccattgttgcatctctctgatccagctaggaaaatctctttatttttatggatgcatatgattagattgggcccaccaggataattcaggataatcttcccatttaaaggtcattatgctcaatcatgtctgcagtgttcatggaaggaagtatattcactggttctgggtatttggggataaacatctttgagaggaggtgcatttttctgtctaccacagagtgggtctggggttactggcaaactttgcctacttcttagctttgtctcctgggcttcccaagtagtgcagtagtaaagaatccatctgccagcgcagaagatgcaagagacaggagttcgatccctgggtcagaaagatcccctggagaaagaaatggctacctgctccagtattctttcctgggaaattccttggacagaggagcctggcgggctacagtccatggaattgcaaagaatcggacctgcctgaagtactgagcacacacacacaaaggtctcctgatcttggggaataattgctaattttccacattgttctctagatcagatctgaaggtcaggatgaagatgaagcccaggaaagctctgagctactagtagacagatcctgacctaccaccaaagtgtttttggcctaccagccttctcaatgtcccttttaaagcaatttgtagtctgttatcctgtatcattaacctaattagtgtaattgcacccaattacgtaatcagtgtaaatacatgaagaatcacataattagatgaagtaattaggtaattaatagatgatgtgggaaaaatccacagaaaacattttgaaatggacatggcgcctgtatgaggcaggcgaattgctaacttcaacatctcagccaactcccttggttggggaagagagatccacaaattaatgagaatctaaagcatgaaattgttgttctaaaaaatgataccttgtatcaggtccctccacctccaattttatagctctatttccaggttctctctctgtgttgctcctgaagagagaaatttccctcaccaagctgagtaggatgaaaaaatctagctcaacggaaaccagatttgacactgagtctatagataggatgagactgttattaaggccatgtcctgtgtgaccaaaataacccactgcggcagacactgctttggtctgctgagtttgacagtcttctcagctgattctcactgaggcagagtcagcctgaacatgagcacgtgttgcttaagcagacccagcaactcgtgggag

SEQ ID NO: 50218 - DNA, 1975 bp, Bovine  19866880937178
  misc_feature (1)..(1): n is a, c, g, or t
ntgctctacagtaagtctttcttggttatccattttaaacatagcactgtgtacatgtttatcccaaactccctaactatcccttcccctcattcttccccctggtaattatatacgtttttgttttgttttgtttgcttatgttttcctcacttaaatgctgctccatgaggagagcatctttgtgtcattccttgttctgttcaaacatgtagagtagtgccctgcatatcgtgagcactcaaaaaccagtctggttgagtgatgagtatatgaaagaatgttgaataaactatgctcccactggagctctgcattcagacctgctattcttgcccccttgatacctcctgccctcccacctgtgccccacagtgtgcatatgggctgtacaaatgcccggactgaatcaacactaggtctggacttggttgcaggaaccccaggcagcagagttcagcaagtacagctgagctctacagaaatgtagttcagtaacttggctttcagtgggtgtatacccctgtcagatacctgcacactaatggccatttcagaaagtagacaggttggcaaagcaaaaggaattgagccctgcaaaaaactcatctccaagattaaatctttgaagatcctcagatagccattatttccctggctcccttccaactgagagagtcagcaaaatgatcagtgtcttatctctcaggtaaaggaagatactcagagcccatttcttcttgagtgcacaaaataaaaaattctactgagtggttacttcctgtgtttgacagtttcaagatagacagtacttttctggaatggagggggagttggcaacagcaagttttcacatgctaagatagctcatcagattctcctggcatgattgttaagtgggtttaagtgctgcattcttttttataatttacagaattgtggattaaatatacattatatttcatttataagggtagcccgagggttcagataattcagagcaaatgtgagctaatagtaaaaaaaaaaaaaaaagaagaagaagaagaaatttcttcacaattttaccttttaactgattcaacttgacaaattaaattgtttacacacacatgcatatgcacacatacacagaggaattaattttatgaaacagtctttcttatagtcaaggctggatttctaaatgttttattagtcctttccctcttattttttctacatagattataagttccttgaaagcaagatttgaatttaatattttccttgtttttaatcagggaatttgacacaatgttgcaaatgcaatgctctctcaacaaacacttgattaaataattagagctagaagttaatttgcagtttcaatatataaaagccttcaataaactctaaattctatctatttggagattattaaaccccaagtaattaacactgatccacagtacagattcaaattgaattaggccattttgaaagaaccaagctgcagccatgtacaatttcaactttatctaaactgaagattgatcctcctctatatcatttaatttacccctttagggtgctaatgaattccagtacttccttttagacctagacaagcagagccattgtcctaagctctatgtttcaaaggatccaacatctgcagctatggagtgctttccttgaaatgttccaagtcctcttccaatgtctgggacaggctagggccaccagtatcatcctcacaaggtgccccaagtggtgccccacttggaagacaagtggtccctggacctattttctcttatgtgcaggtaccctatgatgctttatcccctgtatggagttaaccagatgtctcaaagagctccaggactcatatctatggaattttattagccccatgtctaagaacttgttccaggataacggtccaccaagtgaattactgttccggcagatgagatatttcttttatagt

SEQ ID NO: 50219 - DNA, 2399 bp, Bovine  19866880988320
  misc_feature (1)..(1): n is a, c, g, or t
nagtactacactgggaaaatgtgtttaggcagatgcagatgttctcacatgaaatgtttctttgaaaagttgggggaggtgtttaactaatggaaagttcaggtcatcacttaggcttgatgcttagaagtaataaagctcttgtccataaaggtgtctctgtgtgtacatgttgttggtctggttggaatttggccatagactgctagaaatgagatctctatttttgagacactaagaatcacaagcttaacctctattctggttcaattagtcagttactacgatttgcatgcctgatctacagccatctagtacctgtgattgttttctggacataaccatggttttcctcctgtgtgccatctcctgggaagttactaccacatagaacattctcttattctcttatttggttgttaacctccttgctcattgaaatccatctcaaatgataccataataacctttcctcattctacagccagatagaatttctctttacatgaaatgcaatcaggttcattagaacattataaggttctacatggcaaaatatctttcctcttatacttgtatttcctataagaaagtcactcaagacttttccatataaggtagtaacattaatgacctcaattttcttcccaacaaacatccgtatcctttgcatataactcaatggtacacttttgctgtgggcagagtacacattctccacaccttagtttaggcacatgctctgatgtggccggtgggttgcatgtcattagatgtgatggagcagacttggaaagtgcttgtgtgactggcctccttgttcctgctctttggacatcaccatgagaaggccagtcttaggataaggatgagagtgaaagaaagctgtgtagtgcagagttgctccaggcaagatgctccagttaaagctgcagaggccctaggctatataaagagatataagaaaacatagccaagatcagccgagctgcaaagacatgaaaaataggtgtttatttttcactgagtttttgtagttattcattgcacagcaattttgtaacaacagccaatggatataatattaattaacatctttaaataaattgaattattttctagactctgctgctgctgctgctaagttgcttcagtcctgttcgactctgtgcaaccccagagacggcagccctctaggctcccccgtccctgggattctccaggcaagaacactggagtaggttgccatttccttctccaatgcatgaaaatgaaaagtgaaagtgaagttgctcagtcgtgtctgactcctagcgaccccatggacttgtccatgggatttgccaggcaagagtcctggagtggttgccattgccttctccattctagaattgaatgttttaggacgaatttgtatgcactttttaaaagtatttattgaattcagtacaatattgcttctgtttcatgttttgacctgttggcagtgagacatgtgggatcccagttccccaaccagggatcaaacccacacaccttgcactggaaggcaagtccaatcactggagcaccaggaaagtccctcttacacacttaaaatggggaagagagacctacagaagacattacagatttattcgtgcatataacaatgacactgagttaaggggatgttgtaggtctgctactgctaagtcgcttcagtcatgtcggactctgtgcgaccccatagacggcagcccaccaggctcccctgtccctgggagtctccaggcaagaatactggagtgggttgccatttccttctccaatgcatgagagtgaaaaaatagtgaaatcgctcagtcgtgtccgactcctagcgaccccatggactgcagcccaccaggcccctctgtccatgggattttccaggcaagagtactggaatggggtgccattgccttctccgatgttaatttcagtcaggaggacctgtgggcaatgtgcagagatgggagtgggatgacacttgcttattgtatttagaacaggtaaaggaatatatccccaagcagtgggaaggtggacggtggtatggaaagagacttttgaggagggtgccagagcctccatcatcactcatttctggctgattttcaattgttcagtgtccttcctgtaacatgaaacacagagatcacccctgtacgtgagggctctgtgttaactgtaaagcactgaagaaatagaagagggtattggtgatgatgacagagctgatgatggtgacaactaggttctttccaacgccggctttctcagatttcatttcactgcactgaatttaaactttacaattctcatgctgcctttttatgagtcatattcagggggaatttttacataatatcataggg

SEQ ID NO: 50220 - DNA, 668 bp, Bovine  19866880998475
  misc_feature (1)..(1): n is a, c, g, or t
ntgacccactgagccatttgcttcttggggttaaggcctgtgtcctacttatcttctcagtatataacaaattgcttgacccacaataggtgctcagtaagtaatcaatagtaaatcagtgagtaaatgactgaacaaaagagaatttctcactagaaatctaactgtaatctttttactcctcccagtcctcagacaccaggactctgtgcccctctaccctggactctaagattctcttctcatttccagggtgactctgcaaccctcaagcacacctggctctgttaccacatctgtctcagccagaagacacccttgtttctcctctctggcagactggccctttgggcagcattcctgcacttattcctggtgtcagagctcagacactggtgaaatcacttatccgctgcttcattagctatggctgctacctggatgctgcacatagcattaccccacacttattgatcttgcatttcaggaccaggcagaatgatttcactttcaactgactaattgtgtagggaaagggctttaaaacaagaaaggaaaaatccattaaattctctaagacaaaactgaggtcaccctgctaagtacaacacccatacagatgtgctattaaaacagatgttcatgcagacaagcctaaactgttaaca

SEQ ID NO: 50221 - DNA, 1316 bp, Bovine  19866881034501
  misc_feature (1)..(1): n is a, c, g, or t
ncttggaattcgtatttacttccaactctttggggatataaatgatgtagatatcctcattaggcacaatgaagaacccaacattgccagatacctaaaggcttcccaaggtatacaacattttaagctgaaagtggtggggagtgagaggatactaaaaagagggataaaaaagtaggtatggtggctagaactgaagaggtgtgagcgcttggtatcacatgctacacagaagctgaatagcttgaggactgaaagaaggccatttgaagaaaaaaactggaaagcagtgtcactctttgagagaactattctggtaaaggtgtaggagccaaagtgaaaatataggcacttctttattgctgtccccaagttcacatctgatacaatttaggcatggtaaaaagcaagcacaagcgtctaaaatggctttattaagtatgcttccgtattttttccttttttcccctagaactgcatccttatgacgtaaacctggctttctttttctatatccatccattcactgtactatttattagttcacttgtatatccaagcctctagtaagtctccagcataagcctctcccctggctttacatgcctggccaaaatgaagctgtaaacacacacagtgtgacaatcctcttcctgtcccctgtgcctctgtaatatctactgtgatcatctcagaacaaaattatcccttcactgttcaagttctttttacatgctctcttatgttcattttctttccatctgcatatttatctcctgaaatagagttaagacttatacacttgagagatggactgtgtctgatgcagtgtctccacaccaagctgttctgccttaattttaaacattccattttttccccttttctacagggcaaagtctaaagctttgagcataccctacaactccattatgttataactagttgcaacataattggagttttatgcttcaaagctttgcacatgcacagatggaaagcaaactcctggaattcccttagtaatcatgatttaggcttagttgctcaatacagaaatattaaatattaattgtgtgccagaccccacacacaaaggaactatctttaaggagcttgcatcatgctgcttgtattagttctctattgctgttttaaaaaattagcacaagctgagtggctttaaaacaacacaattattatcttagagttctggagattagaagtctgaaatggttttcaccaggctcaaaaccaaggtgttggcggggctgtattccttctggaaactcttagggaaacatctgtttccttgc

SEQ ID NO: 50222 - DNA, 1429 bp, Bovine  19866881073685
  misc_feature (1)..(1): n is a, c, g, or t
ntcccctcatattcctcagtatttcttagcttcctttgttgcatcctttgttctatccatcctataaatgtggctggtgcccagggtcctgtcctcgaccagcttttcctcttactttatacttaatcattttcattgcttcaactagcatctgtataataatgtctcttatatctaaatttttagcccatccatatgtgtcttatttctagattagtacaactaactaacctcctgggaattataattggatttcctacaagtatcttaaaataaataggactcaaccctatcttacatgctcttcatctttatgatcccttttcactggatcataccagtcattcaaaaccaaccctgtgactcatcctggaaactttcttctcttttactctatacatccagtcccaagtctaacaaattctactcgttattctttcatcaaattatttttccctcctcactgccactccctaagttcaggctctcattatttcttgactgaaacacagctgaattccttacctccagtcctgtgttaatcttggttagagtaattgttctaaaaacaccaaccttatcattctgatttattgctaaaaacttctcaagggttagttatttttaaggcaaattcccacctttttaatgtataatgcaagggtttccctgaaacagcctctgctttcttctctaattttatttcttggtatgcttcattcttgcacagtgtttaaaattctttcaatttgcattaacttgtcatgctgtttcatgaataagcatttttgctcctgctgtcgtgtttgctgagagttacttttctctaactctatttcatctcttcagcctagtaagaaattatgccattttttagactgtaatttcaatgacttctcattttagagtagtatctgaccctctaccaggcagaaatgatcacaggactgtttctgtctttcctgctctacttctttatatacagacttcaattacatcataaaatagtttacattactcatgtatgacagactagctctatcagtatggtgggtagaataatggctccccaaagttatccatgtgccaagccctagaatctgtgagtgtgtaacattacaggctactggagagttaaagttgatattcaattgattttaaaataaggaacattttctgggttatccaagtgggtccaatgcagccacaggggtccttaaaagtagtggaaaagaagacagaaaagatggagtcagaaaagatatgatggtggaagcaaagttggaataatgctatatatggtttaaacgcttgattgctggcttcacgaatggaaggaggccataagccaaagaacacaggcagcctctagaatctgggaaaggcaaggaaacagattttccctaagaatttccagaaggaatacagc

SEQ ID NO: 50223 - DNA, 1379 bp, Bovine  19866881149501
  misc_feature (1)..(1): n is a, c, g, or t
ntctttgaggggttgtgttttattcccctttgtgtcactctatacctgacacagttattatatacctggcattcagtatacacttgtttactgaataaattcatatatgcagaaacaaatggctcaagtaaccattaataatgttaagagatttgaggggaaaaactatatatttttatttaatattgtggctagaaagtgacacaaacaactagctctttaataaatgagtctaaattattatgataaaacatgcaggaaatgtgtccatgagagcttgataactctgaaaaagccacagctgaagccattatccttatgttgttcatctcttgaacgattttaatttctgtgaggctgaactcttttttttttttcccttcatttcctaagaacaattgactctgcttgcctggcctgaggaaggctcctgggtatcattgctctggcaggtggttttcatttgcctgtccagagatgctggcacaactgcaaacacagctcccatctcactcccagccatatccccaatgctgcctgcaactgatacaatggcttgttacatcctagaatatatggttgcaacagtaatgtagccctatcttccttcagcatgtctttgaaaaagcatttattggattatttacttagcaatttatttttaacttaaattaaatgaactatttgaaaaatgtttcttctgaaataataatggttgtccacttaacctctgacaaaggagctgaattggaatgggacctcattgttaagccctggcagctgctgcctaggtttagtttcctaagcaacctggaaacttaattatacccaaacaacaaggacaagtatttagaggaagaagatttagtgaaatcaccatcatcaagcgcctaaaagctgagaccactgagagaaagagaagtacaaatgagaaaatgctattcgatgatcaagtaaattaaccgcaaatcttttaaaacagtaattaaaaaaaaaaaacttagtattttaaatctctattaaatgatcctcagtgtttcagtggaatatcacattacaactattcatgcagtcagctaaaattgcattgcctgggatagtgcctgcaccaaagagctgtggcatgttaggtactgcttaaggggatggtttttgaaccaacccttgaaaaatgtatagaatttggatacacagaaggttgatatatgatctcaactaatctgtttatgcaatcattgaatttgaattcccagtgtcttgccatcactgtttactgtcatatttcctgatggcccctgcatcattccacttccctgcatcccctcaaacacaggttttgggcaggggtaaggggcactggggtaaagaacccaccgcca

SEQ ID NO: 50224 - DNA, 1304 bp, Bovine  19866881178151
  misc_feature (1)..(1): n is a, c, g, or t
nttaggtatgtcagaagaaaagattaggtaaggtaaagatatagcaatgggaactatccagaatggactacagagagaaaagggaatgtttaaaaaatgaaaaacatgaccagagcatcagtgagaagtagcacaacttcagacagcccaatatacatgtaattagactctccaaaggaaaaggaagaaaagttgaaatagaaaggaatatttgaagaaatcatggccataatttttccaggtttgataaaaactataaacccacagataaaaagctcagcaatcccaagcacgagaaacatgaataaaactaaactaggctacatcataatcaaattattcaaaaccattggaaaagaaaattcttatgtcttgataaattaacccctttattattaagaaatggccttctttatccctggtaatattctttgctctgaagtctactttgtctgatagtaatatacccaccgtagttatctgttattagtgttatcctagttgaaacctttagtttcaacctatttgtgtctttttgttttaaggtgtgttttttcttggtggcatgtactgttgggtcttgattttttaaatataacttggttatttataatcactaatcttttctatatataatttctgccttttatttggattatttaaacaataataatataattatcatatcactttatatcagattatctaatgggatatggtttgatttaaatctgtcatcatacttatttcctgttccatttagtctttgttctcattttcttctttttttgtcttcttttcaattaattaaatttttttataattccatcttatctcctttttttaattcattcaccataactgttagttgcttttgggtctataatatccatgtttaacttaccacaggccacatgataagtaatattattccacttagtgtatagtatacatatcttactatagtatacttttatttctcttctccaacctttttgctacagctgtcatacatttcactgtacatatgctatgaaccacacattacattgatattatttttgtttaagcagtaaattatcttttaaaaagatttaaataacaagaaaaaaaggtatatgctacccatgtagttgccactgcagggcttttcattcctttgtgtaaatccatatttccatctggtatcatttctgtctgaaggacttaactttaatactccttatagtgcagctatgctggtgataaattctttcagcttttataaaatcattacttagtctgctaaatagtcattatttagt

SEQ ID NO: 50225 - DNA, 945 bp, Bovine  19866881183953
  misc_feature (1)..(1): n is a, c, g, or t
ngagattgggcaggtttagccaatctagtgataggtgttaacccttggaatgtgattttaatagccaatagggatttataattaatgtgcaataacccaataatgcacatgtctttaaatttaataggcccagttaaggtaagatcattaagcacccaattgaatgtgaaacacatatatttgaggtttaacgactatgcagcagatgcaggatggattgtgggattgttaaaggacactaagaaagttgttaatattgcgagggtgtttaattaatgctttaagcaatctatcctttgaaatctgcccaaaatgctatgcgaaatctgctcgaggagcaggagcataattgatagcactaccgtttaaacccagccacatcgaaggaaaacccaacagaaacagctctctaattagcgtgagaaatgacaacaacacaacaaaaactactgagtgtctccaatgacaggtgcagcaaataacaaggctgatgaaggactttgcaattaaagattccactatgaagattaatagagtattaaattaatgtaaggcgggatatcagagatgagtttctgccttacaagccccctccttttttatgtttctttccttcattcgtttctatgcctatgattcttccctatcatccctcagtattcaaatgactgcttttagtttctgtattctttctgtgtctgcccatgacctttcttcctttgggcctcttctctcgtatctcctctgttttacctggaaggtcaaaataaagtggttccagctcactgtcagtgccctatctcttgggcccaccattgcactgggttctctcatgctacaagagtagtttgaactacaaattagactcgaagctgcaggattacatatgtttgaaactttcgaaatgccctccttgttcagtttctctttttattggaatattta

SEQ ID NO: 50226 - DNA, 1153 bp, Bovine  19866881214618
  misc_feature (1)..(1): n is a, c, g, or t
ntctaaatctgtgagcctatttctgttttgtaaatatattcatttgtatcattttgtttttagattttgtatataagggctattatatgatatttgttcttctctatctgacttgcttcacttagtatgataatatccaggtccatcccatctaatgaagaaataagacaggtataaaaataactcaattttggatagtgtttcactggtgtttttaaaaaatgatgctcacagtgtgaggataacgcgttagcagcagaggcagccagtcctggcatatctgggtaagacaccaagtggcctttatcattggaaccaggataaatacatacttatacatttttatgggttttctagtttatttctaaagcaaataggtaaatttagagtgaatcagttaatttcaaaatataattcattataaaaatttcccacctttttcccacttagaaagatcacagatgaggtgcatcttagaactgggctgggatggagctgagaggaagcctgtcgcttcatttgagggttagctgcacgggactcaccacaatttgaatattttcttctttcttgtgcacagtctgatgtccttgaggttgtctgtgttctttatggcctggagctatcgggcccattttaatttgactgttcacattgtcctctgaaattatgaataaggaaagcatttagagccataggtctagttctgggggggaaaaaaaagctggctctattttctgaggttccttggctggttatttttcaaaccagaagacttcctttccatgatgtgaaactctaaattgccagaatggttaaaaataacatatttttaaagattgctatacttgagagatccttagacagttgcagcttctttataggattatgaagaagctgcacatgtggaaaacaatagaatctctgtctctctttctctctgcattctgtggtctgtgaatctgggagtaggtcttggatgctgttgccagacaagagagggtactatttgtacctgtagttggcaggtaaaggtggtgacactcagtgaggctgatgctattttttctttggttgtgacgtcactctgttgccttgacagctgctgtggaaggtgaaacctgtggaacatgtaaagcttagaaacctctca

SEQ ID NO: 50227 - DNA, 775 bp, Bovine  19866881358051
  misc_feature (1)..(1): n is a, c, g, or t
ncctttgaaatatgaagatgacttttttcccacaaggctaaagaggttttacttagaggtggtataaatttatcggttttatttttggccactggagggctctcatatttttccactaatgaaatagagaccttgagcatgactaaaaactagaagtcagagatgaaagttgaaagtaagtgttcctgtggtttgtgaccaaatttaaatgcagacaaatttgagtgcatattagtctaatgctatagagcagtgatttggctgcatgggacaaatgtttgtatcactaacatgacttagatctccaactttggggaaaagtggactgtctccttcatttcctttattttagtgattgtttattgtctttttccctttctggctaataatctcctagcactctgttctttcaatggaggtcctatcaagtaatgctgacccttggttcttttttttaacttttcccccttttctattattcctaaaccctgtctaccactccaaagtctctcctcatcaatgaccgtccctaacaattatgcttcatggattctttaatgaactccctaccccttgccacacacacaaccatttgtgctgacctcaatgcttctccaggagatagtgaagaataggagagccaggcatgcagcagtccatggggtcacaaagagtcagacacgccttagtgacagaacaactacaacaatgcttccagatctatttaggtcaaccacatagtgctacgtacttgtgctaaacatcaggttttcca

SEQ ID NO: 50228 - DNA, 1186 bp, Bovine  19866881367754
  misc_feature (1)..(1): n is a, c, g, or t
naaatgaggaaatgcaattcaaccttaactttatctcagcagctcaagaaactggttttatttcttggaatttcccattaagaggttgtttgattgtacttcctctgacctcttgagtagctggaactgggttggagtgttgtttgactatgatcattatgtccatagacgaaatagaaggaaatataccttggagctctttgaaaataaattttaaagggcagagcaatggtttttcatctgaagccaacatcataaaatgagcttgagaatgaaaaattggctgaagagtctggctcaggctttcttagaggcaaaaatgaagcagaattctagtttttccaaaacatctcccaaaaatattccatgggcatccttgttggtttcaaagatagaagacaatcatagactgctacagccataagggaagttagtatttaattcaacttttgcaagtaacagatgttgaaattaagtcctggaattttgaagtgatttgtttaagatcactcaacaatgccattgtaggatctatagcagaaccacatttgtagattcgtctcccattctttcccttcctcagttttgtttggttttgttttgaactctaccacatgatcttcagaaaatgggctatgtctgacatatatagattttacatgcttgttccatatgcaataagatttattggacattatatgtagaataacaccctcaacatcatggagggttcaaaggtgaattagacactcagtattcatgaagcatacactctcctctctaatagggtagcatgaaagcttcagaaataacctattgtgtagaaacaatgaaagaaaaggcttcttggggacccagagattgagtgtgctttagcaggctataatagaatctgactgtgcattgccagctattattttggtaaccatccttacaggcatccagggaatctcctttccacatggtaagcaggatgcacatttgttcaccaatcatacattttccatttcttagaactgtcatcccatatttctccaggaatctctggcttcactcatccaaaccccaaattaaatccctcatgatcattattgctaactggaagaagatttcctcatagtaactggaaaaagctgtaggtgcattcagtaaggatttgagctgtagggttagttaacacttaggt

SEQ ID NO: 50229 - DNA, 1343 bp, Bovine  19866881391342
  misc_feature (1)..(1): n is a, c, g, or t
nttatgtaaaaataaagcacgacaaagaagagctaacattcattatgagcaagttaaagaactcatgcacagaggaacttggattcctttcttcaaagatataaatctgtagctatgagaaacctttcctaaattcctaatagaattttatgtagatatatggttggactgtttttttgttgttgttgctgttgtggtttttccatccctctggcttatctatgtcatacactttctcttatccatgctaatggaggggatcagtagtgcagataattgaaaggttgtgtgccaacaaactgcttggtggttgctgccaaaaactccccagtgttgcatagtaaatgaaaagtcaagcaatggcagggttctcatcacatagcagcccagtataataataatagctcttattattgaaccctctttatgtgccagattaagtgctttatatacaattatctcatttcattctaatctacaaccctatgaaattagtatattttctcttttatgaatcagaaaattgaatctcagagggtcaagtaacttccaatggttgctctaatcattttagtggtaaagccatatttgaaaccaagttgcttattaaagcaaagcctatgcattcagcctttttgctatcccacttccaaatgccatagtgcaccaacctatgcttgagagaattaacttgcaaaggtgggatgctggaagtggatttagagcgttggtcctactttaaactccataaagggatattttcaggtaagagctttcctggtggctcaggtgtaaagaaggcacctgcagtgcaggagacaagggttcaatccttgggctgagaagatcccctggagaagggaatggcagcccactccagtattcttgtctgaaaagtcccatggacagagaagcctggggggctacagtccatggggtcccaaacagtcagacacaactcagcatgtacacatggtacttattattcatagatacatgttattcataggttttctagttttgagttatttctaaaactttaattaatctctggatgagggaaaggtttgagatgccacatgcaaagaatgcattttaatccttacctgaggttctctgtagaatttggcttagtaacagctcccttcctgaattcctttcttatttcagcttctagaccccagttcatcctggtttacaattagttccgatttctttcattgtcgtctcttccttaacccataccttgtattttggtgttacccatggtgctgccatttgctctcttcttggctcgttcaacaggtcttaatgtaacttcaaacaggatccaaattccaata

SEQ ID NO: 50230 - DNA, 1777 bp, Bovine  19866880677404
  misc_feature (1)..(1): n is a, c, g, or t
ntgctgtgtaagaagtgaaagttgctcagtcgtatctgactcttctgcgatcccgtggactatatatagcctgccaggctcgtctgtccatgggattctccaggcaaggaatactggagggggtagcctctcccttctccaggggatcttcccaacccagggattgaacccaggtctcccacattgctgaacacaaaattactttatgttttcatgcctgagcagcatggatagtcagtttgggtgtggttttgtttttgcctatatgccttgtggggctttgagatcatcacggatcagctgcagcccagctcccatgctcttgtcactccaggacccagctgacggggcagcttcttctggggccactgtggcttaatggcagagagacaggaggtgcaggaaaagcaccttggtgctcagggcttgtgttcccaagtgatgctttccacttcccccaccttggccagagcaagcccctgtccccgacatccctgtccagtagggcaggaatgtataacatatgtccatacagggtcatcacagggaggtgaaggcaccatttgttttggaaacagaaatatcacagtagggttaacacgaagaaggatcagatttgacagaaaagaagcaagatacctaagacttactaatttatgacatatcaacagtagtggaaatagaggaattaagaatcaatttcaagcgcatggcctgagcagccaagtagtggtgatgccgatcaccgggaggagctgggttaagggaagacagagggtcagtgctggacagagttaagtctgaagaggtgtgggtccggtcttactgtcatggagctcaggagagacggtggctggagaggcccagcctcaacggatctctccagccaactcagtctgcctgaaagggagtagtcgactgaaggagatcatgataagagtgtctaaagggagagagctgaggatcagctcaggaagggggacacacacggggttctaaccacattatgaagctgtctgagctgggtgggcacaagggtatttgaaatagtacactttattcctttctgtgtatccagaatatttcatggcgtgtttcttttagagaattaataagcaaccagagagattgttttaatcacttcataaatcacatgctaataataagtgctttattaggtagagcctacattttctctgctttaccttggtgaaatgcttaccttggtcgtattacccctactgttgtgtacattttaagtactcggccaagtcatcctttgtacatatggtgttatctcaactcctctgctaactttcaccccagtgtctgaaactctcatgttgtctccgcccctgcaggtgttcacgactctgtcggtgaccaagcgctccgggggaaacatcctccagaccggttgctgaggttaagccccaatgtagatgctgctgcctagactccaaaccactgatgtgtttcttgcccaagtccaaggcgaagtgctgcgaaaggctctcgggtttggcacctgcgtgtcccgtgcttacactcctcgaggcccccttggatctcacaggcgggaggtgattcgtggaaggcaggcagcattgcattggggttaccgtgatggactgaaaactggctcttggcagagcatcagagcgatgcgtccatgaagtcaccagccccaagcccctcgtggtgggtggtgatggaaccgtcaaagcagttttctcctcggcctctcctttgtgggttttcttacgctcaccgtcaa

SEQ ID NO: 50231 - DNA, 781 bp, Bovine  19866881550653
  misc_feature (1)..(1): n is a, c, g, or t
ntgatatttttttcttctgtattcccttatctcatccccatttataggtgggaaaatgaggtttagagatgttaaatagcctcccaagatcacagaggtaataactaacagacctagttactgcagttcagaatcctcctttgttcttaaccactgtgttctacttttcccattccacggtttcttaataattttcttattcctttgattttcaaaatagctagaatgtctaagcttttggctcctctgagctttgttgttgttgttttggtaatacattagaacatcaccctcagccagactcccgattttgggtttctttgggagaaaggggattttgttggacttattaattaacagtggtaatggatagtgcttttaactgaatgaatttgcaggactggaaaaatacctgtcacagaggaagagcaaaccaacgtgccttacatctatgccatcggtgatatattggaagggaagctggagctcacccccgtggccatccaggcaggaaggctgctggctcagaggctgtatggtggctccactgttaaggtgagtgctggggctgtcaacactgagatgctattcgcagtggtcctcctggtgctctgggtaagctgctggtgaagttttccaggtcttgaataatttagttattttgatgatggcattcccatatgtgctttagtaactattctaggcaagacattgttatgacctctctacctttgtgatttattatggacattgtcactctcagaatcaaacgaggagtaaa

SEQ ID NO: 50232 - DNA, 1129 bp, Bovine  19866881126895
  misc_feature (1)..(1): n is a, c, g, or t
ncccaacatagagaagttggaggagtctgaattgggcatctcccaggccctcttggaactggagatgaactcggacctcaaggcccagctgcgggagccgaacataacagacgccgaggaaactgaagttggtggtggctggaaagctatcatcatctttgttcccattcggcagttgaaatctttcctaaaaatccatgggcagctgctgcacaagttggagaagttcagagggaaacacatcatcttcatcgctcagaggagaattctgcctaatccaactcaaaaaagttgtacgaaaaataagcaaaagcatcccaggagcctcactctgactgccatgcatgacaccatcctggagaacttggttttcccaaatgagattgtgggtaagagaatccccatgaagctggacggcagctgactcataatggtccatttggataaagcacagcagaacaacgtggaacacaaggctgaaacattttctcgtctctacaagaagctcatgggcaaggatgttaattttgaattcccagagtttcagttgcaaacaaaaatgattaaataaaatattattcacaataaaaagcccaagatttaattgattaaagaaccgtttgtgttctgtcacattatcatcttgcaaaccatttgggaaatgcagatataaacgggcatcattgcagaagacaaagctgagagtgcagagtcaaatgggagactgtttgcatccatggtggtctttttactaataaagggtctaagccaggaaaatgtcttctgtaaagagccaggtagtcaagactgtaggctttgggaattccttggcagtccagtggtaaggatttggtgctttcactgccataggccctgattcagtctcggatcagggaactaagatcccacaagaaagtaagtaaataagaatactgtaggctttatttttgttgcaattactcagctctgccattctactgtgcaagcagccatagacaatacataagggagtgagtaggctgtgtttctgttcaactttatttatggacattgaaatttaaatttcatatgactttcctacatcaagaaatcttattcttcttatgcttttcctaagcatttaaaaaat

SEQ ID NO: 50233 - DNA, 811 bp, Bovine  19866881257717
  misc_feature (1)..(1): n is a, c, g, or t
ntgttccctcatttgaccactcctctaagtttagatgtgcagaagggcttagatatatccagagtaagccacatgcaacatgttacttgatcaattttctaaaataaggtttcaggacaatgacagtaaaataagggaagaaaacatggaggaatgaagtcctaattactatacatgcatattttttttttgacagtagggggaaaccttttacagataagttacaaacaaagaaaaggcaaataaacaattttgtacaaggaatttaacacattctgtacaatgtcttcactttgctgtcatcatatgtacaaactcttcatagtttacttgaccatcaccatcaatatctgcttccctgatcatttcatcaacctcttcatctgttaacttctctccaaggtttgtcatcacatggcggagctctgctgcactaatatagccattaccatccttatcaaacacacgaaatgcttctctaatttcttcttcactgtctgtatctttcatttttcttgccatcattgtcagaaattccgggaagtcaattgtgccattaccatcagcatctacttcattaatcatgtcctgtaactctgcttctgtgggattctgcccaagagacctcattacagttcccaattcctttgttgttatagttccatcaccatccttgtcaaatagtgaaaaagcttcttggaattctgcaatctgctcttcagtcagttggtcagccatgctgcaagcgctacaggtctccgggacgcaatcacacaaccactcagctcgctcgctccacttggactcatag

SEQ ID NO: 50234 - DNA, 2958 bp, Bovine  19866880580691
  misc_feature (1)..(1): n is a, c, g, or t
ncctggtgggctgccgtctatggggtccacagagtcggacacaaccgaagcgacttagcagcagcaatagatggtgactggttatgagtagacaagggaagaagagtcagataatttcattccccatcccaggttactgagagtgttggtgccattatcagagataagttaaacatacttagtttgtcatgacagtgagacatgcagcatgcatgtctttagttggagttggaaaattttaaatgtaattgttgggcaagcccgcaagatggcggcggctggagcgggccgtctggaggcgggcggcgtcggccctgttgctccgggccccgcgcctgcccgcccgggagctctcagctcccgctcggctctgtcacaaaaaggttgttgatcattatgaaaatccccgaaacgtggggtcccttgacaagacatctaaaaatgttgggactgggttggtgggggctccagcgtgtggtgatgtcatgaaattacagattcaagtggatgaaaaggggaagatcgtggacgccaggtttaaaacatttggctgtggttctgccaacgcctccagctcgttagccaccgaatgggtaaaggggaagacggtggaggaagccttgaccatcaaaaacacagacatcgccaaggagctgtgcctcccgcctgtgaaactgcactgctccatgctggctgaagacgccatcaaggccgccctggctgattacaaactgaaacaagaacccaaaacaggagaggcctagaagaaatgagcgcctggtgatggatgcctcaaagggcccacaggctgccagcgcccccacccacgcagtcacatgggtgttcagaagccctcgcactacaataaaagcgctctgagatcacacaacctttgctgctcacgttgcgaatctaactcaagcaaaatacacagcctagttgttctgaaccctggggtttcctgcagctcactttcatcgccttaacctcgtgtgtgtctatacctcgcgtgtgtctatttcgatttatgtgtatgaccccaaaactgaaattagtagcgaagtctcaggtttgggtagtcgtgaagtgcacaatatctaattctacctgaatcttttgggggaagattaccaatagaaagccttggtaagattatttggtaggaccaaataaagtacacgtattgtacataaaacagattttgcatctatataataaagcaatgttgtaagacggaaaaaaaaaatgtaattgttgaaatgtttgctaggattggctttaagttgtgcaagcagcattttccggcggtattacttatgtaatatactgtgtacagccatgtacttcctagctgaattcctcattattaaaatttgggataactttcatttatactgatagtatcaaagctggatgttgtcattaaggaaataatactgttaatcactgcttttgaatggaagaaccatgatacttatttttatttaaacacttacatagtaatagccagacactattataatcactttacaaatgttaaataatttaaacttaatcattctcataaaaaaaagaaaagttgaggttagaaaaggtagtaagttaaatgtcaaataaaacagtggttcaaacttgtaacattgaatccctttcattatgatactgatatgtgatcaatttgtttttaagtgaaaagaaatacaatcttaaacataattcttgatgaccaccttgataatacaaaacgtatttttacccagttgaaattaaaaagaaaacaccatttacctctaccactgaaattaactataaaagttgctgcacaactaaacatgccacaagatagtataacagctaaaaaatcaaaacatttgcagacagcaccaccagaagaaaatacaagcacaggtatatgcaatgtaatatttccatgtaactcatctttcctaagattggatcttttaagaaaaagaaaaaaaaatcatgagattctgccataatgggcactattgatattagaacttctgaccgtatttttgagcttactgatgttggagcaaaactagagtaattcatttttcaaaatgagaattaaaaaagcacgtggtaataagtcgaaaaaacctacagtaaaaagtaggaattccaaatcattattagtattaatatctatcttttctaattcagcctactgaagcaggatgctaaagatgaggactaatttgttgcttaatccatagtcctgtctgactctttgtgaccccacagacacaggctcctctgtccaaggatttctcaggcaagtgggttgccatttcttcctctaggggatcttcctgacccaggattgaacccatgtctcctgcttggcaggattctttaccactgagtcatccaggaagcctgaagacttcagttcagttcagatgctgagtcatgtccgattctttgcgaccccatggactgcagcacgccagcatgctgctgatgccatgatgccatctaaccatcttatcctctgtcacccccttctccttccgccttcaatctttcccagcatcaggtggccaaagtattggagtttcagcttcagcatcagtccttccaatgaacattcaggactgatttcctttatgaatgagtggcttgatctccttgcagtccaagggtctctcaagagtcttctccaacaccacagttcaaaagcatcaattcttcagtgctcagctttttttatagtccaactctccaaatatgactactggaaaaaccatagctttggctacacagacctttgttagcaaagtaatgtttctgcttttcaatatgctgtctaggttggtcataatttttcttccaaggagcaagggtcttttaatttcatggttgcagtcaccatctgcagtgattttggaggccccccaaaataaaatctctcctgtttccattgtttcccca

SEQ ID NO: 50235 - DNA, 2279 bp, Bovine  19866880753989
  misc_feature (1)..(1): n is a, c, g, or t
ntgttgaaggtttatcataaagttgaaaatgctcacatgtgactatcacttctcaatataatagcttctattctgaggatccattgtaatggaataatctaacaatttaatttaaactcttttggcatatgaaaattactgtggttaaatcttcctcctcactgtttgtgaagcttatgtaaaacacagcaatatgatttctaagtaaaagaaaaaattttttctctacgtctaacttaccacagacagagtcaaggattctacttcctataccaataatttgtgactgtaggaggcaaatggaaattgcttgagttaatctgaaaaatgggaactaaaatggaaatttgggtatatttaaacaacagggcttcttttttttcactttctaaggttgcatttgttcttcagcataatttttttttaccataaactctattaattatgtttcaatagtgaaaggataatgcagaaataaaaatgatgtgcataatccttatatggaacagacaatgtcaaaaataattggtatgttcattgcagcactgtttacaatagccaagacatagaagcaatctgaatgtccattgacagatgaatggataaagaagatgtggtacatatatacagtggaacagtactcagccagaagaagaaacagaattgggtcatttgcagtgatgtggatggacgagagtttgttatacagagtgaagtcagaaagaaaaacaaatatctatatacagaatctagaaagatggtccagatgcgcctgttcctgaggatagcaatagagacacagatgcagggaaagggtgcgtgaacccagcaggggaaggagagggtgggacgaattgagagagcagcacagccatatgttcacaccatctgtagaacagggagtgagtggggctcagctcggtgctccgtgatgacccagagggtgagactgggggcaggtgggaaggagggcaaggggaggggatacaggtacacagataactgatccacgttattttaacagcagacaacactgtaaagcaatgatactccaataaaaaataaaataaattataaaaaataactggctgctgtataggaaagattacaaagattaaaagagatttaggattgatacaaagcagaaaagaagcaaccaatttgaccgaccattcttacctgccatcccagatcccggaaactcacatagagttcatgctttttacaggcttgtttttgttcactggtgttataatctgaaggcgaaaatcagattgtcaacaaatggcagtctatcgggtatattaatatttcttttgtgaggtcacttataaagtcaaaaggaatctgtatttgaagttgtagaacatgagtttgaatctcaaagcgaaagccgcttactaactatgtgaacttcaagcaagtcacttgtgctgagtttctgcttctgtaaaatgcagaccttgaggggtccggacgaggatcagggttgggtcctttgtgttatgacaacagtagcctgatacctgccattcagtgagtgctcattcattaactaactcaaaccgcagttgtgcttactatacttaagcatataaaatattcaaacactatgttttgtattctttcacaaggcaggcactgggaaagtaccaactgggatgttccagagtacatgttatcttaatatgtatcttaaactcaggatccccaaagtggagctgctgattgccccccacccccaagaccaatttcacctgcagatgactgcgagcaacttcccaggcaaaacaaacactgtagcctctcacctccacaaccaatctgtcatgaaatccttactcattttaccttcatttgaaactcagccaccctcaccagctccatgactggctctggtccacgctgctatcctctctttcctgaatcactgccacatgctcgctgctattcctcctgctctgcactgtccccatcccatcaacgcagccaagtggaccaagcgtcacgctccagcataaagtctcacagtggttcctgcatcatcaaggctcccaaggttctacgtgatccagccccatcaccctctggcccatttgctctccttcactctactccaaacagcctctgtgctgttttgcacacaggtctgctttctctcaccttagttcctttactctcaacaaccacacccttccctgcaatgctcttcccctgaatatctacttagccaatgctcagagcttcctcagctcttaagcatcatctgtcaacagagc

SEQ ID NO: 50236 - DNA, 1556 bp, Bovine  19866881002112
  misc_feature (1)..(1): n is a, c, g, or t
ncttttttagttaggactttaaagcagggccaatataatcagagtaagactgaaaaggtgtaatagcagaatgcctttccaactctaagacatgaattccagtggctcgaaataacaagacatcatcactgtccattactgttccaaaaaaacaagtgattatgtgaatctgtgttatgtgaatctcatcttctgtatcatgtgatacctctaagctgttctgtccaaattccaattccagctttttctaaattctgctgtgatctatagttcattctattaagtcttttccataatccctctataccatgttatacacacacacaccttccctactccttccctcactcaaatccaaaaaccttcacttaatcacctcttaatcatttgcctgaaaagtaagccctccagcctcttattgtttccttccagatgctgctggggaatgactccccacagacctcaccgaacattccatcatggtcaattggctgggcagactgtaagtccagtcctccaaagcttttacgctctttctttccaagaaaactcagagctaacaccattgtttcctcacaaaaacagctaacatctgcagactggaacatcaaaacaaagggaaaaaaaatgtgcagggttctgctgatgttggatgcaaactttctcagccattttaggcaataaatcaatgttcttcttttcaatttctattgaaaaataaaccatactggctgattttcagtttctcctcagaggaatagttaacaaacaggttacatgcaatgactaattagtccttctgccttccagctaagcaaactcagcttgtatttggaaatggaatctctaacaaaattcatcacattgctcaaagaatattcaattttattctgcatttaaatagtttgtttcagctttattactttaatctatagatacattggtatagctcaacaaactgcttattccaaactaataatgtacaatgtttattaaagttattaactccaggactttcctggtggtccagttgttaagacttcgtcttccaatgcataagacatgggttcaatccctggttggggagctaagatttcacatgcctcatggccaaaacaccaaaacacaacagaagcaatattgtaacaaattcaattaagtctttaaaaatggtccacatcaaaaaaaaaaaaaatcttaaaaaaataaaattaaaaaaaaatcttaaaaaagaattattaacatcccaaactttgcattgacaaatttgaatataattaccatattatcttataaaaatcacttttaaaactttgatctttagttgttctacaatctcggttaatgtatgttccagtttagaaataagaaaatattgcccctctagtaaagatggagccaaatccctcttattccagctgtttcctgtatggatcataatggcgtttagtcatttctttattttagacaactcctttaaatcggtgtttctcagactttaatgtgcctacaaaccccagtagagcttgttaacagtttctcgggcccatctccag

SEQ ID NO: 50237 - DNA, 1071 bp, Bovine  19866881025251
  misc_feature (1)..(1): n is a, c, g, or t
nataaaagctgagggcaatttggaattctctttgcccaggttttagggctggttttaaaaggcatatgcaggacccatgaagaaacagatgaagtgattcagaggttcactcacgaatgtttgatatcacttagtttccattcccgtgtgaaaagattttaatatttaatataattctgctgaatgtatactctagaaaatactgaaaggaaaacttgagttaaaggaaatagaacagaagcttgcataaacactcatctctggagagctggatctcttaaatctatttggtcttgaaagcatgtatacatatagacctctcgatggaaatgccataatgataacttgttagatagaatgtcaatcatttgattttttttaaagtgttatttaggggcaggagtattatttcagcttacctgcactaaatttgcaactagcttattgcatagggcaaatttaagaatatatttaaatttaagaatacatcagagatatattaactgttaatagaatattattaacaggagtttagaaatttatatgatgatgataatgatgatgatactaccaaccactgttttttaaaaaattttattttatcggagtataggtgattacagtgttgtgtacagcaaagtgactcagttatacatatatgtatacattcttgtgggcttcccttgtggctcagctggtaaagaatctgccttcaatgaggtagacctgggttcgatccctgggttgggaagatcccctggagaagggaaaggctgccctctccagtattctggcctggagaattccatggactgtatcgtccatggggtcacaaagagttggacatgactgagcaactttcactcactcatacattctgtttcgtattcttttcctttagagtttgtcccaggagagtgaatatagttccccatgctatatagcaggcccttgtttgtccactctgtatttaaaagtttaagcctgctcaccccagactcctactccatccctccactacccgccttggcaaccacaaatctgttctgtttttgtgagtctgtttctgtt

SEQ ID NO: 50238 - DNA, 1538 bp, Bovine  19866881276557
  misc_feature (1)..(1): n is a, c, g, or t
ntatatcaagtaaccagggtattgtatccaatgacaacaggctctgagtgggagaggagagaaggcatgttaaccaccagtcccatctagtcttcactctgaccagaactgatgctgtcaggagccagctccttggagccaaggcgtgaggtccaccctgaatacttggtagaaatcacaggaaccagactgtttgagagcagtaataaaatgatcagggtgggtgcaggagaagcagcctaatataagagctataaacgtacctgagaattttgtcactgaacactaattctcaaggagttaagacatgagcacacagttcagacattaactgttaagacatttttagctcaagattgttttaatccccaactcacctatcagattatcacatatttatggaagtctgaccttcttaggaagtgaaaaatcaacctcttctgaatgtaaaagcaatagaagtatagcttttgattttttttttcacttttgtggttataaaataattctgttattcactagaaactcagaacggaaaaattgagctatttcaaatttttttaaataacagtggtgttttgggggggaagaattaatttcaatcaagttaaacatacagatgtttagtgaactaagtgatcacaattaaattttatatttaagtaaattggaatattaagcatacattattttgcttctcttttaaattctatggtgttttgtgacattttaggtgattcattaaatgtaaatgtatgtaatgtgcattggctgattattccaatgatgctatggctttcctttatgaaattctacccctcagtacattttgcctagttaggtattacaattcatctttatagtagaaaaaaggtaggattttgattaatcaggctatcttttagatatgtaacagcctaaggtaattgttaaacattcacctagtaaggcttagaaagaattgtctcattcactaaatttcactcacatggaactcattaacaaagttataatagatcaatgacagaaatgctagctaatgatcccagtgaaaattttaatgtgactagcagtcactccacaatcttaaatattgtaccctgggagaattccaaatatcagttagaagagattaatgttacagagggtttccttggctactgaagcccattggagattgtcccccaccttttataaacagtgaggcttactgtgttttataaccatgaaattaaagtcggcagagttaataaccgacctcagtcccacaccatctgctatatttatagataaacattgtctgtgacttgtttatcttaactcctcccctagaggaattatattatattatgaactatattgtaaaatccctgtacatttgacgggaaatcaagattaatttcagccttacagtaagaacaaatttaaatagtattctccccaaatgagctacagagatgggatcatttctgtcttttttttttccttccaaaaatcttacatagcagggctgagagctgatgcagaccaaacctcta

SEQ ID NO: 50239 - DNA, 1307 bp, Bovine  19866881327702
  misc_feature (1)..(1): n is a, c, g, or t
naagatttggaaaaagtaataactaggcacaggaataagttcttttaaaaagatgcctgatgaagcctcatttcatacctcacttaataactgtgtacaaaaataagaataaaactcagcttataagaaattaaagactatatcttcaggtaaatataaagtgtgtgaaataggcaacaggtccattatgtgagcagattaatcctgcaagggatctgagtaaggaatgcagcaaagttcaatttggattttgtaggaaaacaggggaaaagattgagagccatttcactggaagaacgatgcatatgtgtttataaaatgcagcgtgaatcgtcagtgtgattacacttcccttacatatgcagacagggtaacgttctcattgacccctcccaggattcccgtgtcttaagggagaagcactgctccccggccctgctgagctctgccattccgatgtgtggtcccacggggctggtgcccttacagcctccctctctgagctgcatccacttacctcagtttgaccatcagcaggagaaggatcccgcaggtggccgtcacgcacacgacaccatagatgacttcgcctagaagtaaaagatgtttttaaagtactggatttttagagagaacgaacactaaagatattttagagggtggatttttattatatgtgctgctgaagcaagcaccagaggatggatttttaactgaccattgaaggagggatgaaatccactgagagttatctcctttgcatgttttcctttttgcaatgcaatgcctttcaccttagacagggtcggataatctgaaagaaaacaatgaaaatgaggtgaaagtatatcaaagtcatgcattatttttatcccgtgggttgtaatttgctttataagacaacaatttatttcaataacattattttaatataatattggtatgatagatttgggtaaaagggagaacacttttattcaattttaacagcctttttcacctttaatcaaataactgcataattgaagttgctttaaaaatattactagaataatggttacattttataatacaattcattttaccttatacatagactagggaaaaaatacaataatttaaggctgaacattgggatactgaaaaacattccttcattacaagagtgattgttcgagtgcacatttccccaagacccactgtatttatgaatttttagaagtaccctcaggagagtccctgaaccagtcactctgctcaactctctacctagacacttcaatatctggttttgctcattcccctat

SEQ ID NO: 50240 - DNA, 2706 bp, Bovine  19866880155809
  misc_feature (1)..(1): n is a, c, g, or t
natgtgagtaatcaagtgtctagtgttgcaatagttgttttatttttttaaggtaaagaaggaaaaacatgtgacgtaactgctcagatggtgctggtgtgttgctggagaagcatgaaggaagttgctttactcttaggctcgctgtgccagcttctacccatgcggtctgtgccagagtcccccgatggactgctgacggtggagcaggtagggtaggcgttgattccgcttggtataatctctggtcaaagcatatatcccaaacttttatttataacccaacttaaacaaatttttttggaaacatttttcttgaataaaatcttaacagatgtcagctgaagaaggttcactaatgtgtagaaactggaccttgcaatacatttccaaactttggcatttttagaaatgtttttatttttctaagttatatacataattttagctcttacctcacttttaacttcagtattatcgtttgaatttttgtttctccattgaatacacacaaacttcaaatttaaatgaagtcgtctctttaggaaaactccacaaacctcttaaattttggaaagaaaaaaatatatacatatataggttaattatggatctcatggttctctctgcattgatgataaagttatatagttactttggtttttttggctgacttttattttaagaccacaaagttagttcaccatctgggactgttcaagggacttgagtgcagtgtttacaagaaattagcttaccacaagcatttcatttggaaatattttagatttattagatttctgtttttaattgattccctcttcctttccatatggtttcaacaaatccatttcccaccattttccagcaaagatatataacatgtactttcatttttaacctttttcaaataaagataatttttcccgtagggtgttacgacatctaagaacaaaacaaatattgtagtatgctaatgctgattatttctataataaccatgtgaccagtaccatggaaataatgctaatatttttattctcacactcgctgtggctaatgtgctcgcatctggttaacagctgggcatgtgatgttgcaaggctctgagatggagagcggtgaaggggagcaggacgctgccggcttcatcatgttccgtattctcttccaaatcaaacaggcgttagtgtcccagcgttccttgcagtccttgctggtgactggctagagtgccaatgccaacatctttgctgaggaatccagctatgattaatgattacttcactgatgttcaccatctcactaagaagtaaacatgggctagagagccccttgacttctcagcttttcaaggacaagttaaaacatctagttttggggtttgttggcctgtgttttaaaaaaagaaaattaagggaaacattgttttacttttactgtaactgagaaagacctgaaagcttcctgtgaaaatcattttgacttgacaccttttgtaggacatccaagtcttatgaagtcatgtgggatatccaggttaaaactgggaattcagttcagctcagttcagttcagtcgctcagtcgtgtccgactctttgtgaccccatgaatcgcagcatgccaggcctccctgtccatcaccaactcccggagttaactcagactcaacgtccatcgagtcagtgatgccatccagccatcacatcctctgtcgtccccttctcctcctgcccccaatccctcccagcatcagagtcttttccaatgagtcaactctgcgcatgaggtggccaaaatactggagtttcagctttagcatcattccttccaaagaaatcccagggctgatctccttcagaatggactggttggatctccttgcagtccaaggaacttcaagagtcttctccaacaccacagttcaaaagcatcaattcttcggtgctcagctttcttcacagtccaactctctcatccatacatgactactgggaaaacaaaagccttgactcgatggtcctttgtggacaacataatgtctctgtttttgaatatgctatctaggttggtcataactttccttccaaggagtaagaatcttttaatttcatggctgcaatcaccatctgcagtgattttcgagccgccccaaaaataaagtctgacactgtttcccctgtttccccatctatttcccatgaagtgatgggatcagatgccatgatcttcgttttctgaatgttgagttttaagccaactttttcactctcctctttcactttcatcaagaggctttttagttcctctttactttctgccataagggtggtgtcatctgcatatctgaggtgattgatatttctcccggcaatcttgattccaacttgtgtttcttccagtccagtgtttctcatgatgtactctgcatataagttaaataagcagagtggcaatagacagctagacgtactctttttcctatttggaaccagtctgttgttccatgtccagatgtaactactgcttcctgacctacatataggtttctcaagaggcaggtcaggtggtcaggtgttcccatctctttcagaattttccacagtttattgggatccacacagtcaaaggctttgtcataatcaataaagcagaaataaatgcttttctggaactctcttgccttttccatgatccagcagat

SEQ ID NO: 50241 - DNA, 751 bp, Bovine  19866880388169
  misc_feature (1)..(1): n is a, c, g, or t
ncaaataactgtaattccactctcaataaaggaaataaattttttctcctcctactcttacttaacagggcttttaaaagtccttcccatccaggcaggacctgtggtccagctgggacggcagggctggaatctgcatagagccggggcagcagacagggctgcgagtggggctgtgctgacttcctcttcacggtcctcacagccagcctcgccaggccagcagctgacccctattctcacttggtttttggcctgggtcagcttagttttcttccagtagttggtaaaccgtctttgcatcaggagagagatagtaaactggactgaggagagagggatggcggggaaaggggaaggaagggactcgaaggattaatgagctgatttccattaaggctttgacatcttggaatgaaaagcggactgtaagagcagaagcccagtcctctactccggccatgctgccagctggccattcatcaccaaaaattccccaacaaatccacggctgttgcttaatcacctcatataaatctctattaatcttgcaaagtcaaaacactaatatatgacaaaagtctttatgtaccctcgattttgtggtcaaaatgttaaaaaatggaactgatcatccaatggttccaatcaactttttttttaaacctccttttggggaataaataaatgacctccttactaatgttttagtatctactagactgaataaactcaagctaaatgatcaaat

SEQ ID NO: 50242 - DNA, 1182 bp, Bovine  19866880404863
  misc_feature (1)..(1): n is a, c, g, or t
natttgtgtttataaaaccaaaactcaagtattactgcaaatcagaatacacagttattaaaccaaaatactcctatttcccttaggtcaacatgaacctagagatgattaggtttactcccttctattctctaccaactctttacctcagaaacatttcaggtgattaatttaagcctaatgattcaataaagaccattgctaaaggcacttatagaaatgataaaaatacaaggatatccttcctcttcttactaaagttttcctaaaataccttacaccctggacttcccggtggccccatggttaagactccatgcttccattgcaaggggcacaggtttgatccctgattagggaacaaaaaccccaaatgccatgaggtatggccaaaaatatatatttttcaagtactttaaaaaaataccttacagactgaaaactccagtgctagattttttttttccccctttcaaaaaaagagctcaaggttgatttattacaccaaagtgaagggacttttttcactctggattttaagcccaaatgtaaactcaactggatcacagaacaagcagttcacagaagtgccacgaagagctctggtagtccgattccatgacccttcttcccacactctccccaaatctgggctctttcgaaaaataattttcagggcaaagtttaccactttcctacactttctgaagagaaattttacctttttaagaagagaacaaatctgttgtcgcactcctggagactgactgttaagattgtatgtgataaagaactggatccactgcatttcttctgtggaaacgatttctgtgcttcgattactttcacaaagcaagcctaatgtatcaatccgtacctaaaatacaccaaagaataagatgttcatttttcagtgatgtgtcagttgctcaatatgtccaactgtatgcgaccctacgcactctagcctgccaggctcctctgcccatggactttttcaggtgagaatagtggagtgggtagctatttccttctccagggtatcttcccaacccagggatcaaacccgggcctcctgcattgcaggcagattttttaccatctgagccaaaaacaaaagcaaagcctaaaccacttaacatgtttaattatctacacagatatcaagggcagaaaagaaag

SEQ ID NO: 50243 - DNA, 2149 bp, Bovine  19866880407921
  misc_feature (1)..(1): n is a, c, g, or t
nccccagtccatggaaaaatggtcttccacgaaactggtccctggtacaaaaaaggatggagaccactcgctgccctaggtcatactgctctgaagtgctaaggctagtatttatttgaaccaagcaatatggctccagaacctgtgctctttgccactcccttaactacgctggcactgaatactacaattcactctttgcccctctgtttacaatgctccatctgtggggtgtgacgagctagttctcaacatgccaaaattaacttgccattaaataacaaacaattggacttactttgctttcttgagagatctctcctctgagcttcttgggcattgctctagcagtgttctcttcttctagtctgaaatgagtagaaaaggaggaaaaacttgttaagcccaagtgattgtgacaggttgctgaataaaactggctcaactgaatttctgagattcttgagaaactgagaatttcttacaaaagaaattgtccttataatagggaatcgagggtcattgcacagttataagtgtcttagcaaaggaaaaatgtgtcttgaggctaagaagcataaaatcttcatgagattatgtatgggctgctacttaggcatactttttaaataattagaacgtgtattttccatctgactttacctaagtttttactgttaaaacttaacataattttgaaaatcttcagggttgttgaaagagtaagaaaaaaaaatattaacaagcatttatataaagaagttgaagtttacaatatactttcatacacagaaccttactagatcatcctccttttactctcttagaaaatagtatcataatgatatcaatatatgttgaaatttttaaaaattgccaatgttttcttatgtggtaatcctacacttgaaaaggagccttaaaaggcaagtttcaatcagtgaagtgttcaaattactgaatattataaaatgaaagtttcagtactccaaatggtacatagtaaatttagggaactgctttctaatgggtaggcgacagtagcctctggttaccgtattagttgacatgccacaccgtgaagcctctgagtcggattgaaatccccctttattcatcagttttgtatttttcacgtgcgaagtaccacttcctttcttcaccaaccaaaggttagtcgccaaacctgctgaagggcacactgagagtgggatgtgtgagacgtgctcggtgacttgtgttctgttttgttttgcatcagggaaaattcctggtttgggatatttatgtcctggccaccagtccccaagagacggccacatttctcccaagtttcaatgaaactctcagtcccagaggtaaacttcagctcagcctcagtctgaataatcgcaaaatcaaaattaggcccacgtgaatgagattttctgtttggcctatacagtgtccagagcattagcaacatgcctatttgtatgaagggtgatgctgttgtcaataagcctgctcctttttgataattgcagtcatacaggaaaaagccatctgttttgatagaaactatggaaatatatctaggtagctaaggaaaagctggattcttactaaaggatgtgtcacacctacgagaaaataatttacaaagcagtgtgtagaaaatattttcaaacactaaacaagtgagtctcttaagctatccttttgcgtgatgggtgagtggtgctttgtttgtttttcgcttgactgattattcattttttttttccccagaagaatctcttttcttgtgaagtcagagtttaaggctcagcttcttttcagcttgaataaaatgaaaagtaaaattcttctgttactaagggtaacctacataagtcttgtgaagagaaacttaaatgtaattcttgctttctagctgagcttcagtgccatataattaataaattcagtcacttcttacccccgccttttttttttctgcatgatttaagacatcagaatttaattcatagccagaatgaaaaccggacttaggaaaaacttgaaaagactagagagggatttgcattctgttgcatggttgaacacgtccctaaagtagcagctttaaagtggccgggtcctgctagaattccccgtagaacactgg

SEQ ID NO: 50244 - DNA, 2409 bp, Bovine  19866880409896
  misc_feature (1)..(1): n is a, c, g, or t
nctctgtcgtccccttctcctcttgcccccaatctctcccagcatcagagtcttttccaatgagttaattcctcacgtgaggtggccaaagtactggagtttcagctttagcatcattccttccaaagaaatcccaggggtgatctccttcagaatggactggttggatctccttgcagtccaagggactctcaagagtcttctccaacaccacagttcaaaagcatcaattcttcggtgctcagccttcttcacagtccaactctcacatccatacatgaccacaggaaaaaccatagccttgactagatggacctttgttggcaaagtaatgtctctgcttttgaatatgctatctaggttggtcataactttccttccaaggagtaagcgtcttttaatttcaaatatagtagtatttaaattgtaaaacattttaatcacgttttcccttaaggagcctttatttcctgagtcttaattgttgtctcaaaaattataaccaaagtgctcagcaggcatttttaatgctgaattgaagatttgagaggaccaagccccaaatgccaactaattggaagccatcttctcctacgtgatagggaacattttaggatcaaaactgtatgtttttctctttaagcagaaaagtccgaattaaggaatagagtatgaaggtaaagaggagttacagtaggcttaaaatgagcacaaggcgaatgaacgacatgccgtgttttgattatctttctctgattggagcagtgttttcccctccctctcctctggaccttgacccttaccagtctatttataattttcttgttttaatcaagctgcagtagtcacatcagtggcaccagatacattcaccctcacatctcttgactttccccttgtgtcttattttcctcactcaccttgagcgttgagagtcctgacttctcgtcttgcccctcctccacacagcaacaagggctcgctgcttcaccatttattcttgtctttccctttcttctgtaagtgctcttcatctcctggttgtccagccactgcacgtatttgctgagggcctcctttgtgtcgttgcccaaacccaagccccctactttcatcagctcttctttacaagagaaaatggaatagcccatcaggcatggactctctccatggagacacccacgttacccaccaccatagttccttctcttgttttatagccaggctcttggaaaaggtggtctgtgtttacagtctccatttcctccccctcttattcattccttcaatcactgcagcccagatgcttcttccacaacttcactgaagcttcactgacaaaggttgaaataggagtgccctcttcattacaaaagccactggatgcttttcagtctttagctttctggatctttctctggtatttgacactcttgtgcactggcttttcaagacgctcttcctctgtggccttctttggcctttgtttcttccttgtctttcagggctccttcctcacgctgcctcccaaatgctggtgcacctctttatcttgttctccactcttttctttattcactttacctgtatggtacttctccggctggcaactcacatatgttgatgagtcagtcctagatctagaatgcatatgaaatcatagactcaactttctgttggacagctccttctctatgtccatagatattgaaaagtcagcagtttcccccagggagttcctctgcacactgaggtttgaacagccatctcttagggcctagcacagtgtctacacattccctctggctagctggagtcagaagacttctttgaaagggaacaaaactcaggatattatggagtatccttccagtattactgactgtgttcatatgaactcagtaacaaaggaaagttggtttaaaaaatcattgacttttgatatcccaccagtaagtttgaaatggtctgcttttttccttaaactgatgatcatcagtttgaggtagcaagtggcagctgttggtaactttctttggaaatgaaaaagttaaggcccaaaggagtgagcagaatgtgttcacagtcaaaaactgattcattaaggagtcagggatttacctatttatttctttactcagctgtaagcatgtgtctggcatggtaaaggggagcatcagaaagataagagttttggcaaaatgggatgtcctttgtgctgtgttgcctctttgtccctatcatctttgctctaattttttccatataattagtgataagtgataataattagcagatgtttactgtgagctaaacactgaatgcataccaactcatttaattatcatgacagcactctgaggtccctaacattattattcccatcctacatcctacagagagggtaag

SEQ ID NO: 50245 - DNA, 3644 bp, Bovine  19866880472533
  misc_feature (1)..(1): n is a, c, g, or t
nccccttccactcagcacgaggctccccccaaaccctgcccaatgcggccttcctgggccaccgagtgccttctgtcccaaatcaactcatgccctctcacaggaagactgtttttgggaatgcccagaaatgcccagctttcacatttctgcaggttcactcaggactgttttggctctgtaggttaggggtggctggattctgcctcaaccctggaacccccaaggcctgggacagagctggctgcgctggggaaaatgtagagaaagtgtcgggttcccctcacccctgagaacgacagccgacgggggccttccctgctgcggggaactcagcctgtttgtagctgcgcagaggtgcagggactgggctttggctgaggaagaagggaaaggcccagaatgagagcactgtcctccgccaaggacacaggactgttgacgtgggcgagatgggcgcagcctctggatcaagtccacggtgaggaggaaatggttttcactgaaaaacaaagttgaaaaacagtttactgaagggaagagaaagaggaaagcggaggggaaaaaaaaaaaaaaaacccacatacctaaaactgtctgatcatcaaaatcacctagttggttaaaaatacagattccaaaatgtgttccaagtcaataaaatattattcttggtagctctgggtttctttttccttgtggtttaaaaatgtagatcccttgtcaattatatctcagaaaagctggggaaaaaattaagctacatgtaaagtcagctgaagaaggaaaatcagttgcacagcaagaaaactttttcagaggggatttttcagtgcatgtggagattgaggaaagtgaattaaattgtcacatttctaagctggacattaatatctgaacttggaagatttaataatataatcagcttttcttttttttaattaaggagaatctgctattggaaatacaatgtaaatctttagaaaatgcagatttcaactcatgtagcttggaagacccctgggtgggtaggtacaatgagtgagcggaagcagtgtcttatggaatcaacagtgtgggtcatgtttctaattttcccgttaggctttgggaaggagggagaggagatgcaacaggatcaggaagaaaaatcctaaaagccacttctctccaaccaggctgggtcttccgctgaatgactctgtcccatccctccttcctttttcacttgttttccagtgaattgtctccacctaccttctcccttccctcttcttcctccaccttaagcccctgctacctgaacaatgggaagctggataaagcctttcaattccacagtgtgtttgtgtcccagttcctggaatctgccctcatataggtctgtgcatgcgtgattaaatgaaggatcttgagatgggaagattatcatgggttattctgatcggtctaatgtaatcacaagggtcctttaagagagaggcagatcaaagagtagaaggtgaggagatgacagaagcagagattagagtgatgccctttgaagatggaggaagggactacaaaccgaggaatacaggtggccactagaggctgaagaaggcgaggagatgggttcttccctggagcctcagggaagaaccagccctctgacaacttgatgttagtctgtgagactgatttggggctttggacttctagaaatgtaagaggatgaagctttactgtttcagccattcagtttgcagtgatttgttacgtagcaatcagaaagtcctacgctgaggcttccctctggtggtccagtggctaagactaagtgctcctgaggcatagaggccctaggttcaacctggtcagggaactagaccccacatgctgcaactaaaaaagaccccctacgctgtaataagacccaggacagctaaataaataagtacttttttcaagaaacagaaagacgtgcacctcctgacctcttccccgtccaccccaccacccagtccccacctgggaccgaactcttgccaacacttgggcccttcttagcactgctgtccctggccctcttagcgatgtttgatattttccactttgctctttcttaaatcttgcatcagcccactcccctggtcgtccttctgcctctcgggtcctcttcctcagcccttcctagtgctcttctatcccacctccaacatggctgtgtgtcccagggttctcttctcaacctgcctttctgctcactttctactttctcggagtgtcacattccagtgatgatcccaaaatcaaggccatgtgctccacaccccagtagccagctggtaatagtggtcttcctgctccctcctcagcaaaccactatctctatccgaaagcattttccaccttccctacctgttgaaatctggctcaccagtttattcaaggtccagtttataattgaataaactggctcaccagtttattcaaatgtcacttcctccaggatgtcttctctgtctgccatgtcacatgcttatcttaagtaagtttttttttttatctttatttttttttagagtagttttagggttcacagcaaaattaaacagaaagttcctgaggagcacttacttttcataggctattgtgtgaccagcttttattgacattgtcttattcatttcactcaacaaatctgtgtagtagagaggcattttatttttctttctttctttaattccttccttcctctgtcccgtctttcctttcatccaggtttactgacatataattgacaagtaagaatttcatatatttaaaggtgtacagtgtgattttttgtgtttgttttaaattagttaattaatttatctggctgcattgagtcttagttgcagcatgggggctctttcatttaggccctagcgcttctctctagttgcactgcgcaggctctaaagcccatggacttcagtcagtatgcaggcttagctcccctgagtgtgtgggatcttagttctctgaccagggatccaacctgtgtctcctgcattggaagatggattctcaaccactggactactggggaagccccacgatgttctgctctacatgtccattgtgaaatgattaccacaaccaaggcactcaacacatattacttcacgtagtaccttttttttcctttgtgaaaacaattaagagctactcctttagcaaatttcaagtttataatataatataatgctaactatggcagtggtggtttagtccctaagccatgtctcattcttttgcgaccccatggagtgtagccccctaggctcctctgtcagtaggatttcccaggcaggaatactgggttgagttgccatttccttctccaggggatattaactctagtctagtactatacattagatctccagaacttattcatactgtgtgtctgaaactttgaaccctttgatcaacatctccccatttctcccacctcccagcccctggtaacctccattctactctctgcttccgtgagttggactttttaaacttgcacatatgagtgagatcatgcggtatttgtctttctgggtctgcttgatttcacttagcataatgccctccaggttgacccaagttgtcccaaatgacag

SEQ ID NO: 50246 - DNA, 780 bp, Bovine  19866880478593
  misc_feature (1)..(1): n is a, c, g, or t
natgactgtcaagtcgtatttctattaagctgattctgaataaattcagaagcttcactggcagtgaacattcagggaggaaggaaaacgtgtgtgccgtctcagtgagaattacagaaacaaaactctaaaatggtacaattcaaggtaatgagatttcctctttaatctagaaaaatctcgttctctttaatgaacaaagtgagagttgacgtggccagtaaacctggtattctaagtcaggagtttctaaccactctgagaactttgcattgcagggtgtgaaggtcttcaaatcaccaccaaatcaacacagctgatgaaggggagttttctacaacatgagttttcttgttcaactatgttgcgttcctatgtttcacgtcaccaaaaggaaatgagccatccaaactgtatctcaaagtggcagaaaggtcagtctccaatgtgacatagcagatactcagtctagtgtatatttaaaatcagatttttaaaattttataaatttataatttaaatttaaaattagattatttcagaagcacttgtttctaatgctaccaataggaaaacagagaaaaagaagaaagcactatttcaaacccttttgattattaaaaacagcattaatctagttcattcattcaacaaacatttgttgagggtttacagtcaaatgctatggggagtatataaaataactggtgacgtgttcacatggctacttaaagtacaatatacaatatatagcttaaattataaatcacgattcaaaga

SEQ ID NO: 50247 - DNA, 1019 bp, Bovine  19866880495791
  misc_feature (1)..(1): n is a, c, g, or t
ncacacacagccctttgtgatcagtgagtcaccgttgatagcctggctttaggttttacatcctgagaccatgggaaatgaggcacttcaccacaaagtttcaatgtggaaccaggactctcacatctccccttatggcaagttgattttaagaccctttaattactcccgataggatatcagtgtggccagtaagccatttacctctataaaactcctgtatttgatgatagttgggtactatagagagaggatttgggcgttttgttataatctttgtctatggtatgatgtcttccaagcttaacctaatgtttttccaagtctctaattatatttttcattcatttatttaataacaattataataatggccctcattagattagtttttgtatttgagaggacctaagaagctaccttggagaaggcaatggcaccccactccagtactcttgcctggagaatcccatggacggaggagcctggtgggctacaatccatgaggtcgctaagagtcggacacgactgagcgacttcactttcacttttcactttcatgcactggagaaggaaatggcaacccactccagtgttcttgcctgaagaatcccagggatgggggagcctggtgggctgccatctatggggccgcacagagtcggacacgactgaagcgacttagcagcagcagcagcagcaagaagctacccagtcctgttctcactttgtagatgtgaaaattgaggcgctcaaggtcacatggctagtgctggaaataaggttaatggttatttttagctcacagttagctcaactaagacatttaaaaaatttagctgatcatttataaatggagtttctattagcaacaataatactagtttggattcaaatattttgaaattaagctaagagccccagtgttttgatatggtctggaggtgtcattcatgcatttttcacagttgtttatagaacattcaatctaggtctttaggcagagtaggtaaatgtgt

SEQ ID NO: 50248 - DNA, 1818 bp, Bovine  19866880568809
  misc_feature (1)..(1): n is a, c, g, or t
naacttgcctggaaaatcccatggacggaggagcctgataggctgcagtccatggggtcgctaagagtcagacacgactgagcgacttcactttcactttttgctttcatgcattggagaaggaaatggcaacccactccagtgttcttgcctggagaatcccagggacgggggagcctggtgggctgctgtctatggggtcacacagagtcggccacgactgaagcgacttagcatagaaccaaaacaatgtacctgaagtaaagctatgagacttccaaggccaggtcagaaagcaccatgcagtttcttcctggttctcttggaaacctctctctagaggaagccagctgccatagaagaatttcagctaccctacgactgccatgctgaaaggccacatgcactccaaatgaggccctatcttctagttatcccaccaaggtgccataatgtgaataagtctgtcttggatcctcctgaccagttcatctgtcagctgaataccaccaactgaattcagtaaataccccaaggagaagaatcactcaggtatgtactgccctaattcttgatgcataaaatcataaaataagagatgtccacggcttcccttctaagcattcaaaatgtcatgtgtagagttgttactacatggggctaaacattaatcgagatgtcacttctttccctccattcctagagccatcatcaaagcttgtatcacctctgctctagattattaatagctgatgccaggctctcctcactactatctgtcattacaatctatctaacctaacacttgcaactgaaaaactactttgaggtaccaacaccataaccaacatcagtctcataatgttttacacttgtagaaaactttataatgcaaaaggatcttcataaatatctattttacttgatccatataagaaagaccagagagatctgtcaatagagcaaatattctcttccttactttataaagagaccagaggctgaggagattcaattttatacaatctcactgccagcagaactaagacctcgtgtcatagatcattgctagttctctattctacttgcctcctgagatctgtttcagattaagaaaatgttcagtgcctctttccatcccaactatagcgactctgctttctaggcatccataataaggctttttctattcaactggatgttattgcctagtaactctaccactactgcaacaatcaggctggctcacttactcacctaacaatctgtcaggctgattatagcctctcagtatttacttacaaagtctcctcctttctcctcctatctacttaaaccttactcatgtgttagcacaaattctgcctcctccattaagccctactagcccatccctgttgctttctctctgctattcctacagaatttgcaaatttcgcccaaattttgacaattttattggatcatcttgttcaagtgtcttggtctcactttccaggctcgtattcagctaatacatatccatacagacagcaatgctgggtgctcacagccactgtctgttctgaccagtcagtgcccatgacataccatttgttaaatattttgaatttcatccctgcttatttctccaactaaaccataagctctttgagagcaagaagcttgtctcataaagaagtatttcagcctccaaaccaagcataggactaaacacacagctagtgttcaatacatacatttgctaattgatttgaagggagtgaagtggattgtgctgtgagaaaaaaatattcttaagtcatctctacactggaa

SEQ ID NO: 50249 - DNA, 935 bp, Bovine  19866880577710
  misc_feature (1)..(1): n is a, c, g, or t
ntggctgggaacctaagtatttagggggatctacaggctgtcactcctaaaaatacagccccccagcctgggagtcagccaggtgtggctgccacacagcctcccagcctggctgatgtgcagttctggacctgcacagacatcacagcagctgcctgtgcagatcccaggagcccacggacacccccaagacgcacgcaccaagtctgcacatacagaccttgctgaggcctgttcctgtttgtatacaggtccctcgtccacatacaacctcaatgcactcacacttcccgacacacaccgacagacaaacccgaggccttccccactagaacaccagcctctccagggtagcgccctgttgaatttgcccactgctctttcttcaatgtctgtaacagtacctgacatacaccaggtgctcaggaaacgtttgcgctgtattttttattctttattctttggctgcaccacatggcacgcgggatcttagttctctgaccagggattgaacctgtgcctcctgcaatggaagcctagacgctttatcactggaccgccagggaagtccctaaaatatgtatttttattaattcattcatttggctgtgctaggtcttaattgtggcatgtgacctcttagttgcggcatgtggggtctagtttcctgaccagggattgaatggaatccattggaagcccacagtcctagccactggaccaccagggaagtcgtctgttttataaatgaacatgtgtgcacacctccactcatacacacacacattctataactagttaccctcatcctcactccatccttgcccctgtgttcaggtgctacgagccctggagagggcaacaccaggaggcttgtctttttctggcctgcccaatcctgcacagccagagtccaagccagggtgagggcttgg

SEQ ID NO: 50250 - DNA, 1168 bp, Bovine  19866880601592
  misc_feature (1)..(1): n is a, c, g, or t
nttaaaggcttttgtaaaatacagatatcatttaatatgactgactctctctagaacctgtatctatgccaaacatttcttcaaaatccacaaaaattgtagacctgcccaaagtaagttttcttaatatcaggttttttaggtgtattctccacattttttggctcagaggttaaagcatctgcctgcaatgcaggagatctgggttcaatgcctgggttgggaagatcccctggagatggaaatggcaacccactccagtattcttgcctggaaaatctcatggacagaggagcctggtggggctacagtccacgggattgcaaagagtcggacatgactgagcgacttcactttccatatttttaggtgcattctctgccattaagcagtgtaatgaatttagataaaataagtctatccgtactataaattattcaaaatcaaaaagtaactataaaagagaaacctcatttaagccaagtatttcactttattcctataacgaagtgatctctcttttacagataagctttaaaaaaaatagattatcttgtctgcaatcacaaagaaaattcagaagaggattaggactaaaatatgtgtcttagtcctcggtgaatattcttttcactatgaggcttcccggtggtgctagtggtgaaaaaaaaaaaacctacctgccaattgcaagagatgttagagatgcaggttccacccctgggtcgggaagatcccatggaggagggcatggcaacccactccagtattcttgcctggagaatcccaggaacagaggagcctggcaggctacagtccatagggttgtaaacagtcagacatgactgaagtgacttagcatgtatgagtggaaagcagtagtttgagatttttttttaagtcctattgtagagataaaattcccactaaacatcctgaactatttggagcggtcttatgtgtgtgcaaccttcccttacctcgcttcagggctctggggctgcctggcccactccgactgcgagagtctgactccgaggtccgggagctggatcttgaactgtcttcttcttctgacccagaggactcatccaggaacgggctgctgcttatctgggtcgccttctaaagagaaacaaaatagcctccctgtgtgtccatctctaaa

SEQ ID NO: 50251 - DNA, 2731 bp, Bovine  19866880623757
  misc_feature (1)..(1): n is a, c, g, or t
nagaattttagtatatcccaaatattacatgggacatacttatagtaaaaatgatttgctcttagtctgaagttcagatttaaccaggcatgttgtatttccatttgttggctgacaactctatttcagggccaggaggcagggggctggtggagaagtaggggtggtggggggtcatattccacccaaggacagctgcctcaggtccacccaagccagcttgtacctgttgagtagttcctggggccagcctcacgctgggagtagtgggagtgacatgctctgggtcccacggctctgcctagacccacatgctcgtttcagtgggcctgcatgtgggagcgggttactgcacggggtctggaaaccagactgatcagtgggagctctcctgcagatgtggccgctgttttccaaaagtcaagagataccattgtgatgaataaaatgcacatttgtttaaaggcaagcattacataacagcttttggctcttagagctttctctcaagaaaataccaaaatgtacttactagggtagaggaacacttttggagttttcatactggaaaaaaaatctaaggactattaggactgagaactctaggacatgacttttcatggaccatggacacagtggacctctgctgaagcctatggactttttcttggtgttttcaaacatatacaatcaaatccataggtcacaaaaggaaccagtggtgcaaaaatacagagatcaaaccatgaaggaaacagctttatgaaagagtaacaggcttctttactgacactttggtggtggtcatttaaaagtagagatgggtagatatttcaaaagatgggcaataatttcaatgtgatctcaaaatatctgatttctactggtgacaacgtcacagtttctgcaaatactactgtagattgttccctgcatttcagttctctgctaaatttcagtttgaggcttgtgtaaatacatattgttttctcatctgaagtcatggatccctgaattctacccacaaaccttttgcggtagcgcccaataggcattgggacctggacattctggagacaaggcccgaggggagggctttaggcaatgctgataacccagtgagaaggaggccctggtttattttaaatttaagtggtagaagaactcacacaatacaaacacaaatgtaggacttccctggtggtccagtggttaagcatccaactttcaatgcaggggacatccatccctggtcaaggaactaaaatcccacatgctgcagagcaactaaaagagaaacccatcttgcaaccacaggaaaaaaaaaattattccataaaaaaaaaaataaaacaaacataaatgaagacatgaacgtacctgggcaacttgataagcatattgtcacaggaattaggacttgagataaggatgttcagagttcataaataatgccctcttgcaggatgtcaactctcaccccagtgtgactgcctgttaaagcctcaggctgagctaatcaagaatatctgcattccaaatattcaacattggaattaatcttgagctggctgtggatcgaggccttttatgtatgaattttaattttttccaggcttattgagatataattgacacataacattgtgtaagtttaaggtgagcaacagtgatttgataaacgcatacactgtgaaataataatcataatcataataagattagccaacatctatgaatggacagggaggcctggcgtgctgcgattcatggggtcgcaaagagtcggacatgaccgagtgactgatctgatctgatctgatgaataacctcacataactataatttttttcttgtgataaaaactttggagatctactctctttgcaactttcaaatatacaacacagtcatgtgaatttagtcaccctgctgtatatcacatcccaagaatggattaatcttataactggaagttttactttttgaccgccttcactcattgtccccatcctccacctctgcctctggtggcaaaaaaccccaccaatttgttctctgtttctatgagatatgtttttttagattctacaacaagtgtgatcgttgtagtctacaactccttctgacttctttcattaggtcctggttctggaaggattatgggtacatttggaatgagggggagtgaggcagggagggtggggtaggtccagtctgggttttcccctggtggggtgggaatacacggtagataagatgcaggggggtaggaaaccacaaggaagtttctggaattctgtgccttttgcctcctttcttaatttcccttcccctcttctgagccctcctcccacccagaagcaggatccaattttctctctcttttttttttaaatacaactcagaacaatttaatctctggggatttttctgtggagggaaactagaggctagttgtttctgcagttgtaagagaaatacatacatacatacatatatgtgtgtgtgtgtgtgtgcgtatgaaaagaaatgcaaaaaagcaaaatggctgtctggggaggccttactaatagctgtgaaaagaagagaagtgaaaagcaaaggagaaaaggaaagatataaacatctgaatgcagagttccaaagaatagcaagaagagataagaaagccttcttcagcaatcaatgcaaagaaatagaggaaaacaacagaacgggaaagactagg

SEQ ID NO: 50252 - DNA, 1480 bp, Bovine  19866880649692
  misc_feature (1)..(1): n is a, c, g, or t
ntacgagcctctggtttttaaaatgattaaggaacaaatcccacatgttctttcctttttttctgtcctataatttgagtctttcttccacagttcccccaaattcagagctcatcatatttcttgtttgcaaggtatacgacagagataactctgaggtttaatgtatttatgtaaacatttttcaaagatgtcaagatttataattcaagaaaatgttctgtgaaagaatttgttttctgattacaaaatgatttcctgcttttgaaaaaaataacaactttctatttacttagctggctctgaaagtcccatggagatgactattcctttcaagccctaatatcgcttttccaggtgcaggactttgactgatttcaaaggtagctttatgcagagaaggaatctatatgctacaggagggaataagacagagagccctccccatcttaacccctcctgctttccccacaaagaacaacagagtgaaacagaactattgcaacacagatgagacacccgaatagacatgacaaaaagattttcacatgcctttgacttcctttttgcaaccagggtataagccaatctcggtaaagacaggaatctgtttgacaaacacaaacacaataccgagcacccaacacccatatatgtgttgttttttccaacaagccattcatttccctaacactcaggaacaagagcaatagccacaagcaccccagcgttagagggttttgactttcccacagtgtttcacatattttgcagcagaagaagtgactttgagaatagcaaaggcagcccagagacagagtaaaagactatatgttgttgctggacagactggcagaacgcaagccagaccctttagaggtgagtatggggaatgaggctgggaggcccatttgtaccgctggtagaagagccaaagaaacaatgtcaatctgactgcttctaagtttggccaagagtggctcttcagtaaagaaaactggatgtcccctgacaatccgaaccttccttctaactcagctgcatcccctatgcatctctgaaaagcctgttctgcatgactcattactacagattcccttcaaagaaacagcggagtcgcacagaactgtgtgggcctcagggtaccatctttataaccaagataatgacccctacccctcttcctcacagggatacagtgaggaccaagggagatgagtgcttaggagtttgtactgaagaaaccaccaacgatccataatgcacataacagaggccagagcatctggtctgggatgcttgggagttgcaccatcttttcaggagatctgcaaaattaaactattttcaaaatgacactgagacattactttcctctttcattctcattctctcccaagtgtacagtggagtttgccagaggctacaaggtgtgtgatgatgtcaccccctctaatgactaatggaatgtgtgctcatg

SEQ ID NO: 50253 - DNA, 1373 bp, Bovine  19866880673794
  misc_feature (1)..(1): n is a, c, g, or t
ntccgaactataaatgccaagtaacgaagaaaccacaaaatgcggtcactagcagcctggtactgggcagtctttcgtgcagtggccgtaggtccattttcaaagggaaaaagggcaggtggcttcccaggagtgtcaagatttctctttctagtaactagtcctgggtatgctctcctattattccacacaccctggagacgggggacagcaacgcagacaagaaagtccccataaaagcctttgatttggaagctactggaaaagggatccctctctgaggcctgggggttctgcaggaggggcagactcctgggaagctgaatcaacagaagctctaaagcacctcttcctgagacagggagtggctttcctgactcaggcttgagtgtgctgtgggggcgggaaggggcgtggctggagggctcaggcgtgctccttctatacacgtgacatcgtgcggttgtctctgtacctcagtttcctcacgtctaaaatgaagggtcaggcttccctgatggctcagtggtaaagaaacctgcctgccaatgcaggtgacataggttcgattcctgatctgggaagatcccccatcctgtggagcaactaagtttgtgtgccaagagtacaacaaagcttgtgtgctcagagtactgagccagtgctccagagcctgggaacaactcctgagcccgagcgctgcagctactgaagcccgtgcaccctagagtctgtgctctgcaacaagagaagctgctgcaatgagaagccctcatactggaactagagatagactccactcgccacaactagagaaaagactgcacagccaaaaataaacaaataaaaattttaaaaaaataataaaaaattactataaaatgaaggaccactagtacctcttattaatgcacacaaaatgcttggcacagtgtttggcatggagttaagtgctcaatacaggttgaccataattattatgacccctacaagggagatgatactgcaaataatgtttcctgaaaatgagaatacaatgggaatcctgtatacatttcaggggtaggaaaacagccttgtaagatcacttacatgatgtgggcaagatggacaaaacctcctccttgcacctaaaatattttttggaaactgttatgatgtcatttctttatttctttgggattaactgatccttttcaagattcatattttaatatgtgacacatacagataattacaaaaaaataccaggttatataaaaattagtaaaatgcagactaggaaaggaaaagcccacacataaacccaccaagagaacttaaacttgagagtcagtgaaaataggtaagatatttgtttaaacacttggtaa

SEQ ID NO: 50254 - DNA, 973 bp, Bovine  19866880697457
  misc_feature (1)..(1): n is a, c, g, or t
nttgttataatgtgtggatattgtgttcctgtgacagatctcttcttggaacaaacccctttaagaggtcagtcttataatatgaacagagagtggtagaggtttccgcctgtgtgtgaagtacgaagacatcactgtggtgcattcattcctcacttccaggaagtgcacatgctacctttttttcaattagaaagaatattattcctctcttttcaaagacccttaagactgtaggcaaccagtgttaagtgtttcttttgaatccttccacaaaatatccatgcatgaaataatcctaatactaatagtagcttttataagtggttatttcacatgttttctcattgaatcctttctcaagccctacaagatagatcctattgtcatccatatactgggccatagaaaagttaggtaagtgacttgccagtggccatagggatagtaaaagcagaactaagacctgagctgagcccaggcaccctgcctcctgaacacctgtcttatgagagacagagactatgtgtgcatgcattttgttttttgtcactgatgaaagcatactccacacattgttttgccccttgcttttttattttacttaacattataccttaaagattgctccatatcagcatgttcagatattgctaattgataggaaaatatttccacagtgttgaaattaagaggccatcacctttatgaatccaaagaataaaaactaagtcctcgcaatactaaatcagacccgacctgaaagacctttctttaatattcaggaagataaaatctaggaataggttttaaaaaaaaaagaaaatgaaaataagtgaaatgaagtctgtcttttagtgtcccagtattttttccttccctttgttattcctcccccaaattcccagagtcatgatttttttatgacagtgggtaccagttggaaagggtgatttgacacacagatcaccaa

SEQ ID NO: 50255 - DNA, 2536 bp, Bovine  19866880729798
  misc_feature (1)..(1): n is a, c, g, or t
ngaggcctggcgtgctgcggttatggggtcgcaaagagtcggacacgactgagcgactgaactaaactgaactgagagtctctgcccacactgaatctggtctgggactgcaactctccttaaccatagaatatagccaaaggggtactgcttcagtgttggcctaagctttagtgaggtgtaggggctcccatttttgcacttttgagagccctgtgctgtcaatgtaagaagtcttgtgctctgctggagaattccacatgaagagggagaaaccctgagactagttggagacagagggaactttagcaatcctagagtcccagctgagcccagcctttcaaggtcctggccagggtgacagacacaagaatctggcatcttgattcagacagtcaagtgcccagatgactgccatcccaggtgccatctgacttgtagcaccatgagagaccctagcgagattgatagaagaactgtccaggtaacttataaaatcttgaaagatgataaatatttgttgttcattttaagccactatgtcttagagtggtttgctatattgcagtagacaaccaaaaaaggaagcacccaggatagcgcctggcatacagtaggtactcaatgaatattgctgactaaatgaatgaacctcttccattcttttcctagggcctggtgctctgagatgcctcccagccccctgctcacccctctgcacctgccttatcttattgcccagggactactggggctaaagtgaaaagggggcttctgctgggctcttgagtgcacaaaagcctgaaatgacagtttcctttgtgagaaaaatcccagcctctggatgtctaaggcaatgtcttcccactttttggtaaaacaggcaggtttactatatttattttttttttaagtatttatttattgtctgtttgtttagctgcatcctgtgtgtcctgcaggatcttcttatgccacatggactctagttgtggcacaaggacatagttgctcctgcagcatgtggggtcttagtacccagaccagggattgaactcgtgtcccctgcattggcaggcagatcctttacgtgggaagcccagaaggtggattgttaaccaccgaaccaccagggaagtccctcgtctatatttctgaagaggaaagacgtgagaatcagcttctggagtccatctaccctgggtttgagtccatgctcctctatgtcttgactacgtgacagtgaactgctgatttaaccaactttcttatctgccaaatgggctccagataaagcttcagtgcagaaactcaacatgctatcctctgtacagcacctgcagcacagcagataccacagagctgtgagtgtgtctaaacaagggtaaatctcagagacaatgcagagcaaaatatgcccatggccagagcacacaccatttgtgattccactgaaacaaagtccccaaaaggggaaaattaattgatggtaagagaaagaaacttctgagagtggttaccactaagggggggttattgactatgaagggctccagggaaacttctagggtatttgaaatgttctatattttgatccattgagccatgccatttaagacagtttgatgcctatatgttacatcttaataaaggagttgagaaagtgtcagtgtatcatcccttcactcaggcatgatctttaggagtttcctaacttccaggccttttgcccccacggggctgtctaaccttgcctgctcacccccaagtccaccctgagagcagccttgggtgacgctatcctagcgcttggcgtaagttggctgtcactgccaggcttgacctggggccgattccaggatgagaactcagttggaacatgggctgactttctgctcttgggacgggctctggggcttttcaagatctgagtggggcatcctgcttcaggatcgctggggaggcagcggtgggatcctcgatgcccttgggagtttgtgagtgggaagggggtctttactacctgccagcaaagacctgggggctctaaggggctgctgcggagtgtttggaataaatgagcagcaggatcacgtccttggcgtggcaggcccagttcctggaaggagagccgggaggggtgggcgctgagggcgtccggactgggcagaaataaagagcttcttctgctcacaagcctgctatttgaggacctggagccatgacgtccctcaaagtttccattctctgtgctgcagctgttggttacgtgtttcattcaaaatgctttgcaggaagcagcaggctccacattccagggcttttagtcattttttctctcagagctttggggccaggattagaacgttcttcaaaccacactgtcctcggcaggactcccaagaggaagtgggtgggcccctggaggatgagaacatgggccccaattcagagatggaatgaaaaaagattaaggccagcacaagtaaactcctagagagaggcttagccggtggcccacgtagggtgagggcgg

SEQ ID NO: 50256 - DNA, 1540 bp, Bovine  19866880749944
  misc_feature (1)..(1): n is a, c, g, or t
nggtgagagaaaaatagcttcgcagttccagacatccgtcctaccccatactatccagggagaaagagttccttttgcagaaactcccttaaagactagtgattagtgctctctcattggacaaaattaggtcacgtgcttgtttctgaaccaatcaacttgctgcttgacttcagccgatcacgatctaccactggagctgctactgagttaaattgtgtgacttggacaatttactgagccttgttctcctcatgtataatacaggatgttaataatacctagtgttttgagacagtataaacaaaatcaaaatttagcacagtgcctgacattctctgcatttgatcaatgatagccaccaatagctattagcactaattctaaaaactagggctccattctcaaacctggagtatgaaagctggactggggctttcagtttgaaactaatatcggtctggggcctgttcctgagaagagggagtggtaccaacattaaacttgacccccagccctaggaggtaaactgaggcagtatgcccatggttcagctgaaagcacaggggtccagagagatccatgctccccctaaccctcagcaatcccaagaataaagagacagaggtgattctgcccaaacatgactttcctctcattctgtgacctcccccggggatcattcgggcccctggggcagggctgtccattaaatggccacattcgatgcaagaggagcagaaaggctgcagagcgccactctggctcagctcatggtgggcgatggggtcatatgccctgacaggcctttacccagggagaaaaatctttctaatagcccagaagaatgccctaatctgacatctcgtttagcagattattgggcccggctttgatctctactgggcataatgagtgcgcctctggggccaatcagcagtcattaattagcacagcggcctgcagctgggcctgcccaggaatggggtcctcagcctgcgaattgggagttgagggtgatgtttgtgagcaagtcaggcccagactgaagctacgggatagatcagggtcaccgggatcagcccccgaggtctctctgggaaagtgctctaatctgggccttcccatgacacatgtggcacaccagggaccaggcatggctcccatttggcaggacatcacccgacagtgtgagcagagaaccaactgggcacacggctcacggggtgtgacatcgcaacacagcgcaccacagtgtgcaaggcacgtagcagaaaccacccggctcttcatctagccctctcgtggaagggcagactctgcctctatgactgattgactcttgaccaccatttctgtctcttcttgggtccctagcaaccacctatttgggcttttgggaccctgggagatgaggtcaaaagatagtttttgagtcctatggtttcatcatctctaagagcagtggtactcagccttgcagtcctgtattagggttggggttgcaacaaagctggaccaggaacacagatgaggaggg

SEQ ID NO: 50257 - DNA, 1585 bp, Bovine  19866880810167
  misc_feature (1)..(1): n is a, c, g, or t
ntatatgactcagtaactccaatgttaagtatatactcaagagaactgaatacagaagtccacatcaaaacttgtacacaaatgttaatagcaacattactcaaacagtcagaaagtagaaacaaaccaagtatccatcatcagatgaaaggataaacaaaatgtggtatatccacacagtggaatcttcctcagccacagaaggaataaagcactaatacatgttacaacaatggatgaactttgaaaacattaccttaagtgccaagtgaaagaagccagacacaaaaaatgacatattgtatgattctattcatataataggcaaatctcaagacacagtatgttagcttagtggtcgtcaagggctatgaaaagagggcaaaggtgatcaactagtaatgggttgggagcttctttgtggagtgatgaaaatattctagaattacacagtgctgttgattgcacaaccttgtgaatacaccaaaaacccactgcactgtacacttaaaaagtaacttttatggtttctgaattacacctcaattatagagagtatatatttacaaatgaataaacaaaaagtaacagtttaagtggatgtatattaataatctattgtttgtggttatccctgccaagaattccaccattaactcaatctagagttaattgttaatctcaagtagcagacatatatttcaccaagagtactgtgctatgaaaatgacacatcaaataaattctgttaaacacatctattcgtttctttagttatgtaattacatactttcacagtgaagtagcaaaatgttaggaatattattggtatttaatatctgcattccttattaatagggtcattattttaaaaatccaaaactatagattggttggctaatggcctatggttggctaacggttgcctaatggtcctgagatctagacacctgatttcctcatttcatcctgtaatttcagttaatataaagtaactgctatgttaatgcaccagctttctaaagattctaattttgaacaacggtcaccatcttttcccattactactgattttacagagtctaacaatatacatagctttgagagccatagaaagaaagaaaaaagaaagtgaagtcactcagtcgtgtccagctctttgcaaccccatggactgtagcccaccaggctcctctatccatggaattttctaggcaagagtactgaagtggattgcatttccttcgccaggggatcttcccaacccaggggatcgaacccgggtctcccgcattgcgggcagacactttacattctgagccaccagggaaatccccttgagagcctatgactacctgctaaataaataacatttttagatttcgaatttaaaattaatctatcttcacagcagcggacaggaaaaagtctttgttttccaaatacccccaatgacttttggaaacatttactgacacaaaacgaactgtttacagttgtggaatgaatgctcttttctctgaatctttgacttcctgtttctcttacaaatccctagagggaaagaaaaagaaaataaagaatt

SEQ ID NO: 50258 - DNA, 1388 bp, Bovine  19866880830989
  misc_feature (1)..(1): n is a, c, g, or t
nttggcctttgaagggtaggccttcctgaggtggacactttaatcgcccccaattaaaccattgccggaagcttttaacagccccatacggcctttcaaggactgcccttttgttagacggccaagctgtcatgtaaaaggagagcaggctgggggcctctgaccactcaccccaggccccaaggccagccagccccaaactcaggccagcttctgaagagtctgctgctttgcgaatcaaaggctgaggaacctgctttgatctggggggaaacccagcccttccttggctccccagattcagttccctcactgagggtgtgggtccttccatgaaggcttcacccacacagtttccaagtctggggccagccaggctgatccctggggttctgggagtctgcccctcacttcaagaaacaggtccactgagatggtgaaaacattccctgctcctactgcccgccttgggcaaggacacccccgccccaccttctccggctactctagggtcttctagcccttgtgacagagtgtagtcctcaaatgagtgtcctctgggaccctgtcagaaatgcagacttccaggccccacgcctttcagacctactggatcagaatctgcttttaaacagctcccacaggtgaagttggagaaatactgctgtagtatttcatcctctctctgcatttcctctcctactgcccccacctctgcccccaaaggcaagattaagtgtagaaacgatactagccatgataagttatggacaatatagccctctgctttgcagactctacaacatatactttctggaaagtcaacaacaaagcccttcctgtcaatagcagtttctggaggaccccagatggcaggcttccgtttggtcatttagttaacatcaaaactctccatcctgacttccacacttgatccttcatttcattctcagaactgcccgaggaagagaagacaagcacccccattaaacagcagagaaaactgaagctcaggaaagttcgtgaataggctagaggtggtggtgaagttgagggggcgggtaacctagaaaaccctcctggggtctccctgctcttaggtccagcagggctcccatccacagctatgacgtgtgtgccagagctgcagcccacttcccacttcactccccaaaagtgtcctgggggtgggcagggccccctgtgtgggaggaagccaagcctctttctgttacacaaaagccccctacaggcaaggaaaagccagaatttcccaattcctacctcctccccttcctcctcacaaaagctgcagttcatccagaatctatgacacgcatgccagtcttcaggcttagcgctttctctttcaccatcccacttagtcc

SEQ ID NO: 50259 - DNA, 2259 bp, Bovine  19866880862063
  misc_feature (1)..(1): n is a, c, g, or t
nttctcccccaaattgctctaaaatttcatgcaataccaatcaaaaaacatcttgtctattaccttactatttattctttcatatgaacttactgtcatgtgaaaaaatatttttaattaaaatttttatttgcaatgtattaaacctatggttgttttatttggccacaccatggagcttgtgggaccttagttccccaaccagggatcaaacctggggtcctggcagtgagtgccgagtcctaatccatgaaatgccagggaattccctaagcccatgtttaaatttggagaaaactgacatctctataatatgcaatatccttagggaaaacccaagagaatcaatggaagacatattacaaaggattttcacaaatgatattattacaaacgagagtgaggtgactgagcatggtgtaatatataacttaggagtacaggccctgaaactctggatttgccactttctagcagtgagaccttgggcaagttaacttctctgagctttggggtttcatatagtacaaaacagtactcactttctaggactgtaatgaagatttaatgaataaatatatttaagtgcataaaatggtgcttgacaaaaaggaagtataatgtaagtgatgactaacagtataattacaaagtgaatatttatagaaaccaatcaccttcaagagtaaaaacaagtcaaaagataaagcatgagaaaaggattcatgacgacagtagtaagaaatataagagaaatatgtgatctacatgaaaaaagctttaatacacaatgccactgaggaatggaggagaaacgaatggaaaggcatacggtgtcttgaggaggtcaacagcataaaaaggatgttatgcacggtgaataatttaacgcattaagttaatgcaattccaataaaagtatcaatagaatggaggatgggaaaaccaaacaattgatttcaagttcacagggtactgaaaaagaaaagtaatgaaggggaattagtctaccaaattgcagaacatattacaaagttcttgtgagcaaccggtgtataaacagacaaaccactcaatgtagcagactagaaacctagaaaataagagcatctgaatactgagatttagtgtatgatagaacgataacatttctgtcaggagtgataaaatgtacttttcagtaaatgaattcgggaccaaaacaatcatgcaatagctgtccattaatttattttttaattcctattgataaggctcaatactcttaatagtattttaaaatttataataaaaataataaatgaaagttatcacttactaaaaaattatactatgatagccactatattgggaagttgtacatacaacatctttactccttatatcaacctttcaaattatgtgttatgaatagtttatggatgtctaagcttcattttagaatttaagtgatttgccccaagtcaaataccctcaaagtggaaaaagagtacatcaagcctagatcccaaacctctttccatataccatcctccacccataaaataacacaggtttcaaagaaactctaagcacgaagcaattaaaaccatgggatatgattcaatttcttatactataatggaaaagaatagaaaaaagaattagatctatatgtataaatgtataattgaatcactttgctgtatagcagaaattaatataacattgtaaatcaactgtacttcaataaaaaagagaaaaaaacagtgcaagattataaattgtgcatatcaagtaggaatgaagtgactacaataaaacacagtatcttctctttatgctttttttgttttaaaatggtaatgctggggtcttatttccactctgtcaggagagcctggcatttcagccactgaataatagtcaaggtgaatccaccttataccaaattctttccaataaagaagagagttaaagtgaagctacagtgagcttcaacacaacgtgacactaaggaaaactttgtaactgttttcattttctacatacaaggtcccaatgtgggaaaccgaaaatctgtatgccagaagaataaaacacgggttattttgacttccctctgctgggcaataagcctcttgaacttctatttttggaaatggaggtatccctttaatcctgttacagaactgctgatggtggtaagacggcagaggaaaatcggcaccgggcctgtaccagcaccgtttccaagagcaggaataaaacggagcacag

SEQ ID NO: 50260 - DNA, 1441 bp, Bovine  19866880885061
  misc_feature (1)..(1): n is a, c, g, or t
ncttccctccctaacccggtacccggtagtcgactacagaccacgctgtgagctaccgagacaccgtagagctagaccagcttccgggactcatcctgactgctgcgactcttctcagacgctcacgagcacgaggtttggcttccaggcgtcttctttgccagagccgcggtagtgcgcgactctccaccgctcggccactttactagggcagccaggggatgcacatcaattcccgttctatagttacgcgagaatttggcggtcttgaaactgatttccgaaagcttaggtctccatggagatagcactttaaccattccggccccccccccccccccacggcttgtcattccctagactccacgtggttgggaaattgtccacagaatgtttgtgggagtcagccagaaaggtgtaggtttcactggagcagcaatcataagggaagcagccagtggggagcaggaggagtataatttactgagcatcttctggccacttaaggagtgccttaaggtgggcacgagattttccactattgggaggacaaacgtttgggcatccactaagcacgcataagcaccaaacctctttgtgcagtcttaagggttccaagataaagttctgcggcagatttgctcacgattcatcacagaatcgtctccccatttgcttatctctatcccttctaaggtttgtatgttggtgacttacatgggaagtgatccgtagtgcttattccccttgatttaatcatgtcactttgcaaatttttaccttgtcgatgcctttctagcagtgtcgatttttattaccattttctattaagtgggttttcctatttcactgctgtattaatttcttaactttgcagagggaccataggttcctcagtgtcaggactatcttgtcacttggatatagaatttacttaagatgacaagtagtccacttttctgctgttaaaagtacacatactttttagtacatcactgataaaagtttgttaattcattagtttattcatcaaaattttttaaggacctgatatatgccaggtactgttttgggaattgatgattaaaacagtgaataaaacagattaaacttgctgccttcattgaatatattactaggggagacatatatgcaaataaacaagttcttgtaagttcaggtagtagtaagtgctataaagaaaataaagcaatagaaatgacttatatgtgagtagaagtggtggaattttaaatagagtgtccatggaaggcttcttagaggaggtaatgtttgggaagagacctgaatggtgaggagttggccttgcaaagatttggtggaataagcctaacagtagacatatcaggacatacaaagtcccctagatggtgaagagaagattgatttgaagtgaactgcaatggaaggaagggccagg

SEQ ID NO: 50261 - DNA, 977 bp, Bovine  19866880910436
  misc_feature (1)..(1): n is a, c, g, or t
nttacttcataggttgttataataactaaataaatcatatctgtacagtgcttagtacataataaatcaatatttggtatttttattttaataccagtacttggtatttttatgggtgggtaccaaaaataaattttaatccagagaaaaaaatagcgaaaaatacagaaaatatcatgaaaaagtgttattcctattttggtgttgaatatatttactgggaagccatgagtaacttggcaggtttatcctctttccactgtataaaacacatatgaatcattccatctctgagatctgtcaaaggatttaagacaaataaaattacagaagaccccaaaaaaaggaagaagaagaaaaagaaaccacatctaaaacagcaattctgaaataatattcctctcaatctttattcactgacaaagaaaaaagaaaatttggcaactaaattaatgaccaaaaactatttacaatcttacttacagagaaaattacacttttaaaatttacaaaatggacactcacaaagaaatttcttatgacaagcctactgaagaacaaaacaaatactggcattaagaatttaaaggtcaattaactggaacccaaataagcataactttttataacttcttataaagaaagtccataaagaaaccaagagagtacaacagccaagggaaccaagaaaattttgagtaggaggctgtggtcaacagcgggccaactgctgaagggctgaggtactgggacacttggaagtgtccagtgaggctgggcagcaaggttataattagtgatattgctaaaatcattacatgggggacaatcatagtacaacctgggaaatgatttttacagagagaggagcaaaaggtaaagcatgagtcactgactctgagttaggataagctttcccaacttggagataatcaaactgggatttttttttccaagttataatttttattttaata

SEQ ID NO: 50262 - DNA, 1201 bp, Bovine  19866880913729
  misc_feature (1)..(1): n is a, c, g, or t
ncgcctacacccctcctgatcgctaccctttatactcaggtccccctcctgggatggggagccacaagagtccatgggagaaaacttattgaattaaacagaggacgtcccagttgaatttgaattttaggtaaacagtgaacatctttccagtgtacatatgtcccaaatattgcacggggcaccttacacaaaaaagctatttgtggtttatttgaaagtcaaatttaactgagtgtcctgtatttttatttgctaaatttggcaatcctatactggaggtcaaactattctttggaccagaactcaaagacctggccaatatgtacactgagggtcgggggaaaaaaaatcaagtgtaaggtcactttttgaaatgaggagtgaggcagcacagagatttgccaggcaggatggtagccagcaattcaaaatgtcaattctcaagtcgtctccttcttgaacgatttcctgctgggaccatgtcagtggccccctctccctgccaagagtcagagaggctaaaaactgtgcacagaggcacgctgggactgtgggtaacctgggctgtgtgcggcttccgtgagattctgaaatttctgaggtggagagtgagcttgcggaacactgagggacaagtagagccaaaataaaactcagtatataatctagggtgctaaaaaacattaacctcaatcttcatcactatcattttccgagggacatgactgagcccaggccaccgtgctcagggggaggggtaatgaagctgacctcaaccggaagctccaggttctctgagtgcttggtgaagaggacacagcaggtgaaacagaaatagtggcctcttccgtgatccactgcttcgtgggtccactttgctccaaactgctcgatgctgcactgcaattcaggcagcatgtgctctgttccaccatggcccctgtttgctctgatggaacacccgccagttcttgcagtcatgctccttgccaggtcccgggaggctccagagactgtaattcataatatatggccgtctagagcttccctggtggctcagttggtaaagaatccatcttcaatgcaggagaccctggttcaatccctgggttggtaagatcccctggagaagggtatagcaacccactccagtacccttgcctagagaatcccaggacagaagagccgggggttacag

SEQ ID NO: 50263 - DNA, 1932 bp, Bovine  19866880917736
  misc_feature (1)..(1): n is a, c, g, or t
ncatttggaagtgtttccatcgtaaggtgatgttattcctgaaaactatgtaaatatgtcaactattaaaaattctatctacacagttaaagaaataagcttggacaattttccaaacaaagagtgtaagaaaattttgaatcagtttgctaaaaatgtaaaaacaaagctttccaagtattttgcaaatataataaccaggaaaagtggaaatttactagctaaatgtcaaagtaaattgcacaatggatggatgggagtgaaatacaaataccatggtttaatgggtccagaatgatacataccttttattagagaactatctcttatatcatagctgaaggatatcagctatggccattatgaataccaagactaaaaatgtataaacattcacttagcaaatgattcagcaatcctacttctacgtatttcctcaagagaaatgaaaaacatgtgcacacaaataccagaatgccaatgtttatttgctttattcacaaattttctttgttcacaatttattcacaacagttttattcacaattgccccaactggaaacaacctacatgtccatcaactgttaaatggataagcaaattgcggtacgtccacacaatggaatactccttagcaataaaaggaacaaatgactcatatacacagcatggatgaaactcaaaagcaatatgctaagtgaaagaagccagacacaaaagatcacatactctgattccaattacatgacatgctgggggaaaaggcaaaaatacagggaaagaaatcagactagtgattcctaggggttggaagaggggagtgactgaaaaagtacataaaagaaccttcaggtgatgaaaatattatacatcttgactgtgatggtagttacaagcttctatatacatgtcaaaactcatcaaaacatacacttgaaaagtgaattttaccatacataaatcatattttgataaacccaatgttgaaaaaaagtgtttagcataggtgctcagtcacttcagtcgtgtccgacccttggcttagcatataatgctacataaacattgaatagaacaaatattttaaagcatatatagaaatatacaaccaaagggaattgcctgagtctccatggttaggactcagcattttcactgctggggcccaggttcagttcctggttggggaactaagatcccacaagtcatgtggccaaaaataaattaaataaaaaataaaatgaggagcttaaaaaaaaagaagtattacaaccaaaatattatcagggataatctctaagtggtaaattattgtgatctttactttttaattttgttttctgtttataaaagtaagcagaagtttgaaaaactgactctaacattcagatggaagtgccaggacctagaatcatccaaacaattttcgaaaaatgaagctggaaaacactacctgatttcaaaacttattataaggttacggtaaatcaagacagtttgatattactggcataaagatagacatcaatggaacagaatcaagagaccagaaataaacctttatacttaaaaaaaaaacccagctttattgaggtaaaattgatctataagtattatcctctacttacgtggacaagtgattttcaacaaaggtacaaaggcaatgcaatgcaaaaaagacggtgttttcaaaaaattctgctgatgcccatgagcaaaaaagtaaccctctatctacactttgcaccagacacaaaatataactcaaaatggccatagacttaagtgtaaaatttaaaacagtaaaacatctagaataaaacctttacgaccatggagtaggcaaaaatttcttagctatagcaccaaaagcatgacccatagaagagtaaattgagccgtggactttatccaaatttatccaaacagaca

SEQ ID NO: 50264 - DNA, 2748 bp, Bovine  19866880953821
  misc_feature (1)..(1): n is a, c, g, or t
nttgggcagggcaggaaggaggcccattaacacttcggccggaccgcgcttcctccggcacctcggccagggcggacacaggcgcgtttgtcccgctttcactgtggcgctgtgttcgcagcagcccctgccccccagccccaggtgggcggtgttgcccgggcacaaacgtcctttatggatgggcagtgctggaggaaggcaacacctcccgcggacagggaccaccccccagaattccgaattgaccctggagcctcctcccctggcaaggctggcactgcagggagcctggtcagtgggggcggaggggcccggctctgccagggtttgaggggcaatcagggggtgcgtcctaggagaggagagggcggccacagcccattccttccaggtcccgtcttgggggacagtcctctcaccctgactgctgccacctcctgcggctgaggtgggggactttaatctccttgaggggttctttgggagggccatgccttggtgagacctgagaagagggaaagcaggcagactccaactattccacatccccctctcccccaaatcccttgaggagtgtttgtttttttgtttgtttggttttttttaactagatttcacacctccccagttccccctcccgtgacacggcgcagcatgcgggatcttagttccccgacgagggatcaaaccttcgtcccccttaatcgctggactgccatggaagccctgaagagtggggtcttaagcattcagggacaacctgaccatcccctccatggagcgcagtccttgagagcctgggactgaattctcggagggccttccccgagcagaccaccccgccccacccccgcgcgctcttcctgcaaccagctggcgacagaaatcacacatctcccagacaaactctcttcaggccccactgaacttccgtcccccattcacacagatcttcaagcccctctccccctcccaggccttttgaccgtttaatccattgacaggtgcaggcctaagccggctgcctggcagcgccccctagagttggcccatggacctgcccccaaagggaaggtctgactaaaccatctctccggagtccagcaggaggtggggaagggagcaggttgctgagctttgttccctgtgcacgtgacttcaggcttagccaggtgcgggtagcccctatcagtaggattccttggcttccttttatatatggaaagactgaggagaagaggcccagcgttctggggtttgcagtctggctgggagcagggtcaggcgggggcctcacagtgggggagagacccacatgctggtggaggggcacccttcctgtggtgcctgaacagagagctgcctggtggtggtggtggtgccctgtgttctctctgctggactctgcagagtgggtgacccctggggatagagagaacaaggccctgccttcctttccctgtctcctgaaaacccctgtgaatgtgacactgctctgaccatggccaccagcgctgacttggtttatctctgaccctctctccaggctgagggaggtatgaatgggggcagcatcactggccttggtcacaaacccactatttcacatcctgcagagtcagaggctgggctggcggcccagacacagacacccccaatgcctgcacaaacacagacagaaaggatttctccgcccggcacccacctcctccacgactcagatatccgtgcagacgcttctcaggcactcacagcacgcctctagggtgcgtgtgtacatgctcagtcacctagtcgcgtcactctttgccaccccacagactgtagcttgccaaactcctctgttcatgggatttcccaggcaagaatactggagtgggttgccattcctccttcaggggatcgtcgcaacccagggatcgaactccccgtctcctacgttgtaggcggattctttactggtgagtcgcttgggaatagacacacaacacatactcctgtgcctctcccagcagcaatgagcgcacagcacccacccccaccccaaccctgcacccatagaaactttgtttggaccacaacctcacagacccacgtatgtgctacagctcccgtcacagacgtcccctcctgatctcagtcatacaagtgaactcacacagagacccagcacgtcagagactctagaacacttgtgggcacacacacagacgcatccacgcagatgcacgtagacacacagatgcatccacgcagatgcacgtatgcttcagctctctgagccgcgctcctcccctcccccggtgctggatggaggtatttatgctgataaccacttatttacagttcatggattctgaaaggcggttgcatgtgtgtggttgagtttgtgggtgcatgtgcgtgagtgtgagaaagagagaggctctgtaaggtgtcgggcaagcagagtggagaggaagagaaggaaggaaaagctctgtgactcacttccagctgaacaatgccacatctcagcctccgcggctgggggagggcatgtgtgtcaacacagccagggcccggctgtgagatggtcagggaggtggggaccccatccaaagagacttgcccttcccctctctgctcccggggggtgtgaacgcagcatcccacagcgcccaacacctgtcttgtctgcagcacagtacatgagaaaggcaaagacaacggcagtgatgcctcagcatgtgccttgtgctcagt

SEQ ID NO: 50265 - DNA, 1185 bp, Bovine  19866880981990
  misc_feature (1)..(1): n is a, c, g, or t
nctgtgaagaaagctgagcaccgaagaattgatgcttttgaactgtggtgttggggaagactcttgaggagtctcttggactgcaaggagatccaacaagtccatcctaaaggagatcagtcctgggtgttcattggaaggactgatgctgaagctgaaactccagtactttggccacctcattcgaagagttgactcattggaaaagactctgatgctgggagggatttggggcaggaggagaaggggacaacagaggatgagatggctgcgtggcatcaccaattcgatggacatgagtttgagtgaactccgggagttggtgatggacagggagccctggcgtgctcactgaactgaactgaactgaatgtattaaccagttattgtctctcagccccaaattcactttctatactctgcgttaaaatacaggggcgtgggattctgcaaactccattaatgctttaccagctggttttattaggaagtaaattttattagaaggaagttgatgtctccttgtcacctcaaagatggaaagtctttggggagacattcactggctagctctgctatgagatttaagtttggcttatatagctgctacatttccttcttctgactgagagccagtgagctctccctgctccctttcctccctccctcctcctgtggagatgatattctccacatggtcttcttttccctctttgccaggagccacagagaatgcctcctttcaaatcactctgtgttagacactccctctgccctcttcccccattccccaacatcctgtggcatctccctaattcttccaagtatggatctcaagccttggacaggagtagaaatatgtgggctcttatgagtccaggacactgtggacagtagctgaacttggcatttcttgcagcccaggtgtcatggaggaattaatacttactacctacagaagaggaaacagaaatatcagccactcctataacttaatttaaaaaatgatcaaaacctccaaaacaaaaaaggacaaaaacaaaacaaaaacaacaaaatgatgggtgaaagatgtgaacaaacatttcataaagattcacaatatccaataagcatttcaaaaatgctctataccatttagtcgtcaggggatatacaaattaaatctacaatgaaatactatta

SEQ ID NO: 50266 - DNA, 956 bp, Bovine  19866881052117
  misc_feature (1)..(1): n is a, c, g, or t
ntttgcaatacgacagcccacagcctacaacctgtggtagaaccatagatgttaatgatgtttatgaaaagagcagagtcacctgtagaactaatataaacaaagaaacaaaaagtcatttgaaatcagggcagtataaaaacatcatttggaatcggaagcaactccttcccccgttcctgccgtgggatgtctcagccagagctagagagaacatcagcatgtgcaaagtgtggatgtagacatgtgtatggaatggtcttgtgtgtttgtctcctctcagatgtggtcactcacctgtctaccgttcccgtgaaatggcagcacgtgccttggtcccgtttgttatgatggacgaaatccctaataccatccaaactctgttggccaaactccccgactgcactgaccagtgtttccggcaaaaccatattcatgggacacttctccaagtaagtaaagtcagtctttatgacttctgtcaaataactgcaagatgaactttggtgctgttagcagctgacgatttgatacacagacttttcactttatgcgtagaagtgttttctaatgctgaaagaacaggtatttcctaggggtgcttttttcatcataaacatgaatgcagtgtcacagtgtgactcagtcagaacatcttttgcattaaaacctaggttttctatggcctgcttttccatctggctttcctctctgaagaagttgtgtcttttccatcaagtatgcctgaagaacattctgggccactccctgttcacagtgaagttgtgagcattccttgatacacatcaggcagctttgtaccttaaatgtcaaacccttctttcctattttctctgtgctacaaggcagacttctcttttgaataaataagcaaaatgacttactgcttttaacttaacatttcttctaggcaagactcaaggacaataatgatt

SEQ ID NO: 50267 - DNA, 1666 bp, Bovine  19866881129454
  misc_feature (1)..(1): n is a, c, g, or t
nccctgaaacgctctgcaaagtgctctcatggcagatgcaggagacactaaaggccatcgccgggctgctcctgcctcccggactctctgcttccacctgagcagctcgctcacttctgtcttacagattcataccccaggatttcacatccgagctcatttgaacaagcgcttccatatgaggcaaaaaaaaaaaaaacccagcctggacactgtttaaatttcaatcactagatttgtgtgactctgcgtgaggcagagttctaggtggaagcagcaggggaggcttgtgaaggtacaaacttcaaccgcctgtttaggaggagaggatgaaaggcaccttcgaaaaacaacacacccagaggtgtagaagatggccaaaattcagcaagttgaggttattccataacctttaaaaaaaaattctattgaagtatagttaatttataatgtattaatttctgccgtacagcaaagtgattcagttatacgtacatatattcttgacattttcttttccttgtggtttattacaggatactctgctatatagtaggaccttgatatttatccatcctgtgtatgacagtttgcatagcctttctttttttgtagaaccctttgtctctgatacacggtctctgctgggtctcatttgatacagtggcgtcagacttgaaaactctaggataagaggatggagggtctgacctgaggggtgctgcagagatggctgaatctagaagcctgaggtggaaccctgcatgctcaccttgcagagggggtgctcactgtgagccggaggagatgcagggggcgggctgtggtgctctagcctgctctggccttctgaagcaccctcctcaggctcctcaccttctctggctcaggatctccctctatccctcctcttccagcttcagccagggaatgccacctgattcagaagccctccttcctttccttgtttctgtttatgagattcaaaacaagtttctgatacccaacagtcgctttggttgatgcaggaaaagaaagaagccagttaacaaggaggtccagacctcaaaccactgtcagtgtttaggttcgagaatgatgacttcgtggtaggaactttgtttttgtttttttagatataattgagataaaaggcagaaactttcttatgaagagagagttataaaagaataaaggacttttgggaaagagagacagatacagaaatggagagagaagccagcacacgtttcctcatggacatgagccatgggtggttcttttccttggagtgctagccccaaggagttctcatccctcccttccaccatgtcccccgccacaaaacaatcatagaatgcctgtgcattctgccaaatagaaatgtttagggatgacaccctaaatcccaccttctctgcaatgccccccaccttccaagatctcccctttttctgaactcctgcagcagtttggttatgaacagcctttgatttcctactcttttatcatttgctctttcatacactttagttctatcttcccaactagcccatgagtttagagactgtcttctattaggtacacagtaggtactcagttggtgtcgatagctgatcttccaccacaataggccacctaccagtcggtagggagtcatcagtca

SEQ ID NO: 50268 - DNA, 1206 bp, Bovine  19866881176317
  misc_feature (1)..(1): n is a, c, g, or t
nttacctttaattaagaataaaagtaccccagaaggctgaaatgagatctgaggaacaccccacatgggtcagctcatcaccataagaaagatctggcagtgcccaggtgaaactgctccagagtgtgactgtaacactgttctgttcaagcaaagatttagaaaacaggtttcctggacagaactgggcctgacatctccacgactgagctgacaagccaaaaaataaacctggtgtacgaaggtacccagtggttctgaaaatagctcactgtctttacaaactgctaatgatcaagtcctgggcctagacaagcaccaagcaaggaaaggacaaacatgtgctcagcactaggctaagtgctctgaaggatactagcatacagaagatacaattctaagtctcagagacttaaaatcaagcatgaaaaacaaggcagaaatcaaaacaaagcatggctgaaggactggcatggtaagagccaatggaatggtataaccttgctctggaggccaaagcagagaggagaccctacaaaaggctactcagggaaggccagcttcacagctggaaggcaagcagcaggtggacccatttggaaatgcagagcaagggcaaaagaggtcctaaactaatctaggtgacacctggccttgcaggacagctaggggttccctttcccaaggcatgaagagcctctagtagaggaagcatgtggaggagatgaggttgcacaagacaccatggaggcagagatgtgtaagccctgcctggggacaaggcagaagtttagagctcctctggtagaaagcaggttggaccatggaaggccctgaatggcatgctaatgaatttcaacatgatttctcaaatactggaacgctacttgcagttttggtcacgtgaggaaaacactgtttaggtctgttataaacatttttaggcaagtctatactgcccatatgaaagaattaaaagaagggatttttctcagcaatgtttcaaaaatttaaaaaccagtaatattttcatagatttttaaataaaatcctatcactgtgattaagttttagaccactcaatcacatatacttgagtatatgcagcagccacttgatcattttacacagaacttctgtgtaaaaaactgacttcttaaaggcaaacccagtcctaaccacaccttactcaatcccccctccaaa

SEQ ID NO: 50269 - DNA, 859 bp, Bovine  19866881184420
  misc_feature (1)..(1): n is a, c, g, or t
ngaaaacaactgcttataatctacaatcttaggtccgtcttacatcttctccctaagccttggtttcctcatctaaaaaatggtataatgttccttttttttttttctgaattaagaattaagtgaggcaatcatgaagtgtttagcccagactttcctggtagtccagtagttgggagtctgcctgccaatgcaggggacattggttcagtccctggtctgggaagattccacatgctgtggggcagctcagcctgtgctccatgactactgagctagagcctgtgctccacaaaaagagaagccatggcaacgagaagcccacgaaccccacccagagattagccctcacttgcccctgctagacaaaacccacagagcaataaagatccagcacagccaaaaattaactaattttaaaacataaaatgtttagctcagtgcctggtatacagaaagatcaaaataagtggtcctggcatacgttgttatcgtcaggtattttatatgcattatcttatttacttggaataattcacttaatggactcattagtgagaagagtgaggttttaaaattaagacattgtttctttacaattttaacaagctatgtagttttaatgtctctaagtaaaagcaataaataaaagggctgcattctaacatgtgattccaattttagggaaaagaatgagaaactaatttttctaaaactttgtcttaaaattatcaactaaaagagactactttttttagaatctgaagctttaaaaaatggcatgtatgtttcttaattaaatctatacttaagtgaaggcagatagtaagtgcggaagatcatggcacacttcagttta

SEQ ID NO: 50270 - DNA, 1531 bp, Bovine  19866881226802
  misc_feature (1)..(1): n is a, c, g, or t
ncataattgcaatcaatctttagcttgcagaaatgacattagcccaaaaacctatttggcttgatatagaaacattcatttcaatacaaaatttctatctttaatatcctcctttactatttatagacatggtaatattaaaatttgaatatggccaacatctgcctctataataggtacctctatttcagcagcttaactagaaattactaaaacaaaaaaattcattttcttaccagttttagcatcagcagaagtctgaagaatctttaccatatagcttaagctctcagggttgcagttcagtaattttggcaagtaataatcaatcacataagatttctgatccagatttccttcacacagtacacaaagaagaggagaaacccaagtctcgtgccacttgtcaatccaagtgctgtcgacagcctgggatttcaaacgactcttatgatttttaaacatggtttccaagaggtcacttgcgtaaggcaccagagactggtcccccatcacctctaagatttgcgatggaatggttttagctaatgccaaaatatggtcaattcctatcaagtctactaaacaaccaaggcatgtgtactttcctttactatgccattccaatcgcagaagactctcggtcagttcaaaaatgaaacgatcagcagacaaatctgaacctgactcttctacagtgagctggtgcatttggagaatatttctgaatatgattttggtttggtgtctcaaagcatccagtggatgttcccagtgggtatagacatagtccaaaagcctcctaaccacatctgcattcccattcaggttgtcctttaggcttggggaacttgagtcaaggacttgtatagctgaattagtccaagatgccaaaatcctagacagaaacatttccagggttgactccttgatcctgaagaaaaatgaggcaggttagtataaactgacaaataaaaggagtctaattctataatcatttagaccttaaaaatataaagaatgaccataaaattgaattatcattatatttacaacaaaaatacaacacagccaaaacaaatctcaaatctttccattttgtaaaagttaatccaaaaaagcacccaaggaaacgtggttcattattttaactgtggtgatgtttcacaggtgtttaaaaatgtactcaggggccagggagggggaatattagagtgaatcagctttctctgggcataaatgaaattattctaaagttgattatggtgggagttgtacaaccctataaatatactgaagaaaaataactgaaattgcacaatttaagtaggtgaattgtatggaatgtaaattacacctcaatatagctgttcaatgactttaaaatgtacataacttacattaaaacacacacacacacacacaaaatacaatccaatgaagtcagagacctcattacagttctggcttgggtgcttgtaggtaatatgctgttaggtaagcatttactttgctaagcttcattttaccc

SEQ ID NO: 50271 - DNA, 1746 bp, Bovine  19866881231966
  misc_feature (1)..(1): n is a, c, g, or t
nccctccttcctcctccctccctgtaccctccctctgggtcgtcccagtgcaccagccccaagcatccagtatcgtgcatcgaacgtggacgggcgacttgtttcatagatgatattatacatgtttcaataattaaagaagaacaaattaagtggtcatacactcttggaagccatattaatactttatgtaggtaaaaaaatcctttaaatctgccatttctatagtagattagaaggatttgaggaaaactagaatgtcttaatgagttttttctgtttttaaaaatatttttagaatgtcttaatgtttaaaatctaaatctttgtgtctttgacttgtgatccttgaatttctatttttaagtccaccccacagttgcaaaagatgttaccttctttctggaactttgaatactcattttttttaaagttctgataataattctcagtgattttagactcagtaacagatggatcttattcttagtgaatagcttctatctcagcttttttagtaagatcccagagttgttaatattaattttttccttcttgatctcagggaatggttacattaaataagagaaccaacaatttgttacatttatctaaccacttttttttaaaattcacatttatctaaccactttttttttaaatccaccgtatcttgcccttctcctcatggctggccgactggtaatttaatttctatttggccattgttgtcattgcctgtgcctacagctgaggctttacagtagcccctgatgttttagcctgcagtaaacctcgacaatatttgatggtggagagggaggttaagatggcttctgttgatatgtagctttctcactggatctcatttgggcaaatcgtttttcaggcttaaaatttctccatgcttcaaggctgtgttccctttttaaaatgtgcatgtacatgcccacaaccttcctgcccatctgtcactgtttaatttaattgaaataataaacatgaaccttgaaataataaacagtacttgactgaagaatgaatggagtggagaattggagaatttagcttatgaaataataggagcttggaaaaatctctaaattaggaaaaataaccctacagaaaaagtctgaggaaatgaaggtaacatttctcaattaacaatcataatataactaatcagaacttgacaaaaaatagctctctgttactgtccttaggtggatggataaaccattggaaagccactgtgtagtcaggggacctgatttattggcacaaaatagtctaatgaccaattagttgggtatacagcatgtgtaatttgatttcagtctgggttttatgcttatcttagaatccttacccactaccagtgagatagctttgtggatagaaattggactaatctgtttatggaagaataatttgcttcagtgatcttctcaagacaacacaaagacctaaaaagcagccatggactggcctgttcatttctgttacttttggtagagactcaagctatgaaagtgttagtcactcagtcgtgtccgactcttgtgacttgggctatagcacttagcatagaaaaaccaaaccaaatccagactctcttgtctctttcctgtcagccttttaattttatttcttttaatttctactatttcttgactgataaacaggaaaagcagaatgatctgatttccttccacatccccatccttaaccaccacctccctcagg

SEQ ID NO: 50272 - DNA, 1100 bp, Bovine  19866881252083
  misc_feature (1)..(1): n is a, c, g, or t
ntgttctctggcaagtctgtcggtgagagtactcggcggggctgggaagaacacgggtccgtgcccaccacagcggaagagacttccactctctgagagtgggagtcaggcccgaagctggggtggaggctgggggtgctgctggcctcagtcgtcctaagcagcccaggggtaagtggagatgggggccatctctggtcacccctggcagagaagggaccccaactcatgaaactggctcaggtttcaaaaggcaagattgcacacatgggtgcacacgagaccctcgcatcctgacagggcctctcggggggacgtggcggcccctgagctcaggaacgaaagcgcacaagaggagagttgaggccacgagcaggagaacgaggaatacagggcactgggctcgccctgacgaagagggaagatgagacccacaccagcaccatatggcctgagccccagactgtgggttcatcattgcccgtggggccgtcaccttgtgccccgggagctttcatgagcagcagcaggggaggcgaaatgatgcaaaaatgactgtcatttcctctagaggagccggttgttgtccctctgaggcttagtcactgggaggccatggaaacaatcccatcaccctagcaactaggtggaggcagggtgccccgcggcggtggtcacctgctctgatttaagaccggagcattagtctgcatctgcttcggcacatcagtgggggcggctgccagtgacgcactcagtgagacgcaggtgaacgtcaggagcccaggcttcctgggacagcgactgatgggaaggacatttggtacgtgttaactggggttctgctgggtcagtccaccgaacctggggtgggtgtgtggggctcctgtcttgatcacacatgttagtcttgaaggaataaatgggaaaatacagaactaattcctgctcagctactctgcttcaacagccattggcccttgccctctgcccaggcaatgccagggtctgcttgggagttaccctcacaattcctaacttgttgtttccttccctggaacctactgagaatataaatggacatccagatggccctggga

SEQ ID NO: 50273 - DNA, 1352 bp, Bovine  19866881348897
  misc_feature (1)..(1): n is a, c, g, or t
ngaggagtctggagagaggcccaccaatccagccttcctttcatcctacgcctgccttggtcttgccttggccccagggagctcagaaaggattcccgctgggctgagccatcttttcacactgtgtgctgttttttttttttcttttttttgctgagtggcacctacttctgactcactgtgcatcctccctaaaaggacagagtctaacacgagcaagatagtgaattatccccgtggagaaagccttcacattttacctgttacgtttcctttgggtccattatccaatctttgtaacatttcaagcataaaaggatatttgaaaatctatgaatgtgtttttctttctcgcctttataaatacatgaccttcatcttccttggcccgaggcatcctctctgcctgaggagagatgaacatggagttttgacacagaaagcacgaaagaaaaatgctgtaatgtttggcctctgatctgcaaaatatgattatgtggtaagtcaaaagtcttctaagccatgctacgctcttgagagcatattttctggatgccttcgtttctcttcttgggtgtgatcaccgcattttatgtaagggatgcccgggcaagaggaggaagtcccatctgctttgctcaatagaggggccctggtgatgaccctgcctgtctcccaggctgctctgaacctacctgcctctgtctccaacaccaaggctccgggtaaggcagaggagcctgggaagccagcttcacaggccagcctcagttcccacaggcctagctaccaagctgtgagcctgcaggtcactcagggtcacggccactcaacaatgagatgccacaggaagggagggggcaccactgggtcagtgggaggccctgtgggaggcagccaggggcaccacaggggctctggccagacaagcaagaccagaccatgagttacaaactcagcagggacaagctaccttgcctggaaaccaaaggacaccacaccccaggatcccaacacgtggctgctgccagctgtcacataagctgccccatctgtccacacacctccaccttgtatcggtgggagaaacttaggaagtgttcagtttgaaaacaacactttctctaagcaaaatgaaaatcacttaacagaacaggctaaattctcaggtcccaggacgtttaaatcaagtgggacatttcattgtttttctcatgcttatcagataggagttgggggaaaggccagattagttatacaataaataaagaaatgactttttactctgcacagacaaattaaagtgtgagtgaaattttcaatcctactacacacacacacaaataaaggac

SEQ ID NO: 50274 - DNA, 1051 bp, Bovine  19866881374487
  misc_feature (1)..(1): n is a, c, g, or t
natatttgctttgttttacctgtttaggatttcagtgagtttccaaagccgtgtaagccagttcaaatgctcctctgtgcctggactgtaaaaggtgttgtttaaagtaatctcctatttcttttaccttcaaaacaaaatcaaaaaataaatattcaacttaagtttacactgacaggtgtatttatgtccgtaaccacttagaactcaggtctagatgtctgtttagcacctactatgcaacagttaatattttaagcattttgacaccatcacaattgattctcacaatgaagccatgaaagaagcactattattatctccactttacgatggggaaaaaggaggcccagaaagaccaagtaacttattcaaggtcacacagcaagtcgatggtaaaaacagtgcataaacctaggcaatttggctccagagctgaccaaggtttaacagctacgctagacctgcctccctatgccagcttcacagaccttgctgttttctctgttagctcatagcattcaataccaacagcaaatcacaaaaagtgacaaccttcactcacccaggtctaggtgaaataattacctattttttctctcttcaaaaaaattttttttctattatgactaaaatatacataaattttaccattttaaccattcttgggtctacagttcagtagacccagggcattcagtatattcactttgctgcacaaccaccatctatctacagaatttttcatcttcccaaactaaaactccaacctactaaacaatattttccaaaaattacctttttatacacacacacacacacacacacacacacacacacacgttaatggccatgcaagatttagggcaaagggcaccctgaaaactgacaggcttcactctgagtcagaagcatggagctttccagtatgcgacccaatcacttttctacatgctgcctttctccatgcaagtttaaacaattaacaaaatgacaatatattttaaagaagacataactgacagttagttgctgatgaggttctgcacag

SEQ ID NO: 50275 - DNA, 760 bp, Bovine  19866881375912
  misc_feature (1)..(1): n is a, c, g, or t
ncgtgtgaccgcggcgccatcacactcctcacatagaaagagagataaaaactgtggggaaagtgaaaaggcagttaagttgtggcatcagagcacaggaaacacatgactctcagaatgtgatcccggagaaagccggaagccggcagccctgttttgaacggaaggcccaggggctctgagaagccctctcagaggtccagagcctgctgagctataaacagtggtcgcatccaagtgtttgtaaatatcaggggcggggggtgttgtgggaggggtgctacggaacagtgggtaaaggaccctgagaccgagctcaagaggctcctcagcggctgctggggatccctccgcccgccagtgagcgagcagtgcaagcccaacactccgctctggagcgcaggaccagactgctttgggccggggtccctcctggggacaggcgattcctgtcacttgctgacaccagcatgtgggcacctccgaaacgaaatggaacctgtgaaagctgtcctcctagtaggtgtcccagtgacgccctcaggactccgcgccccacctcttcctttctgcacgctgacctcctttagaagggctctttagaacggggatgggagtgtctagacgacaggaaagctttccagatcagtgagcaatatgctgacaaacagggcccgggctcagccccaggaaactgatgactcaggaggacgtgccttctctccacagacgtgttcatcaggactggccagggccctcc

SEQ ID NO: 50276 - DNA, 555 bp, Bovine  19866881401271
  misc_feature (1)..(1): n is a, c, g, or t
nattgaaactttgctttcagaatttataagctcaaacagtcactcagatcaacacttggctagtttccccaaagcactcttgaggcataaagtttcattcctgagaaatatgagtcattgtggacagctaggcctgagtcagccaggtcataccttctccgagggccttgcctggggcctccaaaagcctttcctattccaaaggacatttccaaacctgcccccttagggtcctcactgttcctgttttatctgactctcaggtctcccttccttgcaatacccacaaaaaaaggaataactcattcagtaccggatttgaagcagttgtttgtgccagcctgtagattgcgtcctaggtaatctgaattctttttggccttcttaggactgcaggatacgcttgctctctggaaatgtgtcctcaccctcctgcaaagtgaggagcaagttgtccgagatgcagccacggaaactgtgatgaccgccatgtcacaggaaaacactcaccagtcaacaggtactttgtgcttatctctcttcgatgcctcagag

SEQ ID NO: 50277 - DNA, 1308 bp, Bovine  19866881486587
  misc_feature (1)..(1): n is a, c, g, or t
ntcagagtatcttctatactctatcacaatctttaagaattaaaactactcagttgtgacttacacataccacctgtgaagcttatgaaaatgcaccacttgctgatatcactgggacttctttcccttatagtaagcctgattcagtttatcttttttctttttaaattcttcttattatttattttttgttgaagtatagttgatttacagtgttgttagtttcaggtgtacagccaagtgattcaggttttttaaaaatgtttatttggctgcactgggtcttagctgcagcatgtggtatctagttctagattgaacctgaactcctttcacttgggagtgcagagtcttagccactggaccaccagggatagcccatcagtttatatatatatgtatggacatgtatattctttttcagactcttttcctatataggttattacaaaatattgagtacagtcccagtactactacagtatgtctttgttggttatctgttttatgtataggaatgtatatatgttaattgctcactcatttccaactctttgcgacctcatggactgtagcctgccaggctcctttgtccatggaattctctaggcaaaaatactggcgtgggttctttctccagatgactttcccaacccagggatcgaacctgggtctctagcatggcaggcagtttctttactgtctgagccaccagctcaaattcctaatttattcctccccccatcattggatctttttgatcagcaaagcaatatgacatttgaggtcttactattatcttagatttaatttactgttcttaaaatatgctgaccagtaatttctaacatacagtccaatgaagaaaattctactgattaacactcatgtagtacatattgcaaatagtatcaaaattttggtattttgatcagtttttacatatgccctgaaagaacctttaatgtgctaaattctatgtaattaatatctattgaagtactttaagtgttcttaaataattccaaaagggaaacacgaatttttctattttttatgtcttttctcacatttcagatgcagcagcttgagagacaagttattgatgctgagcgtcaagcagaaaaagcttttcaacaggtagtgtatagttttggttaaaaaattttttttgcctctaccaatttaagcattgttttgcccaaaataatcttgaaaatagttttcagctgtcctcttcactttgtcgtttttactgtttatgagctagctccatagagaaaatgtagaatctaacttgttttgccc

SEQ ID NO: 50278 - DNA, 1141 bp, Bovine  19866881521379
  misc_feature (1)..(1): n is a, c, g, or t
nttaacaaatatccaagcaaacagcacacatcctaggtccttggcgtttcacgcgtaattgtctacatctcctctgcttacttgtagatgagaaagataaagaaggtggtttgagttattttggtgccaaacaaaattctagaaagaaacactcagcaaaaaaaaaaaaaaagttctaaataaataaaaagaaaaaggagggagaaagggaagggcgtgcgtggagaggaaacaggagggtgccagcgggggagggcaggaatcttgtttgatacctgtcggggtttttatttgcaccaggagcgcggagactgaggacgctaagaaaacccgcccaccctacgtagcagggaggggccaagatgggatgcgggacaggagtcggaggagtttcgaatttcttaaactctccagtctagattcaggtgtcagctctgttcctttccggctcggccaaccacccaccttcccctcccggccctcttccaacacgcgcagtcttcccaagaattctgagtctggaagaaagagaggaaagcaggggtccaattggccttccccgcctccgcacccacacaggcaagcaaagcgtctccgcccgctcgcgaggatccaggttagcggctctcaccccaggctggaatcatcagcgccttaggtttgtccgccctctccacctcacctcagattcccggtcccagtgcccggttctgcatctgtgaaactccttgtaaactgtggtgtgacttgagtatgccccaagacacgaaaggagctcaggcgctctgcctgccacctgcgagcgtaggtgaggggcgggcccccaaacccggcctggcgggtccctgtctagcatcacggtctcccagcactgcgccccccgcctctcctctgtcctgtctccaaccagtcactgacagagccgagcaaatggcacccaacacatctgcgggctctggcctgatctctgtcctagtgaccggacaggggactagcatcaatcggggcctacggtggccgctgtgcaaccccggcattcccagtctacagatgaggaaactgaggcctcaatccagtgtcagcaacccagtgatcaggcgcttgggtttccaaacccgccttctcctccttacaggatagt

SEQ ID NO: 50279 - DNA, 681 bp, Bovine  19866881631983
  misc_feature (1)..(1): n is a, c, g, or t
ntttttaaatctctttaattaggaaccactggaaaaatctggctacttattaaaaatgagtggtaaagtcaagacttggaagcggagatggtttgttcttaaaggtggtgaattactttactacaaatctccggtgagtggaaattgcttgttatttagaactgaattcctcaatctataaatcagacacctggctgattttcttccatgtaatgcaattaatgagacaaatcatttcttattatgactattacagataatcactttgcattggttttcttcccttcatacagagtgatgtaatcagaaaaccacaaggccatattgaacttagtgcatcctgtagcattttaagaggggataacaagcaaacagttcaggtatttttttttcttttttatatcatgtaaaactcagttgtcaattatgtaagctaatagaatgaagactgggttttcagtatttttttattccatttggtgatcagtttgatgcccctaaaatttgtgaaaccctgggacttcttagttaaaactatgttataacctaagtttatattaagtaagtctccactgtatttcctttgcccttgatcccttacactgtttgttccccactcctaaccctcccagccattctcagttctcaagctgtcaagctattttagcagaaggttatttg

SEQ ID NO: 50280 - DNA, 2047 bp, Bovine  19866881648629
  misc_feature (1)..(1): n is a, c, g, or t
naaccctataagcttttagaatccatattctgccagaatatgccttgatagtagacctcagctccataggtgtttgttttttaacaaagttatatatgtctggaaaaaaaaaaaccttgcattccaaagtttcatactggttactggtttcattgccaccacttagtggatgtttaatttagaaccattttgtctgctctttctggaagccttgggcagagcttagttcataattgatggggaataactgctgaatttttagctgttttgagttgattcgcaccactgcaccacaactcaatatgaaaaaaaactatttaacttatttattatcttgtgaaaagtatacattgaaaattttgttcatactgtatttatcaagtatgatgaaaagcaatagatatatattcttttattatgttaagttatgattgccattattaatcggcaaaatgtggagtgtatgttcttttcacagtaatatatgccttttgtaacttcacatggttattttattgtaaatgagtaaaaaaatcttaatttaagagattgtatgtaatatttatttcattaatttctttccttgtttacgtaaattttgaaagattgcatgatttctttacagaaatctatcttgatgctgtggaagtagtttgaggaatatcttacgagtttttcttagaatgtataatggttgtagcccatccaactttaaaagaaaaaatgaccacattgcaatcaggctcacatgtggtatgcttttctcattccaactttataaattagcaaaagatgtttttgtttgcttgttccaccagttctactgtgacatactctgcatataaagacatgtagcaataatggggcgagggtgatctcacagtgcctttggaagggccagaacttgccttaaattttcctcaaccaaataagtattttgtctattagtgcttgagagaatctgaatgtaggatgggttcaactgcacaaaaggagaagatttttaccactttttttttatatagatataaagtgaagaggccacctcttagtgctaaaatggtatgtagtacatgaatatgccttgtttaattacagaaaattccaaaacttgtactattttttttcccccgtgtggaaaggcaggaatgcttttctggacagcagctgaatgagcagtagctttagttcgtttgtacgtaggtacagtcggagcactatgtatgtgtgtattgtggactactttgacagaagtaggtattttgaatgtaacaaggttaagtcaacttgagttgtaatatatttggggaatcagttcactacaaattgtgactgtaaacattgtactgtaaatgttttgtagttttcccccaataaaacttttgggaaaaaaaaaaggtattaatgtgtaagatagcttccttttttaaaatggggatatctatagagctttctagcttcccaccactgtcaggcattgcccaggtcttagagagttgggcggtagggtttagagggctgcagagcctgagttttgaagagcttgtctccctatatgttttaatagcaagttcttttagctgaaagtaatttagactgtcaagggcattagtttagctagctgttccctttgctaataagatgcatccccgagttggctgactggtagcaggtcctggttgggaggcctgaggggtgtggcccgcctgtgagtcaccaagcgatcacgtgtctgcagtggcagctgaaggtctgattttttttttttttttccagtgggacgcccgtgaaactgaactgcttgggtgaggatggtcttgccagcccctggctgaattgggggcgggaagttaaagcccagcctttctgggccagagaaccagggtttggcctggaccttggaaagcctggttgtgctgaggacggaaagagaaggaagattaaacaagttaaacttatatctgggtagtgtttgtttatgtggacagcttcctctgggagtgagcacacacgttatttagcaaaaggattagtgtctgtgcttaga

SEQ ID NO: 50281 - DNA, 806 bp, Bovine  19866881902700
  misc_feature (1)..(1): n is a, c, g, or t
ncctgtgatacttaaggtgttaatctcagcaaattgaatttaaagaattatgaaaggtatattgttctagtatgtttaattcagtgaagagattagtattttatctttacaaaatattgctctacatagcatggaagttacctgagctaaaagagctgccatttctaatgccaggtccctgttcagaggaaaaagtccatttactatttggtcatttgtctgatacattaacagcaacttttctctatcagtctctcctcgaacttgcattgagaaatataatctgtaaaaaaagaggaaaattttcattaagtgatatacttacaaaagaagaaggtaaagagaaatccagaggactgatacggggttgttctaacaatattctctcaatgatacaaacctagatcattacgatctgttgatgacctctattcctattctttataacatttaccagcaaactgagaaaaactgctctgaggctgagcttgaggggtgcttctgtgctatttttatgccctgaaataccttagctgctactgaggaaggacctgatgccagtgggctgtataaacccaattttaagaacactcatgatctttcctacacaccatggacataacagggaataggaaatgaaggtttcaattaaaaatcaatgtcagatgagatcaggcacgttcagggtggtatggcaaaaccaatacaatattgtaaagaaaataaataaataaaactgaaaaaaaaatcagtatcaaatggtcaaatgggggcagctctccaggaatctaaaagagagtccatct

SEQ ID NO: 50282 - DNA, 4306 bp, Bovine  19866880414337
  misc_feature (1)..(1): n is a, c, g, or t
nttgattgggcctgaggtgtgcagatactgtatccattcttttgtgacccagtggaccaccaggctcctctttcattaggatttttcaggcaaaaatactggagtggtttgccatttccttctccaggggatcttcccaacacagggatcaaaaccctcatctcttaagggttgtattatatatactatttatattataataaaatataaacatatctatataaagaggtttgttgttagaatttgacttatgtgataaacattgtgtgtatgtgtgtgtgtgcatgtgtatgtgtgtgtgtgtgtgtgcacacgctctgctgcttcagttgtgtccaattctttgcagccccatggattgtagcccactaggcttttctgtccatgggatttcccaggcaagaatactggagcaggttgccatttcctactccaggagatcttcccgacccatgaatcaaatccacatctcttgcctctcctgcactggcagctgggattctttaccactagtgccacctgggaagcaatatatatatctggatatatatgtgtgtgtactattgttgtttgccagggcatcttcccaacccagagattgaacccgcgtctcctgtattggaagcagattctttaccactgagccactggggaagccccgtgtatatatatctagagatacagaatcagttatatatagctttcatatatattatatgcattataaatatcatatgaatctatatcatgtatatgtgaatattatatataatatgtttttatctacatgtctaccaacccatctatcctgatggttctgtctctttggcgaacccaggcagatccatgtcctcagggctgtgcagctcgactgatggggttcaggtggatgcagggaggccaggcagggggcagtgctagagtccagcccagccatgatggtggcagcagggagatggagagaagtgggcaattctaagaactatttggaaattgaaattgataagacttgctacggtttggaaatgggtgggagcaagggagagggagatgctgagaaggatttctaggttgtggctctgcttctaaacagatacaggtgctctgcatgagaacactggaaacattctaggctgtgtggggccgagtatgggcaggcagggagctagcatgagagcacattattagaggaaagcttggaggcaggccacaaagccagagtcatccgtgtagggatggtaacagacagcatggctgtgagtccccacggagacaatggcagtcctgcaaaaccacactgacccatttggcagagaagaacgagcctgtgaaggagacagagaaggaacaggccggaaggaaggtgggcaaccaccaggaagagtcccctggtgccaaggaagcaagcatcagatggcgcctcgagcaggaagtggccagctccatcaaatgataacgaaagggcacacaagcgggaactgaaacctgccctgaagattaaatcaccagggaagtgaaacctgtgcaggtctcagctctgagatcaactccctgcatgtctagctggcatctctgaagcaagttctcgggaagtttcttcaggaaactgaaggcccgggagagctctccagctcccatcagccccttggccacccctgtcctgacaaaaggaggtgacacttgactacatctttcccttctcctcccccaccccaagcccttaggttgcctttcaaacagccagaattcctttaaagagtaatctaggtatgcttcagctgacattcaaaagtgcattgtaattcaaatggaaatgcagaaattcattcccttggacagtcttgggaaattataatagagataaaacatcttttaaaggtggcgacaggcatttatctgtggggacatctctatgcgatagactctcctgatgcaaactcaagagcggtccaaccttcacacggagtatgtcctttcggcagggtcaccgagtctctaaatttgggaaagacattaattgcatccatcttcgcttctccactttgtccctccatttgtctttgtggattttggtttccccgtgtctgtccctcttcatttttctgtctcctcctatctccctcagtctttgtcactctctctcacacacagaatggacaattcctttacatgcatacatcctttaccttccatagttactttctcccatgcaaaagaagcaactgtgaattcaggaaacctaccagattggttatttctgcatgcattgccatcccttcagaacagggaataacagggcataacaaaagggcagggttacggagtcttttgatgtcttcctagtagagctttaaggctccctccctcaccagctctacccctggagcccctctcaatctacccctgtccttggtcctaagtcagctgacaagagaggggagtaaattagtagccgcatctccccgtgcccccatagacacacatgtgcactacaaacacacacacacatacacacacatctgagatcactgttatcaggtggatgcggcagccaccggtgcagggagtggactgtatcaaggtaacaattaagtgcccagctcattgctagatgagtcatcattgatgggtctacgctttcactggatcccatatcttaaaaatggaaaaattgatcttagagtgtgaatcaatttgtccaagatcacacaacttgttagagggaaactgggactggaaccaaggtccatctgactgcaaaacttgtcatttatctccaaatgaggaagtctttatccaagatagccagaagaaccataactatgactcatgtgtcaaagtcacagctaggaagtgtatgaatgtcaagtcaaagaaggaaatgaagccctgattaagagaaaggtagcttttcaaatacaggtgtatcgtgaacacagcagcatagagtgaaaatattaagctgggacagaaactagaaacttcacaaggcacttggagcctggcctgggagcacaggtgatggctgagggacagcagcagactgaagagcttccaagggaatcgcacctgggctggagtttcctgggatgacttcagctactgtagctgctcctgaggtccagctgtccctggcttccgccagcaccatccagctgacctgtccagtgctccagtccccttcggactggtggaatgcccggaatatcctctcctccctgcctggatctttcccgtcctccttggcattctcaatgtctctctggaatctgcgtcagaagctgggtctgttattctagctttcacttcaccctattacttggaagcaatatgtaagtgttaaccaccacttcccctttctgcatctggagcagttactgctaactgatcgcagcgttcttttctaatgacctggtgacctccacacagtgtctagacaagccactcctcaactgatcagaactggcatacgaaacaaaagacacgggccaccgggtgacagttcccgaccgcacaccagccacctgcctttctccagcggcctattggtagatcaaaggaaaaaaaaaagtctatcacgaaaacgacaaggtattggaaggctcatccaggctgaaccccttcatggacagcacccacgtcttgcctactttaacgccccagcacatggcacgaggtctgcagtgaagaagcacttaggaaataccagtgaaccagagggtaatgaatgatcaatgtgactttctttttcctgtggaatgcacacttctaagcacttatgggaataagagtgaaactctcatgggagatattttaatcaggcacattcacccaacccccttgaccttccatgatctctagtggctggatcacaacagtgaccagagccccaccattaattagtaaacttggaaagaccaggatcttggactcaggttggaatttaaacactaattcactcaggaacacactgtgcggtccaggcaagcccccgatcacttctgagttcaggtccccctttcgcagagatcagaggtgggtcctcttgccttttttgcctcaaggggtagatggaaagaccaaaggcaggcctgtataccgcgaagggctctacaacgtccgtggttgttatacatgccccatttggtctcttctctctgaaacttagaaattactttgcctgaggtttcctgacagggatgtaagaagaggtaccaggacttgaaatcttttctgtcccacttgaaaaaggctttcatactgttcatggggttctcaaggcactacttctaagtagcttgccatt

SEQ ID NO: 50283 - DNA, 502 bp, Bovine  19866880497989
  misc_feature (1)..(1): n is a, c, g, or t
ntaataaggtgatgaaagtcgtgtccagtctcacaaggaaattaaaaagaaagtaaaggtccattgggacttgatcgtgggacgggactctcctagctttgagaccaagaccatcttcaaaatgtagtgacaggagcattgcggaggacaggtatcttggtagccctggaaggacaggaagaggcagagagaggggctgggtggctggtgtctcagggcggcgaagccaaatgcgcaaggaggcaggcagaagaatgtcaggctgggaatgtggttcagacacagttaagggcactgaatgtttggcaacagggtatacagtcttttagcatgcagcaggcaatcagtggagtggacttgatctgagagctggtcctgagtccattaaaaacgggtcaaagaaacagtagcataactgaggctcgttcttgaaattccctgctgattgattttccaattgcattttccctctcctcttcccctgctccctccatataaacat

SEQ ID NO: 50284 - DNA, 1817 bp, Bovine  19866880499891
  misc_feature (1)..(1): n is a, c, g, or t
nagagaaggtcgccccagtagaaagtggcagagtaagaacttgaacttggacctgcctgattccagacatgcccttccccgggtgaatcagtgaatgagtgcacggctcctccgtagttacctgggttcatctgtttatgttcatgactcaaagaataggcaaaaaaaaatcagtcctctgaaagatgctttctgcccccctctccattcatccatcttcagagtggaatttccgacagaacttgagaggccgtccgaggatgtggagaaggatactgatttgtgctaaacgcctcctatgaattgttttccctcctctctctcccacacagatggagacttgccaaacagatgtaggtatacatcagtcacctaccctccaagaagcatttataatggattcattcattaattcttccaagaagtaattgcagatctactgtgtaccatgtaccattcaaatttattcagaaataaataaaaccctggccttcccttcactgcctctcactgtggaaatacaatcaacacataatgagatctactcaggattggacccggggcttggtcttgggtacacagagttgattaaggatgctctccgggggcactcaggtgatgagagggtagttggcagacagaaggaggagtcactgagggtcctaacaggtgaccgtttaacaagccagagactgcaggtttcacaaaggtttgttgagaactcatgacccaagaactgaggtttaaaggactagacaaatcagcaggagttggtcggtgggggggagggtagtgcggcagcgcacaggcatttcatgcagagtgaacaacctgagcgaaagcacagctgtatgagatggtgcgaggggcactggagggctcactggtgtagttagtttatgcttatacaactgaaatgtgaggcaggatgtcgtgattcacctggccacagatgcctccacgtttgccttttcctttctgttctagaatattggagctggaaggactgttagacaccagctgatcttatctactcgccccaaaatggggagggtccatggtcaaggtcacagagcttgaaatctgtaggaggagagcagggtgatcaggagaattctttggaaaactgtacagagactaccttatactttaatggagggagttcggcagcttcactattaccttgtatctgattttttttcaggaaataagaccttgcattaataccaaggattctaatatttcttgagacccataacttgcaaaccattatggtcagtatcatgtaatcctccccaaaccctctgagttaggtgttagtaacccaatttacagatgagaaaactgaggaaacgcaagcaacggaccagacactcacaggaaagatagtacagccaaatccatgtctgtctggctcaatgttcattagttttctccttgatgaattgctaaagggttcagaatgatcactgaaggtttctgatctgatctaaagataattaaggagattagagctggatggggagtgtgttccaaaaaagcttctgcattttcactttattccttcggcattatcttgggaaataaaatagggttgctagtagacacagtgtaagtagatgattagtttaaaagaaaaaagtttcattttctataatgggacctccttaaataggtcactctatatctgtctagaggcaaagagataactctacataaatacagccaactataggtacataaagataggtctcagtgtatttttatacacatggatacataggtacatgtatataatatgtatatgcaaatctttg

SEQ ID NO: 50285 - DNA, 4036 bp, Bovine  19866880528341
  misc_feature (1)..(1): n is a, c, g, or t
ncttctgcttctgttaggtcctacctttctgtcctttatcgagcctatctttgcatgaaatgttcccttggtatctctaattttcttgaagagatctctagtctttcccattttgttgttttcctctatttctttgcactgatcactgagcaaagtgtgcttatctctccttgctattctttgtaactctgcattcagatgggaatatctttctttttctccttttcttctcttctttcctcagctatttgtaaggcatcctcagacaattatttagcctttttgtatttcttttccattgggatggtcttgatccctgtctcctgtacaatgtcacgaacctctgtccatagttatcaggcactctatctatcagatctaggcccctaaatctatttctcacttccactgtataatcataagggatttgatttaggtcatacctgaatggtctagtggttttctgtactttcttcaatttaagtctgaatttggcaataaggatccatgatctgagccacagtcagctcccggtcttgtttttactgactgtatagagcttctccatctttggatgcaaagaatataatcagtctgatagtaaccccgttttcactctcctctctacagaatgctgtgtcagtctctgtgtgtcctctgcagtgataagattctgcatgttctacgggcatcctcccgctgcatgtgtgcagccttcccaccttcttgtctctgtgccactcctccgtcctaaactccccctgttccctgggcaccagttgaaattttgtccatcctgtaagactcctctctgaatactttctagattctgccacaagtcgtagcctctgctctaagcttcctgctttgatttatagctactcatagcatgctttttctgttccttggactgagctcctgaggatagacttcctcaatgccagatctcagaaaaggttggttgactaaatgaattttaaagcgagcatgtatttgcatctgctacagaggtaatatatattccatgtagaaagcgtagagaaaaatgaatcataacgattaaaatcacctctgatccccccattcttggtgttccagtgtacttctttccagctgtatatgcatatacttatgcctgaacagaatcttaagattgtatattttctatataaacttcctctgcctttccatgagaatgcaagccccttgaaagttaaaaggtctatctttctcttcatttgcattcttcagggtgcttaaacttgagccagatgttgaataaatttctatagagtagttacctggaaattaagccggcattgacatcctgagttgccatttcctctctctgtcttctgggaatgtccatctgaattcagatatggggcagctcagttcagctcaccaaagacttaaccttcttctttctatttggccactgtgttggtcacacggacactcatgtagctgttgtgtgtccttgtaccaaagtccagcgagagaagtcagctgtataaacagatcattttaacatagataaatgccatgttaaaataagatgctagagcagtatatatgaagtaatgtgtaagaaatggaactgcagaatgctcactgaggatcaagtttaatgttaaaagcttgtttatttgtatcatctcattgaattctcacaacaaccctatgaagcaggtactaattgatgttattcagatttgatagttgaagcttgaagaagctataaagcttctccaaagacgtacaacttgaacacggggcaactggaattcaaaatcaagcagttggtctccagtctgtgatcttacgcagcatgcaatatttcctctttatggaaacataaagagggtgttccatgggggtcaaaggaagtcttctggagtgagggatgggggttcagtaggacaggctatcccaaactctgaaaaagctacccaaagatgtagaattaggaaacaacattgtgtatgtggaggatcacataagaatttgatgagatttaacacataaatgcaaagaaaggtgtgaaataaggtaaggcagaggagaaatgcagatggccggctggtgaaattagttttctcctgatgggaatcaagagccattggatggtttttggcaaagaaatggcatgagcacatttacaaattaggcatataatcttggtagccacttgcgggatggctggaaggaaggaagcctgggggcaaggataccagttggggttgctaggaagtctccatttgcccaaagtctccatatgatccactccccatgcttttcctccctgctgtgtaccttggggagcccacctgtatggagcacccttgagtgtttgtgtgagcttggcccatatttaggcacttgcaggagattaactttagaaggtaggtgacctcagtgctgagtcgtgacctccatgctggatcatgccttgtcagcacttgggttattttcctggattatgctacgtgaaggtcgcagcagctgcctggcggccctttcctacagctgtggctcttttagggtcttataacccaccctccttttgccccctttggcctaggatggtaacaacactttgctttgccaactctggggagcttcatcattggttgaccttcaacctacctgtgatgattaatttgtcaacttgactgggctaagggattttcagtgttggcaaaacattacttctgggcttgtctctgagggtgtttctaggagagactagcatttaaatagttggactaagtaaggagaaagcctttgtgagtgcaggtgggcctcatctagtcccatcggggccgaatagaaccaaaaaggtggcggaaggccgggttcgcgctctgcttgagccaggacgtccatcttttcctgccctctgccgttactcgtcttggttctcaggcctttagctcagactggtacttacacctctgactctcctagttctcaagcctttgggtttcacctggagccataccactggctctcctgggtcttcagctggaatatggtgcactgtgggacttcttagcctccatcatcatgtgagccagcccttcataatgagtctctttcgacatgtttgtttatgttctgttgcttctgtttctctgagaatgctagtgttctgttagtccccaagttgtgtctgactctgtgacctcctggcctgtagtccgccagggtcttctgcccatggagttctccaggcaagaatactggagggggtggccatttcccttctccaggagatcttcccaacctagggatcaaaccccaggtctcctgcattcataggcggattctttactgactgagccaccagggaggcccaggtcacttgcaaagcctttgtaaatgatcacattattaaacacatctcgatcagcttatgtttctgctcttttcagatgagaccctgactggcccagagccacctgaagcagtccacaggagagattagataaaggttggcaataaggcagccaccatagaggtgacaatgtagagactgacgttgtagagatgacagtgaggggcatgtacttgaggtctgcttcccaagcccagtcagcaggtcttactgcagagaagtgaccgcccatggaggctggaacagctaattgcaggggtgcgtgaagtcagtgtccctaccttccccagttctctctgcctaggcagtgagttcatcccacataatgtctggccccctcaaaccgccccccccccccatcaccctgctccccagcgagacagagaccatttgcaaactcatcagaagcgctctctggccttttgtgaataatctgctggagggtcagctggtgctgtggaatctgaggaccggttagttagccacttgggagatgttaccaagatggctggtgatcagaagagctgcttattttcataatgaccttcaggaattaaataaaaatacaatgagtgccatagattaggaagaacaagccaattaaaaccacaacacgccttcgggatttttttattt

SEQ ID NO: 50286 - DNA, 954 bp, Bovine  19866880553298
  misc_feature (1)..(1): n is a, c, g, or t
ntcgtgtccactcttgctatcccatgaactgtagccagccaggctcctttgtcctgagatttcccaggcaagaacaatggagtgggttgccattttcttttccatgggggtagcttctgtaaaaggtggggtttctcatttcaggttggcaaccttaggatgtgcagaagggagaggagaggtcaggaggagagagggtggagaaaaaagatcatttcacgtcagtttcagcctcaaagatcactctccagctgtcagctgagcccacaatcactgcggagctttattaaggagcagaagtcacagaagagtgaggtgacagatttaaaattaacttgccaaactccccatcagtactgtgacagtccccaagaatcagttcagcgacccagcgtaccaacttgacaatattaacataactttgtctgaacaaaagcttcccctctgtcttttcaagaaaaggtaatttgggggagacaggcattctttgccttttctggcacctctgtgacaggtccctttgggccaacccaggagtgcacgttccataaacttccattctccttccatctttctggggactgccacccatggcatgatggcaaagacgggcagagaggtgcttccccccttcagggacctactaagtgaatgcagatgaggaaagagaccctcacattgctgccactttctgaggtccagcttgaatgccctttagcctttctgtttggagcagcatgctctctgtgccagctctcatcagcgcaccatagtctgtccccttctttcccgtcacctagtaacgcatctcatctcaaacattactccctgaggaacacctacctggactccaaacatccccatgtgggttctagatgtttgttcaaggtgtaccctgacttccaaacatcacactgcacaactcactgatgaatttcactgaatagcaccttc

SEQ ID NO: 50287 - DNA, 1353 bp, Bovine  19866880586230
  misc_feature (1)..(1): n is a, c, g, or t
nccttaaataatcctacttaggtcagagctgagtatggcatgattcaggaaatcctggggaactaacagggcagtggtaaggccatggagccttatgttggagttggtacagtgtggggagcgatatttagatcttggtaaaagaggtttaaatgaggttttgggagatggaagtgaacttcagggtttgaccaccaatacctgtcctatgaaccttgtatcttcatcgctaagtcagactctggttttcctgggatgctgtttgttcaaaataaattaggcttccatctgtatgtcacttcacttaaacattcagggtgggggtaggcagactcactttctgtgtgtctgcctgtgagtgagacagacacattcttagctgtgttttatgaaaacaataaaatctaaagccccagtagctacagcttctctatccttttcagagaggtgtccttggggattcaagccttacggcgttgtctagcagtgcgttagaaacctgttaaaagcctttgcctgttagttagggaagtgatacatacttttgttgttgttgttgttgttcccgataaggaagggatttgcaggaagagaggggtgaaagcagcatttaagaaacagcgaccatcagtgtcgaggcacaaaggaagaaagaaaattccagagaacgtttaaaaccttgagaagacggatgttgtctggtctggcttttaagacctagatacgcttttccgatttgccaggagacaggcaggccctggtctgcagtgcaggtgatgactctatccagagctttctgatcacagatgatcgcgtggttcacactgagatcatcctgtgtctgacacctgtcgggatgggcgatggcggaggttcacgtctcccgtgactttgcaaggtcacccggcagcccgtgtccccagtgtcatgagccaggggcacccgaggacttgttttccttcagcgtgggttttgcacttttgtgtccaaaaatcttttcctgttatcttcacctggcaaacatctgtccactcttcatggctgcactggggcgccgtctgtccaggagacttaccgcgcttgccctttcaggtaaagttaatcatcaccccttttgtattaccgctctgtcgttcgcacgattccggagctgcatttctcactctgatgcactgatgagccgaatgctactcccaccaccctgaggcctcactgcagcagggggaggtctgattgctctgtctcttggaagtcctgtgctcacaggctcctcggggctagagctcgggagatatgaaataatccaaagggaagagtcaggtcggcaccaaagcccagggttccagtgtcctg

SEQ ID NO: 50288 - DNA, 2864 bp, Bovine  19866880589073
  misc_feature (1)..(1): n is a, c, g, or t
nccttttgttccttcattcccacctggcatatgaagacccagctatgctttgtggtggtacccagcatccagactcgaagcactgacaggagaaattgatccatcaatttggctgtgatgtaagaggccttttaactccaaaccctttgctctgcagcaaagtctctgtggagaaagtactagagtgaacacatggttttgtcagtaaatactctttgatcaacactcaagtcaaatgtaaggagagtagagatggcgaatgcttaaactgtaattgatggcatggcttttcctatcctatttaatttggttcaacaactgtttattgaacaagtaacatgtgccaggagaaagcctagatgttcaagagtaaagagagtcaaagattaataaagtataatatttgctgtataaatatcttaaaatctaggcaaagacacatgtgtcacctaaataacttgactccaaagtataaaaagaaagattgattctatgaaggcaggggaagttatttcaactagagcataagtgagtagaccttcattggggaaaacagaggaaaaagaatattccagggagagagagagaacaacagaggcaaatgccaaagggggacagtcacatctcaatgtttctccacgagcatagaatccttgtccattccctgctgcctgaaacacatctcatggtttcatagtttctcagccggagtccacttactattcctacatacagcttcctaaaactgcaccaaaaatgcttgtacattttgaataccaaaacgtctgccattttatgcctctctaataaatcttgcatttgctatctgggctcaaaattcatttatctacctgaaaaggatagataaatgcctcaagttcaaatattacctccttcatgaagccttccttgatgctctcagatgatatcacaatatatcacaactctttgcttgtctgatgtgatgttctttgaatgaatgagtgattgaatggatgaatggaatcatgtataaagtattcaaaaaatggcaagtctggagggattgggacctagcttatttgagaacacagtgtgcttggtttatatgacagcctaagggatttcaaatttatctcctataagattatataaatgaccggaatcatctcctaagaatattaacctaacagtagcatgtagaaaattttggcaagggagaaagcggaggaaaccatacaatttagatgatgaaacaacaaaatgcaatacctatagtcgaaatgaagagaagaaagaggaggatattctagagaacgaacaaaagttggccgtggattggttaaaagggggaagaagagtaaagggtcaaggataaggctcatattggcctgcttaccactgcaaacattgttgggaagagatgttcctataccgttctccttccttcccctgcccccttgctttaagaaaagcgtaatctgcttacttcagatttcaggacagagatagggagaatggaccccagggtgttgttgtttaatggctaagttgtgtccaactcttttgtggccccatggactataccctaccaggctcctctgtccatggaattctccaggcaagaatactggagtgggttgccatttctttctccaggggatcttcctgactcagagatcaaacctgtgtcccctgcattgcaggcggagtcttcaccactgtgccaccagagaagactggattaggaaccaaattgccatggtctcttctagtcttttcttttactgcagccagatccataaggtagctgatcaagcttgcaactccccccacctctttcctgtcgataaccctaggaccttggtacacaaagcatggtccctgaaccagcagagccagcagcagcagcaccaagacacttgtagaaattcagattcttgggccccactccagagttactaaatcagagtctgcattttaataagatcccaaatgatccatacacacatgagagtttgagaagtactgttccagggaattgtcacttaagtgtcagacaactagcttagacagtatgactctcaacctgggttgcatgttagaatcatgtgagaacttttacaaatcctaattctccaatctacatctcagaccaattaaatcaaaatctttgaaaaaataaataaataaataattaaaaaaaaatctttggaagtaggaacagggcctcagtgcttattttttaaatttctactttctttttttaaaaataattttatttatttatttttgatggtgctggatcttcgtcgctgtgtagcttctctccagttgcagcgagcaagggctacgcttcattgcagtgtgtgggcttctcattgcaggggcttctcttacggagcgtgggctctagagcctgggagttcaggagttgtggtgcacaggcttagttgctccaagacatctgggatcttccccaaccagggatagaacctgtgtctcctgcattggtggatggattctttaccactgagccggggaagccccaggctgtggtgctctaaaaagtttcccaggtaattctaatatgtggctaaagtttaaaaccactagactaaagttaggagttagattgcaggacttccgtggtggtccagtggttaaggcttcaccttccaatgcaagaggtgcaggttcaatggctggtcagtagagctaagatcccacatgcctcttggccaaaaaccaaaacataaaacagaaacaagattgtaacaaattcaataaacacttagaaaaaggagttagactggacataacaggagacatcatctccctttctccttcaccattcccatttaaccccttagttctaagccaag

SEQ ID NO: 50289 - DNA, 1190 bp, Bovine  19866880593406
  misc_feature (1)..(1): n is a, c, g, or t
nttaaaaaaaaaaaaaaaagtcagcctccttgcctggcagagaattggtgaatttttcaagaatcatgagttttctttataaatagactggatgaatctagaaatattaaagaggatgatgataaagtaatacaggaacttgaacccaaacccagacaagtttcagtggtagacctcacagtctgtgttggagagaggagtgcatgagtgtttgaacatggccttggtgaataccactgtagacagggcaggcggtgcctgtgctgtagggtggcatatcaggctgaagcttgcctggtgtctgaaaaccaacacaacctttatgcctttgcagaggcactcgggtctgccttgtcttcaccctcctctcgctgtctctgtctcctcccctatcctccgtatccttccctttcccttctctttattgtttttccagctctctcatctcctttccactcttccatctctcgtttccacaccctgaccttgattccagagcacagctttcctttccattcttgcttcatctccctcctccctgcacctttttcctgttctcttttctccatcttggcttgggggctggggcttcagtctcctcgggccccagcggttcattcccattaagcttgacaatctctcatatgtcaattagaaagaggccgcttccccctcttccccctccctttcccgggcctgccgcgatgctcagattaagtaccatctgttgcattcatccaggcgacgggtgagcattttgctgctctggggaggcagagctcagcgggtaccaggaggtaatgtggcttgtttggacaacttgatatattgatattgatagagctaccggatgggattgagagggacgggggcgggagagagagttaccgaggatgaaagaggccatggaggggtttgcataagcacttcccgctctaagcctgtctgggctcctggcaccgtcaccaaggcaagagcagccaaacagatggataggatttgctatggttgggatcagaaacccctgcagcccaggggagcaaaccttgcctctctgtgtatcttcctctgctcccagctggtcagatcggcatcagcttaggagaaaggaaagcagaaataacaggctaggaagaggctgaccttttggagttgctgaatgtcagagcacgatgaaaagggatgatgta

SEQ ID NO: 50290 - DNA, 937 bp, Bovine  19866880641146
  misc_feature (1)..(1): n is a, c, g, or t
nccccacttctaccttctcccctcagccacagacacacacgagggatacacaataggcagccatctgcaacccaaggacagaagccttactggacactaatccagttgctcctgaaccttgaacgtcccgtctccagaactgtgcaaggacacatttctgtcatttaatccatccagcagcctcagcagattgacagcatcgtgtctacatatacagtccttcgtatgcctactgctgttcaggtgctcctctgagcgagggagccaattgtagacctcttccaacagcaagctacaaccctccatagacagctcatcaagagcctcctactcttccatgacagttgatgaaagaggcattgggttctcgtgtcctgattcctggttgtctagctcaaagtcacaaccacattccatctgtgaccgtttgccagccacaaagagagtagcttcagctttcccctcctacttcttttcaacttacattttattgacattttaagcatcttccacttaagatgtctgcatgtggacaccccgtgagacatgcatcccagctacaaagaatattccaatactgacaatatcagtccaggggcctgccttggtccagataaaaatagagtgagaattaaaaaaaaaaaaaaaaaactacatgtgcattgctgtttcacccaatttttattccctcaaaagatatcatggagatgaatattcatgctgagaaacgtgaggtttcagccttggaagcataatttattgttatttcgaatctcattagcgctttacatttgtaaaacccgtttggggtgaggcatttcctttctttcctcccttgcctttttcttccatgcctccatccttccctaaacaccctgtcctcttccaaaagctaaatcagacactgtcatttttacagaaataaaaaatcaggagt

SEQ ID NO: 50291 - DNA, 1306 bp, Bovine  19866880671080
  misc_feature (1)..(1): n is a, c, g, or t
nccaatggaggagactcagcagatccaggtccgatccctgggtggggaagatccctggagaagggaatgaccaccccactccagtattcttgcctgggaaatcccatggacagaggaccctggcgggctagagcccacggggctgcaaggagtcggaaatgacttaggacctagtgactaaacaacagcaataaactgtgatgcaagtaatgtcatgcatttaattctcacagcaactctatagagagacactgctgtcatcgcttttctacagatgagaaaactgaggcacagcaatgttaagtaactcgcttaaggtcacacagtgagaagcggcaagctacattaccagccacgtgaccttggacacattacctaacctaaatggagtaataaatgccctttgcactctttacaaccagcgttacattaaggcagatattattaaaattttagagattctagagactgaaggtcaagggtcctgagagtcttgcctgatgtctaagagaaagttagaggtgatcaggattggaacccaaatgtataccaattccccttgaccctggcagtctgctatggatacaagaggcagacagtttctatgtcaaaatccattactgctgtggtcccctgctgtaaactgctgcttgcaacagaaggacacccctccccccaagtacaatagcgatgataagaacacagctgattcggtattcaggcctcagatctaagcccatgcataatttactcagcactgccctgcagtcacttcagctgaggagagaccctataaattcaggtctgcacacactaatttatttcttatttattttactgatacatatctagggcctccagcgagctgctctaacacctgctcaaaggcgcctctggcaccaagcgtaactggggctggggtggggagcccctgaaatgagtcccagaaggaaaaccagatcccacagactagaaccatgcaggtaaaattaatttcctgttaaactgaaattaagcacttacgcattcctccacctcctctttcatagttcttggggctgaaaaggttgttaaatgcatttttctccttttctatcttagtaaagccctgtgtgcattcagctgctcagttgtgtccggctcttcgcagccctgtggatggtagcccaccaggcttctctgtccctggaattctccaggcgagaatactggagcagctggctgtttcctcctgcaggggatcttcccagctcagggatcgaacctgtgtctcttgcgtctcctgtatcggcaggcagattctcta

SEQ ID NO: 50292 - DNA, 1041 bp, Bovine  19866880704487
  misc_feature (1)..(1): n is a, c, g, or t
ncttagcacataacaaagggcatctaagcaaattctcttccctacaggcagccagatctgaaaaaaacaataaagacacacagatccacattgagctttgcatacccatttttggcatagaactcaacaatcagataagccgctttcctgggggtcatagaagggccatgattattatgctaattgaagttcctttacacggaaatatgagaagtcaagtgtaagtctttccatttaatgctattattggtatatgaaataccttgtgttatctgcaaagtctcccaggtaagttaagtgtaactaacctagagtgcacagaacccttagggtccctgagagaacaactttcaagcacttgtgtagctggcgtgttatacgctagttatcaacgaatatttttctattttcctccacatgtccccatagggacttgaattaaatccacaacacgcacttctgaagtttagactggccttcccttaattaccagaaatgaaaggtctggctcaaatgtagatgagttacatagttgactcaggttagctgcatcgtggcaggaaggaccgttttcaacattagcccaactttcgcctgcttggaattctctgaaaagcctccatttgaggggtaactttgtcagacccatttcttgtcataagctggaggaaaatcaatcccagtatttgggaactggactcaatctgaaagcaataggctcgtcacatttaattatttcacactccactcaccaagcctcgaaagtgtcaatttcacctgagggctaaggggaccagggaagagaaatctgaccaagtgtgggaaaacaataaactatggttaacagcaagagcaacctttgaaagttagggaaaaaaaaagtttccccattgaggaactagaggagggttggaagagagagatttgcagattgattttcttctgatatttttggtaaaaaattagaattctggaaaaaacgtgctgaaaggaccctcagagatgatcaggtcaaacaggtttagtttattgatgcagtga

SEQ ID NO: 50293 - DNA, 910 bp, Bovine  19866880721750
  misc_feature (1)..(1): n is a, c, g, or t
ncatgggaaagagggagactacagtaaagatgggagttctcaagctagtgcaaagcgcagggagaagggggtgggggcggatcagggagtgaaaaggtagccacagcaaagaacaaggacctagggtggtcgttcccaactgcgccccttcacgtctgcctgggcgatggccacaagtcctgcatggcctctgccagcagagggcgcccggggccttcgcatcaatcagctctccccggaggcaaaacaggacacgcaaggaacggagctgggggagctggggacgctcccctgggctggggaccccagacacagcccagagggcagctcagaatccacccatctggggaaggtgacggggaggatagcagggtgcttgcctaaactcagttggctcgaaaacaaatccagattctcagacttgggtatgggtgggtgcgtgtgtagtcgaagctaccaggcaactaccgaatcctaatagcaggaagataggaagcagagtaagtactgtctgtgtattgatcctatctgttgatcatcagctatgtgcttggtagtgtgccaagacacatgtgagtgcgtgtgtcatttttaattgcacgagaattctgtaactactattattattcccgtttacacgtgaagaaatggatactcagagaggtctaggaacctgtccacctgagggccaccatcaggaagtgacaatggggctcctagcttagcatctggtactcagggagcacacgttcaaggcatcagtccagaccacgtgctcttgatccagagtaacctgagagcagggcagagacaggtgtgcttctgagcccagggatgcagtcatgtgtgtgtgtgcataaatgtatgtgtctcaaatagcaacaggggcactgtttctttgtacaaacct

SEQ ID NO: 50294 - DNA, 828 bp, Bovine  19866880734566
  misc_feature (1)..(1): n is a, c, g, or t
nctcttcaaaaaatggtgctgggaaacctggacagctacatgtaaaagaataaaattagaacacttcctaacacctacacaaagataaactaaaaatggattaaagacctaaatgtaagaccagaagctataaaactcttagaggaaaacataggcagaaccctcaatgacataaattaaagcaagatcctctatgacccacctcctacagtaatggaaatagaaacaaaagtaaacaagtaggtcctgattaaacttaaaaagcttttgcacagcaaaggacactataagcaagatgaaaagacaaccctcggaatgggagaaaataatagcaaatgaaacaactgacaaaggattattttccaaaatatacaagcagctcatacaactcaatgccagaaaaacaaacaacccaatcacaaagtgggaaaaagacctaaacagacatttctccaaagaagacataagcacatctgggtcttcttcagctcagaggtttgtaaggtgtgcttctcctgtctcagtttactgatctgcgaacctggggaaagggtgaggtcagaaatctggcctttcaagtcctgagattctaaagtgtctcccgtctccctggtgcctgctccagttcatttactcctccaaaatatgtcagaaaacacacataaacagacacacacacacacacacgaaaagatgctcagtatcgctcattattaaaaaattaaagtgaagtcgctcagttgtgtccaactctttgtgaccccattgactgtagcctaccaggctccgccagtactattttccaggcaatagtactgggagtggatt

SEQ ID NO: 50295 - DNA, 594 bp, Bovine  19866880764361
  misc_feature (1)..(1): n is a, c, g, or t
ncagtgcctgctcacagcctaagactcccccaatcatctgttcaactgtgtgccgagggggaggtggcctcttcagtccccatgccaccagcacaccacctccaagtcacacaaacctgggcagcatgcccccagagcccgcgcctcctgtagctttcctgtcatcagccttgccccatgctgataggaatgccaagcaaggggagccggccaccctcccccacccctcacaaggtttcacttcttgcctgtccccatctaagaatatgtataagcattttggatatattaatacacagcgaccagcatgcaagagccgatcacccctcagttctggggaaattagcatttaaattgaggtatttcagggaagtaaatcaccccagagccagccagcactgtctgcagccttttcttatggagagaagacaaggaatcttggcctgcgtgctgctgagttcgcagggaggggccactctccttggcactccgaggctgtccacagcagccccaaaagggtgcccccaaactcccaacactcacgagggcatctccccggtttaaacaaggacctgtaacttacctccagctaag

SEQ ID NO: 50296 - DNA, 1488 bp, Bovine  19866880842306
  misc_feature (1)..(1): n is a, c, g, or t
ntaccccaggcttattcctctgagtcgtcagccccaggaaaagttattgttttgtgagttggttgtttttccttctgctttagaacagctggtccaccttctagacctgggggtggggtggtggaacagctcattacaaattttgtgctcggagcaatttgcattccataattaatgaacattaaaatgcataattacaaacagaaacaaatggcttggtgctgaggaaaagtcaggctgggaaggagccagagcaggcacagggggtggaggaggaagctggagagagcagggcagtgccagcctgtgagagaaacagctgggaatcccccagccctcccttctcagatcctcaaggctttaagactcagggacccaggcccaggatcttcctgtggtttctcttctgagatggagcagaatggaggctgtgaaactctggagcctggctggcctaggttaggccccaagctccgtcacctacttaccatgagacctcaggcaaaggagcaatgctgcaagaagtggggtcatcgtcagctggacctgccccctctctcctgcccgcttctggtcccacagagcctgcctcccaaggctgcttctgtgagctccaaggaagtacttagagataattgaattcacttacttcagtaatctcttctaagtagcaaagcagatcactccagtcctctgccaatagacctccagtgccttccggttacacttagaataaacttgagatgccttctcatgaccagagatgagggttagcaccttttctgtatgaagggccaggcagcgaaacattttagaatttgcaagtcatgtgtgatcctttcgtcatcatcttctttaaaaacaaacaagcaagcaaaacccttttaaaatgtaaagagacatttttagctctagagctgtgcaaaaataggctgtgaaggagtggatttcttttccctatttctcccactaaaaacaactaaagcctccagaggtgatatataaaacaaattaagactgtgggcttcacaggtggtgctaatggtcaagaatcctcctgccagtacacgagactcaagggatgtgggtttgatccctgggtcgggaagatcccctagcataggaaatggcaacccactccagtattcttgtctggaggattccataaacagaggagtctggtgggctacagtccatggggtcacaaagaatcaggcacgactgggcacacccaagactgtgaaaggtggagagaaggaggcaggtcagtttaggggctttgagaccaaggaagacatgttggtcattccctgcattttctttttgcctcatgtcccaagcttggagtttaaggagccagcaactaagaaataaatgcctgtagatagaccaaaacaaacaaaaagcagaaaacctccaccaaaaaatcaaataaaacaaaaaaacaatcaaaagccagctttcttcagccagagtattaggaaaagg

SEQ ID NO: 50297 - DNA, 2207 bp, Bovine  19866880878143
  misc_feature (1)..(1): n is a, c, g, or t
nctgcacttcaccagtcaagtcgctgacccagaacctgggcgggggagggagccatgggtatgtggggtagaggcctggtgcaccggtcagcatctcctagactcacaagtgcctgtgcacaaggtgccagaaggcggcagaatctattctctggagttcctcttccactgaccaaagcctttgtctaccccatcctcccattttctaactctccacatattttcatttcaatcttaaatcatcctacaagtatagttaatggaatttttaatgtaattaatcttcccatctattaaaaaatatcttatgtaggctattcaggcagttcaaaaataaagacatttaatgaagtagaaaataaaattcccatcatccagaaatagccagaattaatattttcttgaacattcttaaaacacctctctctctttctcgatctgtatgtcaatgagtacacaaacacacaaacatgccaactctcaggaaagctgtttagaaattgctgtttttttctcattggtatgtcaaatacctctttccttgttaataaatacagacatacatgtgaaattaaaagatgagagtgttcctatatgagaataaacaggaaagcaactgggttgtccaaattatatgaagattagacacgcagtctaattgggaaagtcttcctgggagagttgaaggaactgagggctgttgtttctgcagatgagaggccttcggtgggatttattcatgcgtcaaaatctgaaagccataagacgatagcatgagaagaactgagaactgtcccatatgtaagaaatgtttatctttttaaaaaatatgtatgtagttttagacagttttgcataacaatgtaataggatattatcacaaagaaagcttcatctatcgtttgcggtcatgtcaacagaagtcagaactggtaagaaacatcaccatcagaatcatcctcatcctgccaaatagttaataattgcttgtaggagtggtaatactagctactatttactaagaaatactgtatgccatggagtaggaaatggcaacccactccagtattcctgcctggagaagcttatggacagtgcagctggtgggctacagtccatggaatcgcctggagtcggacgtgactgagcgcctgacacacactgtgtgtcaagctccttactaagtattttaagagcaatgatagccacgaacattaagttagcatatgctgtgggcattctagcactttccacccactgatttatgtcatcctcaccatggccctgtgaagtagaggctgttatcatcctctttatacagataagaagtggcagtgttaagtaactttcccacatccccctgatgggaagttaaagagccaggacagtgcaattaccacttcacaattaaacccttttgagataccatggcctccattttgcagttgaaaattctcaataacagagaggtaaactgactgtctcaaggtcaccatctagtgagagggaaagtaaggattcagatgtatatctgactgactccccagccctgggcttatcttctaatccaacatgtcacatcacttcccattttatagaaccgaaatgaaaatgtgaatcccctgaactgttcatctgtgtcgctgtcacatgcttttgagcacctgcagtgtcccacctaccatgctggttacttggaacacaatgggagatgagataaaagtggctttagacatcgtggtgtttagatacagtgtgcatgtgtgtgtggcatgcaatcttaagtacttaatttatagcaggtattgtgaagtaaaaacacagtgttccaggaaatcaattaacagtgggatctaatttagttggagagagtgaggggtgggtacatccactggattagaaagcaataagaaggctcacagtctagtttccaggggaagtgttatttaactaatacctggaagatgagtgggagttagcactggaaaagttttcaagcagagacagatgttctaagagggaaaggaacttgactgacttcaggaaatgaagaatctggtgtggttgaagctgagaaagtagggaggagtagtgggaggtgaaggcagagtggtaagcaatggcagatcgtggggatcttgcaggctaaggctttactgtaacagtaaagagggaaactcttaaatggataaatgaggggggtatgt

SEQ ID NO: 50298 - DNA, 1485 bp, Bovine  19866880913960
  misc_feature (1)..(1): n is a, c, g, or t
ntacaagactagcctgattttaaagaagcgacaagcactagatggtaagagagatacaggtaatgtgccatggggacgctttgtctggagggatcagggtgagcatcccaaagttgatatttattccaatcagacctagcaggacagtctggctttatccgatggagcgggtttgacgatgcaacctaggctgacggaactgccccagcaaatggcagcaggtgaagacgtgcaggctgcgtctgtgggtgcttgggcagaaaacagaatggaatcttaagctagaaaggccactctggctaaattaacaacaggtaataggtggctcagacagtaaagaatctgtctgcaatgcaggagacctgggttcgatccctgggtcaggaagatcccccggagaagggaatggctacacattccagtagtcttgtctggacaattccatggtcagaggagcctggtgggctacagttcatggggtcagaaacagttggaaacacaatgaagtgactaacactttcaatggcaatcagaacaggaaaggaaggaagggaaaagggtgggtggggatggttgcagctgagggtgggtgaggatggttgcagctgagggtgggtggggatggttgcagctgcagggacaggatgacaaagcagaatgccgaagatgggactgcacacaatatctcagtgagtgccacatatgtatacacacacatatgtatatctggggttaagtaacatgtttaaggtaaggaaacagcagagccaggatctacactcaggctgtccatctccaaagtcagggcttcccatgccctgctacacttcacccaacgtcaggctaagaagtggagaattgattacgaaggccaagagggagccgccacagttatatgcgggaatgacgcgattcaacaaatgcttgcagaagatgactctggtgtcacgcgtaccccatcagctttgggcaattcctacttccttattttctaatgaagccccttctggggtgagtaggggcagacatggtccatttgtagcagtccccaagtgtcccagaggagccctggacgggctcagtccctctgacaaacgctccagcctcccacggcccctgggggtgatttatcagagcagcgtcaacgcctctgcccagcagcctgtgacccaaggctggcagctcaggctggggtttttaattagccgagagagggaagagtcaggcccttcaggatggagagagagagacaccccgacggctcataaatccagatccaggggtccagaggctggtgtctggcacggggcagggaggaagggaagaacagactgactggctagcttttcagccttttcatggtctcctttgctttctggttcagatactgcaggggctggtgggaaactgtgccgccttttacacagcaacccctggggaggcactttctctagcttggctgcacgaccaaaacccagggaccgt

SEQ ID NO: 50299 - DNA, 1057 bp, Bovine  19866880995675
  misc_feature (1)..(1): n is a, c, g, or t
nccatgggaggagcctggtaggccccagtccatggggttgcaaagagtccgacacgactgagcgacttgacttcactttatcaaaactaagcatcatgtcatatgacagtataaccattgaatttatttctttttgtttttctttgcttcttattttctttttaagtaagcatttgtatcattttctcgattacaaatatgatgaataatgatctcaaaagtaatgcacgttaaacttagttttaacgcagtgatacaggtgtctctgggatttaaccgtcccctttctctccaagggaggacgcgatgctgtccacctacttcgaaaccatcaacgacctgctgtcctccttcgggcccgtccgtgactgctctcggaacaacgggggctgcactcgcaacttcaagtgcgtgtctgaccgtcaggtggactcctcggggtgtgtggtaagtgcccttgcccgtgagcatggtgctggcccgggggccaaggctgctagcgggaggccccttctgtgagggggcagctggtcaaggtcgtagctcctgcctttgtggccttcagtatatcaggctgctgtccttggattcctcatctggacagtgggatcccgatcacacgtaactcctgtaagtgttggaagaatgaaatgagctattagagctttagtgcccactattcagtcggtcctcgagagcccctggcctctggctcaccaacaccccagccctgcccctgccccaccccacaggtacaaaagccgctaaaccactgcaagctcttacttggattaagagtctgagggcatagtcaacgaagagtgagcatctctcaaggagatctgtttataaaactcgggaaaacacctctggataggatcatgtataaaggctcccagaatggaaatgagttggcacgtttgccctccccaacgtattgacgctgggatttagccttccaggaagttcacaggccatttgggagtgagatagggcctgttcttgtctctgtgcagtcagtggggaacacggcatctgttcggaagaaaagtagcag

SEQ ID NO: 50300 - DNA, 1848 bp, Bovine  19866881006575
  misc_feature (1)..(1): n is a, c, g, or t
ntatctgtgtttatgtgtatgtaaacatatgcaagcatatatacatagacacactcaattatacagttgtatatatgaaatacacgataatgtatatgtatagacaagggcttcccgggtggtgctagtggaaaagaatccatctgccagtgcaggagatgcaagagacatgggtttgatccctgattcaggaagatcccctggagtaggaaatgggagcccactacaggattcttcagttcagttctgttgctcagtcatgtctggctctttgcgaccccatggactgcagcacgccacaattccctgtccatcaccaactcccagagcttgctcaaactcatgtccatcaagttggtgatgccatccaaccgtctcatcctctgttgtccccttctcctcctgccttcagtctttcccagcatcacggtcttttctaaggaatcagttcttcacatcaagtggccaaagtattggaatttcagcttcagcatcagtccttccaatgaatattcaggacaggattcctgcctgaataaattctatggacataggagtctggcagactccagtccatgggggcacagagtcagacgcaactgagtgactgaacacatggatagaagtattaatataattatgcatagaatgcatttttgctgtgtaagttttattccctggaatagtgcaatgcagaggccctagccaggcacagtcctgtccttaggcaattcaaatatattttatttaatagtcatagaagctccatgaaataactattcctattgtagacatatggaaattgaggagtcctgccaagattaagtgatttgttccaaggtcacacagttatcgaatgcctgggctaggatgtaatccatgcttgtttgactccaaaatccagacctttgccttccacccaagttcatgtcttatgtgagcaactgacagagaagaaagtttttcagtattagcaaagcagagctaaaggatctttgagttttctgagcaactgtctatcaggttcattcaagaagcactgatcttagatcaaaaagaaatctgataccaagattgggtttgatgcataaattcccaatgaattaatgaagacattttttttaaaagaaagggagacaaaacaactgaattattaaattaaaagtaaatagctgcttttaatctcctcaattattctttaaaattttaagttacttaaagaaaaacaagaagcgttttatgactttgttatttttccctgctgcctagcttgataccaaattgttatatccctggggagagaaattattttttgagatttcaacacttcaaacctcttttgttcagactcaaacacccctaactcagctatgaagcaagagcaggcatatgtaaaagcctgtggaattctgtggcaatctgttttagccagactttgatcacaatttgaggtgggaaagacagaaagtggtagaaacacaacaattgcctgacctctatatggggagagggagcaacacttggaaacaagtttacttggaagtatgtctttttctaacatagaataccagtgggctgtctatatccatgcttccttttctgggacatctagtgatggattcttcagtgtctcttatatgacatgggcttcacaaatatattaacatttcattttcccattgagggatctctagcttatgacagcttatttccatggaatctactcttttattcttttttaatttaatttttattgaagcctctttaatttgcagtgttgtgttagtttcaagtgtatggcaaagtgaacagttagtattatttttcagattattttccattataggt

SEQ ID NO: 50301 - DNA, 1092 bp, Bovine  19866881063333
  misc_feature (1)..(1): n is a, c, g, or t
ntttttgagatgtctgtcagagataacattccaaggcttgctgatttgagatggccactgttctgagccctctagatcgaacccaggtctccagcattgcaggcagattctttaccatctgagtcaccagtgaagcccctcggtacacataaactcacttaattctcacaactagagaagataggagttactgtcctcattttacagatgaaaaaaatggggttcatggaagttaagtggctcagctgaggtcacagagctagtagagctagaattcagactcaaaacatcaagcgccagagcccgtgctcataaacattacacaatatgcttgcttcacacactttatgtgacaaaatctctggccttctcccaaacacatcctatattttctgttcctgggtgttcaacatcatcccattctctgcagatcccaactgtcatgaatattcaagaccaaattcaaggggtgtctcctccatgaaaattttcatggtctctcctgctgtaagtggtatctcccaattcaactcccactgagcattttatcttttcttctcttgtggtgattaccatttggggactgaaaagaaagttaatatgactggagtatagcatggcaaataatcatcagatatggatgcctcagcactctcctacagactgtgagcatcacgtgggcatggggtaggtgtgctggcatgcctcacaatccctagaacaatgctctactcttagtagttatatcaactgggattagttcagtggaaagtaacaaaaaatcaaaaccaatgaatttaatgatagaagtctggttatcgttctcataaagcaagtctgtagataggcagcacagaactattctagtagttctttggtcatcaggtacccagattgcttctgtatttttacttcttaatccctaagaagttgatcttcttggcccaaaatggctgcttgagttccagccatcacatgcatgatctaagtagtcagacagaataagaaaagacttcatagggatgccacacagcacttcttatatcttatggaccagactttgttacacagtcattcctaactgctaaagca

SEQ ID NO: 50302 - DNA, 1357 bp, Bovine  19866881099716
  misc_feature (1)..(1): n is a, c, g, or t
ngtcaggggaggctggatggattttccagatagctcttagagatgtaatacagtagaggttcaggaaagaggcagtagagaagattggctggcatgcttgaagagtctccatgagaaattgtgttaatgaaatttgcacatggtttgccccttccgcatgccttctgcagcctggtggattcccatccaggctggagtgtttctgatctcatcttcttttcttcccagagagacccaagggcattgagaccatctggtctggtgtgcttctctggattacaccccacctaggggcttgcagtgggagaagggaggcatgtgccctcaatttgtctcctcttgaaaaaaaagagtcctgaaaatccagaaaccccatgtactagcctcttgtccccagtcaatagcaccgcctccactccactaccaagcacacagctggcaacagtgctgtttccatggtgataatgaatggcaagaggcagtaatcaagaagggttgctggagtcataagtcattacagattgcatttaaagggacacagccacctttaaaatgataaatgacttcatagcctctccctgccccagtctcccagaaacaaaggtttgctgaacatttggtttgcatgttgattttcttgatatttcttttcatttggacagtgggatcagatgggtcaatctttcatcaggatatcctaagcctagcagttcacacgctaaggtttacgatggctaggatggcagcctattcaaagaggaagtccttcctctttccctggcagaaccttgcatgcatgcgtgctaggtcacttcagtcttgtccaactctttgcgaccctctggactgtagcctgccaggctcctctgtccatgggattctccaggcaagaataggggagtgggttgccattaccttctccaggtgatcttccccacccagggataaaaccgtgtctcctgtggctcccacagggcaggcagattcttaactgctgagccatgggagtcaagcccctccaaggatcttaaaagtgaaagtaaagtcgctcagtactgtagtaggttgccatttccttttccaggagatcttccccacccagggatcgaacccaggtctccctcattgtagacagatgctttaccgtctgagctaccagggaagtccaagtaccttactgaaagtcaaatgatcgcagaaaaatctgacattcattgacttttaagctgtatttcagaataaaaataatagaaactcacattgaatttggactcagaacacattgcttgggttccagccgtcctcgaaaagggacctgaggcaaatcccttaaacttgtggacatctatgcctgcac

SEQ ID NO: 50303 - DNA, 1659 bp, Bovine  19866881129716
  misc_feature (1)..(1): n is a, c, g, or t
ntctaactgtaataggtggcagagacaagtctcaagcttctttttataacctcctggctccaggattattcccaagtgtcccaaggaggtcagcagagagagcaatcgcttcctcatcatttcccttgtgaatgaagccttcggagaccagatgcatccacttcattataattacgttaagtgccgcctgattgggcgctgttcatcacccctccggaaagcggcttcgcccagtggacatacaagcagcctgcttgggctcagcgcacctccctctcatccgtctgtgtccttggcaatggctgttcgtggtgcccaaggctgtcctctggaggagaggaagcagtgggggtaacatgtgtggcctgggttgactccccctcctcctccctggggctcagagtaactgtgcacaatcagctgcaccatgagacctctgcaccctcatccagctcttaacttgtcaggatgtcgggaggaaggtgaccttggtatccttacaggtgaacctcctgggaggttccttttgtcctgaggcatctgattgtccttgctgcgggattctgtgtcctcaccttgtaagaaaatgaggtctgccccatccttcaaaagggccagagcatggtggagactgttctgatgtcaagggcggccttttgtaacctcagttgtctatgcgtgggttcagggaagggggatgtgagttcccagaattaagagaatggggctggcaaataagcaaagagtccgtgggagagggaggctctaacccgggtatttagggctgagaaggactgagacggaaggtgcagggaggaagctaaggtctctctagagcctggtttttaggtgtgtggttctggagcaaggctgccttggttgactcctgatgttagtactttctgagatctactaggcatgcataacgttgacctaggagtaaatgtcgccgtctctcattgtcctcatctttaaaatggggaaagtcagagttggcagagttgttgttagactaaatgggttaaaacatgtcacagggcttagaggagtgctttttacagataaaaggctccactcatgttagttattatcctattgagagtctcctgcaaatagatgaggcacttcgtaggctgctttatttagttctaacaactgctcagcagttcatttgttcattcattcaccaaagattcattaaagcagtagcaaaagtggctggcatgaccctgccctcaaagatgttgtcctttaatgggaagaaatggcaacctgctccagtattcttgcctggaaagttccatggacagaggagcctggcgggccacagtctgtggggttgcaaagagttggacatgactggacaatggaaccgcaatgggaagacaagacttgagacgtgaactgaattatcagttactgaccaccatggacccaccaggaagaaaatgtgctgagttctctgggggaggagagagggggacttggcctcagtttggctgttcagcaagccctttctgaggaaggaataaactgaagtcagaaggatgcacagtgtttgccccaatgaggggctgaagaggcagtggaagaatttctacaaagaaagagcctagcccgtcctgtgacctggaaggccaatgtgactgggacacaggg

SEQ ID NO: 50304 - DNA, 823 bp, Bovine  19866881169560
  misc_feature (1)..(1): n is a, c, g, or t
ngagccggcgctccccttaggttcttccaagaagcccagagagaaggtgtcaacgagatagctctcacctcccctacagtttccccagcctcctgaccttggcagttgttttgagaggacagagtgggaaacaaggaactcgcagtagaaggccagagttctggagtccaccctggggtctcagaaaacgcctgaactttaagaatcctgaggaatcatcacacggtccctcattccatccccggtgaacatgaagccctgagaggcgcagggacttgtttacggccgcccagttcctacgtggcagagccaggatttggctcccagggagctcagttatctccccagcagcctgacctccatgtctcagctggccgccacctccagcaagccctccaggcttacctttctggtactggagccacagctgctgctggaccttcttgctggggaagtgaatgatgcaggtgagctcggagccatagagggcctctgcgatgtagtgtgagccatagtgctggatgaaggacagcagctcctcccggctgctctctttggtcaggatcttgaggacgttggtgaagcctggacagaggaggagcatgtggaggtggtcagagtttgggaggctggcgcccagcaaatggcaagcccggatttggtaccttgtccctcaccataacttcggccaaatgtgcatagtatccctcccttacttggcaaagactgctctctctggtggacacacgagacaccacccagagggagtcaacagcagaggaaggacaaacgcggcgacccaaaagccacaatcaggaaaaat

SEQ ID NO: 50305 - DNA, 1200 bp, Bovine  19866881197019
  misc_feature (1)..(1): n is a, c, g, or t
nattttagtctttaatccaccagggcaggctctgttccactcgcagcctcacctggtgaagtctggcgggatttctccagtttcaaattgctcttgcctttatttctcagaggtgtttggtggagagaaattctatctcctcccccagggtctgttgctgcggttacccaagtgcgccccccagtggttgtagactttttttctcactctgagagcaggagcgttttgtccaagcttgcattcatctctcaggcacttatcagtcctgcgctgggtgggcagtgcatgcttaccctgtggtgggcgctggagagagacgatggatccaacctccttcctggccctgggaaatttagtctgctgggggaagcaggataccattaaaactgagatataaagtccattgtgataaataatatgatggcggtttctggggtgttacaggaacacagaagagagccttccaaccgtgtctggaatggaaggtggatgataggaagagcagagaggagggtttttaaaggagaggggagcttagaggattaggggaaacgaacctagggatatccaggagtagggtggagaaacggagaaggcaatggcaccccactccagtactcttgcctggaaaatcccatgggtggaggagcctggtaggctgcagtccatggggttgcgaagagtcggacacgaccgagcgacttcactttgacttttcactttcatgcattggagaaggaaatggcaacccactccagtgttcttgcctggagaatcccagggacgggggagcctggtgggctgccatctatggggtcgcacagaatcagataggactgaagtgacttagcaatagcagtagcagggtggagaaaaggagtggtcaaggtattcctggaggcagaaagctgagcgggggaataggaatgggtgggagagatcaaccaagttcaatcagagagggctgggggcctggggaaggagctggatacaagcatgagagagtgctaaagcatcttcatcagtcagtgacgaaagttatctaacgccagtcttctatttctgtaatggccctgtatctgaatttctcccgcactgtgttatctttgcctttttctgttttctcacacctctcctgcctcatcttcctgttgctcatctcttttcttctccttcatagatgtcttgtttcacttccat

SEQ ID NO: 50306 - DNA, 1844 bp, Bovine  19866881215821
  misc_feature (1)..(1): n is a, c, g, or t
ntgggttgccatttccttcttcaatgcattaaagtgaaaagtgaaagtgaagtcgctcagttgtgtccaactcttagcgaccccatggactgcaggcccaccaaggctcctccacccatgggattctccaggcgagagtactggagtggggtgccattgccttcttctgatatctagattaggggtgaacaaacccagtgattataccctgtgacttccccgaccagctccactccgggaaacagcagatctgtgggtggctccaaaactcagcattcatgagcaactgagacagagctgtctttcccaagcagtgtatcacctcagtatcttaatgaggtgctcctcaagtcctatcacacagacctgatacaccaggaagcagatggacctgggaaggaaatgaaaactcacagttgctggtgtgatcatttaaatcaagagagttgggccaagaaccaaattaccattgctgatccctcaaacacattttaagaagccagtgagaggagcaaattcattgcaaggcatcatcaattttgtaaacacagatgcaagtaaaaggatttcaaggggtgaaggtctgattctccactcaatttcttattaaatggaattcagaggctgaagttgaggtcaaatgcaaggtcccatggaagataaaactcatgcaaacgtctgaaaattcaaatgtttggtgcttgtggtctctgtaacctgtagtgggcaattcagactatcagtctgataaaatcacatgtgcacaagaaaataaatatatctctaatggggcactcataattttgaatagataatattaatgctaattataattataacccaatttaattgaactgatcggttataattattagtaacatgcggtcagcttacatttaagttcctactatctgccaggcactttacatgttatgtcaccttcctcactgttgattctccagtaactagaacatttcctagtgcataataggggcttgacataaatatatgaaataaatgcataaacaaatgaaaatcccttcactggctccgataaatagttctcatcttctttatgcagagaaagaaacagttttggagaaacaaggtgtctttctcagtatccaacagatattgctaatatacacatgtcagaatcagcatgggggaaggcctcttcctgagacactgtagaaatgtgtatacatgtatggatttccatgacaactaggatctgaacactttgtggcgattttatacattgtatttcctttcattctcctcctagctccttacaagttagggacccatactcccagagaaagaaaacggagctttaccaaattaaataattgcctaatttctcatataaaattctgtgatagaggcagataaggttgattccagtgccaaggtataatactctgaattagaatgtcccagttttggttttctttaatctggccaggaactaataatatggcagtttttaataaacaatgtatgaacttaataaaatgtatcatatttctgcagactttgagtccttaaagagcaagaaccctatagcatgatgtatgccacacagaggttctttttttgtttttttaattgaagtatcagttcagttcagtagctcagtcatgtccgactctttgcaaccccatggactacagcttgccaggcctccctgtccatcaccaactcccggagtttacccaaactcatgtccatcaggttggtgatgccatccaaccacctcatcccctgtcgtccccttctcctcccgccttcaatctttcccagcatcaggggcttttcaatgagtcagctcttcgcatcag

SEQ ID NO: 50307 - DNA, 1412 bp, Bovine  19866881219388
  misc_feature (1)..(1): n is a, c, g, or t
nagaggctgggctgccatcagcggacgccaaggaggcccctgtgttcctggatgtgactctgtctgctgaggggtaaggtgaggatgggaaagatcaaagtattggagccctgaaggggaaagaaccggttcgaccacaaggtggaaggcctaggccaccccagctagtaggcagggagggtctggagagcgccaacctctgcacaacctactccaccagccacatccttgattgcaaggaaattcaagagacattttgggtcttggtgaattctttccaagctaaactcactgagcagaaaaaaaaaaaaaaaaaaaactaaggatcactgagagtctttggggagaggtctgatttagtatcattaacactgggtgtggaaacagagaaagtccatgcaagactagtattatcattggtataattcagtcaaagtccctgggttatgggaggatgtaggtgagtaaatgctatgctgaaacagaaaatgcttaataaatgtgaatccaaaccgagtttcactcccagacattcaaagaagagtcgccccctgtccagtcttcttcacgtcagatggcaccccagcctgcacgaggtgctcagcaagcacctgagaagtgcccacaaacttgcaacccagcgtcagcatgcaggcacccacttggcttggcatgtggctgcaacactcgctaaatataaaaatgggaaaagtctatcacactcattccatgaataacacaaaggccttgatttgttcctccacgtgatgagcatgcgttaggtccaaatttaacgtggctgtctggctggggtatgtgcgtgtttttccaaaaagagaaaacttccaagcacttactcagccctaatgagaatgtctcatgcacagtaagggttaagaggggcctggagcacggagaccatgacgaaaggtcagctccgctccatcgcaggttcttggtaagtaccactgacgactgaatgaaaggcagaaaggaagggctggctcatagctccattctgctgagtgaccttaggccaaccacttcacctctctgagccctaccttccttacacgtaggctaggagtgacatttcctacacttgtgcatctgtgctaaaggtaaaaaggagaaaatactgtagagtggcctgaggagtgaaaagcaccagacttgagttcagttgtagctattatctgatcttttctagagccagttagaccctgtacattcttcactttgattctttttttcaatttactgtacaaagccattaattacagcttttcaaatcatcgttaatgtgagtctacatacatcatagacttaccattccagtgatttctgccctggcatccttctttaaggaggcagcaggctcagagttccagatcctgagcccaacagagatg

SEQ ID NO: 50308 - DNA, 1441 bp, Bovine  19866881239197
  misc_feature (1)..(1): n is a, c, g, or t
ngccttggaaagggtaggtccccattgatttaaagtgaaatatagagtctacaccatatagcaataagaaatggaatacaagaagcccggggtctaaaccctatcctgtcaccaatgtatgatgtgacttctaggtcttaattagctcatctgtcaaatgagagattcatgttagaaaatctcaaaggtcccagtgagcactgatattctttgatccttatttctgttttatcaggactttattcattagagatcatttattgagtcttagtagtgactcaaaattacagcaaataaaagagttttctgaaaacatgagaagactgtaggggatgacatgaccgttctctgcaaatatctaaagagttttatggcaagactgctgatcacttgttctcactttcaataaaaagaacagactttggttactgcaggcaaggatgtaattagacatatggagagatttcttgattactgcagggataaaatgatgcttactttcatactcctctacaggtgagagcttgggtccccaatgagtcaatcaatgaatcaacaaatctttgctaagcctgtttgctgctcattttcctcttcatgacattttactcaaagtatggattgtgagccacctgtatcaaaatcacctggagctcgtgttaaaaatgtatattcttagactcactcctactgaatctgactctctggagctaatgtctagaatctgtgttttaataagctccccaaatgatatttctgtatatcccaaatttaagcaaacactgtttttgagtttaatagccttaaacaatactttctccctacctggtggctgttaatataaataataatcacagatactatttgttaagtgccaactgtggccaagcatcttacttatataactcataactgacacactcaccctgtgaaatagggattatcccacctaggagatgaataaaacagatactaagtgacagagtgatatgatcagaaagggacaggatcacggcttgaaccctggtctcctgaatctctttccatgactccacagctgcttccctgacatgctggcttccaggaaggacattctgtgagattcatgttctgaagccatgaccttgcttgtatctgaaagaggaaaagaggtaaagaaggtcacagagatgcaagctcatccatattcagcttggtctgttcacttcaagtttcagaaaggagattgagcaggagatgggtttctagctctgtgcaaagatcccaatgtatagtttcccagaaaattcatggatttttttttcttttctttcaaggagaatgtgggactttgtgtgtgatcttactgtgacccctacaggttactcaaagcagaataagctgacgacctctttcacagatccctgtctaaaggagaggctccagggagccactttcaatg

SEQ ID NO: 50309 - DNA, 1218 bp, Bovine  19866881294890
  misc_feature (1)..(1): n is a, c, g, or t
ncacgggctaggtgtagttttccaccttgtgcctcagtgacccggggggtgaacattccatgaatatttattggttgaataaatacataagtgagcacttccaaaggttaccaaatacctttgcttttggaggctgggtaaaaagaaacatattcaagatttagaacaagataaaggtgcaaatgcaattgaagtttaaagataaattaataatagctgctgttctctgactcctagttgatcctggtatgtatttcatttgttttataaagatttgttattttttactgaactgtcaagcgacgtgataaactcagctgcaaagagaaacacatcttttctgccctcagaaagctcacagtctaactggggaggcagatacactaaaacaaagctcacaaaatatattttgacttttggagcctataccaagccaattttcttggcacacatcatttctaattttcttagcaatctacaagacaagcgtttaccccatttttacagatgaggaaactgaagtacaaggagatttgcgtagagatttgtgtaacttggtttatttaatctaggtaactctctgctcagtcatgcaaagcagtgacagaaatatgaactggtcctccttaacactgctttcgtgctatattcccttaattctcactccactctgctgtaaaacacttgaacagcactttgtacatttgccatcatttgtatgcatattacctcatttcagtctcacaaagcattctttcctatggagacaaggatactattacaatcctccatttacagagaggaaaattgagacccttaagaggctggatgacaacctcccaagtcacatattagtgcaaacgggaacaaaaaacaggtttcttggtgggggagggcatattctttgtcacttgacaaatacaacctccaaaatcatgcccctccaactccagacatgtgattccacgtgtctacaagaaacactgacatttttttctcgcggcagatccatggcactgcgctacggctggatggtggcagctttataacccctgggtgccccaacaatcccccgtttccccaagcagtgcttacattaagcttgctttcaggcgcttttccattgctcccctttccactgatgcatggaagggctctggagaccatggccagctctaggccccatttgaggacagcccattggtgcaaaccacagca

SEQ ID NO: 50310 - DNA, 647 bp, Bovine  19866881369117
  misc_feature (1)..(1): n is a, c, g, or t
ntggcttgctgccccctggcagtgaggaaaatgagaggtgatggtggaaagagtaaggacgtgttgcctgggcccttgagagcagctgggctgagggcagggggccagtcccaaacctccgcagcgtctgctcctctatggaatggaggaggggactgtgaggctgtgcgtgtgtgtggtcgtttgtgagatactgtgagcgtggctgtgtgtgagcttgcgtgtgggtggttgtatgcatgtgtgagattgggtgtgtatgtgcaatcgcttgtgtgatgtgtgtgcctgtgtgtgtgcgtgtgtgtaaaggtggacagtcatgaagtttggtgccggcatgagcaacggctaaggtcatttttggctctgtggggtagggacagagaaaggagaagaaacaggagagagagagttcctagaagattcctagggttagggaaatgatttgattgaaatctctggcaaagagtcagctcccagttagactgatttaacccctgttcttctccgaccccttaatttccttcccgcccctccatctctgtgtcttactccttctctctcctctcagtctccactctccttagtgttcatcctctttcctgttacgctctgctatgctaagttgcttcagtcatagcccg

SEQ ID NO: 50311 - DNA, 821 bp, Bovine  19866881401008
  misc_feature (1)..(1): n is a, c, g, or t
ncacccaagggtttatcatatactgtttatgaagccattctataaatgttcaaagactatataaaataaagcagctattactgttttatactcctctaaactgtgaccttttaggaaaggaccatttcccattttgctctgtatcttctgcattaaatacggtgccttgcacatagtaggtgctcaaggtgctcagtaaagatctgttaaatacatgaatagtgagtgggtgaatggctgagtagtaagggggaggtgtacccaaagataagatgcaggaactatactggcagctgtctgcaaatggctgataaaggtgcccaggagccagaaggtacagcaaacaggccctggaacagtttccactgcagatttcaaatattgctttcaacaaggagaggggagaggcagttaggtgtgaagacatcagggtggtctggtggaagaaagtcatattcaaagctttcttctttgtgtgctacagagctggaatcccagtatacagcccagtttgaaacgatgctgcctatcttgctttccactgatccctggtagcccgggaagcaccctgaaggtgatgtcaaaataagagccgctgttatgaaggactttccccaagctctctgagaagctctttctgggccctgggacagctgggaagaggaaggtgttgagttgtggcttaaagaatgggtggtctttcccaggcagggagcagggttggggggagggggtagaagcaaaaataaacaaggaaagaagacgaaagagacacaaagttcctttgggagggcaggtgggtgaagtttcaagagatgatg

SEQ ID NO: 50312 - DNA, 1005 bp, Bovine  19866881431134
  misc_feature (1)..(1): n is a, c, g, or t
ntaactcgggcggaggattcatttcccttccctgtccctcagatttctcatctgtactatgggatgactttataagtacccagctcccattccatagtcctgaacttctggaatattttattgtaggtctctttggggttcaatgtcaaggcctttaaggagtatttcaagtgataaataaagagtgtttctttttatcctgaagtggtcacattttagtgaaggcccctcggatcttactggatgaaatctcccagaataaggcacagtaataatgatcattaatattgcatgtaatcattaaagtaagtagcatcatattaccctcaactcagatgttatcttttagctgagagtcttctgatgctttcgcaaggcaaagcaggattgctatttgagctactcacgttaagcttcctggcttaacctaagggaggtgacacatggtagggaagacacactggactggctgtaaaagctgtgtcttcagcatcaggttctttgactttctaggtgtgtgaccctggaccagtgactcaacctctctgggtctccatccccttagctgggaatgtttctctggctcacatcacatggctgttgcaacaatcatctaagataatggatgtgaaaatttgttgtaaactgttaagctctctgcaaacacaaggcattgccattatagtaataaaaagcaaatggcacatgaatatttcacaagcatggactgggaccagttatttgtaaagtattcccacctaatggggttttataagtacacacaccctctccttattacagacttcctaataatctctccccaaatcttcaaactccctttgtctctccataatttcttcttaatgtccccttactttcataactatttattactgaactctgggtcccatctggggagatggctagaaaaatacatacataaatattttgtacagagacataaacacaatgaagccaggacatttcaattctaaactaagatac

SEQ ID NO: 50313 - DNA, 2714 bp, Bovine  19866881488913
  misc_feature (1)..(1): n is a, c, g, or t
ngaagcctcaactctgcctctagcagagaaaatctatttcaggaaacttactggcaccaagtatgagagtatccaaatataccctctgagataacagatagatggataaaaacagagagatggagtaagacggcccagtttccaattcatcctccatatccccgtccacttgactatctttctcctgcatctcggcaaccagaaaaatctctcttcattttacaggtgcaaacgatcatcctatcatcagacacaaaagcagaaggacctctaaataccatcaagttcagaggcggtaaatacctgacccgtctgtcaccactcccatctgctgaagtcaggcctcatgagtcaatcctaacaatctttccagctgagtcagtctgtagcatcagaaatcttccaagcttaacatccaaggcagccccgcccatttgtctgagttggcacctaagaggtcttctctaatttagtccaacctctcgggcagatggatgcaccgaagcccagggaggattttcaagacaagggttggagtcgctgtttggcttatggtcccccgactcacttccatgcttgtctctctgctttatgatcctgttccctcattgtagatgactaagccagaggtcagctcctaactcaagccaggccaataagattccttctctaggattcttcaaactgcagctcaaggaagagaagcattcactgtttggtggtaagaacatgagagccttagaaactcatggttatcacaacccaaccacgggagtgggagtggggaggaatgaagccatcgcggaatgatgcagagaggaaagacagaattctaatgccacataattcactcaacttccttcatccctccggccaagctgatctttcacccttcccatggcagccttccaacacagttgccattaagctaatttgaattaggtttctttctcctggagccaaaaacatctgactaataaagagcagaaaggatttccacgcagcatgggggcggggggcaacacggtggcatgctggatagagtaaaggtcttgagatcagaagctttgtgttcaaattccagctcattctcttaccagtggttctacttaagatcttagaacatcagcttcttaatctgtaaaacggtggaagaggggaataaaaatagccttgactttagaagatgactgtaaggatcacatataagatgctatataaaagcctctgcccagtcaagcgagaccaaaacgctgcctatgcctgtcttcagtgtggaatcaggactgaaacccaggcgtcttgactctcagcccagggagcttgccaaaaaaaaaaaaaaaaaatcatatttttatatgtctttctcccttctctctctctttccccactgaaagatctgcggtcccattttaacactagaagtcccatttgaaaagtgtttaacttctaatgcagatataacaagtcgtttctcagtttcactgtatctgcaaagccttctataattcaacatcaaatatttattattacatttattaaacttttaataatttagcatctcctgcatgtaagagagaagcttagctaactggttcccctttatccaacctgggtcacttcaatatttatattccaaagtctccatttgagtttcatttagcagaggctgcgccgcgggccgtccaccccagctgacagtcgatgtctgctacagcctccccagtggcaaagactaacagaaatccggtgccggatggtgtttgaggagatttaccgaggctgggcagaaacacatcctaatagacttcacttttattatgattgctaaactaaaatgggggaaaatatacgactctgggctcactggctgagtgacagccagcgaggctgggaagagatgcgggtagagcgcagatccatttgttgcggagtgcaaagctctttatgttaatgcttctcagaggagcttcacatgcctaaagacgggtagggaggtggtggtacagggcaaattccaacatccaaatcccatctgtgagtgctaaacagatgccctattgcccccaaagtctcccctgaccccgtttcatatttcaccttccacttgaatggaacagacttccacacgcactcagtggattcagtggtcagcaaagatgaggacagacggtccaatgcatggatccctcagtctcacagagaaccccctgcaccagcagcctgggggtgcacaagcctgatgcagacccaaaatccacgcttctggcagttgccctgagtgtgtctgtgctgtcgtgtccagctctttgtgactcatggctcctctgtccatgagatttcccaggcaagaatactggagtagcttgccacttcctcctccaggggatattagccaacatttactgagcactcaccctacaacttgagttcaaattctgattctgccacacactgcctgtaacctgttgggtaaatgatttaaacttctggtgcctcagtttcctcctctatgcatggtatagtaactccatcattgagtcattgtggagaaatcagaacgaacccacctaaagtttagacagggcctgatccaaaataaacgcttaatacatgtgagccatgattatttatgactgtggtgctaagagtttaagtgtgttatcttattcaaccggcaaaaacatccaaagatacaatagcaattatcattc

SEQ ID NO: 50314 - DNA, 1440 bp, Bovine  19866881523725
  misc_feature (1)..(1): n is a, c, g, or t
naaacagctaccaaggattagtgggatttgggaagttttcaggtaggtcctgatagactcttacacagaattatcacaggtagagctgaggttctgagcattaccaagagaattggaattatgctcctgggtgcatgcaggcacgtcccctttggctatgccaatcagagaaggatgaattgaagttacctttgctttattattttctccatttcaaaaatcacacctattatgggtctgtagaacctaatgggaccctggagattggaatcaatacctaatctatgattaagcaggtctttaatgcctaacccaaattctgactattctagctacactctttaattttgctttttaagtctgaaaaatcaacaaatgttgtttccctggcattgctgcaaggatttccttctaataaggtccttccagaagtctgagtgtataacctctgggatgaactgaacacctgaatggcagtaagaagacacagactgtactaacaaatccatcatgtaactgtgtgatctggacaagtcacttccccttctgggccctcgtttcctagatctgaaaaaggagagttactgacatatgtaaacttgcaagaccttttaacgctgaatgtttaggatattacggatgatcctatcatagatccacttagagtaaagtcagtgttatgtgaggatctatcatgttaggtgtttaagaagacttctattaatagctcgcctaaaagtcaagatatgcctgttagtttctgcacaaacagtatcacttttaagaatctgcagagggacagtaagggtcaggcagattaggtaatacacacacacacagagcaagtcaggggcaacgccaggtccaagccctggggacagtacatgtgtggggtcaaggctatacctcctgcttgagttgtcacattataaatacccccatcctagaattagaagctctccttctgggcatgacaagctggatgagaaattccatttcctttcccatcatttgaatgagaaaggggccaacattaaaatgggggcaattgtctttacgtcaccctgggcaccacttctaatcacaaacttgcagaccaacggcctcctgtggcactgatatggtgtgtggaaattatcatgtaatttacgacaggcagtgcctgaaagtgacttttcagcatctgctctctagtagtcccaagagcaggcaaatgaagaaagctcctgtggctgctggagaaacgtaatctcctccagttgcatccaacagcctccccttaaactcctcaaacagatccctttcctccgtttccctcatcccatcatgcctctctctacccctgatactgaaactctattcacccttcaaaacttccgttcataagtcccactgtgctctaagaatctgcctatcccaactcactccccgctgccccat

SEQ ID NO: 50315 - DNA, 1299 bp, Bovine  19866881784874
  misc_feature (1)..(1): n is a, c, g, or t
nagcaggcaagaacagaagactccaaatctgagagggcttttcaagacttgtcaccttgcagccctctcagtgtataatgtggtacccaaggttcacaggaaatgacttgctcagtgtcatctgtcaagttggataaccagggttggatggaaagatctgtagagtggaactagattggctacttctctcttcgcttctcacagatgggacaagtgtggctcagagatgggaaggtgctagtaccatgtgctagtattcatctggcagcaaaactgacccttgagcagaaatctcttgatgtggttaggctcagtcatgtgttatgatgagaaagaacccatgatttgtttaagtgaaggttatcttgggtttcacttttgtctttgaatcaccagttcattccagtacttccttgatgagccatgccactctgtccccagacttcccaagataccttgagttctgggtgaaactagactctgtgatccatcccttctcttgcaacccagcctggtcctgcgtgaccacactgtctcctcaccttccaaggaccacccttgtaacttagtccagccctgctcaggggcccaattttaccacccagatgtgggctcctctctgaatattcccaggcatccttcaatccttgaagctggcggttgaagctgggtcccagacactgaggagaccaggttcttggctgtcgacggtagataagcggagacttaaatggtgattttctggcctgtgatcccctgtttgtggatttcatcttttaatggaagtgcagtaaataaaagccgttttcacaatacgccaagcaacaggtcagaaacatctgagcctctggaattgatagaagggagctaagcgtaacaaatctccccaaattgcacccggctccacttgtatcagctcccagactgcatcccccaattattgtgcaaggcaattatttctgagctggagctttcggagaataccacgtgtggatggtaggtatactttcattgcttctcgccagatagaatttttcaccccattttttggctagtgtctgagctctgattgaatcttatccctactctccttcagcattttcttccccaccttagaggctgaagtcactcttcaagacttgttcaaatggcacctccctccatgcagtcaccctcctcctctccccagtgtttcagttcaaagcaatagtgttaggtcgagggtaaatttacatacagtgaaatgtttcactctcagtgtacatttcaatgagttttgacaaaggtctacatccatgt

SEQ ID NO: 50316 - DNA, 1333 bp, Bovine  19866881886816
  misc_feature (1)..(1): n is a, c, g, or t
ntacttctgaagaagtaactgaagggattcattctgtaataaaatgaagtatgacctatgttttagagcttatagctatcctgcaaatgaaatgagtgcatgagtgaacagatatttctttctaaataaaattttgtactgaaggggctttttcccttcatgcctccttctagactttttctgtatacctgtgcatctcaggatactgacagatttctaggtctgcaaatcattcagcatgataacgagcttcaggccagtttcttgtactgtatactggtatctttttcctttagtatcagatattgctttaaataaaagtattctccgctgaagcttaaaaccttgatttcaatcatatttaacctttaaaaaaaataaataataagtcaaaaatagggctggaagcagcttagaatcagttaattttcccagagctggtctgcacccacacctgggttgaatttcaggtttgcccttatcttctcatctgccttccacctttgcactgtattctgagtcagtattgagaacttaaaaccacacgtcttttactccgctttctgatagcatcatgttgttactctttttcttagtcacattcagctttgtaacttcatgtttgtttctttgaatgtctgcgtccctactctgtggggagtctgccttaccacagctggatccagcccaccacctgcttttgtggagcccctgtgctaagaatagtttggttgtttttttttttttgaatgcttgaaaaaaattcaaaaggcaaataataattcatgacatttgaaaattatatgaaattcaaaattcagtgtccataaatgaagttttattgttacacagcctctgtggctcttttgtgctaggcagacttgaatacttgcaacagagaccatatgaactgcagaggttaaaatatttacttcctggccctttacagaaaaagttggctgacccttgggttagacagtaagcttcatgaggacggccactggttcataagtgctgttgcactaatcccaaacctggtagcattcagtaaatgtttgctgagttactgaatagtggagtaaataaatttagggattctggctgcactgtacagggttctagcctgtgttgtccaccctcatctgagttctgagatttaggatctctgtgtatatggtagggcttcccaggtggcgctagtagtaaagaacccacctgccaatgcaggagacgtaagagatgcagggtcagtccctcgattgggaaggtctgctggagaaggaaatggtacccactccagtactcttgccggagaattccagggacataagag

SEQ ID NO: 50317 - DNA, 651 bp, Bovine  19866881889490
  misc_feature (1)..(1): n is a, c, g, or t
nctcctatttaagccacatctggaaagcaagccccagaagccctcagcccctggtcgcacctagcgttaagtttccatcagtagtctttccctcccctagctagagttctagttctgccaccgtcatttactggctgtacaattgtctttcctccccctggcccttaaatccacagccctgagacagcctccttggtttaaacatctttctccaggccctattaggttgagcaagagtgtgtggcatcccctgccgttggctcccaatggggcgaaagtgtcctgaacttgcactaacatctcttgcttcctcctgagccttcgacagctcagcgccggagggggaatgagtcattttgttaaaaataaaaacacgaccgtcttccctctaatggctttgttcatgatcactgcaggctggcgctgacatgcattccaagcagccaggcacagccagtgggcagcccggaacctggtctgcctggaaccactgttgctgcttggctgaatctcaggggtccagccagccccaccttgaccaggctgtgggcgatgtgggtgcatggatgacattagcacgagctgggcgggatggcgacgttccagaacatttagttaggggacagagggtaagattcacagcctacaaag

SEQ ID NO: 50318 - DNA, 3602 bp, Bovine  19866880562118
  misc_feature (1)..(1): n is a, c, g, or t
ngtgttgttgttgcaagtcgctcgtctgtctgactctttgtgaccccatggactgcagcacaccaggcttccctgtccttcaccatctcccagagcttgctcaaactcatgtccgttgagccagtgatgccacccacctatctcatcctctgttgtccccttctcctcctgtcttcaatctttcccagcatcaaggtcttttccaatgagcctgctctttgcatcaggtggccaaagtattggagcttcatctccagcatcagtccttccaatgaatgttcagggttgatttcctttaggattgactggtttcatctcctgggtgtctgggtatgttcttaaatagatattcctgagggagaatgattgccttcaagagaggaactaaattattctcatttgaatgagaggggtgttatagatcacagaacatagaggacttcccaggtaaggtgccatactgaatctatcttggagaatgaatagatattctcaaattaaacaaagtaaggagaaaggaagtggcaaaaggaagcacaccaatagcccagagctcagaaatagtatagagtgtcctggcagctgcagacacagttctttgtggctgacagctaggatgcaggggttggaggaacaggagctatagtgagagagtgagctgggggctaaatccaaaaggaagactggccctcgcaaccatgagtgattggctttacgaagaccacgcctcagccagcactcacgagccttttggaaagggaaccaccatttgcaccctgggatccgtgccggttcttcatgctggcagagtcccagggctgattctggtttgtgtctactgcctgatttgggtgtagccttctttgtaacagattttcccagctccttatcacagctcttgctcttgttatggcaacgcacgaacatctcagtggggtgggacatgcctccagattagttatctctgctccatttctcagtgttgtttcagttggctggacagggtgaagaggatgggaatgctactgagtatcactgaaccttctttccctctcactgagccgtcatgagcaaacattagcctgctgtaagctgaggtctaaggcttgtgtttgactcctcgtgatcctggatgcccaggaaaaatcaactggctgtccatcagagcagatgacaaggtcatgcgctgtaatgcctgattatgggctttgagagtcaggcagacctggggttcatatcctgcctctgccacttcctagctgtgttttcacaaagtaacttatttggtctttaagtttcctcatttgtaaaatgaggaccattatacctaccttctaggcttactttgtagatttaacagtgcagacccttaaagcaccttgacagtagttttgtgtaaaaacataatagcaatcaacattactaaatacctggagagtttcagattaggtaacagctgctttttctcacctaaatttctctaaagctttccctctagcaccttttctctcagtccggcagagtctgtgtatgtggattttcagccctcagagcccttatggcaccagggacccccatggcctcttttatagagggagagtgcttctttttctttctctgtgttctcagccccagtcacacggcagggcccacggtgagttatgtgcgtggatttatgagtagaataaataaaagaataagtgaaggagtcaatgaatgaatgagcacacacctctgattgctcctcatgtttacatgcacccaaaggatatgcaggtaaaatttttctgggcactggaggaccctagagaccacagagagttataatctactgctcttctgacgctgagactctttccagtattccaaccgtgcttgtctgtgttaggggatggagggctcagtgccacaaggtcatgcttttcactttggggaaactatgactgtaagagaggcctttcttctgttactacgcctgcatctgtcttctgctgcaatgtgaggtgacaggtgtatagacttagcacctctaggctacagatggccagacaggcaaagccaccgtgtgtgtgcatgtgtttaggggacgtcccatatgatgggacccgcaaggcccaaaaaactgtgtttactttgtgatagcagtcagagctgagcagacctagaaaagtagttcatgctaaccaagtttacaggatatcagtatggggtcataatttgttcattcaactgtagaaccttctttttacattgccagagtacatctatgtgctattccaggcatgtgggaagtcggctagaacctcagaagttcgcttactgtggtgactctgatatcatgagaggtggatgagatgacatccaccacatcagagggtaccctctcagaggatgggatgaggagcatcctccaggccaaattctctttcatgaaagagattcgctatataaatggcctttagcctcccttttctgctctggtatagaccacgttatctctgttgcaggacatggaagttttttatattcagtgcatgctcagtcgctaagtcatgtctgactattttgtgacccccatggactgtagcccaccaggctcctctatccgtgggacttcccagatgggaatataggagtgggttgctattttcttcctccagggggtcttcctgacccagatatcaaacctgcatctcctgcattggaaggtggattctttaccactgagccccctgggaagcccttcattgcaacatagaataaaccaggtcaatgttttctgccccttttcattgtcattgattgagttaagcagctgtttccagtgatcggctgtccctgtagctggtattaaggtttgggtacgccaacacagtagcgtcattctcagatacaccctggtcatcatgataaactcataccttcccacattcccatagccctcccatttcctgactttttgtgggttgagcatgtttacatgtgcatgatatcattcattatttgaggatcttatcagggtaactgtcagagagagaggcaggagcgataggttagtttcctcaaccttccttctggcccccttctccattttgacttcatctagtgtagacagattttccagtctctgcccaatgaagcactgtcctgcccaatgaaatccttcacacttcctgcttcctctcctctgaactacatagattggtgtggccctatacccattagtgaatcaaatccatagaactggaatccatgttgtgacctggagtgttccaggctcattcctctgcctttgggaacttcttggcctttcagctataattcagcctcttgaaggtctgaggtcctgtcttaccagctgctggagttgtcatcctgtgtgacctgaccccaaactctgagagagtaacatggcaaggatttcttttgtatggttactagtggaagagctagatcaggaaatacaatggcttaccaactttgtcaaagcaaatggaaagactcaatagataattttattccaacaaacctgggcgtaccaaagaggagagttgtcttttcatcctaaagtcctgcaacttttaaggtagtttaaaaggcag

SEQ ID NO: 50319 - DNA, 951 bp, Bovine  19866880581009
  misc_feature (1)..(1): n is a, c, g, or t
ncccgatttgacctcatcacagcctcataagacgggcagttcttacaccttttgttccattttacagaaaaacgaaagcttgaggctcagagagaaagaagactcattgcccctgaggccacttcctcagttctctctatgaagccctgggctgaatatttccacggccgggaaaatgcctggcctcgagaagcacgtctgctcaccccaacttccagcttatcctgggccggctttgctgaagaaatagcatggcgtgcatatgtgaaggggcctggaaggcatgccttccgggaaacggcatttcttgtgacgtagccgccatgcacggcacacaattatttatagtgctcaactttatcttccaggctgtgggtttcctctctcaccttttaaactctcaaatacgaagcctacttgaccactaatacactgtgatggcttcagagtaagtccccacaaatggaagctgctctttaattattcagaaatatgacaaaacccatcatcaatccccaggtctgagtcacagggggaccccggcagcagttcaagcattactcccaaaccgcagccactcagacaagaataacagcagatgcttgggcctccccaacaactcacccagcaataaacccatccttggggctctgtccctttggctgttgcatgccgggatgacaagggttttcaattggtgctgtgaggaaaggaaacctcccctcacaatacatacacactcacacattcacacacatgctcacagtgtcaatcaatctaagaggcagactaagaatgaaagatccttaagttaccattcagacaccgctatgcaatcagaaagacaaacctgtttgcctcattgctttcaaccaatcactggaagttgcacagtgatgtctagataccttgtgcatctccttactatatctttatccattccctttgttt

SEQ ID NO: 50320 - DNA, 1834 bp, Bovine  19866880735748
  misc_feature (1)..(1): n is a, c, g, or t
naatttccttttgcccatctcacccactgtactaaagaaaccaaaattgaactttgttcctgcctcccatgaaagaacctaataacccacaccaccctcgcgaatccatggaatcttttaaaaaatcagtccccaaattggactgttcctgtgtgtatatattaagtagacatttgggaacatctggataaagaatgactttccttattttttatccatatggctgtgcctctcagatacaacctagctgactttagttgattatgaaagctaaatgggccctgtatggactcaaatcttttgtttaaaacagttcagttcagtctcagtccatcaagtgctttatctaaaataagaccatggtgtcatagatttacataacaatgctttatattttgatggggagtagaattcatttcacatccctgactcagactttccgttttgattgaaagaaagcaagtttttttctgtgtgtatatgtgtgaatatgtttatgtatatatgtatttgtgtgtgagcatatatttatgtacgtgaatgtatatgtgtgtctacatatcatgcacacgtgtgtgtatatagataatttcatgtatcagtgagaaaaaatatgtggctgacataaagccatatatatgctgtgaaagtaaaaaagaaaatttaacatattggccaatctgcatagaacacacatacacaaatgcagcccatcttggaaggcaaaaaaaaaaaaggtactttcctgcctctaatggcttgataatagccattatcggcaacaatgcaaatgaaaagaaaataaaaagaggcatttttatgcactgcccattaaaagcagcatacacataaactcatgaacttggaaaataaataagcagactggttgctaaacaaaagcttggtttcatttccagtgctatcgatggatagtttgttgttaaaaagatagagctgtttaagctgtcccaagggaaagacttaaagtgggataaaaaagaatccagtggagtatgcagacctgggccaattgtaaataattgccattccaccatgagtccaaagagattgtgttgagacacggcccatcaaccacagcgagcagggctttcctttgggacaggatccaccaggttgcccgtggagccccatggggacagcccttggacaacgacggaggcgtctctgcctccgctctgtgataacacggttcttaaagccccacctgtctgtttttcttgctagtttgtcatgtgtcctcatatatctttagaatattgtctgttaattccggaatggaactcaagaggtcattaggtccggctgcctgccttaacctctctcatcaatttacctccataagttacttcaatatcaatccataaaagggtactaactttatttctcggtgcattaactcattaaatgaggtatgcatatggagtgtataatagtggctggcacataatacctgctcagtttatgaccagtttcattgtttctgtatttactattttttgaaaggcagttgatataaaagaaactttatcaagttcagaattagacagaattatgttcaaatcatcatcgcatggtcttagttaaggatttagcatccatgggccttagtaccctcatttagaaaacatggttgatgattcttggtatgttttttgactcttatgagaagtaagtgaggaaatacttgcagtgagggacatagtaaattctcggtaaggatcaggtaccattatcaacacctctagtgataccatttacatctcagtggaggacagtcacttctattactgaaactgccgacatcaatgggatg

SEQ ID NO: 50321 - DNA, 1114 bp, Bovine  19866880803624
  misc_feature (1)..(1): n is a, c, g, or t
ncaggaaagggtgagcagcctgctgtgcttggctgtggtttatggggagggaggttaagccaagaggcgccaggcactacttcaattacactttgcctgttccgagggctttaatcatgacccctttctcaatggatcctttcagaaaggccaggggggaaataggcaattggaaatactggtagtaatcagggtgccagacctccaactctactgagaaacatagctgggacataagattcattaaaggcaaaaagaaaactaagagagactagccattcctgaaggatctacgtctgtcggggacagggtggagggtttcttggagatcataaacaataagtggaaagagtaggtgacaataattagtttctggttttaattaggaggtctctgaggccagatgttcactgagaaagaatgaagacccctcctgagatatgtaatgaaacttagaccccatggctggggaagtgggtggaggcgctgggtttggaagcattaagggctccataggtttttggcctgaagcatcctgtgaatggggggagggaggctcaggcatttgtattctctcctgagcagtctgttcagcccagtcgagcacgcctgcttctgattaacataaggaggagagcccggagacctgactccctgcctgggctgtctgtgtcaggaatctggacctctgtgtgctgtctgggtctcactgtcatgagaaaacaatgggtggaggcatcgcacgagtcttccttggttggcatttctcaccaccaggctcctgtcccaagaagggtgggatacatggctagctttcaccatgggaaggggggtggtgcgggagggggggctacaagtaaacttttaccagccctctcatttcccagacacattcccatcctgtaattttttgctgtcgaccagatcaattattgcaccatgagctaccagctattaaagagccaaactcctaaataaagaaacatgggagatggacatctgcccagagggatgaagaaagaaaataacagccattgtaacagtagctaaagaacatccactgggcactttctaaacagtttccattggagtatcccattaaagtcccaggaga

SEQ ID NO: 50322 - DNA, 2535 bp, Bovine  19866880860417
  misc_feature (1)..(1): n is a, c, g, or t
natgggaaaagatcctgatgctgggaaagattgagggcaggaggagaaggggacgacagaggatgagatggttggatggcatcactgactcaatggacatgagtttgagcaaactccaggagatgatgaaggacagggaagcctggcatgctgcagtccatgagattgtaaagactcagacacgacttagcaactaaacaatgatgctttccttgccttctcatgctccatctgaagatttgaagtcctgaatttctcaggtctgtcataaatttctagagtaaaaactagatttattaaattgggcacatttgtttcaaacctattcaatccagataacaactcattttagcatgatttttccacttaataagaacactttttccaactcgatttggcagctcttaataatcgcagacagaataactagagatgcaagatattaaaaagtagattgttgaaagaaggaacagcagtgcatgagttgaatagcagaatgtacccagcaatatgtcaaacacataatagaaggcgatttcataggatttaagaatctaataagttcctagaaagacaaatcttagatgtcgagctgaataaataaatgaaaaattaaatccacacaagagacaatgtatggtgaaattttaattcattaatggaaattccaaaaacttctggagtgaagtacggtgggctgggtgggccgattacctgcagaaggatgtgaatcgggttgacatcagacttctcagcagcaacaatggatgcagcaggtaatggatcaatattcccaaatgtcgtggagacaattaactttgaatctggattgctagatccagtcaagtttaattcaagcttaagggtaaaatccagagattttctgatatgcagaggtttggaaaatttgccacatgcaagatcccttgaaaagaattaactagcaacgaagaaaaaatccagaagagaagaagtaggataaaagaaacaacagttgaacaaatacatcaggaaaaaccttatttgggggtttaaaaaattaatttcctaactggaatacttcagctgatttcaaatgcagtgtgcttgggttgcataaaggaggcagatggaatttaaagcctgctgaaattcttgtaacatagagaacgtagatgctgattatctctaaaattgttctgaataatccatgttcaagtatgtttatcagaagtataaagtaccaattatagaaatagatctggagtacagtccccaggccactaactattctggttaggggaaacagatcaaaagaacctcaactggttcaagagaagtcagagaagaaacaaagaattagaaaataactggaaagaatggcaaatagagaatgaattaactccttcatagtattgtaattactaattatagacttggacacttatatccaatactatgaatgagttaatgttgcttgttaaaagacaatgattctcatactgagagagaaaacccaatcttctttatgccatttgccacagggacgttaaatcacagtaataaaaaaaaaaagttcacgatgaagggatgtaaatatgtccacagatcagagtgcatttagatcaggggccaaaatgaggaccacatacagattgtggaggctcttcagggagtatcagaaacttgaaatctctcctgaagggaaatgagaagaaatgtaaagaatggcatgacttaataagatttgctaggcccatcaggaaagtttttgaggcaggtcaagcttgtggtggggaacatgcagtagatattcaagaaattcatgcatggagcagtaaagagctggaccgtgtcacagcagtggagaaaagatggtcagtattgttgatttcaaggagacagactcagtaagacttggagatgaggggaagagaattgcaagttggtgcacaggtttctgaagtgcaagccctggggggcatcttcaccaagatgggaacacacggggaagaagatacagggaaggagatgatgaacttgtgccttggtgtactggggtgttgagcgacagttgattctcaagattcagattttgattggctatgcagatcgtagagccactgtcttaccaggggaaggagtcatcattaatttataatcggagcttgtactacagagccggacttgcttctaagaggtaatattctttagatccatcgtctgaaaagctgtaactctgacacgaggcctgactctttccttttacattcagtggagagaaaaaaaggaatgaaaataatcacgtcttcctcaacccaattaggaaagctaaagatttgatgaagcaaagatcatctcagtcactgaattcccaaggctgtgcagcaatgggaatggtgtaggtgagaaggggaaggatgggactgttcttgatgccttctggcatgaaatgaagcactaacagcaaaacatttaggaaaattaagaagccccttgttgctctctgaggaaaagcaaccccttgggtgaaatggttgctaattatccttctat

SEQ ID NO: 50323 - DNA, 1167 bp, Bovine  19866881129724
  misc_feature (1)..(1): n is a, c, g, or t
nctttcagagcctcattccacactcttctcctgcatcctgcctttccaaatcaccagcaggaagtgaatttcctcttctctatacaactcagaatcctaattggaatgtgctactccatgtcatcctgaacacacacatatcaccactttcaagagattataagcaacttggaggtgataattgcttaattcatttctgccctttccccctcggtgctggctaaagcaccttccacatagtaggtatcctgtaattactggtttcaatgcctgtctgaatgaatgaatatatatcatgggtaagtgggaaacagacttctgcattcatttttcaaacataagcaaagggacaatcacatagatttttaagctcatatgtattccaaggattgagtctagaaaaaattactaatcagggttcttttctcttttcctttgtagaccatactctaattttttttttcaaaccggaagagagaatgaagataagacagtgattctggttgagtttggataattatatttttcacactgcttagcagttaagattgacaactactgattatctaagacactatgtatttttcaaaataattcacaaaacaagagtaataattggatataattgcaaaaccaatggacagtttcagcacactcctgaatttacagacctcagtttccccaaccataaaataaaaggtatggaattgatcggtgtttctcagtgtttgtttcctcaagacatacaacataattcatacagggttcattcattcacgaggtcaagccctcatctcccgcattgtaggcagacgctttactgtctgagctactagggaagcccaaatatacagtgagcatctactacggtaaaccgaaaccatgttgagtaaaggagatatgcattcgtcaacagtcatatatataaatgtctgcaccactgccatgcctggggggtaaaagtattttaactgagtgcagtgtggaagtttgagacagtcatagaggtcagaaataaataagaaaatggaaaaagctcctcctggagtatgggtacatgttagggattttcagagaaacaatgaataaaagagatatatttaaaggaattgactcgcaagattgtaagggctgatgattctgaaatctgtagggcaggctgatagg

SEQ ID NO: 50324 - DNA, 1342 bp, Bovine  19866881152384
  misc_feature (1)..(1): n is a, c, g, or t
nggaagaagagtgcaggtttttgaagtccccactgggaggcaaatacagaaaatgagatggcaacatcccttcttcctttctttgttgtaaaatttccctgccttaaactctttcttgtgcccttcaagaaaatcgttgtgctattggacaagtctttctccacacccaggccacatcatagatcttcttagactgcgagtattattcatcagcatgagctacgtttttaatatttccaggttcacacacataaaactttaaaattatataggtctatagatttctcttattactttttatattcaaatccattaatatgaaaaatttcaaagccattttagattggaagtaattcagccagatacgatttgaatatgaagtctgattttagctggtttagaaatagtgagagggtgttgcatatggctgcccctatttcaagagcctggctaagctcaaaaccataaagttcaccttccatagaactgcctctctctctgaatccaaagtgctcgcataggccagagctaggcatgagggacaaagctttcctgacctttccccaaataaccttgcaacacacatacacacacacacacacacactcacactcacacacatagaggaatgaataaaagaaaagaaaagaacaacaagctaaaaataatctctggaagtgaaatttctaatttttaaaaggaagaacttgggaagcatttttcacaggccttaaacatgtccaaatctgtatacctagttattctatttatagaaattaattccactaacttactggagatattccaaaaagagagggggaaaaaaaagactatgttcaaacatctcactgtaatgatatttatagcattaaaagttagaaaaaaatccagcatcagtggagtaggagtgattacaaaattcaacatacgtccattaacggatgcttaaagacaacagcttcactaactagcacagaggtgtcatgagcgagcaatttctcattcagtttaatagtcattaatattatattaatattgttttggcagggaagggcattttaatttaaataatttgcttctggaagcaaaagtggaagtgcatccacagaacagaaatttagattctttaattgtattaccggagaaggcaatggcaccccgctccagtactctcgcctggaaaatcccatggacggagcagcctttgaggagatcattttattgtttctcaatggcttcaacttggcatgaggagaggagtatgaatattccttaatcacttcttgtccacaatttcttacaaatgttttgggataaagtcatcataaaacatgtcaaaata

SEQ ID NO: 50325 - DNA, 752 bp, Bovine  19866881168045
  misc_feature (1)..(1): n is a, c, g, or t
nagtttaaggagtttatgttttaagagagactgtaaaaataacctagattgtgatactgccatttttaattttatctcagttctgatgaatgtttctctttaaaatgcttgccttcgtaaagaatactgataaccaccccccaaaacagattcccccaacttcctgcatttctaatcctttgatttgggttcttaataaataccaatggtaaaacaaatagtgaatgatggttttgaggttttggggatgttattttcatctacttttgggtttcatagatttaatacatattgctgctgctgttgttcagtcgctaagtcaagtccaactctttgggaccccatggacgacagcacaccaggtttccctgcccttcactatctcctggggcttgctcagattcatgtccattgtgttggtgatgctatccaattctttactttcaatatgtgctttatttatttcaagaattcaagtcatttcaattccatgagcatttatagaatgtctactgtattccaggctctgtgttaggggctcgtggttctgaaacatgaaacagagtgcctaactttaagtagttctaagtctgagcccgcgatttcaaggagtaagatctcaggaatgatggcaataaaggaagggtgtttacataaggggtaaagtttagactgactctgttggggaaggtggctggcaaaattgacttcaaaatgtggtgactttttgagctgggctttgaaggctgaat

SEQ ID NO: 50326 - DNA, 1760 bp, Bovine  19866881186773
  misc_feature (1)..(1): n is a, c, g, or t
nctcctgatgtggtcaggggagagataacagcatgtctgaatattctgtaaatcaccagagtcatctatttttgtctctctctagagaaaggagaaagttcagtcagtcttctggttttgaccataaatcattaaaaatttctctccaaagaatgttgttctaattgtcctacagaatcctcccaagtgtcctctaaagttacacactgtaggaaaactggatgcggggcttcttagggtctgtgtgtgtcgaagaaagtctagatgctacaacgcttttttcctccaccaacttcacatttccctgtctgtgcccaagcctgtcctccgcagagctgctgatgacctgagtttgagaggcctatgtttgggaatctcctgaatggccagttgacttagctactgtctggagcccagtagagacctgattctccacctggcttgtgtctcagatagagggccaggctgccttcaacacaagtgtttctgtgctttgtcttgcctgctcaacatgcagagctgatgtgcagggaggcccctcctcttcctcctccatctcctctcccaccaccagcacactcctactatcatgcaatggagctcgagactggagtggtgattagagcagttaaccttcatctcttaatactgaattgaagaaagggagaaaaaaagacagcagagcatcctctgatttctctcctaaccaggggttgtgtatcacaccagcagagagaatgcccaattgatggctctgccagcctgattaagccttttttatcttctctaagactgcagaggagcaaaggccacctcagccatcactgctctgaaccagaatctagcagtagagtcccattcccttttatccttcgagctctagagtcattccctggggctcacctagcatagcttcttgaattttacagttgggaaagttaataaacaaagaacacattcattcattcatccaaaaatctgtacacagcaccctttctttgtatcgtaggctttgtgctaagttagggaatcagagaaacatgagtcaagtctttgctgctgaggaggctctctgtctggtaaacaagggaattaaccagagcctggggagagctctaaccttgcaaggtactgatagctcatagggagagagtccagagcggcctggccctgggcccaaggctcttagagaggctgaatcaaaagttctatctctcttacaaagtattttttccaaaagcatctaacttggtcagccttggagttgaacacaatgttttctccctaccttgtgtttttcaaggcaagagtatttcaattactaccgtattaggcagataaatgtatattttagtgctttagtttggatccaggaaaagatactgcaactagttaccatattaagtgctgacgatgtgctgggaaatattggactctcctctcttggttctcagttacatatggtgtctgatgagttatgtaccagcaggcatagtacaacttagaacacactgtcactggagatgtaacagtagtgagggatggcttagtggaagacagaacctttgcctcagtcctggaagagtgggcacagtgttgacagagggctgtgtgctgcagaatgtcctgccgcgtatcatcctggataagctattcgccctgtggccactgagtttcctcaactataaagaaagaggttaattaataagacctacctacctacctcatgctgtgccaaataaagctttaatgcaaaccca

SEQ ID NO: 50327 - DNA, 1807 bp, Bovine  19866881188351
  misc_feature (1)..(1): n is a, c, g, or t
natgcatgatatagttaacttctccaaaatagttcaaagttttaaaaatgaatcatgtttccaacagtcatcaacggcaggccaatttgcctggcattaagtgatttcctagatgcagaatttaccaaatgatttctctttgttccatcgtttattcctgacagcatctaagaatcacaaaggaactaagcatttctggaggaacacacaacaccagtaagcatggttgtcatttgtcaagcccctttatgtgcccggcactctgttcaggctatatacacactactgtacttgactatcacggcaacactatgaagtaggggttactatcacaagtttttttttttttttaagtatctatttgttttttcagctgcgttgggttttagttgcggcatgcgggatctttctttgcagttcactggctcctttctagttgtagcacacaggcttgtctgctgtgggacatgtgggatcttagttccctgaccggagatcaaacatgtgtcccctgcattggaagatagattttcaaccactggaccacagggaagtccctatctcaagcctacttaatgaggataataaggctcaggaaggttaggtaatgttcctaaggcttccctgcatgccaatgcaggagatgtgggttcgatccctgggttgggaagattccctggagaagggcatagctacccacttgagtatttttgcctacagaatcccagggacagaggaacctggcgggctacagtccatggggtcacaaagagttggacacaactgagtgactgaacaacaccagcattttcaggttctgggcagctagccgcggggtcagtctgagcagacagccttccattctgggagggccaccactaaggaaacactcccatattccaggccagaggagggggcgtgatggcacctgttggctcttcatccatgtgaagcacatctcagaacagcttaatacagccattttacagagcagcaaagtgaggattagacgtagcaatgcattctgcatggtttctcctgagtctgagattctgaacctgcctgcctgcctccaaaaccagtcttctcttcccagcggtgttcttgcctctctgtttccatttagtgcacagggtccttttggtgtcccaagccagtgcagagtggctttcctctggcaagctgggcgtaaacgctgcagagctcattttcactctctgggaggagtcctttcttggatctcagatgcacggttccaccgcaaagctggatccatgtacgagggaggcagtaacgcttctggggggtggtggggagttcgttggttagatgccagctggctcagaggatcgtctcttttcccttttctggagtaagtgatgttgcgtctggccatacttgcctgctctggtgcccaattccatagccatttcaagtctttcctctccccaaaatgagcatttactctcccatggatcactcctgtgatatttctaaccatgtagctccagcttaaaaaacaaatcaggagtggcattctgtattttcagctatagctcataatttggtgtaaagcctgtcattgtctaagaaacatatccctgtgcagggaacccattggacaccagaatgaaattgactaaataaaagcagtttcatggaacaatttgcaaatatcactgcttcttgccaagcctttttggcaaaactgtcttcaatgactcgagagcttttccagccagaaagagatttgggttaccttatgcttccctctctcatttttctatataaatactttcattaaagc

SEQ ID NO: 50328 - DNA, 984 bp, Bovine  19866881334668
  misc_feature (1)..(1): n is a, c, g, or t
nacatcactttgccaacaaaagtctgtatagtcaatgctgtggtctttccagtgatcgtgtatggttgtgagagctggaccgtaaagaaggcagagcaccaaagaactgacgcttttgaactgtggtgttggagaagactctcgagagtctcttggacagcaaggagatcaaaccagtcaatcttaaaggaaagcaacactgaatactcactgagtggacagatgctgaagctgaagctccaatactttggccacctgatacaaaaagctgactcattggaaaaaccctgatgttgggaaagattgaggacagaaggagaagaagatgacagaggatgagatggttggatggcatcaccgatgtaatggacatgaacttgagcaaactccacgagatgctgagggacagggaagactggtgtgctgctgtccatagggtcatgaagagtaggacacgacttggcaactgaacaacacaacatgtcgtagactatatctcgggtgggcaaatattttctataaaggaccagagggtaaatattttaggcttttcaggccattcagttcctgtagcaactactcaactttaccactgtagtgcaaaagtagccatgggcaatacttaaacgatgagtgtgtctgtgttttaataaaactttatttataaaaacaggcctgtgagatttggttcatgggctatagtctacagaccctggactagaaaaaagggaaaaaaagaaaaccctacatcacagaggtgagatgtgtttgggtaaagagaaaccctagactggccctgctggtgaaaagaacaaacagaaattgaaacactcccagtttacttcagccctccacatcccaccctcttcctaccatgggactggagctcatcctctcctcttgcagaatcagcaagagctagaacagactgagactatgttcatatccagcggaggccacacgggcagaatatgcatgtccctt

SEQ ID NO: 50329 - DNA, 1113 bp, Bovine  19866881409981
  misc_feature (1)..(1): n is a, c, g, or t
natgaaggggatgctgtggaagcagggagcacctgcgggtaccaccaggcattccacatgaatgaggaggaggcaggcatctcctgaggtttgtgtttcctgcttctccaggcacaatcaaggcctggcaccgacccagaaggagggcagatttaggatatgaatgcctccttgtagtttgttgaaactagcttgtattgtcttgcaggattcaatcgttacacactgaaacattttaggagctagtcattgaattgttggtagccagaaacagaacatgtagggatatttacaccagggaaattggcaaactctccagtaagtaggaaagacttgaaacctagcattgcctcagcacataccctctggaccagagattatcttgagaagtatttgttgtcagtgagatggctttaagcaaaggagtcccttaccaacctctgcacatgctaagagtcggacacgactgagcgacttcacttctacttttcactttcacccactggagaaggaaatggcaacccactccagtgtgcttgcctggagaatcccagggacaggggagcctggtgggctgccgtctatggggtcacaaagagtcggacacgactgaagcgacttagcaacagcagcagcagcagcagcagcacatgcctaaactttccatgtctctcaactgttgaaaacagaggaaaggaatagctcttcctccttttttctcttactccatttccttccactctggtctgcatcaccagactctgcttcccaacgaagagcagctaggttctaacatggccattttgatgagttatttctacatttttgacagattttcgcagactatgatctacctctgaagtgcaataacatcccagatggcatcttcaatgaggtatctgaatggccgttaattctgaatcaatatgattactcagagcgagctgtgtgtgtgtgtacagagcgcatctgtgggtgttcccagcagcaggcatgcgtgacttaagagcagagagctggggattctttgaggaagcagctgcagggtggggaaacagttagcaggatgggcagggtagaatgatggacatttagttatcttgtattctacag

SEQ ID NO: 50330 - DNA, 747 bp, Bovine  19866881453412
  misc_feature (1)..(1): n is a, c, g, or t
naatgccttggccttgagcttggccctgcctgctgcttataggtgatgttcacgtactgacaggtcttcctcctccaggtttacttgaggtaacaaagcttatgtagagggcaggtccagtgtacaccccacacccagacataaagatgggccactttcataagttttccttgcttggcaagtgccacgttcatgaccctagcactccccaatgactgtacacttccttcatgttttttaatgatggtgcttctgacatcccttaccctggacaattttccttgtctcttgctccgagtatcacaagcagtgggggaaaggacagccccaaagaggaggtgcccacaaaaaggaagctcttgtgccaacacctgtcaaagggagaggcaatggcctttcagtggctccccttgggctctcctggatgcaaatctgagaagcagaagactgggctgctctctgcaaaaagaatccatcacccagccattttcccaggtcccattaaaatgctgacaccattaatctgcactactttacctctcattatgcggaaatgtgctcttgatcaaaagtccccttgtgtagcagcctgattcatcaccaatagctatgggccacacatcagaaattcataatcagctgacgttatccacccaaatcattcccaggatctgaaaagctccgaacatgtccatcattgggaggaagcagccacataggatgcagtatgcaaacaggcctgatagt

SEQ ID NO: 50331 - DNA, 992 bp, Bovine  19866881539364
  misc_feature (1)..(1): n is a, c, g, or t
ntgccctttgatatacccatcccgctaagtggagctcctctttcacacacaagttaggagagaagagattccagacactcaaatcacaccactcacttgccattaatttatccacatgtctcctcaccaaagggaaatgtccattactcattatgatttgcaaagctctcgccctgcctctgctcaaaacagcatctctagcatcccctcctctcaaatcctgttctcagctctacctgcccaaccacacacacacactcccaacagcaacaggaaagaaatggataaatatttccacagtgaattcttctgagtataaatattataagtttatttgcttccttccttgggattcatttttgcattttctgaatcttctatggcagacactttattttcataacacatagtagagatcacaaacaataggaagtgacgatttctttcacttgaagacaaagacactattttacttctgttttcctcacaggatccacctgaatatctcttgtaccattgcaggaatgaatgagctgaaaggcatgcacggttcattgtgtacacatgggcagagcagcctcaatttatacactaaatatatttttaaaagtataaactttaaaagttcttttttttaaattattgatttgtgttgttttatttgaaaggtactcccagtgaactatttttgttgttgttgttttgttttgttttttaatgaagaaatgctttggtgaagtaactcatcattctataatttttttttttttttgaaatcagaaagccagagtttcttaaaatgagtttctccttctgtatctatgtttataaactaatgacaggctcttaaacattcatttagcaatgaggaagttccaaggcagtgtgctatattctgcttaggaggatgcagtctaactaaatatatataaacagtgtacacactgaagagagatgaggtctgcaggaatagtaaactccagggtacagat

SEQ ID NO: 50332 - DNA, 1208 bp, Bovine  19866881620505
  misc_feature (1)..(1): n is a, c, g, or t
ntggtatataataatttctagtgcctgaagaaggtctgtgtttttgagttacccaccttcctgtggctcttttataggtggtttcctttgagtcataccacgtacctgccatacctccattttttaactgaatttcagcattttcatgattttttagagtcacatcatctttgactagcagaattaaagtatacatgtatggttgacaagccattagcccaggattctggggctcgggaccctctaagaagtgggtctctaggtagagtcatgatccatcagagaggcttcaaaatcagccactccctctggctacctgatttcctctctcttgcctgataagaaacccagattcctttttatggatgtgggaaataaaatgagatgaatgagtcggagacttaaattgttataaaactattaaagagaaatctgtcttaagttatcacctgaggggccggtaaaaattggtcgtcatagaggtggatttttaaataaaggttgaacaaaattacactcagatccctaaggatgcttctaaatgatcttttaaaacagggggttatgcaggggaggtgaccttcctgcctcactgcctgcgagtgttatagcaagataccatgtgtcgagcaaggcttaaaagatctgcacatcctcaaagagtccgtgtgtccccctgggtcttctattatcttgcccagagtgatgcactactcttggaaacagggcagtcagggcttccttcaaaactgagtactcacctgaaatttcaacccttgaaaattcaggatcctttggagaatctttgacttctgcaaatatctgcatacataatggtctagagccccacctccaccatgtcgctcccttgcttagaaagctgccacgcttgccctggctttcatggtgccttgccccatcatcaacaccactcctgactctgcatgatgttctatgggactccaccatacacgggtgagtagaaacttcctcaaccatcacctcctgtgttaagagtttctaaacccagtgtaacagagataggtttttgtttcttcgtgtcctgtacccaccccgccatctactcagcacacaggtttgtaattgcctgcgactgagtctgtaagtctgcagttacctccaagacagagacagtggctcaagcagctcttccccccatgcttcgaggagggtttgatccactttag

SEQ ID NO: 50333 - DNA, 1137 bp, Bovine  19866881778257
  misc_feature (1)..(1): n is a, c, g, or t
nctcctgaacccccacaccctagagcctgtgctccacagcaagaggaagccaccacaatgagaaacctgtgcacctcaacaaagagtagaccccacttgccacaactagagaaagtctgtgggcagccccaagacccagtgcagccataaataaataaataataaataaacagattgctcgcagtccacaggaaagacccgatgaggaaagagacaagagaatgaagaaaacaattaggagactgagaattggagcccttaaagaaatacattcaaagacatgaaggcagaggtcttcattcataaacgagaggtggagcaacatgaccaagccaccttcctcaacccacaccttgcatcacccttatcagcaccaacctggctgcttttaaggccactcttgactttctctgagctaatctcaaagattgattttcttaagaagacagatgtggagtaagcttttgggtggcaccatttgcagtatttcagattcctactttctgctttccctttctcacattcctatttctctttatttatttttcttaaactgctgagtctgataaattagggctattaagagactgtttgttattccgtcctgagttactatttttagagcttaaaacactcataaatatatggatgccctgactgtaaatggatacattttagccagtgaaaaattcattttctctaatacacgtttttaaagtgtcctcctgaagttctgcacaatatctcaccatgatctttcactgttcctcccatttttatccgataaaagcagatccatcatccgtgtggttcctttttctctgcaccataaataacagctgggaaggggggcatctcccacaacactgcagcttcgggttttaaccagttttggaatttattgttcagccttcttgggatgggagccagaggtacctgcatgcccctcagttatctcatggcctctctcgttttggacaaaggcactccaagtacaagcagagtgaattttgcatctgatttcatcctgactttctggatggaaaatcagatatgaggaagtcttcatatgatggtcatacacccaaggggtcttcccaggggcctcagtggtaacaaattctcttgccaattcaa

SEQ ID NO: 50334 - DNA, 1337 bp, Bovine  19866881878767
  misc_feature (1)..(1): n is a, c, g, or t
ngagagaatgatcacactaacgaaggcggtaattgcacttaccaggacttgtagagcactttgctgttttgtgagtgctttcacacatggcacccctcttatatcatcacagcaacccaatgagtaaactgggcttggggcttttgccctcacctgacaaggaggaaaccgcagtgcagcgaggtaaacggaggagcagaatctcatgcggtgcgccggcagcaagtgcatcgcccgaggccgccgcctctctcctgactagctctattatttgcattaccacccctcagagaacacggtgcaaacagacctgtctcttgccggtgtctgtgctttccaactgcccacttctattctttcctccttcctccatttagaatgaaaatttcaaaatcctgagatatgcaaagagaacagccactcataatcccaccgtcctgagatgaccactgcgtatttgcatctagtattgttttatgcccatttgcctgttattacattttctcaaaagcatacttttaaatgtctgcagtgagtttcattttatcttactttacattatccttttgttgttgggtgtttagaacgttttcgtattttctataatttaagtaacatgataaacatcattatacataaattttggggagcttaaaaaaaaaaacaaaacactgtccttgagataaatttcttgaatgaaattttagagtcagagtgtttccagatatttaagactttgggtggatgttcaaaattgccatttagaaaagttttactaattttatagcaccatgagcaataattttctgcacttactattactctttttgaacttttaaaagttcacaggcattgttttaatttttgtttctttaattaccagtttggatgattttctctttttaaatactcacttttggttggtcatttttatttcttcttttgctaatttcctgctcatgtccattcttattacaatgatcattattttgctttaggtatgcttttcttattaatatcttaggaatctttacatattaacggggctaatatttatgttgcaaataatgtttcccttaggttgaaatcataatgaggtaaacactgtgaggcatgtttttaattgatgagagaacttatagggggtaagatcctggctcaggatgaagaacacatttctagtaaggaaagaaaattatgtaaagaagggatttatggttttgtgttaatcttatttcatggagaggtaaaccaagactcagagagttccagtaatttgccccaggtcacatagcacaaaatcagaaacaagattgaacccaggtctgtcgtctcca

SEQ ID NO: 50335 - DNA, 1183 bp, Bovine  19866882021803
  misc_feature (1)..(1): n is a, c, g, or t
ngagaatgcgccatgtcccagtttctatttcatcgtgcctctgagttgtattcacagtgctaacttttctacaaagaaatacttgtagaaatgctggatgcaataggaagcttttaaatgagaaaaatggagattctatatgcctacttggataccaagattctgcccaaaagttaaatttatttggaaagagtctaaactggtgtttccctgcccctgatataatctcttctccctctctccccttctttctccccatcctcctccctctccctctcatgagcctcatatgagggccacatggttaaaatgactcttgactgttgtttttgtccattgaaaacgtgaccagtatctgctgggtgtctgggaaccttacaagcttgccttctgcagcccctgtaagtggctgaattagtgtttctcaccctgtcctcagacagaatttgttatcaaagcccaaggtacagtggaggccaaggcaaccagctcagaggccaacagagccttgaggattgtagcagaagatgggcatttttttttcctctaaagaaggattttaaagattatcaagttgctccctttcagacagagaacagaaataccagaggctgtagttgtcgaaggaaagttgacaaagttgaaagttggtcaagaggttggagagaggaagctattttcagcatactgaaagggcaccatctgaatttagtcagaaaaatgaggtccttggttcaaattccagcccccttcaggggctagcaagcctgagccaatcattgactttctctggacttcagcagaaggatattccttttggtttcagggaaacctggatttactggggcactgtcactcactcaccatgtaaccctgggtgtgatgtttagccatatctctcagcatccttatctcgaagtggagattataacatccactcatttgggatggcttttgcgaggaaggctctcagctcactcctactaggtgagtgtcattcccagatactgcctgtggcgataggatggtgagaaagataatgaaatggtactttctggaaatccgactgccctcccagtgctcctgcacagtgccagggccagttctggaaggcgacatctcacagaccccagctccgtctacatgcggctcaacattttgacttggctcccttgtccagaga

SEQ ID NO: 50336 - DNA, 1120 bp, Bovine  19866880485789
  misc_feature (1)..(1): n is a, c, g, or t
ntgagggaatttgcttgttggtttggacattgtttgtattcgtgtatattgataatgaaagaaaccagaaatacagatagtggcaatttcagaaatgttgaaagagaaacaaggtacagttgaagtcctgttttttaagttccagtggaagtggtagaaagctgtagtgcagccctttcatgggtgagatttagaccgcagagaggcttgtcatttgtagagtttgcgtgcacttttcctgattgactgacagcatctttccccggatttaggacatctctgggcttcaggaccatgagtttcagattcggacatccggattcccctgcccttctttaccagtttcgattgggagatgaaaaactccaggtaacatatgggtgtgtatttcccatgggtagaaagaaaggcagccaggttcagtcagactgagagaatgtgtatttgctggaaacctcatgaagtcagaatgccaactggatgtaaattagctgctagcccaacatttaaacccctgatagagtataggtcagaagagatctgagccatctttttaattagccactatgtgaggagttgctatttagagagaggcaccattctgggaaattacaaagtagtttcagttcagttcagttcagccactcagtcgtgtctgactctttgcgaccccatgaattgaagcacgccaggcttccctctccgtcaccaactcccagagttcacccagactcacgtgtagtttactaggcacgtattttgcattcactttgagattactctctcaggtgttacatcacccattcagtttggtgatgaagcccattacacactgaagaaataatgctccttccaaaagagaatgcttacccaatccaacttacaggatctgacctgccagttttgtttttggaaggacacaatttatttaacggggtcagttttttcaggaggcagtagccttgattggtcattcttttccgtccccgcacaggctccaatggctttgttttatccagcaacttttggaatcgttggacagaaaatgacaactttacagcacagatcccagggtgaccctgaggatcctcacgatgaacagtacctgctggccacgcag

SEQ ID NO: 50337 - DNA, 1303 bp, Bovine  19866880489815
  misc_feature (1)..(1): n is a, c, g, or t
naccgaaaaagatggactcttgggcagatcccaggcccttggctcttattcccttgaagctgaaagtaggagtcacgtccccatgcttaatgaatctctgcagttaattctggcatcataaaataaatgatgcgtccagtgctgattagcccttgaatgagaattttaataagatgatctgtgttatgaacccagtgcactgagatgaactgagtgtgggttgtgctgtattcttgctgttagggttgttcccaattaaatgggccactgttgattcaaaatcctgatgagctttttctatataaaacaggatggttacttggttccttctgttctcttctctgtagaaaagaaagtctggaaaataaaaagaacaacaaaccagaagtcaaccagatagccaacagtgacaacaaggtatatgttacattttccgctttgtttccaaatcattttgttgatatcaccataaatgtgtcacctttataccatgacagtgttgtgggtgctattttagagtgaaagcgtggcaccccgtcacagatgctggctttccaggagtgtctgcgtgaagtggagcacttaactggttgttaacagtatttcagacagagagctggtgtgatacacatttaactggtctcacaccttattttttcttgattggaatggtgtgggcacatctgaccagtgtccctatcttctcggtggggattaaaatcaaagattggtaatagatgtctgtccctgggaggtgggagtgggggtgtctcaggatcagagggtttgggcactcagggccctactgtgaacactcaggcactgtggcagctgtggatttttcctgaatttgttgatttattcactgagtcagtaagtcctttctcagtggcgatggtgtgtcagataccagggatcaggaatgaccaagagcagtgagatctgcgctcacatggggctcgcagtctggcgaggaggcaggaacctgcgaggtggttctcatgtagcgcgtgctccagtgctggctggccatggctggctaggggggacaccagtttgctcctcatctgctctcaggctttctctctgaagcaggggcatcatctgggggtacctgctctcctgacacactcacacagcacccactttggagatcacacccctaccccgggctgaatggtagggttaggtctttaaccgcccctctcgagtccactgaagtcagagtctccctcctcccaagacttctctgtcctcccaggttaccatcgacgactacagagaagaggatgaggacaaggac

SEQ ID NO: 50338 - DNA, 997 bp, Bovine  19866880490721
  misc_feature (1)..(1): n is a, c, g, or t
natgtttcctcctttggagtgtgaccctcttcatgactctcttgagtccttgtcacttagatttagaagggggcctccctcttgcttctcttcctcccagacactacaatcaactctctgtctttccctcaggcctctctgcactgtggctccaggggtggcaggtggttgatggcagagagctggcttagtgagccctgggtgaggaggcggtgagtcctttttctcggtgacttagaaaatgagatgcttcgtattgaatacttcttgttttccgcggggagccctgtcctctggtacctgagtaacagcacacatcgcagccagctcctgtttaagtacagagttaagccttgcatccttacccacaccgcctgccatagcgcatctgtacacacactgagtgtcacatgcagagcctgcaccctttcatggggctgtcttctcatggttctggttttctgtctgtgacagtggtgtttgtcagagcctgaggaccacttcttgtagaaggatgaatgttaagtcttatttaaggctgttataatgtctcagaccacctcctgccccctaaaagcttagagagtcaacctgcgctgttctgggtctgctgtacgctgccatcagtgctgacaggccaaattatagtactctataacccagttctaaaggatgaatgccatggcaattcaagtattttgcagaaactattattttaactcattttcacagtggctctgggtttttttttttaaacagtctcgtaggaactttggttaaatacagagtaaaaactgaaagcttcttggggaataatgaggagggaataatgaggagtcaggtccatcaaggtctttcaaaaaatattccgtaagtagcagtttctcttgtgcctgcaattccgagttgttgtttgcctatccacacgaagataagaaacatacgtgacggtgcatgtgtgtgtttccagagcctctggtcactgtaattttagtgc

SEQ ID NO: 50339 - DNA, 1006 bp, Bovine  19866880505026
  misc_feature (1)..(1): n is a, c, g, or t
ngggaaaagtgatcggctacactgggcctctgagtgaagatgttcaggaagctggtcaataccctcatctcccacagcatcttagcaaaagacttccttacgaagaaagggtcctttggatggaaaacgcttcacaggtgatgacccacagaataccagagctgcaggactgcaccattgctgtcccagggtgggggcgtgtgggagcggggtctggaatagcatttctcccaaggcctggtcacccccctatacccctgtccaagcacaggaaggccaggaagagatgaagagggcaaaggcaaagctggaacaggacaggggtcgggggaacagggggcctcaacactcaggcacagaaaggggctgtgaaccatcttcccttgcactgtctgcccccctacccctggcccccagccactctcaagcactctgcaggatccgggggagatggggcagccacgtgactagaaaggggatatttacgggttggtcttgctgagaatgaagaaagcactcccttccgggatgggggcgattttctctttcatgttcaactcagagattctgcgaggacgggggccagcaggaacctcaggttcatcctcttcctcctcctcttcctcttcacctactttaaaggagatactttttttttataggcatgaaataaggattgcatttgtgtttgaacgctcattttcaatttcacatgaaaatgtggcttaaacaatgtgtatcagcttacacagggcttcccaggtggctcagatgtaaagaatctgtctgcaatgcaggagacccatgtttgatccctgggttgggaagattcccctggaggagggaatgacaacccactccactactccttcctggaacattccatggacacaaggtgggctacattaatcaaaaccttccaaatatgaactgacagtgtatgggttggggctgagaagcgctcccatctggtgagtgtgtccctttgtggggaatgaggccccag

SEQ ID NO: 50340 - DNA, 1411 bp, Bovine  19866880517329
  misc_feature (1)..(1): n is a, c, g, or t
nggttcccctcaagccttatgccccacctccctccctctatctggagcttctccttttttttcctttccagaaatggacaggaaagtgggccagttcaagagatatgatatgatttttagaaggattctgagagaggtgccgagccgagaggacagcaagtcaccttccgttggaggctgaggtcaggcccgtctaaggtttctgcaggctcttggctctcaaccccaacaagttaaaaggcgcctgcttcccacataaaacacgtttgaatcactttataagagctgtgctcttctcttacgtgtgctccaggtgacaggttgtcctaatattacacttggcagacatttaaagaaacatgtaagaggtgcaagcttcctgtccctgagctaacaccctgtgctatgtgacctcaatctactcctccaaacacggcaccaccatgaaccccctcttacaggggagaagacaaggtgagcgtggtctggcacatagccagggagctctgggccaccgtctgtctgggtctgcccctccccacagcccagacctttgctacctggattcccagctctgcctcggggattctggggcgtggacttgaggtctgtggggttcacatctcattagaagagctcggagctgctgaatggcctggcctgctggacagagccctcctcctggcccagttagatgcttgatgcaggtgccctggaactcctcccaagggtgagctgcagggcacgtggtttacctgccaggagcccagaggcaggaaaacaaacaccgtaaatcatcaggaagcccgtgtaaatattttatagatgggacggtaaataatgcagctccctagatgcacccgacctagttcatctgccccacatccagcacccaggtcagtctgtctgggccccctctcctgccttgcactttttaaacaaatgctgaggcccagtgctgagccctttcatatgcaccatcttcactgctaaacttttgctcaggctgctccctctgcctcgaacacctttctccttaagtctagctaattcatcctcctccttcaagagtcacctcctccaggaagccttctttgatttcctaggtggagtcaggcattctcctggctctcatagtacctaagcttcccccatgtgagctctgcttcctggaggtggtcatttcctagtgacttgcctgctctccttctgattctcagctccaagagagcaatcgtttccctggagctaaaggcaaagcatggcatatagtaggtgctcaataaacagtgttgaagaataacataaattatcttgtttaatctttaaataagtctgtgaagtcttattggggttattgagtttcttattacaatcatccttattttacacaggagaaaaccgaggccca

SEQ ID NO: 50341 - DNA, 921 bp, Bovine  19866880593467
  misc_feature (1)..(1): n is a, c, g, or t
nttctcctggctccccagagtagtctttgcctccggggctgggcagaggtggatctctagagactggggggatcctgaactcttggagcctgcactcagaggtcagcctccttggaagggtctcctccccaaagaactcaatcttcatctgtgtctaatagtggccagcaggtgtggggctgcccaaggtcactgaatgggcagcaacataaaacttgacaatggtttcccccgcccagtgccacagagctctgctggaaggtaattatagatgggattatagcctgggatggctaactctttccacagcccagagctcagcggacccagaggcctcggggctgcacaaaacctctgcctggcccatcagactctgccccaggccttcaggttcagggcatcccaagtccccagccctccaccagccttgatgcctaccaatcttagaagaggtcccccaggagtccaggtggaatcaggactctgcagaggatgtggtaaacatcaacttggtctccgattagaatcataacaggaacaataattccaaccctcacatatcaagtattcactacctaccaggccctgaactaacccttgatatttattaactcacagtctttccacaaagcctttacaatgtggagaccatcgttagccccgttttacaggagaggaaactgaggcccacagaggcaaaatgacatgccgattctcacacagctaggatgcggccagactgagcctcacatcccagactattctgaattccaggccagagctcataggcactaggccagggtacccctaaagtcacaggagcagttggggccaggggagcagttggtaactggtctgggtgaagtcagatgagtaatgggtgtggaggtgttggctgctaacagggcgaggacacaacac

SEQ ID NO: 50342 - DNA, 2635 bp, Bovine  19866880593527
  misc_feature (1)..(1): n is a, c, g, or t
nccactgtctggaacacagcctgacatataatagggactttgtcaattttgaacctgaatagcaaccttatttcattgtacagaacaaaggagcaaggagagacgaaaatgctttgcgaattctcaaacactctaagattttagtgatggctgttgctattctgcataatccagttccctgctggggacagttcctaagggctctgacaaagctgttgcctgcatttttaagtctaataccagggtatataattaaaagcacctacagaggtaagagggcttccctggtggctcagtggtaaagaatctgcctgccaacgcaggagacatgggttcgatcttcccctggagaaggaaatggcagcccactccagtattcttgcctggggaatcccatagacagaggcatctggtggcttatagtccatggggtcgaaaagagtcagacacaagtaagcgcacaggcaggcacagaggcgagaggcagacccgcacagctgctcagagcataaaccctggagtcaggctgcctgcgatcaaattccactcaatggcacactttctggctatatgaccttgttgttcagccactaagtcgtgtccgactctggtactccatggactacagcacgtcaggcttccctgtccttcgctatctcccagagcttgctcagactcatgtccattgagacggtgatgccatccaaacacctcatcctctgttgtccccttctcctcttgcccttaattttttcccagtatcagggtcttttccaatgagtctgctctttgcatcagccggccaaactgtggtgagtttttcacctctgttggcaacccactccagtattcttgttggggaaatcccatggatagagcatcttggtgggctacatacagttcatggggttgcagtcggacacaactgagcatgcaaaacctctcatcaacatgtacaaagtttatatccataacccatgagttgtaggtgtctggtcttatgtcactggtctggattttagggctttataacagaagtatgaccaaggggaaaaaaaacgccttactacaatgccagagaggggttgaagctaggaaaaaagggatgagaagttctggtgaaaaggaggaataatgctaagccccttgcttctccttagctgactccgtatttccatacctgtggcaacgactgcatccgacaaagaggaaccgtggtgcagtgcccacaaacgggagtctcttctcctcaggatcatggtaggtgcccagcacagagcctcaggacaggaaggaccccagccctaccccattcagaatgcaacaggctgggggtgtgggggtagagtgagagagggtcctggcctgtgggtgctgaacagggtgcagggaaagatagcggttctgtgcccaacagctacaataggaataggaatgaggcttcatttatgagatcaagatcctgaccaagcaggacatacagaagaagggaaagaaaaaaaatcagtggtgcaaaatagatgttcagaacaccccaagggtctgctgaaaaacgtcagtggtgtaaaaggactgagtgaatgaaggaacgtgcatttcactgcattttgactttcttatctgtctcagtagcccagggctggctgttactgtaactcgatgcggccacacagacatttggataacaaattaggaatagtggccccggggagacacacctcgttggtgcctgagagcagcctgttctggagaatgtctctctggatttaatgatgttagttctttcaaattaaatgcttccggaactagcccggcatagggtcaaaagttggaaggtgctgtttttagatacccagcctcctgacaatcctgctgtgtgggcacagtgccgacggattcctgagcagtttcacaccctggagcttaactgactctcagcattcctgtgaccgggtggcattaccctcacatttgtcagtctgacagaacagcctttaaagatgccctctatgcatactatgtattatatgaagtaattgcacccggaataacattaattcatcaaagaacaacaacaaaaaaaacctgaatgtaaactctggttaccacagtgaaaatgtggagtaaaaggccaaagtgattttgaaggaccattcctaaactcctgggccccctctcctttttgagcatctactgaaagacctggacactctataaaaaaaaaaaaataccgatctgcagagatctactgactgttggctttgaaggaacccaaacttgtctacaaagcgtcaaataaaaattttagtcttcaaataagagaaaaatctggttgtgtgctgcttaagataaataagttctgttctccccagacagaagtgtgctgggtggctggctgcctctcctcctgtccgctctgcttgtggctcatgggtgctggtggctggcatctatctgatctggaggcacggtaagggttataattcagctctttaaagaatgacgctgattttttcttttaaaggagcttcctccagaggcaatcacattttggcatcagaatagagtcagacaacatttatttaataccttagagctctcctaaagactgatcacacctgcaagggtaaagcaa

SEQ ID NO: 50343 - DNA, 2025 bp, Bovine  19866880619697
  misc_feature (1)..(1): n is a, c, g, or t
nttagctgagaaggaaacttgtgcaaggattctgtcagtaagtagcagatctcacttagatttgaacctgactctaaaagactactactttcaaacttggtgtgtattttcaatctggtttgtaccctgttgctgaagtggtctgtgtattactgttcaacttgcagcctcccttttggagaggggtgctggcctgtggatccctggtgcagagcatgaaccccagggtcctgccatccacgcaggctcccaattttctcccactgcagacctccttccctgattccaggacacagaggcttgatgacgccacagatgggcaacaccatcaggcatggaaaagagattctgccacacgtaattttactctgaaaatatcactgtggaagtgtgtagctgagtcacagagttggcaagggaatgtcacacaggccaggcccttctggcaatgaattccatggggctctacacgggggccccgggcatggtccttcactgatctaggctgacagttgctgaggccaagttggaaggacattccttgcactaccactgaggtggagacacttggatcacgcagagaagtctgccctaaagtcttctaaaattccttccaggcctcccattctaatttatacacaagaaaagcctttattttgtaatctggtcttcttataccatttgtatgactcaggctcccactgaatcacaaatccacacttgagcgccaccctttcacctaagctccagtgccacaccaccaagtgcctggcaactatagttggcatcaaatctaagtggaaatgtcttaagtcaaactaacgtctttgcaaaccagctcccagcagcaaattctagcacaactattttctcaaccgggcaagactcgacctggtggagtggccttctgtttcattttgtgtctttggttcattgccactaatgcctctttcctgagcacactgctcatactgctgcctgccttatctttattaaatctttcaccgtgctattgtctgatccaatattttcattcttgctatacagccatgaaaacagtacttctcaaccttgactgtaggttagagcttcttaaaacctttcatgtccaagccccatccccagaaaattctgatttgggaggcctgggggtcagagatcagacatcctatcattgagaaccactgtcctgaatgacagcacttatcaaactttaaggtgcacaggaatcacctttattgtttagtcactaagttgtgtccaactctttgtgaccccatggactgtagtccaccaggttcctctgtccatgggatgtcccaggcaagaatagtggagggggttgccatttccttcaccaagggatcttcccaacccacggattgaacctgtgtctcctatattggcagacaggttctttacctctgagtcactagggaagcctgaaatcactgctgatcttgttaaaatgaagatctggattcagtagggctagggtgggcctgagatgctgtgtttctaacaagccccaggtcataatgatgctcccagttccaagcccatactttgggtctcctgggttctagcacaccaagtataggagcttcagcattacctgggggctttggtgattgtaaggcccttcctcatttcccaggcttcctgttctcactagtacatctcctgactcctcctaacacaccagccctgccttgcattctgatttatttgggaagtctgactccctcctctctgcctagttaaatcttagccctatgtcagtttccagcctaggccctgttctgcaatttagtctttcccaactattccatatagtttattaattttttttcctccaatctcccacaactataggaagtgtcatgatcattccatcatataacaaactccacagctgacagcaagaagaaaactgtaagaagagagatctggaaactaggatccatttttgacacattgtaaccactggcacatcattttccctttctctaaaatttctctgaa

SEQ ID NO: 50344 - DNA, 1640 bp, Bovine  19866880715404
  misc_feature (1)..(1): n is a, c, g, or t
ncactaaattacatgtgaggaagcaaacttggtgagaacaaacaacctgcccaaggccacacaacacatggcaaaactaacatatgaatccaggtatgttggcctcactgaatgtaggctccacatgttaagtggaagtcacttcagtcgtgtccgactctgcgaccccatggactgcagtccaccaggcttctctggccatgggattctccaggcaagaatattggagtgggttgccatttccttttccaggggaccttcccgacccagggatccaacccaagtctctcaagtttcttccactgggaagcaggttctttaccacaatggcagggaactgtcgtctctctgttcgtttagtctgtttcagcccagtgcctaaaacagttcctgaccacaggaggcactcaagaaatatatgatgaataagtcaatgagtgaataactccaaactcccaaatcttattcagtatgttataccacttccaatacagtcactgagtcacacagccccacctccatcctcacaggggatgttcagggcatgctgtaaatcacagatgccaaggagctgagcaaaagccaaatgcagaaacctaagacaaggtactaatatcgtcattttctcttttgaaatgtgaataatattgtatctggcagccaccacaaattttttcctattctcagaagggttttttgaataaagctattttcaggcaatccccctcacttgacagttacttttgctctttcaaataaacatttttttttttcaaataaacatttgttctttggaattgttgcttgtttttcagaataaatagaaatttgcccctttcaaacagaatcgactcaggccaatcagattgtggaaatgattggcccagcaacaaagaaaaggtttccaaagtttaattagcagctaaagtagaaactctgcccccactggcatgcctcaggatagccaagacactaagtccataaaatacagggtggtctgattacagccctgatggggcagagccatagcattctggggtgtttaaagacgggtcatttgttttaataacagtaccacaattagcagtgaacttaagggggtgggaggcagggcaagtggagcaggagtatgtcaggtctttaccttttcaaagctacagaaggcaagctctttctggttatgggaaatgtatcccatttatgacaggtctctctctctctctctcattagcacagttttgtcattactgtaaatcccccccagtcaaggctgatgttaaaagtctgccctcccaaacaagttcacagtgtcacaaaaacaaagccaaaggaagaaagaaaacctccaactcttctgaaatgcagcagccacaggaattttcatcccaaagggttaggaaaataatttacgcaggtggtgacttaagattgctttcaagtatgagtgttttgcaatgtacacaacatggccctttgctcccgttcttaagtgacgcccttgaaaacaggtgaacaatgcccccctcactgaggagcctgagtcagacagggaaagctgactgttgtttccaggcggccagaggcctcaggggccaggccttgcttccattcctaagagctaggaggttttaggaaagtct

SEQ ID NO: 50345 - DNA, 1299 bp, Bovine  19866880716233
  misc_feature (1)..(1): n is a, c, g, or t
ntgtccttcccattctaatattctgtgagattaccccctttcattgtcctcccccttccacccaaccaaactaagtaccgtgtgcctgaagagatgaggacaaaagaagaaagtatttgatcctcagttgttattaaaagcatatctccagacagaaggaaaaggcaaggagctacccaaactgacacaaattagaactaagggaatgagcccctcgtgttcacaaagcttacgtgatgagcttgaatgcctgcaagacatgtttatcggaaaatttagaggagaggaatacaagttggctcagatcaaacttttctatacagagaattacatcagctctggtagacacgttgaaccttcctgtggtcacattataacagttaacattttagaaaatatcaattactttcctaacgtctctgttattgggaatcttgacaaaagcaataggtcatggttgacttggaatggaaaatccattggattaagatagaatcggcagttggaaactttggtgagtaggaatttgattcaagtaaagacataacaattaaattttcctttttaaacttttcttctgctctttgactatacttttgtacatattttaaataaaggataatctgatgttctaaaggtcttcatatttaatgagaaaaaaagatcgaggccagttcaacttgagtttcttagatgattttttttacgtaaaccaactttactgtggcttactttatataaaataaaatgcaagcatttaatgagtacagtgagacaggttttgacaaaggcatgagcccaagtaacaaacactcaaacagttctctcatgcctctttacaggcatcctcagctcagcctcaggtgtccactgactttatccgttttatcatgtagagttgttttgtttttatttccttttctagaatcttacatgaatagagtcatacagcatgttctccttttatcttgtgttcaccatagtttcgagatcatccaagctgctacatcggagaaggcagtggcaccccactccagtactcttgcctggaaaatcccatgggcagaggagcctggtgggctgcagtccatggggtcgcgaagagtcggacacaactgagtgacgtcactttcacttttcactttcatgcactggagaaggaaatggcaacccactccagtgttctggcctgcagaatcccagggacgggggagcctggtgggctgccgtctatggggtcacacagagtcggacacgactgaggcgacttagcagcaggagcagcaagctgctacattt

SEQ ID NO: 50346 - DNA, 1204 bp, Bovine  19866880730232
  misc_feature (1)..(1): n is a, c, g, or t
ngactcgctccaggagagacggctcaagcccagggtgctttcgaagcagcaggggcatccttaggagacacatggtcctggtactcacgcagggccagccctcgaacgtggagactgtgaacagagcccatcatagccgagaggacgttgtcaaagttgaaatcactgttttgccagatcctctcacggaccacagggactatcaacatcccccctccttgtagaggatgaagagccccctagacaggaaaagaggtggggtcacccaagctggacatggaatgggatgacacgccaatccctctgcaaccccgggcaccatcccgctcagtccacagccaggccacagctctgagcacagcacaggctgcccttctccatatcctggcctgtgtttagtctactctttggttcaaataaccagttaaacgagtattctccaaagctaccaagcagacacctagcacatgcctgatcacaaaggagaactactgaacaagaaccatctctcctacaatgggctccaagtgtgcaatgaagaaccaagagctttggccgtgcagaattccacagctctgggaaaccagcccaggcctcctcttatctctgtcttagttttaatcgaattccttttctgatagtagcaatattcccagctttctttccaaaagaattctgtaattgctggcacacagtatttctcatacaatttcacttctggaagggttccagcccctttgttccacagaagaggaggctgacatagtgagggacgggaaggcttccatgctgtcacctccatggggacccccccaacccacagtgtgaacggggcccccaaagcccacagccacagtcacacggcagtcagataactctctgagagccctgaccgctgaaaagaagtgcccagtgagcccccagtgcaagcggccccagccgtggctggcgacatctcaggacggggacacaagaacatctacgctaaggtctcagcacttcaggctgtggttccgtgtctgccttcagagtcaggtggatgagctggagcaagaggaatgagtattcaccacctgctctctcctgtcaccattactgtgaatgaaaacgagaccaaaaggcaggtgaggggagcacgtggggagaagcagcctgggacttaagtcagcagaggcggccaatcctggactcccggcaggttgag

SEQ ID NO: 50347 - DNA, 714 bp, Bovine  19866880760599
  misc_feature (1)..(1): n is a, c, g, or t
nccttgccagccagctgattatggcacaggaactatagagaccaaacaggtcagcaacccaaggtgactctagccatttccaatcgcttctccacttttctgcacatatggtcttcaacacacttgtgaaatatctcagtctcaatgtgaaagactgggtgccactaaggagtagctaaatccattccaaatgaaaggaaaataacagcaagcaacactttggctgctgccagattccattttcagagtctccacttcatacttctcatcaaaaccaagttagagtgtgacagcaaaagagatggattcctgataattgtgaaagatgatttttttgaaattaagaaccttatttgatcttgggtgatattcaccaaggtcactaactgtatgcttgtgttatacagctggtaagaaaaaataaggtgatgttgaggcaacagcagcagcacatcttactacctagttgaggcaatggcagtcccgtttagagccttggaacaatctttccaaggaccagtgatcactggaccataaagaactttcctgaggacaccacaaaatgaatctgttttcattgagcctttaattaaaaggaccaagaatatcaaaccaaagtaaggttttattcatctacttgggctgtggaaagattaaaagcaaaatgtttatttgtaaaatatattttaaattcactcacagtttttactattt

SEQ ID NO: 50348 - DNA, 1602 bp, Bovine  19866880763338
  misc_feature (1)..(1): n is a, c, g, or t
naaaatgaaaatttagctggaacatggaagccttttgcacagtcagtggggagctttgtgagatgcacaatttcaagctgtatgggattgtttttaactctttttaataactttgtaaacagagtgccttgaagtgtgagaactttctagaaaccatacaagtaatttctattgactctagtgactggagagcaaattctttgtaagttagtttccagttcttttctttcaacagaattgaatggggaatctaatcaagctgtcagatgttaggttgctaaaaataataatcatttaaaaattacagtgtaagtgtctaaaagagagaagacaacaaaacaaacatccctttatactaaaagaattgatgtgcttgtatccagtggttgatgcatatcaaagggagtttcagctggttctccacttactgatacaagttgcatttgaaaataaataggattttcagtttaggaattttgactaaatcaagctgccttcctcccaaattacttaggttttgatctaattgaaaaatattttttcttaaaatttcttgagggtctaagccttatatgccttctttctttctttgcttgatccaaaaaaggtgtgcgacgggggaggcctggcaggaaatcatgttagcctgcctcccggggaagcaatgtgacccggactcggattacaaccccggggaggaatacacatgtgggagcaacttcgccatcgtttatttcatcagtttttatatgctctgcgcatttctggtaagtgatcagaattgcctcacaaacccctgcactcctctcatggatattcatgtagcatttgagattcagaccagtaatattgccccatcaaatagctgtgcggtatcttatgttgacgaacactctagactccactgggcagttgaggtttctgctgagtgaggcctgtgttaatataaacgcctttgttgtaataggggttttggtgctcactaacaggcttcaccactctagcttcttagggctgctggttcttttataaaaatctcaaagccactgcacatagtagtaacttacgacagtgagttattcggtgcaacttataaaactccagtgtgtttcaaaagatcagacaattacctacccaccccccgccaccctccccgccacccctggggactatacccaaaccatttgtgaaagctggaagcctgctttttcttaatcattctttagaaggaaagtttttcagcctttctgggagaaatgggtccagatgtcttgtgacccttataatcaggaagcactcactaggattgaacccagctaaactcactgcacctgaaactcccctcgattggcttttacagatcatcaacctcttcgtggctgtcatcatggacaattttgattatctcacccgggactggtctattctggggcctcaccatttagatgaattcaaacggatctggtctgaatatgaccccgaggcaaagtaagtggaaaagaattccatgtggcttgtatgagctgtttctgggtgttggctgtgctccctgggaaggtgggagggaccgcaagccggacaggtggtgccacccagccctca

SEQ ID NO: 50349 - DNA, 1413 bp, Bovine  19866880799410
  misc_feature (1)..(1): n is a, c, g, or t
ntggcacagctgactttagaaggctgtctatgccctgctcccagaacttaaaggaaactgtcaactgaaaacaacacatcacatatcgtttcagaatctcttctgtaaatgcttcccgtctgcagggcggcttctccctgtgctggcagccacagcccctaattcctgcacatacgtgtctggtggtgcgggaaagggagtcagcagcaccatccaggagttcactccgttcacataaattactatatacaaattacggagcacaaagagaaacagcaccaggcctcccacctcactccgcatgaaattaatgaccccactgagaggtctctgcttactcagagtcacgtcaagccaacctgagggggaggagagctttgtgactaagtacgatctgactaagtgctcctaccatgtcgctgagagaccacccctcctgagggacaccccctccctgtggatcccactccctcctgggccaacaccagcgttcagtcctcagactcaaaaagaacctatacagaaaaacacatccacacaaccccagccatgtgagagacaccgcagcacccgctggagaagagacatctgttctggaaaggaaacgcacatgaaaacccctcaaatcctaccctgggctactctctctacaacctttctagacagttacctcattttaactctccgtgagcacagaaaatagccagctgagacagaaggctgcctcgctaggcactcaaatgataagggggttccagctccactcgccagccagctggtaaccagtatcctctctttagagcatggcctcttgacccgggctcggtgggaaagccctacatacatactccttcccaagcctaggaactgctcaagggcccgggtcgaccccaaatataattctgggaaaaggaaatgctgtgctttacccaaaccagtgaatcatctgactaattagaaagctatttgctcagaaagaagacctcagtcaaccttttctgatgggtggcaggaactagagcctggcctccaggttaagggaggggctgagcaggcaatgcaccccagttttccaagatctgagccctaataacctgcctggggcatttggagttcaggtttaaaaatacaaaggagaaacccagaaatgtaactccagtccaaggatacagaattttttttttataaaggcaacaactgcaaattcctccacggagaggcctgggcgctaactcacacgggctttggaagaagaggcacacacaaacctctccctccacaggctccctcatgctcacatttcaaatgctgttttggaacttgtcaaaaggaaattccaggaaatcatagcactgatgaccaaatcgctccctccctgtgaagcaaatgttcatatttgtagctacctgaaca

SEQ ID NO: 50350 - DNA, 987 bp, Bovine  19866880812998
  misc_feature (1)..(1): n is a, c, g, or t
ntctgggaagaaggaaaaagaaaaattaaaaaaaaaaatgacacaatgagaatccagtgtcagaagaaagctgaagtggttccccatcaagaagagcagggaaatcatccccatgtttgcactggaaacctcatattctatttttcagaagcagggttaggtcagccagagcagcaagaaagtccctgagctctgcccagagtgtcaataacacacgaccgctgcatttcgcccaatgggttagtacctctctacatccatatcttcacaagaagtctttcagtgccttacttcagacaaactgaggtcatttccacttatactccacatcttttctgactttcaaaacccgtgtatctctagtgagttaacagatatataccacagctttcctccaaaataactaccatcaccaaaaaaaaaaaaaaaaaagcagtggcaataattcaatagtcttaatcattttcagggtgttactccaacatctttccacagccacaaatgcatttttttcagcatgggaaaaataaataaaaactggcaccactggcaccagggcaataccaagagccccataacaaatacctagattatgcactgacacttcctgcaaatgaaaattcatgatgcttgggactcatttcctccacaggcttccgaaaacagaaaacatctttgggcttttttgcattttaaattgcagcgacagcagccaaaccagcaaccagagaaacagacaaggcaggcagcctgcatccttacacctagaagagacaggctgagttatgtcaggggccctcaaggcctaaacaggaaccatctcagcataggctgggacccaagtacacacaggatagaaccccaaggaggcttcatgtgcaaagccctctccagcctggggtcaggccaggacccaggcaggtctcccaggaacctgcctgccttgggtcacaacctccttactgagacagaagtcacaacgagagg

SEQ ID NO: 50351 - DNA, 984 bp, Bovine  19866880819624
  misc_feature (1)..(1): n is a, c, g, or t
ncattccattttaatagctgccagcactcgctccttgagaagactaatgtcctggccatggcctgttttggccatgggccccttgatcagctcaggcctcctcggggattgtctcccattttcatcccttatgcctcagctggaaagagctgtccagactgtccgcatgacctctagggtggtcccccaggaggataggtctggaactggaaccctcttcttttcctctggaaactgacatttctttggagtatggaatcgttatggaatggttttctgatacttggggcaaaggaatggattccctgggcctttctctgtctccagacttgaagcccagagggtactcagtgaatgaatgaatgagttatgccagataatcaagttctaagtctagaaaggaagctcaggagcctcccagaggcgatggggaactctgaaaagcaggggcaggggggaggaatattcatggatcagggtaggagtcgctcttagaatcgcttgaccagcacccgtggaccgactagagcctcccgccctggagtcttcccattcgtctccgggcacagagccgggactagccggcctggcggcgggcaccgagcccggctgcgtccgcactccagccaacaggaagagaaagagcgaaggcccggcgaggagggccagctggcgggcagggagtcccgggcgccagcgctgggaactggggaacccccgccgtcgcctcccgggctccgtgtgcggggcgtagggtggggaaagggcccccggggcctccgcgccctcagtaaaatgaggccccttctgagggcccgttcgtgccctaagtggggcgaggggtgctcgggccggcggagaggcccagacactgaggggcgagcctggggaagccgagctgctggacccccgggggtggccggcgtaggcggggctcggaggggcgggcccagggcgggggcgggccgagactggggccggcac

SEQ ID NO: 50352 - DNA, 1711 bp, Bovine  19866880833082
  misc_feature (1)..(1): n is a, c, g, or t
ncttgggttgtaaagtgatatgtcactgtggctttgacttgcatttcccctaatggcttatgatgttgagcaactttttcatgtgcttgttgaccatctgtatatttttttgagagacatgtctcttgaaatcctttgccatttaaaaattctttttattttagctaacatttactgagcacctactgtgtactgacttactgggatgggcaggggcacacagagccatggactctgcttggggcaggaaggcttaccctgctcccctcccaggattgtcacactggagcatgtgtgtgatagaaggcactctgatccagaagggaaggaagcacaagctggagaagggccttgggtttcggaggctctgtctgtgccatgtacccttccaggggcctgccttgcccattggctgccctgccacactcaacaccagtgtgattgatacctggcagtcagaagctgactgggcatggcagccacccaggtcaccaacagaggaggcaccctctgggtatgtacccacagggagtcccaatttaaacccatgaccacccagccagagctcccacacagtccctggtcatctccaagcagctctgcagggagagtgttggggacagcgaggcttctggagcctaaacaataggaagataaatggaccctgctctagcccagactgctgtgtgctttaggcatgtctcttgacaagcctaaagcacatgacagaaaactgagcctcagttttctcatctgtgaaatgggaaactaacagcacagtctcttgagtcccttatgaagctgaaatgaaatgaggtatgcaaaggggtttacacaggttgggaaaaaggaaatgttcactagatataactcatgtcatctgaaaactgagagggacaagatgatttacaaatgcttgactccttcctagaaaagagaggtcataaggagtcagggccaccctccctgtcatatgaaaggagcaaagaggtgggccagactccccaagccacagctgccgctatggggaggagccatcctgagctcagggttatgcaaaaagaatttcagaggcagcggcctcagccgcagggaaggccagactatcctaggaagctgtctggcctccggggctcttggtctccatcccggtttcgcctcagcctgtgccacggcggccaggcaccttctcactgatctgacaagctcatggccgaggggaagtatgtttccagatagagtgaaaatagatccttctccaaatatgctcactgtggctaagaaaaataaatagaaccaagaaggaaagagagagcagctagcagccatcagatggggccaggcctgggcaggtctggagaggcaagctgcagatgggtggaggttaggtttgtgcaactgaatgatgtgtgtacatgtgtgtgagtgtgtgcatgtttgtatgactgagcatgtgtgatagtaattgtgagtatgtgtgagtatgagagtggatatgcatgaatgtgtgtgagtgtatgtgtgagtatatgcaggctgagtctgtgagttcttttgtatataaggtgaagtctgagcacgtgcaagcatgtgactgaatacataagcattgtgagtttacgtgtgagtgtgagtgcatgtgagagtgtgcaaatgagtgtgagcatataggagtgcgaaagtgtggactgcatgcatgtgtttatgccag

SEQ ID NO: 50353 - DNA, 817 bp, Bovine  19866880836837
  misc_feature (1)..(1): n is a, c, g, or t
ncttaggttattattattattttttttaacacacctatgatgcatatttggttctgtgtgcacacctggccttgggcaaatttgcgaaggaagcagttacttatagtgacctgaggtaacgcttccagggtatggtttgcaaagcaggcaagggtgtcccactgttcaggaacaggacattttacctgggaagtaaagggctggctgtgagatttctagggctgttggcatttcagcttaaggctttaagctctgatgatggaatttctggcatcggtgagctgggtggaaaagtgcagaattagatctttccagtatccttgaaacctcagtacacaggcttccattcaggtgttaggttggctttgtggtggaataattctcagccctcagagatgtcatgaattgtatgatccacatttaagtgctctgggattctgtgaaatggatccagttgcattactttgtcgaattttgagagaatccaggagagaacagaggagagcaagctattgtgctcctccggggataagtaccactgcagtacaagggcattaatgttcctgacggtggcagaatctattcagaaccatcagaagcagcaaccagcagaaatctcttgaaaagcaattcatctgtacagtgcagcatcttcaaacgttagcaggcatctgaatcacttgggggccttgttaaagcactgatggctggacaccacccagaaactgtccagagtttctgattcagtaggtctggggtgagttgacgaatttgtattttaacaggttttcggagactgctggtgctattgtacgag

SEQ ID NO: 50354 - DNA, 1676 bp, Bovine  19866880871302
  misc_feature (1)..(1): n is a, c, g, or t
natgtgtccatgccaaaggatgaggccggggctctgtgctgttggatgatgccaggggatgtcgtcaagtgggaaaccaatccatgggacagtgtgtactgagtactaggctccaggctttgaaaggtggtgtgagatgcacattataacatgccgtccatgccttgactcactctagggaagtaggatggtgtgtgtcgaacacgcagtagccagcttacaggaagcacatatatttagcacttctttgccctcctcagtgctagactgacagggggtacatggcggggggagctgcctggaggaggggagtgggccctaatgactccttctcctgtcctttccccacagggacctcaagctggacaacgtgttgctggaccacagtggccacatcaagattgccgacttcggcatgtgcaaggagaacatgtccggggacagacaggccagcaccttctgcggcacccctgactacatcgcccccgaggtgagcggcaccctcccggccccggccaacacctcgcctccacagggcgggcgtgagttgtgatgtctgagccacaactgggaagctgaggagatctggcccggcttgtattccggggccccttcagctcccacactttgtctactccagatcctgcagggcctgaaatactcgttctccgtggactggtggtccttcggagtccttctctatgagatgctcattggtcagtcccccttccatggtgatgatgaggacgaactcttcgagtccatccgtttagactcaccatactatcctcgctggatcaccaaggagtccaaggacatcctggagaaggtgggaggccctgggcggggctggcccggggtgagggctggcagatgccaggtcttgggagtgccagaagccccctgtctcagggatggcggccttgctgatgctctggtcctcatccacctgggggagtcaccctccttctgtgatcccaggacctcctatctgggttccctgcactgagttaatctggcatggcagtgacaggcttggggtcaggagacagatagaccctaggctaaactctgagtctgtctccttatctacaaaatgaagctaggagagaacctttctcacagacttctgggtggggggaaacataaatgtgtgatgctcaggcctgtgccaggcagacggtaaacacccagtaaatgaccattgcttttactcacaaatcccacctgctgagagtcccagcagcccccatccatgcagacttgggagcagagacaagagaggactcctctaccccagaggctctggggtgtgatgctgggctgggccagactggcctgggtacccctgggcctgcttgggggttttctggggaacccatttcctgcagcccttgggtgctaaccaggttcctttgctgggttgcagctgcttgaacgggatgtaagcaagaggctgggagtgacagggaacatcaaaatccaccccttcttcaagaccatcaactgggttctgctggagaaacgtgcagtggagccacccttcaagcccaaagtggtatgtaatccgactccggtgggggctacgactccacattgccccctactgccttcccaggtgggcttctcctgctttgcccttccctcctgcatcatttacatgctctcctcctctc

SEQ ID NO: 50355 - DNA, 1535 bp, Bovine  19866880893183
  misc_feature (1)..(1): n is a, c, g, or t
ngctgaagtgcttgtcccggttatatctctggacccagtagcaactttgaattcaggctctctgactctaaaattcaccacgctattcagcgtaccactgctcattctaccagctttccttatcctggcttgaggggtgtctggttgcttaaaagtcgggagcagactggtagagtgtaggccttacaggggtgttacaggacacttgattttggggacccacctgttcaccttttactgactgtagtgaggggtagtcttctctcatatctttgcctttttctgtgcttatatatgtctgggctgtgaaaaaatgcacgactggatgtcacagttgaactattctggatttggatttttttttttttaagtttggcatttgtgcagaatcacaagttttagaaagtggtagtttccagacatttcaggtctgattcaccaacactactgtaattaaagaaaaacctgtatttgtttgccccattttatcctaactcactaggatgttttataaataatgaacctagatattttagcaaatagcatctatttagttgttgaagctttcaggggattgatcatctgctcataggtctcaaagtcatcctaatgatgggagtttgcccgaacactaattcattgggaagtgactgtggatagtgaactatattgtcatgtaaaggcagcttcaaaatacagagtatagaaattaagcagctcgacagttcttttaggagatacattatgaagtatcgagagctcaagtgtaatgatttcagtcggtcacagagtgttaatgaattttgaattgaggcagttgtgattaagcctgttgccttttccaacactaatcattattaaaatgatgattgatctgagtgattatgaaaccattaaaaaggcatctgccttatgcctgaattaacaggatggatgtaggttttgtagttgtagccaaacaggacttgtagtgattttgatttcaaggcgcttgtttatttaggctccttcctgtgtttgccaatcctacaatactattttctagtaatatttctactattttcacagggtaaaaacattggggttgggggtgtaacgcttggtgtggctacttgagcctcagctctgcggcgtgtgcagtggcaggagtagggtggcttctcaaattcccacaaccccacccttgattgcggagatgcttgtggaggcccttctgtgagcatcacagctccttcacagcacagctgcacggtgacagcagcccctcactgagtgcagaacgtgtaccaggcatttccaccatcgttattaatccttagctcccccgggtcgtggtggtggcaccactgagaggatgaggaagctgctgcttgaccatttgaggtctttctcttggaccatacatcttgtccagcagaaccagggtttggattcattcttcattatcttcagttttgtacttccttaaaagagtgttcttttggtagatcactgcagtcttaagaaaactgaggaaagacttcacctcatccaag

SEQ ID NO: 50356 - DNA, 3301 bp, Bovine  19866880899388
  misc_feature (1)..(1): n is a, c, g, or t
nccttctctactggggatccagagagtatgcaagaaagagaggcaggcctgaggcccttgcttccaagcagagaactggagtgagcatggctgtgagggtgccccgtgggggtggaggcaggagaggccacgggaggctgcctggatctcaagacagggccagcagagaaaggtgtgtgtgtgttttttctggtttctaagagaagggtgcctaggtatttgatctgataagttgttcagcggaactatgacatgccctttgggtggaggaacatggtttgactaaggagactctatttgaatttatggaaaagactcctgcagcctgcacaagggctgtgtttctaggtgccagagtcccacctctgggacccacccttttctggtcacctgcaggcgggccgctgctctagctgggtttctggctcttactccaccaggaggaatcctgtgctgatggagaggttcacacatgggcttcttcagtggggtctgtgttccgcagagcctgcccataggcacgcacaccgcttccgttaggctttgtcaaccgttctgggaaatgtacgttctcctgttcggggggcactgcaggctttctgctaaggggcttaacaggtgtcttcgcagttcctttagaggctgagtgccctccatgcccttcgggcctgcctgactggctcaccctccccgattgcggtcggcacttccctcccctctctggcctcctgagccaacagccccctttctttctgcaggcgatgggtccttcatggcgctggacccttcagacagctggtggttaggacacaggccactgctccactctgcccggccagccagcacttagggctcgagggggcagctgcctcagagagaatattctatctgaggtctggaccccaatagcagtttcctgttgggtgtcggctgtatgacactcacgcttttctcctgtgaaacgcacctgtgtgtgcggcagtattgtgtgatggtacgccatgagcgggagaggggcctcggtgccccacagtacgggcctccccccgacacacgcagttttgctcacctacacacgcacaccagcctatcagctgctgtgtcagaggctgaaggcaccagagaatgcaggtctgaatggccacgtctcctgccatgcccccccgaggaggtaagttcagtcaccagctgggaggtgtcactctgtggccctcagagtggggggtcaggacccccctcctgcagcccttcacccctgccagcggctccagacccagaggagtcctgtgggctggtgggggcctctctaggagacagacgtctgttgacagacacagaattttctctcttgaccctctgctggaacagaaaataaagacacaggtaagatcaaataagattttactcaaacatttttaaaggcaggccggtgtgatggctttcttccttctacctttctagaaatctttctcaaccgtggggcctccaaggcacttcaaccgcctctgatctgggttaaagcctggaatgttccatcttccttccctctgattctgggtccaatggggcaggtttccaaacgggagttcctttccttcttgccagacaggggcttctggatacagtcagaaaaatcaatacaaaacgcatccacatgttctttaccttgtaacgacagtctggataatggatctcagttcaaaagtaagttatggggttgccttattgaattagaataagtttaaagatcagagatctgttttaaatgttactttgtttttcccccaagctcaaatcttcgccaattcatttgtctttaaatcaattgcgttttttttcaggacgaggatcatagctctacttgactgctttgtccgtcagcctggctcccgcctggtctgttgctggggacatctggagaatgagaattagccagccgtggccactgctcagtccccatctccccgggctttgcgcagagcaggctggggtacaggtctgctctgggtttctaggtttcctggcaacaggaagatctttaaaaatgctaaatcctaaaacccatggtagtaaagaggccctgcagactcctgagtcctgaagcaaggtccagaattccggcctcaggctgatggtgttagtaagaacaaaagcatcatagaggtgggctacaaggccccttggagggacccagctgaacaccagttcctgtctccctctgggggtgaagtcaggaagcagcagagaaagaagcctgtttctttcagcaggcagctttccctctgcccaggcatgttggaggctcgtcacacatcccagctgagctccacgctccctcactccaggcctccggtgcagttttcagccggatggggagaatgccctgggctctgtgcaagctccctgttcctggactggcttgcctccagacagagcctgggaaggacccaccgacccagaccctggaaggcggcaggaccctggactggagagcgctgtggagcgcgtgacaaggacctgccaggagttgcccgttctgcaccagcctcccctcccctttgctatcctgcccagaggcagggagaaggggccccagaatgcctgcgaggacatgctggtaagaaagaagccagttcactaaccagtactggtcccctttcttaggagattatccaagtctcggccactggaggataacattctagacaggttcaggaaagtccatgtggagcaagggctgtgctgggccttcgcgggcagggccgacctcagcgctgggtggccagggtcctgggcttgtagaccgggacatcctcgtcccagagcgccggccgcccctggatgatgtcggctgccttctctgcgatcatgatggtggggggcgttcaggttgccactgaccacactgggcatgatggaggcatcaaccacccctgaggttttccacgccgagcaccctggtctgtggatccaccactgccgtggggtcagagggctggcccatcttgcaagtgcacgaggggtggtaggcgctgtctgccttcgcccgcacgaaggcgtctatctccacatctgactggatgtggcttcccggctggagctcctttcctcggaatggtgccagggctttctgtgcaaaaatctctcgggtcagcctcacacagagacggaagtctttaatgtcagtttctgttgacgagaagaaacaggtgagacatttcctcttaccatgctggccctgctggaagattctccacttggagagactcaagaagctgcccaaggggacacagttcaagga

SEQ ID NO: 50357 - DNA, 1244 bp, Bovine  19866880918438
  misc_feature (1)..(1): n is a, c, g, or t
nagggaggggggttggctcatcctaggctctgtgtgtggtgctgggcattcagaggtgaagaagagttcctcagtgtagtagaggaagaatgtcagtcccggacacccagacaggagtctgtaggagtctggcaaggactagaggacgaggtcgtcaactcgtattcccagtggtgaagggcacgagcagcagcagagatgggatggtggaaggggaccatgggctgatgagcagctttgtttctggggcagaaggctcacaaggaggaggtgagaaggagcaggcagtggaggaccctgggtgtcaggttcagatgttcgctgtgattctctgggcagtggttctccagagaaggcttcacaggcctgtgaccactgcagctgcccggggccccatgcttggcttaatgttctgctgttgtctgaaagttcttagcaactttttttccttttaaattgatttattttttaattgaaggataattgcagaattgtgttggtttctgccagaaatcaacatgattcagccatgagtgtacatatgtctcctccctcttgaacctcccttcctccctccctccccatctcttagtaactttgaaacaaagggccctgtgttttcactttgtgctgggctctgagaatgatgtagcctgcagtggggtgatgtggtagcggcctgagctgggcttcgggacgtgtcccccagagtgaagaagagagaaagggtggagggggggatgtggtttagcagaggagagactggggacctcggggaagacagagagggaggcttgcataagacacctgtggctgagcctgaacctcagactgaacagaatgggttggggagggaggagccagagttggcttctgctcttgacttgggggctcatcatgctcagtactgccctctgagccagggaacttctggtggataaggctggtttttcaaaccgaaatttatgagactgtcttaatatttttactctcaatagtaagctgaagctgacattggcaggcttattcaatgattgtaaaataaccagaaaagacattctggaatcaaacagatggaccaagcaatcatgttaaaaacagcaaatcatcacttgaacttcagctaatcacaatcacattttgctttatttaatcttgagacatcttcctaagtaatttcctattttatttcttttacttaaaggacttgttattatagagtaccccagttaaagatgcctata

SEQ ID NO: 50358 - DNA, 1153 bp, Bovine  19866880926510
  misc_feature (1)..(1): n is a, c, g, or t
ntcatccatatagcaacgggcctctgaaaaagtaactataagatcttcacatttctgatcttaccacaggaacacttacctccatagaaaggaaatcgtgcttcatattatccactattccttcaagcatttgatgagcactggctacaaacaacaaaacctcactaagtatgtttctcttagaaggtgctttcccccaagatcagtgtcgggtactttcattttcatttctgtgggtatcttccagggttaacatggtaacctggaatttgttgtatatatatgtatatatacttctgaattaattatgagatatcaggtctaacatgcacacagagtagaataatcacttctcttttagctaaaaccaccatcacacacttgtctaaggacagaataaagtttgatgtgagaagagaggggaccttaaggcatagacaccctgtaaccagcttaacagcaacagcagatcaccacaccgggaacaattggaaataaaaatcttatcactgtttaatattttgaaagaacttacctccaaaaatctgtgtgaagtaccccttcatttccgcttcacttgtcacttttcctttatatcgagcatcagtctcttgatatagagcatttttaattaaaattagatcactagaaaaagcagggagattcatttccatagcgttgaaaatgtagctgccaaatggtaagttttattagaagaaatattgtagtgtgtacgtgtgtttttcttggtctctgcttggcctttctcggttcaagggcaagagcagtagagatgctaggtggctgttggcatttggtacaaatcttcaaacttaaaagcacaatacaggaaatttccttgcaagagtaattttacagtttggcaactcaagtaatgtgagttctaccaccaggctaaaagacgactttatgaacagtttctaaagttccacagcccatactttgtgatctttgaatccagtacacactgcttcttacgtagcctgaagagaggcaggcagtcttcccccatcagcagcagcagctgcggctggtatgattctgcaatcagcgtaagaggaagaaatctttggcactgcattcgtctggccttctgaaccaagataaagaaagagccttgctgttgtcacat

SEQ ID NO: 50359 - DNA, 683 bp, Bovine  19866880928334
  misc_feature (1)..(1): n is a, c, g, or t
nattacttttagggactaagctgagttaaacaaaatgaaactggttttttaactacagactttcctggagcttttactgagttaatgtgcacgataaatctttaagagagcaataaagtatatggaagtatcccaatttatttcactatagaatcattttatcctggagcatgtcataggactaacaggaggaacttagacattctattatattattctcagaatcatgttctatgatgattagttttgtcatgctctacttctgcaacaatagctgatgtacaaaatctacatgataactctctacttaccagaaaaatcgaccaaagtaccccaaactcccaaataacactagataaggggaaaaaagctaacattaccaggaagagaatggcagaaccaaaaaaaaggctacatggagagaaaagttatttttaaatctgctacaaacctcttccatgaaaagtttcacatctatttatacaaaattcatgactttaaacacttcattcattcagtataaatttgagaatacagctcaaaagagaaaaaaaaaaaaacccactgctgcaaaactctgtgaaacagtcacacgcatcattgtaaatttcaaccactcagaaagccagctgcccacttcagtactgaggtcaaagacaagcacacatcaagacaagcagcaa

SEQ ID NO: 50360 - DNA, 1232 bp, Bovine  19866880935474
  misc_feature (1)..(1): n is a, c, g, or t
ncccatacaaggttaacagcaattctgttgtgaattccttggcgccctgtgtctcctaaacccaactaaactgaggccatggaaacgactaattttaacagtgccagtgacatgccttatctctgagcttcccagagcaggaacatcaccccggcaggatggggcagacttaagaagggaaaagggggaaaagccgggagggacccctgattataatgctggatgctaaatatgcaccctgtgggggtacccacagctggaggataaagacacacacaccatgatggaacagccagtttgctgaaatatattttggggaaagtaataagtaactttaaaatatttttaaaccagaacaaaactagatctcttatgaaggagaatgcaaatgacatttgaattcttaaaataaaacccaagaattcccagcaatattcagtcagttccacgacgtgccccagctcccccggggctgcagctgaccctgcctggacgtgcgaggccacttgggtaggagatgtccagcagtgctctggctgaaggaggaaccacgtccgcagagcagtcttccagtgtgttcgcaaatttggtcgcttttcctgagttcttgctgcatgtctggctctgggcccaggggccagggtgccaagatgtctaagacacagatgggggccttgtgcgcagacagtcattgtctggggtggaattgtcattgggcagtgcaggatggccaagctaaagtaggggcagggacagagaaactgcgaaagcagtatgtctatgagctggatgttgaaagatgataaggtgtctgtgggggtggcggtggggtgggctaggggtggagaaacccagagaacaggctgctcccacctttcctaacagttagttacttgggcttctctgcctgggtactcctccttgactttcccctaaagcaacaaaaaatcaaaatcagtcatttgtatttatttttttgtttcagagaaatgaaataaaaaaaatttttttagtttcaatcttagggttcttcccaacttttttagggaacattggaggaaatacaaaatcagaagggcataaatattcaaaaggagatggcttatgttgcatagccccttagggaccattggaccaccacaaatgtaattccaaaagccctgaattaaaaggctctcctgttttagaccatactgctgctttctaatgaagggtcgttgtaagatgctgtg

SEQ ID NO: 50361 - DNA, 1822 bp, Bovine  19866880959358
  misc_feature (1)..(1): n is a, c, g, or t
nttgtagcttattaaaaacgcagaacaatgttgctgtttaaaaaaaatctgtatttaatattgtttaatccgatgttttcaaataagagaaccatcccacacacactaataggagttcctaggcaggctgttttaaagcagtgaactgacattgggtaccctgttctatgcctcgtagtccataaaaaaaaaagccttttactactgaattattttattgcctgtcatcctcactgtctgaaagttctcaaattaattcagttatcaagctgtgactgtgcctatactatcccgtggcaagtaggcctgttcattacagttggacttgaaacctgaatggatgtttaaaagaaaaaaagattagttatcttattaaaatttattacattaatttcaagcttgaaaaaaaatataagaagcaataaaacatttatgtgctcaccacccaacttttagtttctcacattttgcttcagactttaagatgtggcagggagaaaggatgttcctaagaaatgaaacccctcagatagatttgcagaccgcaacccttgacttagaccttgacttttcatgctttttttaatatatattttcaagtgcaaaattagcttaagtagcactagtcaagataaagagcattgcctcaatcaccctgactttagttacccacttagtgatttttttaaggagacaaggaaaatcttttgtttgcttgtagagttatcgctgatttttgaagattcaccaagatcttcattttcaagatgctaagctttttccttgctccccattattaatacacactctccgtagaagttgttcacctgtacagccttcctttgtcttggtggcattgtccattttcagatttactttaccagttagtttgactgatcctgagatacttgtaggaaagagagagaaataatgagtaatttagtagattttaaacgtatctacttctaccaaatctggaaaggaattctgtatttttggccttctaacagtgaactatattggttgatactgttgtgagtgagatggtgaaagaaatcagtcatgtcttactgggatgaggtagctgaggctctgtgttgtgtattgtgaggaaggcattgttaccatgaggcagtcttccagtatccttggaaatggacgccaaaatcttgggtcatattgtgtcaaaaaaggtctttctaaaacttggttctcttcctctagtgtggtagaagaggagacacggcggtcccagcaagcagctcgggataagcagagtcccagccaggccaatggctgcagtgaccacaggcccatcgacatcctggagatgctaagcagagccaaggatgagtacgagagggtgaggctgtgtgcgctgagcaggaaaaccagagcagggaggagacctgtggtgggtctggtggactggggagctcacctccagggccagcaggaataagtagttcagaaagaaaacatgtcttatagataaggaaggggattttcttacctctgaaaattcagagtgttctttttctattcctaaaaaattactgcgggagaaaaggattttggaaaataaaaggtcccacttcctgggtaaagaaatgtacattagaacccatgagacgtttcaagttctaccagattcctcaatgtctgtcttagagaattacaaagaatttatggatctatgaaaattaatacaggaaaggcaatcatctctataatgaattcattgattcttaggaaactggatgaagtaaataaatttcaagaatcatttctgagcttttaagttaccatgtattaccataaa

SEQ ID NO: 50362 - DNA, 1286 bp, Bovine  19866881012555
  misc_feature (1)..(1): n is a, c, g, or t
natttttaattgagggataattgcttcacagtcttggtttgatttctgccatacatcaacatgaattagtcatagctgtacacatgtcccctccctcttgaaccttcctgccacatcccaccctttgccactgctctaggttgttacagagccccggtttgagttccctgagtcatacagcgaattcccgttggctacctattttacgtatggtagcgtatatgcctccatgctaccctctgcattcacctcaccctctccttcctccaccgcggccccccgcccttgtccgtaagtctgttctctgagtctgtatcttcactgtcgccctgcaaataggttcatcagtaccatctttctagattccatgtcaccaggggttttgaatgaagagtcagtgtgcttgagcccctgtatttcagcggcttttggtgctctgggccccgaaaggtcttttatgccataacgtcctcatgtaaaacttaagtgttacagagaactgcaaactgcatcacacgtaccaccctatgttcactgaagagtcttggctgggcatcaggctcttcctaaatgtcagtctgcttctataatctctgtgagtgaagcactcagtaacttctcctggcccttacagcaaagcccaccagccccctgtgcttgtccacagcctgtctttggtctgtctatcacattcactttggcttcatttcctggagtacccaggccatgtctcttctgctcctttgcaggccttgcaccctctgcctggagcaccctttgccctccttgtcgcctgactgggttctccttacccttcagtccagtccttgtcctcacttctcctgcaagccttccctggtgccagcccccagcctcagggatcccctgagcctgttctgtgcttcctgtggggctggaccagccgaactcccattgggagggctgcctgtctggttatttctgcatcccttccccagggtaggaacttgccgagctgaggatgtgcccagtggttagaagagagcccagcacacctcagtgggatgaatcaagtgccaggcattttgggtattgactgaacttgagttctaaattcacatgtggagggctttttttttttttttttttcctccatatgataaaattttttctttttcccctaataatttctctctctagatgttcgggaaagtggccatgagagataacaaccagatcaacagaaacaacaatttccagacctttccccaggcggggctgctgctcttcaggtgaccgagtccagt

SEQ ID NO: 50363 - DNA, 1094 bp, Bovine  19866881023858
  misc_feature (1)..(1): n is a, c, g, or t
nttcagtcactatacaaactgagctataactttccctatatacatgtcacctctcctcagactcagactcttcaattaaaggcaggggattcacagacgcagaagcccccagaggtagcctcactggggaccttatgcaggaaatgctcacaagacaaccatggagtcggaggaggtagatttacacatttgtgagagagtaaggcaaggaccacctgaagaaaggaggacccctttctgctatgctttaatggcaaggaaagagaaatgttaggacatctaaatgaaaaacacaggagaatatattcccaccaaggtgagaaccttaaatcaagtccagagtctgtgcctacacacaaatgatggtagccaggaggggggccccagatgtagatctatacagaaaatcagcacgcggagagaacagtccgaaaacaccagctgcttcaagatgctcaggctctatcctcagatacagcggcgtccccaaacccagagacaaacacaggttgaacaagcactggcttgtctgctcaaagcaccaaccccatggaggccccggtgcctccactttaactcatcagcagggagcagagtggcaagaagacaccaggtgaggtactgggtttcagctctgctatcatccagctctgggacctgggagcctgctccatggccccctcaccccaaggccatagttttcctgtacttaaaatgagaacattcaattgtaactcagaatctttccagccctgaggttccagaaatctattgagtatttagcaaatatcttctctgtctcacatcagacaaggcccggaggaagttatagaataatgttaagacagcactctttcttctgaattgaccactgttgtagactgcttttgaactgtggttttggagaagactcttgagagtcccttggactgcaaggagatccaaccagtccatcctaaaagaaatcagtcctgaatattcattggaaggacagatgctgaagctgaaactccaatactctggccacctgatgcaaagaactgactcactagaaaagaccctgatgctggggactgaaggtgggaggagaaggg

SEQ ID NO: 50364 - DNA, 1155 bp, Bovine  19866881062392
  misc_feature (1)..(1): n is a, c, g, or t
ntttgaactgtattctctgtcgtaggcagtacccgtaaagcaagacttcagatcatagataaagcagaagataaagcaaggcttatctgaaaatactgtagtgaacataaaaataggatgaggaagtagaaacaggaagcagaaagggaaaagaaggacattcaggtttccttcactagagatgcccaaaagaggggcatttgcttaaacgctcagcttgttttactagaagcagtggtattgaaagtgattagcaaatgcctgcatgaagctgttgatagtgagttttcaagtgtctggcctatttatggctgaagagaataccaaatatgttcacattaactttgtgataaatggcgttctggtcaccaaagataaaaaggttatctttgtcttcctttgctctgactttgcctgcatacagcctcttttcgctacgtatttcagaatataatctctgttagctggagagacaggtaaaattctctgggacatattgtgcatctaaataaaagtgcctgccactgcccattctgttaaatctagttctttctaccactgttttgacagctgcaatataataaaaattcttgaagtaaaacattgatttattccaaaaggttgttaataagaactaagaaggtatatagaacaggtaaacttctagacctgttctataaataaatctggaaattctctttgatcagtagcaaaattgaaaattcactaaacttggaaaatgttgcctctcctaaagaggaaatgcagtctgccaaaaagtgtttttaacaaaacctagtctgaatgtttgcctatacatagactataaaatttggagaactgatagaagtgagccctattcctgatcttacaaatgtcttggggcatactttgggtttgggaggaagggagaggggcagggctgttcttcccagagtgtgattagaagaggccttagagtccagagctcggtgtgccttccatgttgtcagccagtttctgctctcagcagtggagagctttataaggtagcccgttgggtggatgaacagtggtgattattagaaatgtttttcttttgagtgaagatcacaaatccagtccaggtcagagaggtgaatactagaggtgaatactagcaggctaagccagaca

SEQ ID NO: 50365 - DNA, 1840 bp, Bovine  19866881066262
  misc_feature (1)..(1): n is a, c, g, or t
ntaggtctcttttgccctgaaccactggcaggggaaatggggttaatccactgactatagtgactaattccggctggcaaggggaaactgggttgcttttatacaacggagaccagcaggcggtacagcaaccaggcaattctccagggcttctcttagtacttccatgccctatcgtaaaggttaagagaaaactctggcaaaccaggcaaggaactgtagatttggacccttcaggaagatgtaggtcattccaccaagtaaagaatcctgatctgctgatgctgtgtctgagagcagagcaaatacaaactggggagcagataaaggaaaccatcgatggcaactatggtcacatggtgagttacagaaattaggactgtagcaaacagaaattaagactgtagcaaattttttctgttcatctgttatatgtttattttttcatttgtacatgttattttcttttctctccttcccattttgatgtcatgtatgagctgttggaagttaacttagttaagaatttcatcaataggcaacagaatattcaatgggattgtgatgaggaggagtaattaataaagtcaggcaggaattcagtggctcctgggactgtgtctcctcactggggttacgggtgagagcttcttcacatgtaacaaagtaagctgcatctccttaggcagaaacagtcctaggtcctcaccttgtcacacagcagttcaattgtgtcgacattctaagtcagctaaagcacacatcactgagtccttctcactctcttaacctgactacttctaccacaccactataactggtttttctgccctgcttttcagatattaagggtccatggaactcactggtccattaacccaggataatcccctacctcaaagcctgttgatcagcaaccttaattctatcgacaaagttccttttgtaatatattcacaggtgtatcacctagggcgggggcaaagacaatggggacctaaattcagcctaccacaccatacgatccagcaattccaatctgctatttttcccaagagtaaaaaaacattgtattaagaaggttcatagcagttttatttgtaataggcaaaaagatgtttccagtgtttggacccaaatgtccaacatgaactaagtggataaactgtgccgcatctatacaatggaacatcatcctgcaataaaaaggacaaagctttcataacccacacaagagtacatcctgaattatttcatttctatgaaactccaggaaagacaaatctaacctgtaacagtaataaaaagcagatctgtgctttccttcagtcaagaataggggtggagactgaccagacaaggcacaagggaacctgacggtgatgggaatgctctgtatcttcactggggtggtaaatacagaggtatatacatttacctaaactcaacattctgtacaccgcaacgtatacatttcactgtctataaattgtacctcattcaaatgggtaatttccttcctcaagcccttgcaggaaccagaccccacatcatctacaacctctgagaatggtaaagaatgtccatattcctgggcctgccactgtgccctgcacccagatcctaggcagctgtcatttccaggtctaccctcctgtcttttccttccatggtcagggatatcaaagcagccagctcccatcaaggtgtgcaggcaataatgcggttacatgtagttcaccgtaattgaaggtaattcatgttgtcacatctgctgtaccagaggtcttgtgagccagtgagactgctcacattaattgtaactgacacctcttctctc

SEQ ID NO: 50366 - DNA, 1905 bp, Bovine  19866881094395
  misc_feature (1)..(1): n is a, c, g, or t
ntaaataaatgctcattagataatatgagagaggctatacaggcaaacttgtctgaaagaaaattcttgacacctgaaacctggggttgagagtctggctctgttttttattaaggtcagtgttcactggctgactggttctcttgccatgggggtgcagtggtgatggagactgttaactgggtgaggcgtgagggtgtaattgaaaagatttggaagtgggcagtttttgaatcctggtttgtggatggcacactgggttcccattctgaatgtgtaggtggaatggctctgtgggtgcgggattttgcagaaggaaaagctgcaggcagagggcataatacagaagatacggtgagcaggcatttgggtgactggccagcagacaggaagttagcctagtcattccgaactcattagtctgggagcaaagaatgagctgtaggctgtagttcaatgaaaagagaggcctggcatatccttaagaagaaggattaggaatggagggtttattaaagggtcattgaacacttcctcatccccatactcatttctttctgtctgtagctaaaaagcctgtaaaagtttcttagtgaagcgatcacaaaagctaagtgggatgccagggtgggtcggtgatagcccttggaccagcatctagcagctggtttggtttcagttttgctatgaatggggataggcatccttcctttttcagagctgccatagagctggaggaagcagtggttatgaatggcagctttgttaaccattaagtgccattcatttatatggaaacattgcctgtgatgtggacatagcatccaccttggcactggaagagagagcagtctctgcccctagatggggctgggggtactccatagtgaggatagggccccagatctaaggatctagagacatgtgccattaccttcaaatcatggtctgagatgcaggaatggctccctcctaagtccattgcagggcagggctctgtgctgactctggtggtacagctgtaatgactgtctgtgatggtttcccactgaggctgttgcattgcgtgacttgttatacccagtttccagaactctgctgtgattccatttctttgtcttcaagagtgtgatcattagaggtaatcttggattcatctaactgattaaccccacccccccaaaaaacaatagattatgcatggattttgctactgttctgttaggaataaatgacatgcgataccccacacagcatttgtcgagataagagccatgaacccaggtagagaccaccatggtgggctaccccgtgtgtctggtgctgaggaagttattggggagatagatggactgtcgtttttctggtcccttaaagtacttcagtctttctgggaagatagtgaacaatccaaatgactggtaggcttttaggttttataggagttgttcagagagagaagaggattcagaataattgaagtggtgtaattgatcagcacgctgaagggcaggcaaccatggatcacgcaaaccagagtaataacttcaatgcagaacgttttacattttatagctttgtgaacctgggatgtcttcaggagccagacaggcaacaagaaatcagagaagcagttatagatagtgagggctgcgctataaaaccagcattcaggaatttagaagagaagcatggtatgctgctgctgattttcagagctcaggactattcttgtccatggataagaaaacatcaaacacagtcaaaccaaggcagtgctggcttgtggcctgaagcctgcagtgccgatgggcacagctgtgctgtgcttcccctaaaggcctgggccctggggactgagccacttgggaagaaggtggtatgtctcctagtgtctgccctgtg

SEQ ID NO: 50367 - DNA, 1265 bp, Bovine  19866881240638
  misc_feature (1)..(1): n is a, c, g, or t
nacgctataatgcagataaatttaatcaatggttcagaaaatagaaaagaagaagagcattctgactcattctacaaagtagacttaaactgatttcaaacttgcagagcacacacacacataaaaactgtgggtcttctcacttacagatagaaatgcttagagcaaaccttacaatgtatttaaagaatgctgtattccaactatgttagatctagtccctcagccctcagcatccactcccacctccttcatcgtacctaccattgctatggagaatggaaagctatgaatgacattttccagactctcccttattttcttgatgcaaatttgtaaacaccaattaaattcaatggtgtgtgagacttgggagtaaaaatgaagcaggagctaactttctattgataataaaggttttgccttccaatgcaggaggtgcaggtttgatcccagttcaggatgcaaagttcccatggccaaaaagtcaaaacataagacaacaatattattacaaattcaataaagtctttaaaaagaagagaaaatcgtgatgagggtggcatggaggcaaaactctctggatgctgcagaccctgggatcaccgttactgcagtatgaccttgacctcaagagcatcattcaagaatcaccaactcggagagatatagaagctgaaagggcccaggcaccaccattgctctggaggggcaatggacatcttagattgacaagtgttggacagcaagagtcaatcccaatgaacattatcttttatcacaggtttcttctgtggaatagctgagtttgtggttttgtttttcagaactctacttcagcaagatgtgaaaaagagatgaggttatggaagctcatccaattccagatatgatgaaggaagagggccatcaggaaagtaccccctgtccccagaagaataggttgaatttatcacttagccacctgcttggccctaatcctccttcagtggccagtggatgaggaaggtgcatgtctgcattaagaagcagacaagtggacatgaactttcatggcagaaggaaaccagcaagaaacagaatgctgaccacgctggacaagccagatgaacatgtgcatctaaccaaggactgctctgtgtcctcgcactcgaatgaggttgtgctgggaattcactctgcagggatctggcaggactgaaagcagctctataaatgcacaggtttgtctcatctttttgtcatttatctaagtattaacacac

SEQ ID NO: 50368 - DNA, 927 bp, Bovine  19866881368125
  misc_feature (1)..(1): n is a, c, g, or t
ntgtaggacggttttagagtatgcagacgacaagcactctggtattagttattaaagcttgaagagtttaattcagggaaaaattatttactcagtgaaggggtcagttcttgaacctgaactcttcactacataaaagagatgttgggcaatactatggctccagaaataatcctcacaatgaactttcacgcgcagcccgtattcatctacccaactcccaggcacagagttgaagatgggtgattcttgctcttgggggaggcagaagctaggataacaggcagaagttatattagggtatgtttttctttatgtcttcctgttttcctttctcttattccttttgttctttctctcctcccagccccaccccacctttctttaaaaaataggcacagagaatacatactatctgtttgcgttttctgttctagttcagaggagcgtctcacatacctgtggcctgacactgactatatacaatgatctattccaccctttatctctcatatacaagtactgaacatcttattatgcaaggcatcacgtgagactcatggccccaaggagcttatgattgagctcatgactcagggtagttcagcatacaccatatattgtacaggtggacagggagagagtgtgttatgggtaggtaccacaggaaagagcttctgttctggggatttagctttttgcaatagaggggttttcttcttttggaattcacttcaattttataatacagccatgcttttgtatatactcatgaaatcgtgcttagtggacctaggctcggcaaacagatgtctttgcccaagaaagttggaagttgactgctgcacgtttggagagatgaactttccctgcatttcacagaatgggaggatttgtttggtagaaatgttaaacacgggtacttta

SEQ ID NO: 50369 - DNA, 1166 bp, Bovine  19866881379170
  misc_feature (1)..(1): n is a, c, g, or t
nccctgcccagctgtaacacaagcagagaaggctgagctcggaggggaacccagaaacctgtggcccaggtttaactaccagacgcccctgcgtctgaagccaccagatcttcctcctgaagttgaaagtctagttcatcttctttgcaaggctcccaagcagggtcctcagatctccctgtgatccgaggcccccgttccagtgcccacctggggcaacttggtgcacctgcatacagctagcctgagtcttcatgtccccgtcttcctgtctagagtgagggtgtaaagggtcccacatggtctgaacctgagggtttaaattatgtatcccagcctttgacccaaatgtcacccccatccggaaatttcagccttcttttggaactcctccttctattgccacgggatgaccgcctggtgcccacagaccctgaggggctggcctgggaaccggctgtgtttctagccccaatggctcaccatcctgctgtccaaggcctgcctaatagcctggccacctgcctagccactgtggccaagatggcctcagcctgtgcctacagaaggctacaggcagaggcaaggccaaggcatgtgaaagtggtagggtgggcaagtagcctaaaggtgagacttagctccctggggaagctcctccttgccaacctgtctctttccactgcaggctgctggacattgacaaggatgcatatgtgtgcctagggagctcagagcctagggagacagacgtgaacagctcagctgtctgggtccagtgctgggcacaggtctagaccctctgcaaccaacatttcaatccatcctcagagcagcctcatgggctccggattttacaaatgaggaaactgaggctcagagatggctgacacttgctcaaggtcatacagccagttagtgtggaagcagcatgtgagttcttcctactgtggagcctctgtacatgtggtcagtgccccaggaaagaccctggaccgtgccagtagtgggatggaggtgagggcagagctcataggaagcagaggccctcctcagttagagacaggaatctagaggaggaccttttgcatggggtcttgttagatggttaagagcttaatggaatggcattttaagagcaaagcacaacctgagcagtggccttg

SEQ ID NO: 50370 - DNA, 716 bp, Bovine  19866881395287
  misc_feature (1)..(1): n is a, c, g, or t
nttcccacactgggcgggggatggccctggccaccccccaagtctctccaaccccagtctccagcccaggctagcttctccagggggcaaggagaaggaatggaaggcaggcgggcagagggctcttccccccatggggcctcgcatacgtggcacgggagagctcgaagcggcctttgtcctggatgtggtacatcaggtcgcccccattgaggaactccatcacaaagaacaggtggtcctgcgggggcgggaggatggtgagcagagggacagaaaacgaagggaggcaccctgacaggatcaccaggggcaggccctaacaggatgtagggaacaacccctgtcctgggggacctgcggggggaagaatagccctgccctgagacatctgaggatgggggaactcagccctgccttcagggatctgaggaagaagaaggggccctgttttggcaagtctcaatgggagatacagccctgacctgagcaactgaggagggctgtgggccaggggcactgacagtgggtgggccaggcacctttgtctggaaggtgcagaagaggtgggtgagaaacggatgatccccggcgagggccagcacccgcttctccaccatggtgcactccacgtcgtcatcgatcaagaccacgtctttcttgagagccttgatggcgaagaattcctttttgcccttcagctctgcgagcagcac

SEQ ID NO: 50371 - DNA, 1454 bp, Bovine  19866881423033
  misc_feature (1)..(1): n is a, c, g, or t
nttgagaatgcactgtaacctaggaggtagcagcttaacttttctcaggactgcttagacccttttaagtttgtttctatgccttaaaagtcaaactacctatatgagtgacaggaagaattaaaatcatcctgaagcagccatcctggaagcacaaaatgctgcagagaactggtcataggcactacctggtatgctcacctgtgctgggcttgtctcagataagcaagctgcaaacctgctgggctagttactttattaaatcttctatcagtgataatgtaatgaagggactggaccaccaccaagttactgttcactgatcaaaaacaatctgacaagaaaagcaaatactcaggagactctggtggcctagtggttagaattctgagctttcactgtggtggcctagattcaatccctggtcagggaactgagatcccgcaagctatgcagtgtggccaaaaaagtgagagagagagagaaaagcaaatactcaaaatgctagctagacaatttagacctaaaaacctactgtctcccctaaatgacttgcctatataaagctttgctgtgagtgtgactgccacaccagtgaaagacacagagctaacatacacacttctgtgggaaagcacacagcacacactagggctttcatgaacccaatgatgtgagctcacattgttgttgtttttagtacttaagtcgtgtcccaactctctgtgatcccatggcctgcagcctgccaggctcctctgtccatgggattccccaggcaagaacactagagtgggttgccatttccttcaccagggaaccttcctgacccaggaactgaacctgtgtctcctgcattggcaggcaggttctttaccacggagccacccaggaagcctgggctcatcatgtcagagggttccaacggaaccagtttatagccttattatagcagaaatcaccagtttatagccttgttcaaatttgcacttccacaatctcagtggcttcattaaaaaaaaaaaaaaaaaaaaagtcaacatataattccttaaaaaccttctaactcaagatgcttctagttgaataggctgtaaaggaagaggaagcagagaatacctctcaagctcctcaccgagtgttccgatgagagaccccatcctccacacagcacacgcttgtcttctggtctccgacatctacaatacacgtgctgcttaagccacttccaaaggtggcacacacagactcctgatggaccacaatccctgaaaaacaaaaggcagaggggtgatcagctggggagcagggaagatcctgtgacaaatatctagttaaagtctaggaacccccaggcaagcatcactgaccctcccagaataagcatttcagtcaagcagtgaattaaatcaactgtgtcaggaaaaaacaaaacactctcatttcaggtaggt

SEQ ID NO: 50372 - DNA, 1071 bp, Bovine  19866881465058
  misc_feature (1)..(1): n is a, c, g, or t
ncctgagggtggcagcattctcccccagcctctgcaagccatggtcaccggtcaccagcctcgtgggcaccctgggcaggagtgggggtgagcaccttgggagagcaggcctcgtggagaccccgggcacaccggcactgccagggtggtttcctgggagacagcaagagccactgttctgcctcatgcatcgcctttaatcaggctcagcggaggcccagctccctgggcacgcacggtggggctgcttctgaacaaagcagagacagggcagccagctctgaggtgagctgcagctgtcactcgcagtatcgaaaacaagcagttctgaattacaaaccgagacacggcatgtcgaggctactggcagagaattaagggggcacttggaaatctgggtctgcggtcacttttcggaattggcctctccttccgagcttgtctgtcacctttctgagttctctatctttctctccaggcattggggtttggatggttaattgtccttggtgttcgcggtaattacacatgcaaatccctatgcacgggtgaaactatgacccatgaagcctttttttttgttctgtaatttttcttttgagtcaataactgagatggcacttcatggtgttactaatacgctgctctatgaaactcatgacaagtccattattttctgcaattttgagtatcagtttatgtaactgattctaattttggggcttaactgctttgcacaatcttgcttttcgctagatttagtttcccgtgtcctaagctgagagctcagtgcccctgccccctccctgcccaaagcaagtgttgaggctcttggtgcaaatgtgctgattcgggagagctctgtctggtctctccgtttagatgatgaggtaaccgtggggaagttctatgccactttcctgatacaggactactttaggaaattcaagaaacggaaagaacaaggactggtgggaaaataccccgcgaagaacagcacaattgccctacaggtgaattgttgtttttgtctttttctctttttcactaacaattttacaagctttattg

SEQ ID NO: 50373 - DNA, 820 bp, Bovine  19866881631727
  misc_feature (1)..(1): n is a, c, g, or t
naacatatattttaaaaacatgtttctgaaggaatcacacagataaaagggaaacacaactctgcatttccccctttcaaagtgaacggtattgcatcagagcatttcaaatgaagatgtcacacacaaagccaagtgaaacattgcacatgtctctcttgctgaaaaaaaagggctcctggaggcgacggcccactcagggaaatgttctcaagcacaccttttaaagagctcagtgtaagttgctttacttctttcagatcttaacattttagacacctgaaaacgcagggcgctactggttccagcaggccctttgaatacaactgaagaaaaccaaagacaggtaggaaagaaacatgtgctcagcagcaaacgtgcagcaagaatgcaggacacacgtccctgtgagtcctcgttttcactcacacggaccgagcctacccgtgcctgtgccgcctctcattcctctgtgtttcattttgcccagagttacagtatgatggctgatttcgttttttaagcagttaggcaccttcaatttcatgttgcattattagtaatacaatggcagttatggcctctactatcaaaatgagaaaaatgtcaaactacattctttggggaggagagtaataaagctgcatggtttaaaaatatttacctagtagatttgatggggtttaagattttttacaagaacacacaggtggaaaaagaacaattcttgacatgcaaaatcgggtcctattctcaactaagcctgtgcctctcggcagagaagtacccaggtcaactgggctctaacaaaacccagctc

SEQ ID NO: 50374 - DNA, 1366 bp, Bovine  19866881634056
  misc_feature (1)..(1): n is a, c, g, or t
nactgtaaagaaacccctaccaccctacaggtagaagatggaattactacttagttgacgcaactcaaaacatgatgtgaaagggcagaggtcagctgtcctttttatgtatggcactgaaaatcctacagttacaacccaccccacctgaaacagagtactctgaacctaaatagtttctgtgaatttatgtgaaaagggatgggcttgatcaagagaactcagtgacagggacttagaaaataaatcttttgcagcatctttaaggtttaagtactggtatatttcagatcatgtgtatgaaaggaactttagggatattttcctctctggcagtagtaacacctctgatgctcagccagcgtgccctagcaaggggtcatttatctgccatggtttcgactggcgtgaaagcctgttacttgctgtgcagagatgacataatgcttctctcccccacagaaaggatcaagaagacttccttctcaactaccacgctactgccctccattaaggttcttgtggtttacccttctgaaatatgcttccatcacacagtttgttacttcactgagtttcttcaaaaccgctgcagaagtgaagttatccttgagaagtggcagaaaaagaaaatagccgagatgggtcccgtgcagtggcttaccactcagaaggaagcagcggataaggtcattttccttctttccaatggtaacaccacgtgcgatggtaactgtgacgagaaggagggcggcccctgtgagagctcccgagacctgttccacctcgcttttaacctcttctgcagtgatctgagaagccaggctcatctgcacaaatacgtggtggtctacttcagagagggtgacatcgcagacagctacagggcactcagcgtctgccccacgtaccgcctcacgaaggacgctacaggtttctgtgcagagctcctccgtgccaagcagcatgtgtcggtggggagaaggtcacgcacctgtcactacagctgctgctccctgtagcccagccacgaagcaggagaccctaaagccttctaacccctccaatcacagggaaaaaagggtctgtaagcatctcaagtttaccatataggctacttgcagggaggattacagctgaaccctgaacaacccaagggtgctgacccctctgcagcggaaaatccagggagaacttcacagtccatcatctctatccatggctcaaccatctgcagatgtgtagtgcattacttactgaaaaaaatgcacttaagtgtatctgcccagttcagacttgtactgttcaagagtcaaccatatgtatatctgcttgagcaaaaggaatagggaggatttacaacagg

SEQ ID NO: 50375 - DNA, 2267 bp, Bovine  19866881663276
  misc_feature (1)..(1): n is a, c, g, or t
nctgtaggtctgtctgaggagatgaaattatcagtgcaataacgacagatttctacttatctctgtaaacttgtctttgttttccttgacgtgctctatttttcatcagaacagccaatgtgtgtcattcatttctcttctaggtttctgtgactctccgtccctgtttggcatcccccatccagccctctgtcctcccagccagggcgctggttcaggtgccttggacaacactctcgcccaggctctcggttacgccatccatgaaatgggcgtgcccgagcctctgactccgggaccgcgccagcagctaagggcgagagggcgccgccgcggcccagaaggcggcgccactccagcctccaggcgccggcccgatccgggaatagagccgggtctcttatagccgggcctgagtcatgtgacggggcggacacctctgcccgcggctgagaaaggcctcttgggggcccggcggggcggggcccggtgcgtggtagacacatctgcgggggcgtgtgcgcggcagccgctgctgcgggcgaaactgttggggtggggtcggggtgtgcctggtggtcgctctgcaccttgtcagcttagggccgctcctacccgcggtccctgtttcccaaccgccaaaccgggcttggtgagctgcccgctgcggagggagactgaggcaggtgagcaagccagggagctgatggagcccgcggcccttcacgccctgtgggtgacggagccccctaccacccccgactcctcaagtgtcagagcctacagtgagacctggcagatcttagcagccgggggtactgctgtgtgcgggtgagaggtaggggtggtgctggaaactgggagttcctctgggtctccttgccagggaatatctattactttgtgactgcccctgacaacaacacccacccatgcccctttggtgggcagaggggtagaggaggcggaagagcagacccggaagagcaggggttgtgcggtggtcagagcaggaccggggtagtccaggggctccttaccctgtaagaaccctaggaaagctctgtgccctgaactcccagaaagcaccttccccttgtctactccaagtatttctgaagttccacccaaacactgatgtattgaggacaggagctgtgaaccattagctggcctcactaactctttcccagttaacaccagtatggattgagctctgctcccagagtaccccacaagcttgatcttgtccatcttctcagccacctaccaggccagtattactgttatcgtgcccattccacagttgagaaagctgaggcacagttaagacatagggtgtaaacttggcctctccaggcccctaatctggcacttcctgccgtttggtactaccctcaaagcctctgcccttactacccagtgtctgaggcagaaatccaggcccacgatcatttcagtgacctgaggcactgctacatgttggactatgttccaagtgcccttctcgcttgcgctagacccagcaggatccatccaggttctgccatccctaggagttgcggaggagcaccatctctgctagcctggcctttttaaccctgaaacatgagccccactctcccttggccagcctagtgctctgggtgtgatggggggtggtgctggcagccaaagcctcagggagagggatggtgatagagaagcagtaacaggctaaatcaaggaccaactcttggcagggctcaagtgagggaccccttcctgccggctcaggtggacagtccgcccccagagattgagggatgtccaggtcctttccacgttgcttggttgagtcctggacttcctgtggaggggtctgcgggcctccagggttcgtggcctctgtggcgtagtggttgcaggggtcaggctgcccctcctctggtctgaccctccgggagcctttatggggacagagtggatgctgggggtgggagtctggtggctggctgctcagtgctgcctctgatgggcccgtttccttggctgcaaacctggagagggaagaagggaaagtaccacttctgggtggctgctgtggacccagccaagcttagggatttatgccccatgtcatgacaggctatcgaggactcttccaaggctgacagcctgtgacttggcaaattgaccttacctgtgccatggccaaggtgagctgagcctcaccaggtgtccaccctggctgaagctccacgcacatcatctcacacaacacttag

SEQ ID NO: 50376 - DNA, 1837 bp, Bovine  19866881675874
  misc_feature (1)..(1): n is a, c, g, or t
ntgctcctccccatgagaccttgcctgcactgaccccctgcctgcacctctgtacctggaccatgtgcattgccgggctgtctccctgtaaaccttcgtgtccctttgaccgagaactctgtgaggacatcctttcaggacatgccctctgcagtacttggactggcgaggaggggcagggatactggtttgtttccagggcacacagtgagaatgtgtgaaatgccggtcatagtgctcaagtgggctaaaggaagtggggtagttggggcccccatgcaaggagtaggagggccttctcctccctcagcttggggttgtgactctgggtgccagggcaggatcgccacgtgcctccctcttatttgtcctgcaggtatgtggcttggtccagtgccgcctaggaccaagatctgcattgagtgtgcgtgcatgcatgtgtgtgtttgcgagtgtgtatggactctttcacacatttaggtgccccaccccacatccctctccactggtggacggtgtggtcacgtccctttggctcctggtttccgtgggtgctgcggggcctgggtatgtccccatgtggtcggcgtggcgtctccctcctacatgctcatgaacgtctgcccctgcctgctctgtccaggggtactttagtgacgcctggaacacctttgactccctcatcgtaatcggcagcattgtagacgtggccctcagcgaagccgacgtgagtatgtgcccgcccagggtgcctcccgtcctgtctctgtctgcacaccccccccaccctgcactgcatcacctggacaagtcacagagcccgatcgcacttgatccaaaaccaggagtttgctagggagagcatggaagagaggccttttagtgtagaacttgatccgcaagccttttgagacacgaatggtctttggcgggactgacgatggtacagtaggcagggcaagacagactcgtgactatttttatttgctctgtcagaagcgatacccaaaatgacgtacctagtatatttttattttagggcgattttttaagtagccaagcggctccgtgctagaatgttcccctttgataacactgtccttttcttctttttttcctgttgtgcttcctcccttctgtggcttctggctgcttgcctaacagcactatttcactgatgcatggaacacttttgatgccttaattgttgttggtagcgtcgttgatattgctataactgaagtgaatgtaagtagccaactttgtgtcctataaacctaattgtttttgttaagtctaacgtggaagagaccagaaaccctcccccatgcgtctctatacacgtttagaaattcacgcacacatttgttccaagggcttccttggtagttcaggtggtacagaatccgcctgcaatgcaggaaaccccagttcgatccgtggattgggaagatcccctggagaagggaacggctacccactccagtattctggcctggaaaattgcatggactgtatagtgtatggggtcgtaaacagtcaagacacaactgaacgactttcacttttgttccaaaagactattttccctcccgcccccatccccttcccctgaatgacagtggggaagtaaacatggaattgccattttggaatgaaaacatgattagtaaagaccttcttaagatgttaggggctgggagttaattgtgtgggtatgtgagcgttgccgctcggtagctgtctgaccttggcaaggcccccagctgcttcatgcctcaatttttccagctggaaaacagagttgataatgtgagccctggtgcccacccgtggg

SEQ ID NO: 50377 - DNA, 1179 bp, Bovine  19866881925116
  misc_feature (1)..(1): n is a, c, g, or t
naagtcttttaatcaatgtttactaaatagacataatttaaactttagaaagtgagctctttttctgccatgttagtgttcagtggtgtttaagtatgtctattctttggccccaaaaagttaagctgctgctacaacccggttacacttagcagccttgcttatgaatcacagcgtttcctcacctgcctgtttgccagctggcacactgttgtgctgtaatcccaggtccagcagtctttggctcagtaacttttcacctgtatgtgtgtattctaacctccaccccagagactttctcctctgtctctttcccaaccttttgatattgctatggagccaccaggcttcttcttatcttaaaggaaatggtctgtcaaagcgtttgtgttttcagttgtcagggcatgcttatgtatatgtcatctattctattcttacagtccttttgttatcagaagagtcttccttattccacagtaaatatttctggttatgttcaaagtacattttgttgtgtttgtttcctggtctagaggacatttgttggtgccatcttcacaaatgttataagtcataacaccattgccaaaagctttatcaaacccccttttcagcttggcagcatactgagaaaatctccagccacctcagatccttttagaaagtaggtcagatgtaactaataaatgagtcaaaaaggcagcacatgcatgaaagtggtccccaggtctgttttagtgacattttaccagattgctagaagtctcaagggattttgtaagggctccaaattaatttggattttcttgacctcgtgtgtgtcatacaccactcctgatgagaagcagaatgaggtataacatcagatcataattggctgctgaatcttcaaacaggactctccagggaaacagatgacttgcccttcagcttttgaaaatttctcagcattaaataatccaacaactttgatctttgtcagttgcacttttcatatgttcaaaagaagagggctgtcatttgagaagcaagggaaacagttaattttgaatatgcttttctgcattttgatattttttatggaagtacaacataaagttatttaaatgtcctgtcacacccgctaactcttcagggacagcgtgactaattgggacaatggttaacagccacgat

SEQ ID NO: 50378 - DNA, 1101 bp, Bovine  19866880357522
  misc_feature (1)..(1): n is a, c, g, or t
ncaaccctgtggactgtggcctgccaggcctcctctgtcatggggttctccaggcaaggacacgagtgggttgctgtgccctcctccaggggatcttcccaacccagggatcgaacctgcatctccttcacctcctgcactggcaggtgggttccttatcagcagagccccctgggaagtgcccagatgccccctgcccctccctgtcacaccgcacactcacacactcattactctcacatgctatcacactcaccttgtcacacataccgtaggagcacacagcctcccacacctgtgcttcccccttgacacaccctatgctcagggtcctgccctgccagccgcagggcacacacacacacacacacacacacacacacacacctgcctagctgcacactctccctcagacccacacgctcacgtgccgagggccactcagggtcacacacaccacgctttcctctgcgtgccgcccacccacgcacccacccacaagtccgcagccccgagtccaaatctccacgagtacccttgtgcctgagttcatgcctgcaaacctgtaggtctcccttgacccccccccacccctgccaccaatggctctgagcccatgagagcctccctcggggactctgtggatctgtctctgcagggagcaggcggcctgtgaccccgagcgggggccggcccacagcagcagagacgggtgagcccgccccaagcctgtggcagggaccgtctgggtcgagctggctgtgtgcgagtgggctccccatcacaggaggtttgcaagcagggtggacgccccctcagtggagaaggggaggaagggcctcagcccagagacgcttggaggcagaggggccgggtggcaggctccagggcgatggaggggccggctggggcatgaagggggcaggcaggaccggaggggcacgcaagggtggggccggccggcccagagggtgagggctgtctcgctgtggccgccataactcagctggggtggacagtttcctttctcctgcctgatttactgcctgcttcggaggggcgaggcccattctttaacttcaaagggagcagggagggaag

SEQ ID NO: 50379 - DNA, 1368 bp, Bovine  19866880609810
  misc_feature (1)..(1): n is a, c, g, or t
ntaggtgcccaggagggcctctgccacggggcagcgcagctggcaggactgtgggcccccgtggacagctgcggggcctccctgtcccagggccggcccccacgggcatttgctgaggacctctgaggaccacgggccaacttggcttgactgtgctcccctccccctccagccctgaaactggtaggatttctgcagaggaggggtcaccccggaggctctgtggttgcgagctgagcgtcattgttcttgctgctggaacaggtctggagccgtccgatcccaccctagggccgtccctaagctggcccagccaagccgctgtccacttcctctgaccttgccgatcccccatgtgactctggagtgtgacggctgcatcccgagcagagttctgagacttatttggggagtggggaagcacactgcggggtggggatccctggtctggaagtagtcagaagaccctggagttcaagttcagaccccctcctcccactcgctgtgtgactttgggcagacggctttccctctctgagcctcagtaggccccacctgtaggggtttggacctggtgacgggggtggcatttggggacagctcccttaggcggcaggggtgcagacatgagcctctgcgggtgcgtcgcacccacacacacacactggctgaggaaggccagtcccaggccagagggccccgcgggggacagagggagagcgccagcccttctgagggaattcgtttctcctgatttcacactcagctattggcatgcgagcagttctgggaaagtgtgggagcctttcttctctctcccagggctttctgcgaaggcggcgggtctgagggtctcacagcagcctcagaaaggaggtccctgctgttgggtgggtgccagggagggcggcccgccgtgcgtctgacctgtgcatcctccacatgtgcaggtgggcccacccttcccgcaagccggggagcttgttcttaggggcctggggctcctggaacattccagctgttagtgattaggtgtctgcaaggctgcacttcaagctgtggtcagtcttcctccccactacaacaggggtcctgaagctcccctttgagcagctgagacccgagggcaggcagccaggtaagtgtgaccacagggtttggacccaggcctctctgttccaaggtggactctgtctcaagtgctctgcagctccgacgaggagggtgccaaggtcctgggtcgggagggatgatggatcccggccccaccccaccggggtcaggcatacaccgtgggaggactggatctgggtgtggggctgcatggaggaggtgacggctgagcagacggtgacgtgtctgtgggag

SEQ ID NO: 50380 - DNA, 1627 bp, Bovine  19866880738963
  misc_feature (1)..(1): n is a, c, g, or t
nccaaaaaaaaagaggggtgggggaggtagttaattccataatggaacaatatagagaggaggacttcaggcatagctggatccaggtgcccaaatgtctccaggaacaagtttctccccctcggctttcagctcttctctcctctctccgctttccacccatagcatctctcctggtgaccaaaattcccaaaagttccagcccacaacccttcatgtctagacgaaatgaagcaatactccactggccttaaggttctctcctgatggaggggcttaagtcagatgctcagccctggaccaatcactgcagccagaggaacaggctgtgttgattggcttagccccgatcgtacgctctcccaaaagcctgggtgtgggagtgagcctctcaatggaaactgggggctgttgccagatcctggagaggaatccgtgaatgaccctcacagggtgactgcatttgcgttcttgggtttgaacttgatttcttctgcattcgattcagatgctgtcagataatagcaaacatttctgaagcatgttctctgtaaaatcccccaaaacacacatttctgaagtgtgttctctgtaaaatccccagcagacactttggggacttcatcgagctcatcagtgattggctgtcagccaacgaagccctgagccaccagccaatgagagcccagagattcctgcatctcacatggtcgctgactgcggctggactgggtaccaggaaccccggcagcaccggggaagcaacgtgggcctgataggaatgccgtcgcctgcggctggtgactaataacaaaacaagcaggctacacccattgcaaaaatgtgaagccagcaggagggaatgtgacacgagcccagtggctgattcccactttgtgaaaataccagaagcaggggattgtggacgacggggtctaccagatccagaaagcctctcctaggcccctccccggttgcagcatctccccttaaaagcagtggccagctctgggtacatccgtaaatcgttaagttgtttgggttggttttgaagtggaccttagcagaccccctgtaaacgttcctctttgcatcagtgagcacgcgcacgtcggtctgggtttcctttcagtgctgcgtaatattccaccagggtgagcacagcgggtgaatctgctgtctggatgttccaggctgtggtctggtttccctgttacgcgtgacaccgctctggctgctccagtgacataggttctagtcctccagggccagcgtccggccgggtcacggctgtgcacgttttcaagtccaccggctcaagccaaactactctttccaagtgtttgcacccacacgggctcccgccaactgctgctggcggcgtggggccgcgcctcctcgccaacccttgttaacgttggcctgtgcagtaggtgtgaaatggtgtctcggcgtggttctaatttacatgtccctggtcactaatggggatgaggattctgacatgtttgccaggggtctgcagctgctcttcagtgaagtttccgctcaggcctttcgcgcctgaaaatattggttttcttctcggcaatcactgatttgtaaagcacagtctgcccatgtgact

SEQ ID NO: 50381 - DNA, 1815 bp, Bovine  19866880796298
  misc_feature (1)..(1): n is a, c, g, or t
ngcccggctcgcaggtcagagccttgtagcagtggaaggagcccaccgtgttcacgcagtgctcgcggcggctgcacgtgtgcaggtctgtcacgcactcgttgatgtctgaggggagggccaggccgtcaggggctgcggggtggtcctggggatggcagcagccaaccagtcccgccctcaaggtgctcgcctgccagacagcagcaggctctgtgccaccacccattcaacaaagatttatggagcacgtgcctgagtgccagcagcactgtgcttggccccagggcaccggtgaactagacagacaggagccctgccatggggcacactcagaagaggatgccccgcagacagacctaagagggagggtggtctggagtcttatggaagaaacagtggggtggaggagaccaggagaatggggcacgaagggtcatcagggcagagggcacttgagcaatcatctgaagagacccaggacgagccaaacacacatcccaggcagagggggcaggttcatgggtagggtccagatggtgcggtgtgggaagaggtgatcaggagacgcggggggaggcgggagccatcgagggttccagcagaggaggagagtggactgacttgtttgtaacaggggcccctggtggagagtgaacactccaggaatgaggggttcatagaataggagatgaaggggctgaggctgccatccacggaggtgaggagacgcagtcacgttctgaaaacaatgtgaaagtcaaagcaacagatctatgatgaatgagatgaaggagagaagaaaaaagaagccaaggggtcttgccaaagcttcttggccaagcagctgggcagctgaggatggggccagctgaggggagcaggctcacagaggaaggctgggagccctggaggtgacactgagtttgagggtcaagggccagccggggtcctgccttggagttcacagaacaggtcttagtgaagctgggactggtggatgctaaggtcagctcggggacaggacaggcacagaagaggcctaggacggacgcctggtgggagcaggcagtggggagacgcccgtaaaggagggagaagcagccccggggggggcggccgaggggactcagagcggtgatcaacgcagacgtcccacaggcgggagctaagcacgcgcggaggacagcgcctgccgaccccacccggccgcggagacgcagcagtccttgctgattccttcattccctggacacacctcaaccagcacctattctgtgctgagcccaggtggcctagccgcgttgggggccaccccgagcctggcaggggagaggggacaggcgggtgggagacactggggaggaaggcggcacggtctcagaagcaccacctgctcgggggctggaatgtcagggttgctctgggggacactgagattagagctgatcctacaagcaggacggggacaaggtggagaggaggggtaccgggctgtggggcatgtgtgtgttagtcactcggccgtgtctgactctgcgaccccatggactgtagcccaccaggctcctcggtccatgggattgtccaggccagaatactgcagtgggtagcctttcccgtctccaggggatcttcctgactcagggatcgaacccatgtctcctgcatcgccggtggattctttattttctgagccaccagaaaaaaaatgctcccaaagtcccaggtgagccgactggtgtataagccgagccaagcctggttggtggggatgagggagaagaagaggggattctggacccacagtttcca

SEQ ID NO: 50382 - DNA, 1742 bp, Bovine  19866880855703
  misc_feature (1)..(1): n is a, c, g, or t
nctcccggcaccttccccagaggtgtcctccttccttccctactggggaggtgagtttgctgagacccgcaggcaggccaggcccctccgtctgattgcctggcctggctaaagagccggcctccctgggacaagtccagcccaggggcagcggagcgtcgccaggcttggctccgtcgcacggcactcggatgggctccccagacagaccctgtggctgccgttcagtcactggtgctcccgtcaccattgagcccctccgccgggccaggtgggcacagagctctggggccgggccattctgccttcacccacccctcgtccctacctcgcccacttctcgggctgcacggtagacgcgaggaaggaaccagcgtggcctcggagcctggtagaggagaccaggcacttatgcattcgttagtgccttcagtcattccgtgtgaaagcggtgtgtgcggagaggccgtgagcgtcacgggtcaggcggcggccccaagggcgtgtgcgatgtcagccccaccccaccgcggctcaccctgctcataccccagcaccccatgctcatgcacagggccaccctcagctgctctgtacctcatcagctccagagggtgggggtgtttgtctgtcttgtttggggccgtgtctacaagctgggcacagacccggcgcttgtcagagctcagcaggtctcggctggatgaacgagagacaagtcccttcctgcacagagctcggggtccagccagtgctcccctcactgtcctccactcgctccctccccgtccgccgcagaccggctcttgcttctcccccagccccgtgaagggggttgagggcaggtccctgtcagcgcctcaggtgacattctcagagccacctgcccaagctgccatggacctgcattggaccagcatctagttccccacgggggatctacgcaccactgtggtgcctcctccaggcagcaggccagcattccaccactcccgcctctgcctcgccacatgtccccggctgaccccttgcctttttctggacctcgggttccccatcagccccaggcggaggctggacccgatggtctctcgagagaaggctccacatgagcgagacctcgggtcccggctctggtctgggcgggctcctccgtgaccttcggccggtctgtgcgcagatgtgaacgagtgtgaggcccagcgctgcagccaggagtgcgccaacatctacggctcctaccagtgctactgccggcagggctaccagctggccgaggacgggcacacctgcacaggtaccacctcccctggcccgcccggggcccccgcccggaggcactgccccgtgtgccaggctcgagagcccccgccgcggtgaggggatgctccggacacacagaggcctcggcgtcggagcggcggtcccatccctgacgtgcggcttcctggcacctggacaggggctccccaagtctgacttcaggcgccttccctgcaaagcagagatgatggtcgtgacctcagcggggtgaaggtttaagttacatagttgaccttgaaccctgcagggctcagggcctccccgcccctggagtcacgtgtaactttacagctcgccctctgtatccgtggttccacatgtgttactggcccgagggtggatcccacagtaatttttgaaaaaggtccttatgcatgtggatgcacgcagcccaaacccgtgtcatcaggggtcagctg

SEQ ID NO: 50383 - DNA, 1564 bp, Bovine  19866880913318
  misc_feature (1)..(1): n is a, c, g, or t
ngcatgccttacccgggcgcctccagggggaaggggcggcggcagggcctgggtggggaggggcccgggcggaacggtggccctgtctctgcaggccggtacctgtgctccgtgacgatgctcccgctgacggagcggcagctgaagcacctcagcctgaagcggacggcgctgctggtcacagcgagcctcccaggcagcccctccccggcggagcaggtcggggccgaggtgcccttcagcccggggctttacgctgaccaggccgaaatcctcctgagcaaccactacaccagctccgaggtgaaggtctttggcgccatggaggttctggagcacctggaggtgagccctgagcaggcgggagccaaggcccctgggagggggaggcgggcaggaccagctgcagccgtgaagtcctgggccgcctctcctggaaatgagcacagagctgaatgatcttgaccgttctttttccccagagcagaatccctgtctattgttgttcagttattaagtcgtatccgactcagtgaccctgtggtccgcagcacgccaggcttccctgtccttcactgtctcccagagcttgctcaaagtcatgtccattgagtcagtgatgccatccgaccacctcctcctctgtcgccccctcttctcctgcctctgtctttccgggcctgtctgtcggctcgtatgattgtgtgaggggtgtggctgctcctttcctctgcagcacgtgctagtaagcacgtcacgtgtccacgagtgagttcagggcaggacgcgtggtgaccgagagcagggcgagcagctgagccctcacctatcgcagatcctgcacgcctgccgacagcgggtccccagctctgggcctgggccaccctgtgtgccgaagggtggtgtaggacaggggttctggggcccggcagggtggaggagctcggggcgccgtgtgcagggctcgccggcgtctcctcggccttctctggtctcgctgcggcagccttggctgcagagtgaggcagagatgaattggctgctgacgggggagcacctgccgggccctgggctgggctgctggcatctgacagcccaatgacagagctccggctgccccctcgggaagcgagtttggggatggctcacgtagcgcagcgttatttaaaaggagctgttgattagaattccgtggtactgatttgtccttttaaaaaacacccggcctagacagcgtgctcctctgactctgttggttgcgtgcctgtcggctggatatgcccagctagcagggcaccatgagtgtcaggaagaagtgggggtgcacccctcagccctggggctccccaggtggcgcagtggtaaagaacccacctgccaatgcatgagatgcaagagatgcaggttcgatccctaggtcgggaagatcccctgcaggagggcacagcaacccactccagtattcttgcctggagaatcccatggacagagaagcctggtgggctacagcccccagggtcacggagagtcagacacaactgagccggcgttcacatcctcagct

SEQ ID NO: 50384 - DNA, 2002 bp, Bovine  19866881132148
  misc_feature (1)..(1): n is a, c, g, or t
nagcccacctgactcttacagaaagcggggagcacccacctctgggcccctgactttggcagctgctgccggacaacacgtctccacgcccagctctggtgcccagacacgggctctcgggttccacgggaccagaatcagccaagaaatttcttaaccagctaccacccccagcgctcagcaggaggcagcacaccccggaagctgacctttctggaaagcagccagcggttggggctcaaggccggggcacagggtgaaatggagggaccgccttgggggtgcagcggtgccggcgccggctccccagccacctggtcccaagcacggctcacagcagaccctggtccccacgtggcatctcctctccactagtggacacgccaggggcccgtgcgtccagatgccgccccggagccagggccgcccaagcccaccttgtacacggtctcctggatgcgcgccttgagcttggagctgccggtcttcagcccagacaccaggatggtgtcgccctgcttggccgccttctccatctctgagatgtacgagggggggatgtaggtggactccaggaatgtcaggatgctggaaaaggagcgtgtgctcagctatgacatgtggaaccaggaacctcacacatttcctctaaatgcctcctctaagtgcctcctccacgtgctgccaggcgccacagaaatgacccagtgggtgttgcctagaaaaccgttcccagaatgtcgtgcctcagaacttccagcgtccccggaaacacctgggctctcagtccctggcctggcccttggtctgcacctgggaacctgcattttataaacatccagctgtgattatgatcaaaggcagcactgaaatttgaggactgcccacttagctgagggcttccctggtggctcacacggtaaagaatctgtccgaaatgcaggagacttgggtttgatccctgtgttgggaagatccccttgaggagggcatagcaaccccactcccgtattcttgcctggagaatcccatggacagaggagcctggcaacctacagtccacggagttgcaaagagttagacacgactgagcgactttcactcactcagtcaactttatgaaaagctttggtctcacggacgtgaaaggtgagccccgggaccagaggcccagcctgggctccccactagtccccgtgtcctctccccggccagctcctgcgtctgggaaacagttctctgatgacccctcaagtgtcaggaacaagggatcacgttgcatcctaccctggccctatggttaggctgtgggaagaagggagggagaacttgggatggagtgggacgccagagcgcaggctggtgagcggggccagcctgagtctttcctgacagcctgagatctataaataagccccccatcccgcccgaacgggagcagtcagacacgttcattctccccaaggtctgccgagtgctgcggtgattcatttcctcgtcgtttcacgaggtactacgtgctgaaattctttttctttgcatacagaagagctttggttctttttttatttatcattttttatttttcagagggtaattacttaacaatattgtgatggttttcaccatacatccacatgaatcagccataggtatacattacgccccctccccaccccgcccctctaggctgtcacagagcaccacatctgggttccctgcatctgacgtcatgactgccactggctatctactttacgtatggtaatgtacatgctaagtcacttcagtagtgtcctttttgtgactctgcgactctatggactatagcccaccaggcgcctttgtccatgggattctgcagacaagaatactggaggcggggtgtcctctcctcctccaggggatcttccccacccagggatagaacccacatctctgacatctcctgcactggcaggcgggttctttgcctctagcgccacctgggaagccaaaaatg

SEQ ID NO: 50385 - DNA, 2463 bp, Bovine  19866881189745
  misc_feature (1)..(1): n is a, c, g, or t
ncatacatatactcaaggatccaataatacctctactacttatatactcaacagaaatacatccatgtgtgtaccgaagacttaaataaaaatgttcatagcagcattttttttgttatatccccacacgataacaaaaacgtggaatctagtagcatgtccaccatcagtagaatggctaaatcagttgtgcgtacatgcggtagaatactacactgcagtgaaaatgaaggaactcctactacgagcaacctggatgaagctcataaacactatgttgaaccaaaggatgcagacagaaaagaatgcagactgtatgatttcctttgcacagagttcaaaaactaacctatggtgctagaagtcaagaagccttgtttgggggaggagggtggggatagtaggcaaggaggggcacaagaaggtggagcttctgaagggctaataaggctctgtcccttctctagcctgtcttagtgggaacataggtgtgtttaccttggtaataattgagttgtgcacttaaaattgtgtatttctggtgtatatattgtacttcaataaaacgtttttaaaacaaaaatcagggtttcattatctgtattaatctggtcattgatcatcttcccgtgtctctctctgtctctgtctctgtctgtctgtctcttcagcttttcacagaggtcctccgggatcaaggggaccaatgatcccaccactgctgagtctcccacctcctccccggggcagaggcccaattcggggaggcctaggccccaggtctggcccatatggtcgtggttggtggggggtcaatgccgagcctccttttcctggaccaggccacgggggtccctccaggggaggctttcacaaagaacagagaaatcctcgaaggctcaaaagctggtctcttatcaagaatacctgcccacccaaggatggaccccaggttatggaaggtgaggtccatttttttatgcctgcacacatttaatacccatcactcccagagcgacctcatgcctagaatccccgtggctcttgtgctttgggttgtcctttgtccttttgaagtaggagtagccctgaatgtgttttctcccacaagaaagactgtcattccataatacctggaaatggtagcaagcaggaagtctgaccgccttctctatctctgctttttgttagatatgttcgttcttacattttaaactgcccgattttcgcttgttcacagacaaatctgaccgccccgtctgccgacacttcgccaaaaagggccactgtcgatacgaggacctctgtgccttctaccacccgggcgtcaacgggcctccgctgtgaggccgcctccccacccagactggaaggggtccccggcctggcggccacgttctcccctacggccctgtgctggccaccgtgaggctgttgctcgcgccacccccagtcagtgacgcccaccccctcaccgccccctcccactgggggtccagagttgtgttccatgactggtgtgcggcgtgcactcttctgatccagtctccagagaagtctccaggaccatcattgctccattcaactgcctcctggctcctcttcccccctcgccagctgactgcggaacaggaaacctctttggtgctgtttcttgtgcatctgtccacccagccctgggtatcgccctggattcctgagagccctggagcagtttcctaccattccctcctcgctgcttgttttttaagtccttttcgtgtgacacccctgccccagcgtggtcagcggccctgtgacgctcacccggttggctgacctggggtcaagtgcggatgactggtgcagagtcactccctgagaggccacgctcccccgctcttggatctggtagttcctgcgtcagtagcatgatccccaccgctgtggtctgtggtcactgtgctttgtgaaactctgcattcccctgcccccaacccccggagcctttctcagtgtccttggcattttcgtgacttcccaacactagcgtaggtttttccgccaaaatgcgtggggccgttggtgccccctagactttcccccacctcccaacgaggtagaactgtgaaacttcacaataccgcctccctggtcgtctcaccctccccgtgttggtttctcgggattgacacaggcccgagcgatgtcgtccaaaggctcagatgggcctctcctctctccagcccattttagttagactgcatcattgtgaggccaccagccatttcatttgaattctgtgaatctccacctggccagcgggtggaactcggacagtactgtcgccctcttccagccttcttcccctgcatccctggcactggttgttttctgtgaaaacggcagtgaacaggttcagttttgaactggccctgaggaaatgggtcaggagttgtgtgggcaagagggagggatgagagc

SEQ ID NO: 50386 - DNA, 1553 bp, Bovine  19866881194280
  misc_feature (1)..(1): n is a, c, g, or t
ncgctcccggccgtctgtgcctgacggatcgccctcctgatatctttattatcgctttgaaaagacgccgtgggggctcctgagccgccctcctttcctggagaaatgttccctccagggcgttccgatgtcagcgggttaagggtgtgacaccacgggcagtccctggccagaagctccccctgtcactcagatggctccataaataacgcccagcccctgggagcacctcccacccctcccagggagctgcagaggctccgggaggcgctgccgtttccacctttcctgccagaggtcggccggccgctgcttagacaagtttcaggaaacaaggatttccggagaaaacaatcaataagtaaattcaaggcccacgggggtgtagacagcctccaaagactcagtttgaattcagttctttcccactggttttgcaaaagcgccttggaggatgtgagcgatcgttcactaactcactcatttgttcattccaaaacagtactggtctgccgggcagacgacctggtttgtttcagaaacaaaaggcacagaaataaaaaggggggatacgttacaaattcaaagacccgacttataagtcagatggaatatgcgagtctggcacagatcctggtttgattaaatgaggtgtggggagaggaaggcacctatcctgagcaggaataagtgaatgcactctgagttggaaaatattaaggaattactgtcattcttcagacacaataatggttttgtggttactttttaaaattcgtatctgtaaagtctgggattttctttcctggaaattattccaggtaaccccccgactcctaaccccccacaacacacacacacagattcgacttgaggacgaaataagatcagcaagtttgatgatgtttgactccggtgaggtgtgagaggggacatgagtgcgtcacgattatgccatctctccaattctgaccactctttaaacacaatgcccgatactgttacatgaggaagtcacatatgtgccatcaccatataacttgccatatgatacaattttacattatgactacacatacggtatcctatgctagaggcaacgctgtaccatgtagaaacatgacataacgcatgttacaacattagacagaacagacacggaacacagtgcgctgtatatttattacggtattggaacgaaataacctcagggaggtgttaactgatgcctttctttcttttttttgcctcaccctgtagcttgtgggatcttagttccccaaccaggtactgaacccgggcccttggcagtgagagcagagtatcaaccactggagcgccagggagttcctgacttagggcttttggttgggatccagcgggcataaaccctgtgtaagtctgagatgtaccagtgttgatccgggtgcatccccattctgcagcaggagtggtctttgccaacacctctatcacaactcactggaggagggcatggccatcccccacagtgctcctgcctggagaatcccatggacagaggagcctggcgg

SEQ ID NO: 50387 - DNA, 922 bp, Bovine  19866881284095
  misc_feature (1)..(1): n is a, c, g, or t
nacgtctgatgatatgaaatgctccctggttactctgagcctgcaactggccctccgttgataaaagagggaacccgaacgccgggcgctgggacccacttacactggttttcgaagagcagaacctgcatgccgtacagggagaaggactgccggaagctgtacgtcactgagttcttcttcttctggaagatcttggtgacctgggggcaggcagacacagaggctgagccccaggcccgcactgcaggggcaccccggggaatcggttctcgcagcccccggggctgtgttctcctgtgtgaggacctctacccctaccccgccgccccgcagctctgaggccagcaggctcctagggcagcgaagggccggtaggagggacactcatgcctgcaggccccacgcaagcccagcaaaacccgctgacggatgagtcgaacagcggaggacaccaggcccagaggtctgcagcgacttgctcaaggtcaggggctcttaaacgactggaagctgcgtgtctggactccaggctcgggggcctgagcacagcggctgctccttcatcgggcggggacaggggctgggggtcccggggaagaaggcggctgcaggaccacgttcacccccaggctgcctgttttgggggcaagagctcagcgtcctcttggggagcccctctctgccgcgtccagccctccagtcctggggctgagactcaggccaacagggtggcaccacacccgccagctccagctcagggagctgcgaggcctctgctagcagtgtcaggaagaggctccccagaggccgaggggccgggacaggagctgcagaggccgaacgctccatcctggaggaaggcggcccaaggcgcccggggggtctgcgcacccagccccgcacccatgggccccacgta

SEQ ID NO: 50388 - DNA, 1934 bp, Bovine  19866881426392
  misc_feature (1)..(1): n is a, c, g, or t
natgaaacacaatatatcgttggggacgggtacgcagttgagtccaaagctccgactggtcgctctttccggtcttggttgccatgtccagcctccgatcctccgaccccttccacggggcaccagcgatggcctggaactgccctcacagctccgtcccgggcccaggagaggccagaacgcgaggaaggaagtcagcaaaattaatttacagggtcggaggaaaccggccacagcgccagtcccccacgcggccggcgggagcgtggaggcgggtgcgcggccagggcgccggaccagcgggggaacccgggctccacgcgctgtccacggtgggcgccgcctcacagggcaaaggcggtgaagaaaatgtgcatcttggccaggaaggtggtgacggagccctgccgccagagcttcatctccacgtccagcgcgaagtcgcgcggctcgcgcacggtgcgctgcaggaagaccacgcccgtgtaggcgttcaggcggcgcgtgccgaagtagccctcctcgttgcccttggtgatggtcagcgcgatggtgtcgccggcgaaggcgggcaccgggctgatgcggaagatgtgcgcgggcaccagcagcccggtctggaagttgagccggtagtgcgtgatgcgcgcgggcgcgttctggcactccaggaagtcgtggcacagggcgcgctcgcatttcctgcggggcgcacgcgggggcgtcaaccgagggaggctcctgctcgcagctcccacccggcctccacccgcagctccgccctcggcagcccccagcagccggagctgggtcacctgacccccgtcggacctcagctttcccgtctgcaggatgggttaacagccacgcggtgtcattggtgaagttataacccaggcagcgcgcggcacagtgcccacagcgtctggtccccgcgctccttcctgtctgccttcattcttacctccctacccctagtttttttccttcccacactatttgcatggattccctggccatggtgtttctattactctaatcgtttctcagattcccttttctcccgtaattgactctccttctgagccgtttcccccactgatggcctgcccttgtccctctccgagtatcagagagctctgagtcacgcctgccccagaggaggctggggagcccagccacactacagggtgaccaccaaaccccatgggacccctgactcgatttccaagctcagcaataatctggtctcttcctggcgcaatgagactctgtctcctccatcactaaacccccgtcttgaagctcagtgcttccaccaggggcaccagggctccgcagttctagaggatgctctgagcagagttcccgaacgggggcaccacagcaggcaggaccaggccacgtcacgccctgtgtaaactcatgacctgttctcgctcatcacgtgttctcaccctccctggggttggcgctaccatcacccgtgtggcaggcagagcagctgagacccagggaagggaggccactggccactcgacacactcatgtaaacaccccaccacatctgcacactgagccgcccagcactgtgtattagagagcacggcacagggtcagtagggcagccaggagtaaaccgcgcaccacgggcgcgtacgtgccaggaagggccgcctgaggcgggccatgcgcgcagaggcaaaagaggctgcaaagcagagaaagcaagctcggaacacccgagcacgtccgcgtggcagcaccgtgcagaggacggatgccggacactctggcaagcacttatggaaacgtgtgtttagtaagaaaagtgaaagtgaagtcgcttagtcatgtccaactctttgtgaccccatggattgtaacctatcaggctcctctgaccatgggattcttcaggcaagaatgctgga

SEQ ID NO: 50389 - DNA, 1537 bp, Bovine  19866880431133
  misc_feature (1)..(1): n is a, c, g, or t
ntaaggttaaaacatttttctcctccagaagaaaagtgaaagtgaaagtcgcttagtcgtgtccgaatctttgtgaccccatggactctacagtccatggaattctccaggccaggatgctggaatgggtagcctttcccttctccaggggatcttcctaactcaggaattgaactcaggtctcctgcattgcaggcggattctttatcagctgagccacaagagaagcccaagaagaaaacaggatgtcaactaaatacatttggatttatcctttattgcagtgtttgctatccttggaaagagggataaaaatgcacagcaactgactacagtttgtcatacacacaaacaatcatggcttttatccaatgagaaagaaaattaaataatgcatactgcatctacctgaccacaatagttatactgaccttgacggagttatctccatgtgctagttctgttgctgtgccattgagccaaacagtgtctctgcaggtcttttcagaattcttggaccaaaagtgtagcagacacaggcaggggttagggaagagatgctatttattctgcctgtgtagtttggatggaaaaatactttttaggtgatctgtttctaagaagtgcaattttcaggaaaccagacactgtattctcaaaattattttccattctctccctcaaaacttactctaatcatctcaaagtaaaggattattctcaatagcaacaacaaaaaatgctgctgctcacattaaatttgcttttactccaagagaaaactacttcaaatttcacaaaggtagtcttttctccattatacctggattatgtacccaatttatagatggaataaaccctagaatacactcttctggagtattttggggtggcattctcctgcaataggattgagcctagcatatctagggtttgggctagttggagatataattggagtttgtgtctgtaaaccccacaggctcccatcctaagagataggaattaacagatacaggtttgatcatccagcaaacatatatctaccattggtgttatgagaggtgtgaaaacagatcaatcagacacagtggagagtatctgcaatctgcctgaaattatatcttgaatgaggacaggctgtaagcatatgtgtgaatgtatgcactcttttaaatccagaaaaaatattttccacatgaccaatggtggcactgaaaactaaataattattgtagtatagtggcatttacagatatcagaaaacttaaatcaaaaggggagcattgctctgccctgaatataggatgttcatactttgtaaattgctgtgtcacctccagggtaacctgccaagtgcattttcatattatgcttcaaataacactcaccaataagtggaacttagaaaaatgtataaacatgcacattcttttgttctaaacaataagaaatacagaatgtcaagtgaagacctaacaacaaacacagaattccaatcttttcaggttagcttgtgacatcgagtcagaaaacg

SEQ ID NO: 50390 - DNA, 1558 bp, Bovine  19866880659918
  misc_feature (1)..(1): n is a, c, g, or t
ncaatgagatgctgcgtctgataagatcatcacgtttatctattgaagacctctggtttcttcagctgtatttcataaacagctgtagaactggaaagggagagggtaagcagtagacaagaagcctcttccaacatcagaagcctgtagctttaccctttgagtgagaccctgctcttaaggaagaagacttcatcaaaccatcactgtatctagcagataatcttgcttctccttgcacaagtaccaactatcatctattgctagtgccctggcatttttccttctctgtggcaaacatctccaggcaccagactcaactcttgtcctccacccacttccctctatcctctttctgggtttgaaaatctgagcaaaaaaagcctccagaaacatccctattaaagttacgtttatgcacttcctcctgcaagggagaaccaaaagagaaccaaggggtatctcagatgacgtggaggaggaagggagtgaggacagaggtttgggggcctgagtaagtcctaggagggtcctggcagatatcggccataatttttaaactacaagagttgctgcaccataagatggaatttgtgaatccctgtaagagcttgtatttggtttgtttatctaggattctaattcaggacacatggtgtgaagaagctggagtgaaaatagtttgagctgaagtaggtggtattcatgactggttaggcaaaatttttgttttgtgagtcgcagaaaagactgttttgctagctgcaacttctgtatcaaacctaagatcaccctcataggttagctgccagagagagagattttcctggtcatccacagcagtgatgtgtcatggtcctagctaatgacaggtaagcagaagtcagataaagtgttctgagaaagtgtttgtttttctaatacagaggttccaccctccccctccattatccttgttcaaatatagataccatttcttgatcatacggctccaagctccagtgaaccagagtcagtaaccactttccctcctttttgtgggaaggaaagcaaccgttgtttatttaaatcactgtgagtcaaatattacttttatcgaagctgaaagcatctgtgctttctttatcctccatgtctaaaatcaaccaataccatcattttaccagaacatagagggacaaattcctaattatgaaaatgactttgaaagagaagatgatacatttattttcagatgtattaagctgcatgccaatgatgtcctttagagattggaacttggggactaaatggctgtttagaggacaaagcaaattcatattgttaatcagcatctggtagaaaaagcagttaactagagtcttctttaccttttctgtaacctcccatgtaaatatattaagaaacaaaaccaggaaatgtctggatagcacagagagcggaaaaggaagagtaaacatcgcgggttaagtgcagcccacaaaattaccccttgagaaactgaatagactggatcctatttctgagttagtaattaagtcttcattttatttttgga

SEQ ID NO: 50391 - DNA, 1510 bp, Bovine  19866880718602
  misc_feature (1)..(1): n is a, c, g, or t
ntgtccgtaaagtgacagagtcacatgaaccctagtctcagtgatgttctccatctttccttcctaattattgcccataatccacctcgcgtggtactgaagaaggttcagtaccataagcccccatcggcatccttctaattctctccagtcattgctgataccagcaccgctcactccctgaaacattttcttagttccactgaatggaaattcaagattcaaacaagagaggcatgaaggactgagagtaggcagtcagtggctttatgaaagaaggtttctctagctcatctcagtggaatacaggaaggaataatagtgtttggggtccttaggggagggaaagaaagatatgaaccaattatcagcattagagaagaccatagtccaccaggatactctgtccatgggatttcccaggcaacaatattggagtgggtactcccttctcgagccccaaccaagggctcaaacccagatctcctatgttgcagacagattctttaccgtctgagccaccagggaaactctagaaaagagctagtgaccagtaactcttcaaatcagcttatgggcttaaaagcccacatttcctgtgtttaaaccctcaggatcatggagaaacagctattgtagactcagagtgccaagcaaatcattgagcataagataggcttacatcaaattgatcactgactctgaaaaaaattgaggtttgcttattacaaagaagtaaagtagcaaatgaaagaaggaaggtgggagaagggcaggaagggaagaggaagatggatacctaggaaggaacattagtgcccaacagtctgtactacagagctatcataatattaatttctgagtccacagggaagcagccccaccataaccagtaggaaaagttggccagagcaagtcgggtcactcttattggaaaaagaaggtgagcaatggatagagagtctgcaccatagaagaagctttgtgttaatttgaacttttgtatcagtcccctattattaacccagactaacatggctactatacttgagaatgagaataagaagcagaaatgaaatttaaaaagaaatgtagctggccagaatatttaaagctgtacgttttcatattttcaggttctggtaagtcaggaattaaggcccttttggacacaagataggtcagtctcatttagcagcatgccgttgtgaattagacaacttctcgtcactcttccttgctccaggagtgttacaaatgcctgtcaaaggctttatggtaatacactaataatgtatcccacagtagctgttacaatagggtaagtctttgtgactgccagggtgggtaaagatctcagtaatatacttgcaatacatgtgaggcacataatcacaaatgtgcgtagcctcaggatttgttctgttttcagcttaatctgcctgtagatcaaatatgcacagaacgaactgaggaaccacggtcctggaggaagatccacattagcgtc

SEQ ID NO: 50392 - DNA, 2591 bp, Bovine  19866880799459
  misc_feature (1)..(1): n is a, c, g, or t
ntacaatctcattctgggagaacttaatttcttcacccgaagtatagacaggggttacctttgttcacgttgccaactcaatacattgaaaagaataacctgcacaattatcactcttggctttgtttgtagggtgctaaatgattcacttaacagattcttttcaacaaattagcagaattgacttttctgaacaaatatgcttgttatattggtgtcgtgatacatcgccattgggtttttagttagaacctgagagaaatagccagttacagctcctgatttacagaaaatccatactgcagtgtccatctttaattctctttttttcctaacaaaaagtgatccattacttgtgcgctgtggtgattgtttctagagcctggttatattcccctgtacatatgaaaattttatttgctttctgaattaaataatttaacaattcaaatgaatgatcacaactttaatttctgaacacattttcctcaactaaaaggatgcgtatgtaaaatgtaggacatgcggaagatacagaaatcctctgactttaacaaaaacattattcagagcaaggttttttgtttttgttttttttttccccctccccaaagcactcaggtatgatggatgcagatttgtactaattttatggatatttttcatcactgagataaaaagtcatacattttttttagccaattctataaaaccagagattctgggaaactaaaaatagagagcctactttgactataccctttgaataaatgtcaaaaaacaaaacttaatagctattaggtttcttaaggaataaaacagtgctattcaggtctattttattcaacatatctttggaaaatatcctgtgaaattatctagaggaaagatcgttaacatgacagaaagaaaataaaaagtaagtgtaattaaatctctaatggaaattagacattaaaagaataaaccaaatattatttgaaactatgcattaattttcctatttaacttttagtgtgatatgaggaaacaatttacttcttgaattgtataaatatgatataaataaaaatctaagacacttgaagacctaatcaagagattaaactaatggagcaatcatatgctgttcataatgtggtttaaggactgatttaggttcggtgatattttgctactttaataagccaacgtaaaatataaaaatctgactttgcattccagtcatcgtatttacagagttttcatattagtattctgctgtcatctcgttctactctgcaatgaactgtttatgtatgtttcacgtaaacacctaggtaggcatcataacattttcatgtacagcttaggatcctatcttcaattttatattcatcaagaatctcccagcaatgtaaataaatttaagttttctagatttaaaaactgatgatgtcaaataagcatatgcattgagctccctgaaacgtatacatgtaatacatacacaaggaacgagagatttaagaactttaaatcatatagcaatctataagcttgacattttttgcctttcaaatgtttgttttgaaataaaatgatgtagtggttgcaaaaatagtatagagagttcatatgcactccttcctctgcctctttcaatggttgtgaaagtgaatgtgttaggtgctcagccgtgtctgactctttgagaccccgtggactgcagtcctgcctactccaatggtaacaccttacttaatcatagtgcaataatcaaaggcaaaaagttagcatcagcacactattattaactaaaccacaaactttattctgatttaactaattttaatatccactcttttctgtgaggtagcacatacatggtttatcacttgcgtagattcaattttatattcatcaagaatctcccagcaatgtaaataaacttaagttttctagatttaaaaactgatgatgtcaaataagcatatgcattgagctccctgaggaattgtgatgtagaataattccatctcacaaaaggaattcgtcctttcattttaaacttaacagcacaaatagtagaatgtgcttagaaaagccagttttgcttttatttctgaattcagtcctcaccgtaatgtaccctgttcctttatttcttgccacttatgggcaacttggtggctgtcactggaatagttaacggacactaagtgtaaatactaaggatataaagaaaacaattgagactgtttctaaagatagcatttaaattctaagtgagaaaatgttcccaactgagattaaattgggatcaatatagagattaggggaaataaagagaggagttcaagagtaacttgtctctagttcagccccattgactgctcatgcaaatgagaaagtcgagcatgaagaaaatacttatgggagtgatcagcttttctacagtattactgtgaaacctaaagagttttggaaccaggaggactccatcacatctcttgcggtgatgaagggattcaaaaggcagctggaagcacacacaacttcgagggagcacagaagtctccaagtcatggcaagtgagcagcagtcaagtg

SEQ ID NO: 50393 - DNA, 1700 bp, Bovine  19866880859771
  misc_feature (1)..(1): n is a, c, g, or t
nttaaaaaaaaaagatggcaaaaaatgtagatttttttcatatctttaaaaggaaggtacttagatcctagaatataaaattcagtgtatctgaataatcagatttctttgtaccaaatagaggaagcatgagggggagaaggaagcttcaattaacagttttcttttccttttgtacattcatgtcactgtttctgaaagcattaatgtattaagatatatgcacatttcatgggaatgtaaatgagagtttgagttgaataacaaaataatctgttgttccattgctcagtcttgtctgactctttgcaaccccatagactgcagcacgccaggcttccctgtccttcaccatctcccagagcttgctcaaactcatctccattgagtcagtgatgccatctaaccatcttatcctctgtcgtccccttctcctcctgccctcaatctttcccagcatcagggtcttttgtaatgagttggctcttcccattaggtggccaaagtattggaacttcagcatcagtccttctaatgaatattcagggtgatttcatttaggatggattggttggatctccttgcagtccaagggactctcaagaatcttctccatcactacagttcaaaagcatccattcttcggtactcagctttctttatggtctatctctcatatccatacgactaccgcaaaaaccatagctttgactaactagttaataggtatgggggttaagactcaagaatatttgccccatcctagtttaataaacagcaactaacattcccagtgagactagatttatatattaataaataattgaccaaggccatccaaaagaaaacagaggcatctcctccctagctgatacactgtcagttgtgggggaggaggaagcagctctttgctttcttcagaaagtccagtggtccactcccaagcccaccacacagggatgtatccatttcatagccagcccatcacaccaggctgtcagtttgtcaaattcatgatgcaaggtgcttgcatgaatccctcagtctgatagccagctgctgaactctgttagctacagcagaaaggacatgccaggacatgtcctttcaaggacacatgaatctgtgtcacatgactgcacatgggaattgcacacagctcaagctcgggtttgaaatgtgtatacctctcacttggtcagctgtcttacctgggtgcttgttttattctacattttcctcaaagcatgcccttctgtcttccagggaaatttgagtttctcgtgtgtggagccttacacagtacctgtctttttcaacgctaccagttatctggaggtgcccggacggcttcaccaggacctgttttcggttagcttccagttcaggacttggaaccccaatggtctcctgcttttcagtcattttgcagataacttgggcaacgtggaaattgacctcactgagagcaaagtcggtgttcacatcaacgtcacgcagaccaagatgaaccagatagacatctcgtcaggtcagtgaatctattcgacgttcgtgcctgaaactgctgttgtgatttcctcagctagggttatgtttttactttgttgttggcacactctcgtgattatgtttggattcagactgtgagatctttccttggcttccctgagtgcagacgaatgagggaaacttagaaa

SEQ ID NO: 50394 - DNA, 859 bp, Bovine  19866880945665
  misc_feature (1)..(1): n is a, c, g, or t
ntttcaccaggttgcaggacatggtcaagaagcaagccgctgacacaccattataaagcaatcatcctccaattaaaaaaaaaaattaaaaaaggaaaaaaccagaaaacaaaatcaaagaaatcacacacaaaaagaagcaagccactgcagagcatactgtcaaggggacttcagaaggaaagacagtccctcagaatcctcacaccccagccatgaggatggtgaatgggtaaaaaacagaagagcttaagttttgaagctttcattccaaaatctttgttgttaatactgaaggtgtttgagataactacatgtggtgtcaggaataaaactctcccctcaaaataaaattacaaactgataccgagaaggaagaaataaaaatctccaaaagttttatttaacagtaagtgacgtccatacatttggaattattattaattcacaattctcaagcatgcattttacacattctaatacgtgatatatgctattgttgcagacattgttttattacagcacttaatttctgacacgttcagatttcacattcagtagcatactcacaactttaaaaaaaaaatgacaacagaggaagcattattttccattgttctgaatccagaccaaatagacagtgaactgctctgacggttcatacagacaactccaggcctttttagttttccagccctctggctatcttttttatgtcagtgacaaaaggcagtacattttagtacatcatgaatatgaaacctggcgcttctttgaaccataccttgcaccttctccttttgttctgatcttcatacactatttaaagagtgatgcaagtaccaagaattcatagcat

SEQ ID NO: 50395 - DNA, 1931 bp, Bovine  19866880945810
  misc_feature (1)..(1): n is a, c, g, or t
nttcattatctgtgataggacagcatttttgccataaactatttacttcttaattgccccgctgatgccttggggtttttaatcagagaacacattttaaatgaaatcagtttataagccattaagcaattattatcaattttagctcttaattcagccaggagtacacatttctgagagctttcatagaataacttttgtatttcttgtgtacttgggttaattatcccttaggttttaagcctgacttttttattgttacagcgttgctacacattgctgtctcagtttctgtggcacagcaaagcgaatcagccgtacatatacgtggaaagctactcagtgctctgtgctgacctaaatgggaaggagatccacaaaagaggagatatatatgcccgagttttaggacgatttaaatactactcccaatgtctagttactttttcagtgtaaaatcttaaactgagtctaacaaaatctggctttagaaggtaatgagattgaatggaactctgttgggtgttatcagcaatatttaatgtgattgcagtgcctcattccctgttcttgcaaggaaactggctagaaatgaagacccacacagctttcttctctccaaaagcttattaacacccacaggccaggcaggacgatgccgctgccccttcatgttcctggagtgccgtgcactctctctctgatgtatccacgttttaaagtataagcctcaaaacactgtcttcttccattttattccctccactcatttttatttttttcccatcaaaggcgtttgccctcctctttctgtctcctaacccagtctgcttcctctgccgttaacattaacctgcacgcagaatagttctctgtcttctttcacagtcatccccttttcgtagccttctcacaggctgtctttgttataaacctttataatcactcagcaactcctgcttcatgcgctcagctatttcagttcctcacaatcagtgtaaatctttgaattcaattctgttcccacagcttcaattgaaaatctaggagccaactcagtgatcaaacgcagcctgaaaggagagctcgtctctgtaactgattacccacccgcccaagactcccattcagactcacactcctgttccacggatgacttctacctgccaaggctcctttgagatctcttcattgtgtgtcagtcacagtgataggttaatactataagagtcctcaagtgcttttcgaactttaaatcaagaaagggagaggggagctacaggaggtctggtgaagcccacgccttcagacaggagccaggaagggaagggagggcaccatgtgaaaccaagacagagtggtcttggatctggaacaggcagcccagccacctctgagcctccaaaagggtaccccgaatgcaaatgccccaccttcaaacgtttttacacacctgattttaaacacactgcgtttctggtgctttgaaagcactgtctcggttgtgcaatttcaaaacctgctcaaaaacggagaatggtttcacactgtctatgatgatggactgctgtttggcttcctctgtcatttggggtctgaaactctagtctagtctacagatatcagcttgtacatctggcaggtggggggggggaaaaaagcctttgtgaaatccagttaaattagctcaaagtgcaagaataacctcacacttactcactaggaattcctcccttctgactaaacttaaagccactatgcctgagctcctatctttccaatccctaggttttccagtttgctgagtcacctttcattccttctcagtaaatcaatttccattttgaaagattcctggcaattttagcaagagaatctcatgtagcaactggtctgtctttttatctttcctcttagtctaattgatgcaa

SEQ ID NO: 50396 - DNA, 726 bp, Bovine  19866880981196
  misc_feature (1)..(1): n is a, c, g, or t
nttcaaaagcatcaattcttcaatgcccagctttctttatagtccaactcacatctatatatgactactggaaaaaccacaactttgactatacggacctttgttggcaaagtaatgtctctgctttttttttttttagatatttgaaatacaactttattctgattctaaacgaaaaggaatggaaatgacagtaacaaacaagatcccacctctcaatattgttgtgtgactacagcagtcttatatttgaaactcaaggaggaaacagttgtgttccaaaccacctaaatatgcaggtccaaaaaatgaaagtttttttttttttttaaactgccacattcactccaaagcccatccatctccttcagcatccaaagattaagcacatgttctgcttagctatataataaagtggcaaacacgccacaccgctgacatcacaggacagttgcctataaaactagacttctgatgctgggccccagcttcactttctcacaggtcaccatcttcatccgggagagcagttgtctgagtagcctctaaatcgtgctcatactgtgctgccagggctgggtccatgaccacctctggcggggcaagagcagacacagcaacaaactccaagttagggtctccggtcagttttctagcaagccagaggaagggcttttcaaagctgaagttacttttgccagaaatgtcatagttctgaagattctt

SEQ ID NO: 50397 - DNA, 1416 bp, Bovine  19866881041779
  misc_feature (1)..(1): n is a, c, g, or t
nagtgcaaactggcgggttactggcaaatcttaatttcatttttggttcagctaatttatttctaagaatttatcacacatatactagcacactttttcaaagtcatatttaaaatgtctgttgaagccttatttatatcagccaaaaatgggggcaaaagatactcattgattaggaagccactaataaatgaaggtaatacataatgaaaccactgaaagctgttaaaagaacaaggcagatctatgtgcactgatcagatgcaatctctaagatatattgccagcaagagaaagcaagatgtacagaccagtgtttataatacacctccatttgttttaaataacgattgctgtggtgttcgagtgaatagtgaagtgaatatgatgatacatgaaggtaggaaatcatccatttgcagcaagtcagacagagaaagacaaatactgtgtgacttaatgtagatgtggaatctaaaaacactgaacttgggacttcgctgtcagtccagtggtaaaatctttgccttccaatgcagggaatgtgggttcaatccatggtcagggatctaagaccccacatgcctcatggccaaaaagtcaaagcaaaaaatgaagcaatattataataaacttaataaagacttaaaaacaacaacaacatgaactcatagaaacagcaggttggtggttgccaggggcagctgtcgggggttatagttaacaggtgaatgtagtcaaagggtgcacatttccggttatgagatgactatgttctggggtctaagttacaatattgttactatagttaacaatactatactatatacaggaaagaggctaaatgggtagatcttaaaagttttctccacaccaaaaaactgtaactatatgaggtgatgtgttaatttaccacactgtagtaattatttcacacaatcagttcagttgctcagttgtgtccgactttttgtgaccccatggactgcagcacaccaggcctccctatccttcactatctcccagagtttgcacaaagtcatgtcttttgagtcagtgataccatccaaacatctcaatatctgttgttctcttttcctcctgccttcaatctttcccagcatcaggatcttttccaatgagttggctctttgcatcatgtgaccaaaatattggagcgtcagcttcagcatcagtccttccaatgaatatttatggttgatttcctttaggactgactggtttgatctgctttcaaccccagagactctcaagagtcttctcaagcaccacaatttgaaaacatcaattcttcggagctcagttttctttatggtccaattctcacatccatacatgactactggaaaaactgtagctttctaacacatatatacaaaatccataaaaatgcta

SEQ ID NO: 50398 - DNA, 1044 bp, Bovine  19866881132194
  misc_feature (1)..(1): n is a, c, g, or t
ngctgtttgcattaaagcactgtgggcaagggacctgtagttcctgcctggattgtagccaaaatacaacctgcagacatcaagcaagatctgttaagaagtaaagaacaccaaggtgatagagatttaaaaaaatctgtgctttcaacagcatcagaattccctgtctaatcagtaacagcttatcaagcatgagatgggagaaaaacaatcatcaggactccagatggaaatgtttaatgcatatgctgtttacaggatgaatataaattgcaaacatggtggtttggggttaatctgctgaataaaaaatattggatttattctactttaattaatgagtaactgaatatttgacagggcaatacacttaaccctttcatataaagtcaactgccaatgatttcacagatcatgttggcaatggcaaagttattctccggaccaatgtcattctctcagagtatgttttgcagcagaggtgaaatcttagctggattgcaatttattaactgcactgatgatacagtaagtcttgattgacctaactatgcagagtaccctggagaagaatacaagttttgtttaaaatgttcagcataccttgaataaaggaagaaagataaaccagatgtcatgatgaggggaataagggacttattattccctgtcagagggtaacaagaaagctgaggatgttagaggataataatggggagtaaataaaatgatacatttctgtttgtccctgtttctctgttggttgctgtcgttgttcagtcgctcagtcgtgtccgactcttggcaatcccatggcctgcagtgcagcaggcttccctgtccttcaccatttcccggagcttgttcaaactcacacccattgatctggcgatgctatccaactatcctgtcctctgtcatccccttctcctcctgccttcagtccttcccagcatcagggtcttttccaatgaggcagctctttacatcaagtggccaaagtattgggagtttcagcttcagcatcagtcctttcaatgaata

SEQ ID NO: 50399 - DNA, 989 bp, Bovine  19866881145934
  misc_feature (1)..(1): n is a, c, g, or t
nacttgcaagctattttgccttaggctagactctaactttctgcagactgtggtttcccatccacaaaatgtgaggatcaaagaggattcccacagcccctcaactctctgcaggcaccccattctccttcttgttctctccttctagaatgtacagagtgagttatttatatatcctttccccctccttttcccatctttctcattgagaacatttcctctgatacatgtatctttcagtcttccaggtaagagtcctgctttttttccttatcatttgaatttagtcctttaaaaaccataatgagcttatgccaggaaagggacaatattcagcccaagtattatatcataatcatttttctgtcttctgagatcaattcagttaacatttttcatatctccttcacaaagcactttatgtaagtataatgttacagtgaatttaatctgactaacagtgacatagtttaatgcttcataaattctctggtttgccagctaactgaatgctgcaaactaactgacaaagtgatgggtacaccattacttgcagtgatttatgcaaatcgactataattatttcttcttctttaggaattgtcatgactagagtgcatatcaatacctccagccttcaggccaacactaccacaatactaatgtcacaatcagtgttcactgctatggaaattacatgcagatgatttgtgataatgacctaaagaaccattgatagaaatttcttacttggacaatctcttagccagaatttgtaacacactctattcgcagagaaacttcatttcccggcatggctttagcaacagaacaatatagaaaaccacatgacattcctagtttcttttctgagcatatcaaaaatatgtgctcagaacatcaaaatatcaaaacatcaaaacttgttttcatattcgattttgccatatcagcttctcaagaactaattccagacgcttaaataataa

SEQ ID NO: 50400 - DNA, 1833 bp, Bovine  19866881171197
  misc_feature (1)..(1): n is a, c, g, or t
nctcttttattttgtaagaaggctggattctctaagaaccgtcctggcatttccccctagagttttcactcacagtaaatccaccttacgacctaacttcttacatgcagatcttcattgctacaggttttccacctccccacactgcttccgttcagctctgctgctaggtctccaaagtgtccattccagtcccaattcccatcaccctcctcagtcagagatatcacttctacaaagtgtactttcaaatgcttgtcgttgagtttcagacccggcatttgctgttggtgcttttctctcctcctaaaattttaggtgtttagctggcgtgtccacttttccctctgaaatttattcctaccgccctacctctttgttcttattaccaccacttagccagggtcatcctctgtgactccagagacttttgctatgctgtgttctgcttccacatctgtcatccttacctcacttgggccatttttatgctcagtgacctatgctaatatggcaaagagaaccataatattttacatccctagaaaaatgcacgcaccaccaacccccacccttttcaatgtcatgatcaacaccacttcaaatagccctttggagttttactctctaaagacgatgaggtccatctttctcgctcatgctaagaatcaggagatcacattttctccctgtgggtcacacagtcttgctccccaacaaagacaggtcctataactatggtgtgttaaggaaataagacatgatgcttgcttagccactaactcatgagcatctcccttctcccttactccaaagtggtatatgtaaataacaaatttatttacataaataaataattagaatttctaatttctaaaactaagcatgggtcttattttttaaaaccccatttcacccatccttttccctgctaaaatatggacagagatttgtacccatcgtttttatgcaagtaggtaaaagtgattttattataataggtatcatcatgttaattattctctatttttgacagcatgaaaactttatttaaataattataaaattctagaacaagtcgaaataataaacatgtttaattttcatttaaaaaaatatttagtactcaaagcctaaaacatagtattcaacactgtaagcaaatataagtgctaaaaatgacaatgaaaaaggtgaagtccagactgctgctctaaacatttactctgcctaaataaataatcgcataaacaaatagaattcccttcccttggcagaagatcactgtctgtgcaaactttctctttgttgcagactttttccatcataattttgtgactaaactgttcacatgtgctgccaatatatgattgtaattataatttaaaaataaaggcaattctatgtttcttcccctttctgagcaagataattatatttctttggaatataaattgccaccatttttagagttaaaaattcttcaaagaacaattaagtctttgctgaaacatgaaatagaagatagttctagagaagattacagcgtttcaattcagtgcttccaatgagaagaaaaaaattggcttaactgttgcccaaagtcaatgcttcagattctaagatgtcaagctatatactttgaatgagcttaaatatgttcagcagtataagcgagccttgtaaactataaagctattgaagtgaatcaaatgtttattttctctacataatagaaaataggaaaaaatcatatggttgtgatattaaacatcatgcacttttaaataaaagtttaaagcatttctccattaccttatttctcttacagga

SEQ ID NO: 50401 - DNA, 762 bp, Bovine  19866881255299
  misc_feature (1)..(1): n is a, c, g, or t
natagaaataaatcttttaggagcctttttaacatgaccacacagcaatacacatgtaaaagcatttatgtctctaaatacacatatctaagggcttcccaggtggctcagtgggaaagtattctccttctaatgcacaggatgtgagttcaacccctttgtcaggaagatcccctggaaaagaaaatggaaacccactccaggatttttgcctagaaaatcccacagacagaggagcccggcagcctacagtctatggggccacaagaagagttgcacgtgatttagtgactaaaccaccaagtgtgtacctaaaggacaccgctgtctttcatattgcaattattccatgaacagactcagagcagaaacacttccggcgggagatgcgtgtggatataatcatctcatttctcagttggaatctcttgcttgatataacaacagaaccttgaaaatgaacagtgtttgctgagtagaggaaagggacaaacaggcagctatcatcattcaggcagtaacaatacatttatgctaaagtggtaatttctttttcgtgaactcttataaaggcattcagcaatggataatcacttctccatcacgccattcacattgttaggatctgaatacacaaatcaccataacaacaaggaaaatgaagaaatatgatcactttgagttttgttgttcaaccatctcagcgattttcctgattcaatatgtgctcaattgttcctatgagtgaaactgagtcatttt

SEQ ID NO: 50402 - DNA, 1167 bp, Bovine  19866881362960
  misc_feature (1)..(1): n is a, c, g, or t
ntctgtcctccactgtcttccaaagtttgctcaagtttatgttcagagtcattgatgctctctaagcatctcattctctgctgccccctgtaggtcaaactatagttcagtatttaatatccccctggatatttactaaatgctagatgttgggactgggtgctgagagatggctggggaggggggaatgctgagcgggtacagaggccccaggccgcagtcttcctggtgcccactgagacttctgttgatgaatcgctgctgctgctgctaagtcacttcagtcgtgtccaactctgtgcgaccccagagacgacggcccaccaggctcccctgtccctgggattctccaggcaaaaacactggagtgggttgccatttccttctccagctagcgccacccaagtttatgtgactaaggagaaattcatgctcacagtctgtattctgaaatttttgaaaacccaacttagtataagtgagaggagagcagctgaaggcatcatgaagaggcactcagtatattttcagggcgaggataacagtgctaaattcttatcgcaaatgtgcttcacctcagcggtgagtgtcagggtaaattatcacttgctatcactcccttttgaaatctggattcctagttctttttccacctggaaaaatcttgtctgtattttaaactttaaaagtcaaatctttgaaataaaggtccaatttgtataaaatctaccgattttgcatacctgcaaaagactcaagtttcagtaattttcttgggagctgacaaaagtgtcagtcacttcacaagaccatcagcctgacaatctctttggcattcagaacagtatgattgctctggctttgttctttgaatgggtactataggctccttcctccgtaccctaaggaggcttaggccagaggaaattgagctctatcttcttaacaaataacattctaaatggcatcataccaagtgatttaaataaaacatctcccatcattagtctgtcttttaggcttataccagggtttctcaactcagcaccaccgacaattcgggctgaaaaattctttcttgtagggctgtcctgtggtttgtaggatgttatcagcatcagtggcttccattccctacaggccagcagcattcccccttccaaatca

SEQ ID NO: 50403 - DNA, 1310 bp, Bovine  19866881486517
  misc_feature (1)..(1): n is a, c, g, or t
ntttatcaattgcaagagctagctaagttctactcaaattagcaccgatgtgtcagaaagtttttgaaaagttgcacagctttcaatctcctagcactcaaatagaaaattatcaaatttctagtgttcccaagggatgaacacggtgcacaagcaatgaaaatcaggtaagtactataaaaaatattcaattaaagtagactttgcaaccggatatactttataataaagtctattgctatgcagaagaggtgacaggttctttgccagtcattcctaagaaggaagaaatagagggccagtgaagaattagcttctaagttcttactatatttggacggtacaccttggagccatattccaacaagtcagataaatatgagttagaattataagtttggttgtggtgtaatgggacaaaaagtggtttaggagatttctgggacctctcttttctatatttataatatttctagtgtttttaatcttttttaaattaaaaagactacaactttcagaaatgatgaaaaatgtgaaaaattcttgataaaacagcaattcaatgactcaaaacatataaaaatataaacaaccaagaattattacagcctacacattaccacagacacattacatcactgaaattcttctttatgaaccttgacatcagctcagcatctcactgacagagccagtcagtgcaagtatgaacacttgtctgtgaggattatattatcaccacgatcactcactaacgaaaatgagtttctaggtattataagatcatggtatttctaaatggataatttttctaaaaatcagaatgacatttttttttggataatgtcaatattctggctacagaatattaaaaaaaaagaatcatctactgtatttgaagacaaaagaagacaatatcattaaaaataaaaagtgccagaaatgtcttaagagcatcttaatgtttctcagttcacccactgatcttgcccattttacagatcaggaaactgaggccaaatgttttagcagtgtgtcccaaggtactttgttcatcatttctacaccctttaaccccagactagtcctgaatcaagaggaactaaactatattaatcattcctttatctcatggttttccttttttctggtcccatgtttcccaaacagcctaaaaagcaaatagtatgaggatttaaaaaaaaaaaaaacattctgtaaaaagcactcataaacattcattgaacacaattaaaattaataatttgctgaaataatttaagaaattaattccttagcatttcaaaaaa

SEQ ID NO: 50404 - DNA, 1093 bp, Bovine  19866881891494
  misc_feature (1)..(1): n is a, c, g, or t
nagataagcagatgggatctaagcatgactctggtcttacataaaggacaggatggagtcatgtctagaaaatccaggtcaggaagaaagaatccaaaagaaagtcaactacaggcaaacaaggggcagagcccagacagactgtggagacccagtcctgggagaagatatttcatctctctcattctttacacaacctgctgtgcttgagaagagaagccctacaactttaagaatatttaatagttaaaatgagatcttccacctttcacagggagaaagaaagagaaaccacaagcaagcaaaggcccagaaaatgagattaattagaggttacaaaaagtaagtttgattactatgctaaatgtgtttgggaaaatggtaaggaagaggaattgaaagtaagtagtatgttgcgccttgaaaactaagcagctaattttcaatcttctgcagaagggaacaaggcacaattaaaggtttctaaacagagaaattgcagagtaaagtacagggaaagttaccaaaaaagaaacactgtttgggttttaagcatctttagagaggaggttcccaaagtatgaatttcagatggaaaaagaaaatgcatcttgagaaaacaatgtgatcagaaataaacaggaaactgagacaacccgatttacagaattctatcctgctgaagttcatgcagctatagagatgtgaggagtgttgttggttttacattctgaaatgacacagaaccatagcaacaataaataaatgagacatacatacattcataaccatcatgatggagagacagcttcagtctcaagcaaacaatcatattgtttcccaagacacctacacttttccaaaagctggcctccaaacttgaatatagaaaacccaagttctaattcctattcagtctccaactctcttgagcaagccacatatgcacattgaatctcaatttctccatctgcaaaacaggaactattggacatacaatcctcagggtccctttcacggctgacattcctggattctctaacgttataaagcgctctagcgttagtgccagtgttcagtcgctcagtcatgt

SEQ ID NO: 50405 - DNA, 720 bp, Bovine  19866882135630
  misc_feature (1)..(1): n is a, c, g, or t
natctattcaatttaacaaggtgttatcatgatctagacaagctgttctttcatgaaacgacttaaagttctattttaaaaacttaagttctacatttgataatattactcaaaatgtaatgagctggcagagatacaaggtcttctacaactccaaaggaagctgatttctgcgaaggaaaaaaaaaaaaaaagaccaagcatacaaagcaattctatttcagtctttcagtctttgctagggcatcttaagagaaaaagaagagccatgaatgaaaagaaccacaaatcttgatggagagaatccagaatgaagctgccatcccagtaaataccttagtgactaaacaaatgatctgattttaaaatacagtcacgtggttcacagatcataccagcagaatgtgtacaaacaccctcttgtggtgtctgcccctgtcatctacggcccctgaggtgccaaaagagaatttctgttaaagtagaaggcttctaccagatctataaatacaagcctgcatttgcatgattctgagtagcagtataatcaacttttctgggctacacaaggaatcattatttttctcagactctagaaagactggtcctgctgttattaacagcccttgaaataagggccacttaagagtttactcaggaaaacaatggtaaatatccatgactatggatgtgctaaattaagataaggagatgcctaaa

SEQ ID NO: 50406 - DNA, 1336 bp, Bovine  19866880349490
  misc_feature (1)..(1): n is a, c, g, or t
ncaccccctccgagcagggaagaaaggccaaggagaaagaaaagaacaggaagaggggcgggaggctggggactgaggggcgaggactgtctttttgttctgaagaaacttttggcttttcccaacaaatcagaaaatccggcagggggaagccatttttccctccaggcccgcctacgtctgaatcaggcaaacctgagacacacatatgtttttgtttctaaacgaatcagaaggactccaggcttgtacggggtcctaaaagtactcgttgaaaattgctcacgttccaccctctcccgtgaaacttgtttccatgacttaaacatttccagcaacttgccatcgcttgctctaacctcaagcggcactgggcctcattgaagaagtgccagcgtgtccaagtgtgctgggggccgggaagtgtggagcgagagggggtgagggcctggggttgaaatggattgttctctggtcacagacagtggtcgaaccatctagttctgccccctcatcttagagccgagaaagcagtccagagaaagtcacacagccatgcgacatgggagggctccgggctggcctgtgtccagccagccgctttacagcctcccctggatgcctggaaacgcatcttatttgtgatggagccacgtctgtgcatgatgtagaggctgtatcataggaggcacacggtggggctagcagtgagtgggacctgactctgtgcctgaagttgggggctttcccagctcagtttcctggtgtgtgatattgggagcctctcgtctgggccctccgtgccccacgtgaagatcctaacagttgtaactgtactaacatttgtcatttaatgagtgcttacttacctgatgctgggaaagactgagagcagaaggagaagagggtgacagagggtgagacggttggatggcatcaccgtctcaatggacacgagtttgagcaagctctgggagatggtgaaggacagggaggcctggcgtgctgcagtccatggggttgcaaagtgtcggacatgactgagcggccgcacagcagaacgcttcctctgcgcacttcttgcatttcctcccgttttaggctccagcactttcaggtggatcccatcactggctccactctgcagatgaggaagccaaggcttcggcaggttaagtcactcagccaagatgcggagtcacgtgctggacttgggtgtccaggggcagatgttaccctcttactggctactctgctctttgcccccacgcttgggatgaagggtcagcagggtttctggatggagaaagtgaaaagggctgtgttcactattaaa

SEQ ID NO: 50407 - DNA, 1639 bp, Bovine  19866880379342
  misc_feature (1)..(1): n is a, c, g, or t
naactgtacactatgtgagtttattgtatgtaaactaaagataaacagaaaaaagaaaatgctgttaaggctgttggtaaacagaggcatgtataaaatagtcgtgttataaagccatttatagttagtgtgggtgtgtttatgcatgcgtgtgtacacacccatatttacccgttagtaaatacacaggcaaaagtatcacatgtgcaacataaataatgctcatctctgattagcaaaattccaggaaacttgcttttttcttttaacttactgctgtttcctgatttttttcccctaaaataaattagtactatttgtatgctttcttttaaaagtaattttaaaatcaacagataaaaagaaaaatgcaagctcctttgggaagctttccccggatccctccacaaattaacctttcacctctcagacttcccctccacctcctccaagcacttgaccacaggctgccctgcagcctcagtttctctgagaatgaggagccttagtctcctctgctgaactaagtgaggaagtgcctcctcacccaccttactcctgtcttcactccactttaccccacgaggcgcctgcctcaggactcatgtgtatctggttccctgctttattccacaagtggccctcaacaggcactcactaaagtgactcaccaagcaactgggagtgcacaggcatctaataaacgaccagtaaagcacatctacaggtaactggatactatccacaggatgatggtaattaatgtttcacatcaactcacaatatgggctcaggtgaagggcctttgaaatgacccatgcccacttcagtttctagaaattatttgggagagaacgtacaaagctggcttatcacttaccatatttgtggataagacttgggcttgttaatacttaaaattacgtttcaaaatcattgcaacaggtgataaagtggatgctacctggaatatacctgaaagttcaaagagccaactgagagagacttgataaaacaacagcagagagcagacttggtaaaaacagacctggtgatctgaggtgacatcagtcatgctgaagctaaatgtctgtcagtaaaggaggaagttacaagacaaaattttggtggtagggttgagctgagtgatcataattcttttctcatctaggaccctcaattttcacatccacaggctgaagtctgtgtattagtttgaaaagacattaagtctgaatcttattaaaatggtcgttttaatgattccattcaggtcaggaatatttagagtgacgttttaaatatttccttacttcaaaaacaaaaaaacaatacaaacaaaccaaaatatgacagcattctaacttctctctagcctaagcagaccaaggtcccagcagcctgcaagccaataatctctctgctgaataaaaacataacagaaagcttccaaatgtcacaacttcagaatttcagttccagttaatggagtaagtacactctcccctgaatgctgctatcatgtctgcacacattgcatggagcagctatttcaggactctgaaaaataaacagtagcagataaatgggaggaagaagaccagaacgcaaaagttccactgggcaagccggcagtttc

SEQ ID NO: 50408 - DNA, 2389 bp, Bovine  19866880472981
  misc_feature (1)..(1): n is a, c, g, or t
ntgagagtcccttggactgcaggagatccacccgtccttctgaaggagatcagccctgggatttctttggaaggaatgatgctaaagctgaaactccagtactttggccacctcatgcaaagagttgactcattggaaaagactgatgctgggagggattgggggcaggaggagaaggggacgacagaggatgagatggctggatggcatcactgactcgatggacattagtttgagtgaactccgggagttggtgatgggcagggaggcctggcgtgctacaattcatagggttgcaaagagtcagacacgactgagtgactgaactgaactgaactgaacgttacttttgagcagggaatataaaaccactccagtactcttgctgggggaaccccatgaaccccatggaagctcggctgtccatgacagggaagtgctgcagtccatggggtctccaagagtcggacaccactgggtgactgaacaacaacaacacacttctattaccctaactaatgatgaagcgtcctcagtgcctctcctgtgtgtctcccttgtctctgggcagctgcccttgatttgttttttaagcccaggtgctgggtctcgaactcatccttgtatatcacatattgttacttcaaaccacttctttaccctgtcaagacctcttggatcccaacactgttacccaaggcattctccatcccatcagggtctgaacagctcatcagtttgattagcagaccgtcggtgccttcttctcagttactgatgaaaaatgctgagggagatgggcctgaggtggagccctgtggcacaccactgtagatctttctctaggtcagtgtttcccaaattgtgctcccacagaacctttatcttccatgagatgcaaatgtgtgtttgggaataaaggagccagatgaggttgacacacactgataataacagcatttgcacacaaaaaaacaaagatataataacatctaatggtaagcttccaggctagatggtttaccttccaatagatgggaaggtggtattcaaatcccttttgtccactaaaatttaattttataaaagaatttcaagctacatgtaaagatgcttcatgttactaatcatttcagacatgaaaattaaaaccacaatgaaatatctcacttcatattcataaaggatgactactatttagaacacagcagaaagtaacaaattttgtgagaacgaggataaattggaagctctgtgtactactggcaagaatatacagtggtgcggccactatggaaaattgtatggtggcccctaaaatattaaaaatataattaccacatgattcatcaattctacctctgagtttacaccccaaagaacttaaagtagggtcttagacagatatttgtctatatttgccatgtttatagcagcactactagcagtagccaaaaggtagaatcaacccaaggatcattcgacagatgaaaagaaaaaatggtgtatatatacaatggattattattcagccttaaaaaaggaatgaaattctgacatatgccaaagacggatgagcctggaggacattatgctcagtgaaatcagccaatcacaaaaagacaaatactgtttgatttcacttagatgaggtccagagtagtcgaaaccgtaaagataggggctgaggagggaatgggagcagctgtttaacgggcacagagttttgttttgcaagatgggcagatggggaagagtggtggtgatggttacacttcacgccactgaactttgcattttaaaacggttgagatggtaaaccttccgttatgtgtgcctcctgtgagtgccttccccacggccaatcactccttccttcctcagacactttatttttttcaatgcccctgccctgggtgagaaccccagccataccagcatttgagagcttcttgtttgcttctttggctctccagggaccctcgcttggttctccagcagccagcagtgtgggcagcagccatcaattctgactcatctctgtgggctcctattcaaatcctgggtgtcagcttcaagaagtgaagtgaaagtccctcagtcgtgtccaactctttgcgaccccatgggctacacagtccatggaattctccaggccagaacagtggagtgggtagcctttccctcctccagggtatcttcccaacccagggagcaaaccgagggctcccgcattgcagacggatcctttactagcttagccacagggctgcccccaactacagccgcctcagataccccagactagggcactactcccttcccacctcaccagcctcccctggaggccctcccaggaccaagaatagacctgatagaccacaggaga

SEQ ID NO: 50409 - DNA, 1281 bp, Bovine  19866880543179
  misc_feature (1)..(1): n is a, c, g, or t
ntaactggtgtaaatcacagactacccaaaatgtccctgtcctagaagaataacaaggtttcagtgactgctgactttgagaaaagtaacatattttcagtttgctgatttaactctttccttacaagtgtcagatggtgccaaccccaccatgggctccttattcaggttacttcttacaacattttttattgatatatttattttgaacacagaaaagatacattgttgcttatttagcgcttaatccagggacaagaaaagctgcttggctccatcccttcaacactgatgagcatgtgggggtttttatctccccccccaacaccggcactctctagggttgcagaagcaagatgtgtttcttaaaagaacctcagccctggagtgcattttaaaagctatacagtacaacagacaagagattatttttttgcctagaaaacacgtacaccacaaaggtggacagaactgcgtgtaaacaaggtcccttccccgggcagagtcaggggcgccaggatgctacagaacctctgggtggattcctttcagttctgcaccagaagaaatgctatttctacagaaaataagattcacgattgccttcctcgccacctctcttcttaagaaagggattactaaattgtcttagccctttattggaggaatggaaatgtaggggagaggctggttgggggtgctgcagtttaaggagcgggtggggagggaggcggggtgggttggagggactgccgccggtgatgctggtggggatgctctttatgggcgctgggctgccaccctcgtgcaggctgggtctgcaggcatcagctctgttacctgcgtggtctcggatggaaattgctgggattcaggggccaaggtctaagtctgtttacaacgaggcccatgtactcctttctgcggtagccccagcagcaaggctgagatgcaaccactggtcctctcgcggtggcacagtagggcccacatccccttgatttcatttgcgccagcaccatggagggcagaccagaaggtgctggctcccaactcccaaccctgagcccccacctagagcgccagcactgctcctggggtccgtctccagcccactcgagcttaggccatgaatggccggcagggcatgcccctagtgaggggctgctcctctgcctcagcgcctgtccccagcaaggccccaccccatcttctttgaagcccctcagtcccagacagggttgaatgggcatgggcaccgccgtacccactaaccaccac

SEQ ID NO: 50410 - DNA, 1250 bp, Bovine  19866880549248
  misc_feature (1)..(1): n is a, c, g, or t
naatgcagagctgagtggttgctgcttaagaaagactcattacctgcagaggaaaacatgggagctgcctcctcccattatgcaaggacaatgatcattctggggacttaatgtgtgtcaggagctgttttaagtgctttgtataaatactttaaatcctcacaattctgacaatataagagagactggagggacagtttggcagcttgtcagtgatggtacaagtaaccgggggactgactgggctgctatcccaggagatctgcctccatgcacctgactttttaccactggtctttaacaggggatggttcctttaaagtactcccacatctgggtagcttgaaagagagtagggctgaccctactgggtcagttgaattggatcaactgatcgaatctctacccataaatactctgaaaaatctaggatctgaacttggtccttagatatatgtgtgtgtgtgtgtgtgtgtgtgtgtgtgtgtgtatctagggatgagatttgtagccaagcagtccgctggaacaaatccttcttcacaagtggggtttatacttgaggaaaagaaaaagtatacccactgagtagtcacatttaggattaatcaggacacagtgttccctgagtgtggcattctgggtacttgtctttcatttgtgttacaaaaaaaaaaaaggatcaggttttgctaaaagcagacaacaaacggcagcccatgaagtgttagagaggcaatcgtttccctgaatattcccattcagagcaccaactggataccctgctggcgggtctctgtctctgtccgtgtcaggaaccttccggaggaggctggcaggtgccggctgttcatgctgtctgaactggaagctcttacctgggctgggtgagtgtttcctcctgagatctggggtctggctctttctgaaccctggagaacctttattctctggtcacacacccccttgggacttgcctcttgactttgggagacatttgcccttacagttttgttagtctataataaatggtcttattcacttatacctatttcttcaggtttaaccttttggaatcctagtgatagcattgttcagtgaggttgatgacagtgaactcaaggccatcactgtgaggaataactgatggactcaaaggcatctctagcaaaggagacacctcagctcatgtctcttccccctaacggttctgtttgtgtgatgcaagagagaagtcctcttccttttgt

SEQ ID NO: 50411 - DNA, 1098 bp, Bovine  19866880556577
  misc_feature (1)..(1): n is a, c, g, or t
ntgtgtgtttatttgctttaaaacattgtaattacatcctccgctttggaaacttctgggaaccagaaactctgcacatggactttggctgagaggactgtgagccagtgctttgctcggatgactaccgccagtggaagttgtgggataagctttcagaagcagaccatgccttgccctgtcctcactctaacactctcagtggctccaaagggcttactagcatcagaccaactccactgtatgcagaggagagggaactgggcagcaagcctggagaggtgggttctgcagtaccccaaagtggttccctaacctctccactctttgcttcctcttccaggaggcagttctagttgcaccagccctgaagcaatgctggtttccagaaccatcactgggctctccccttccaatcctgcagtttctcctcatcctgcaagaaaacattgagcttcagtttatatttaggttatatttatttcttctatttctgtatatgttagaatatacatgtgtgtatatatatattctttaccagcttagccaccagggaaccccatatatatatatatatatatatatatatatatatatacacacacacatatatatatgtattttgtgaccctatgtactgtagcccaccaggttcctctgtccatgggattttccaggcaggaatactggggtgggttgccatgccctcctccaggggatcttcccgatccagggattgaacacatatctcctgtgtctcctgcattgcaggtggatactttaccactgagccactggggaagcccctatatgtatgtatatatggttggtgatgtgtccggtctgtaaaaactttttactaaaaattctgtgtgattaaaaaaaaataagtggagatagttagtgtgaagagggaggaccctataggtgaaataaattggaatctgaagacctcctttaggatcctggtcctccctctgactcagtgcatggctttgggcagtacttgaccttccttgtccggaaataattctggtctggagagttcattataaggggaggatcttctgaaggctgagttacatagtgcatgctaaa

SEQ ID NO: 50412 - DNA, 1478 bp, Bovine  19866880585313
  misc_feature (1)..(1): n is a, c, g, or t
nctgcagttgtaaaatctacagttatctcccagcctaaaggcctcagcaagggtgactgactctgaatgtcatccgtcctccccctgggctcaggagtagggtataagggacagagggggaagctgggctttgcaatcacaaaagcccaagcaaaggggctggggggcactctgggctcagacacttgccaggcagctggcactgagtgtggttacttaggtacactgattccaaggccagcacaaaagttcaatactctcttaactcttatgttcatcaaccctgtgactgacatttccacttggcctatagtggggcttctcaaattaaatgacttctaaaccatccctttgatcttcaccccacagttaatccctgttacccaggtttccagctcttaagggcaacaccatccaccttgtgttcaggccaaaccccagggtttattgtttatccttctttttctctcatccttccagtctatcatctcctttaacatgcagttttgtaatcagttaagtgaggataatatctcccttcctcagatgatgtgaggattagatataatctatataaagcaccaggcacataggaaatgctcaagtgatatccattttcaataccaggctctactcactgaacaaaagcccccattctcctgaatagacacataggctctgattctgtgcattaaaaaaatgaattggaaaaacatatatcctagagtctaggtttggagagagaaatgctaaaggcctcagggtgagcatctaagagcctgtgggtaaggcagtggtgcattaaatgagagtgctctcattttagcgtgctccaaagtagcccactaataagctatgatcatcacaggtaaatggagatttcccaaaaagaagagagaaaaaaaaaaaaaaagacaaggaaaataaatgtgcaattcaatcaaaagccatttggctgaagttatgcaatttcaagtttgggatcaggcattatgcttattgccacctctgataactaacacattagttttctgctgtatgcaattattatggggaaaaaaacaaaacaaaattcaattcacctgcatttgtcactagagtattgcgtctgctacacaaaggcaggagattgaaaagaaagatgcctcttactgaattttgagaaaatgtgactcttctctgagccttgaatacacagtcggatggtttgaagaagggtcggtgttctgcatacaacccatgtctttggcaccaaggcaccttctctttaggcacgtctgtaccctggccccgccccttttcatacttgcactcaagatctttagtcttttctattggtggactattgatacagatgttcacccagaacaatgtgaagagagtcccagctcctggaaacacccatggtcactgactgggaaaaatagaaaatgcctgctctcgcataggtctctgttcaatgccatgtcggttgtctg

SEQ ID NO: 50413 - DNA, 2942 bp, Bovine  19866880610698
  misc_feature (1)..(1): n is a, c, g, or t
ngccctgcccggggtgacttgcctcttttctaaaatctggcctctttctgtgtttcctgctcttgcccgtgttccctctgctctccctctccttatctacctcaaccttgctccaaaatgagattccaaaggcacctcctccatgcagtcttccttgacttgcagtgtgatgttgaacagtccctgctgtggacctctgagtctccaaacctgtccttctgcccacccctccttggcacctccttcattctgcctcccagatggctctctctcttgctgaagtggacgctctctgaggacaggggtcgtgtcacagactccacgctgtatccccagggtggcacaggagctgatgtgctaccactgctggtggaagggaggcaagggcaaaaatggaagccatcgcctcacggagccatggacccaggtgtccatgttttggccccaatatctccttaccaggagaaccccactgggatgggggtgtaaaaagataagcccaggaactcccctggtggtccagtggctaagattctgctcccaatgcagggaacccagggtcagtccctggttggggaactaaaacccacgtgctgcaattaagacttcacatgccgcagccaagacccagaacagctagggaggtagctagctagctaaataaacaatatctttttaaaaataaaaagataagcccaaacaaccaggcattttccagagatttcaatattacactcatggcctaaaaggcatggctccctccactgggatctgggcttgcattttggagtcaggcagaatcagaatcataacccagctgcccaccttgctgtgtggtcttgggcaagttacacaacctctctgagtcttactttcctcagcctagacagaaagataatcagaattcctccagagggttgtcgaaaggttgtaatcagataaagtaagtagaagtacctagcacccaagattctcaataaatgccacgctcctctcttccttgcagagttagctactgtgagattttagatcacaaagcacctcaatctttccatctgcagaataggcaggcatgctcaaagcttctcacttcactgttcaaagatcaagtatgtataaaaaatatatatttataacagacttcacttattcccagtatcatgtcagtgtgaaatggtcacccattcttcctaaacactgcaggaattatcctctgtcacttctaagaggatcgagagattgtcacccaataagaacatggctctttgcaaagaaaaccatggcccatggaagaggcctgtactctgctctctgttgggccccccagtggtataaaagggactcatgtaatctttaccacagcattttgagactgggagtgcccttcccactttactgatgaggaaactgaagctcagagaggtttgctgagtccagatgcagagctctacacccaccactgcccgagacgctgcaggagagagagttggttacagagttggttacagagacctgtacagttggttacaggtcgagcaagtgtcagactccccagtgctacaagaggaagcgcaaagggctgaaattactagaccttgcttcccctccggttctcagaggggaggtacatgcagtaggaaactgggacattgaaaacatgtgaagatgaagatgttagtcgctcaatcgtgtccaactctgcgaccctatgaactgtagctctccaggttcctctgtccataggatttcccaggcaagaatactggagtgggttgccatttccttctccaggggatcttcccaacctagagatcgaaactgggtctcctacattgcaggcagatttttaacaggactcaaaatcagattcctgacactctcctataatcctctacaatactgtaaaattaccaaggtttgcatccacttagaaattttaaaaacaacaacaaactataatcaggtactcttagaaaacaatttttggggtctctccaggtgaaatcagggagaccgtgcattctagattgcctaggacagccccaaacatcagaatcatggtcaacttgctactcacactcaaaaatatcctcatatatatggtgggtcatcccagatctgtggttctcaaccttgcctacacatttggatcacctggggagcttcataaacatctcgattaaataaaaatctatatggcaggagggagggtgtgggatccaggcagtgatcacttcttaagctttccccagtgactgtcatgggcagccagggtcaatgtcacaggtggaagacacacccttccctggcaggcaaaatggaaacaagtcgccagacagcagaggacagggaactccatccagccctgagccgtcctgcccccaggggtccgaggtcagcagaggacggggcacaaagctggtccgtggaccccatctgtgggcacgacgcctgctttccactcgcctgtctgtatttcctcacctgtctgcttcgggaacgggctggaggctctgtggcagctccactgggtgctagctcagccctgagcgcatcattactgctcgctggctccagagaagagatgaaggaaatcacctgtttcaccttgaagctaaggaggagaacctgaagagggagatttgcccacacttgctggagaagaatgccagagaatgccatcaagactcgaggagccaggctgctggcacagagcagccgggagcccagggtgcaaacgtgtcccgggcagggtttcctgaacagattgtctccaaatgttgctctctcctaattaatgctgcgagcgcagtctctggtctctcatctcacaccagggaggttcctgcagaaagaaagtccctgccatctccttgtcccagccacagagagcagagtctgtccccaggcagttcccctgggtttctgaaccattttcaagg

SEQ ID NO: 50414 - DNA, 1637 bp, Bovine  19866880654094
  misc_feature (1)..(1): n is a, c, g, or t
nttctccctgaaaaggcaggtggcacgtccgtcaccatggtcttcagtgccccaggtggagcatctcctgcttcctgcgtattcacggtcactctgcctccccagcagggctgcagatcaccatgcagatgagaaaggaaggaacacatccctgggccccatgtgtgtcctgggagctcacacgggtcagctttcctcctggctcccccaggtgctcccagcaagcaaaactcggcatccgcacaatagccttttccctggtttctcggagatcaaggctcacaagcccaagccagtaaccacgtctccttaaggcaaggaaagcaaatcggagcagcggatggttcagcatcgtctgtgggaccagcagccacgtgactcagtggcccaggcagccgggcgcagcacctgcccccggggagagggcgtttcggtgcctggctcgggtggccccttggcccaaccagagtctctctgagagttgagacactgtcccgatttataacaggtggcgctagtggtaaagaatccgcttgccaatgcaggagacacaagagatgtgggttcgatccttggtttgagaagaccccctggaggagaaaaatggcaacccattccagtattcctagcctggaaaattccatgggcagaggagcctgctgagctacagtctgtggggccacaaagagtcggacacaactgagcgagtgagcacacacagcctgtgtataacagtatctttcatctcacctggaaagattatggccagagggcagggcaccttctcagcatgaggagctgatcaagaagagcatcaggggggctaacagtgacccgggcccttcaaatcagccactgtttctaggaagcgaatgcactgacagtgcctgcacaggacaacctgagaaaaaccttgaatctttacatttaagctcaaatcatatgatgggcatgacctctctgaatggaagggctggggatgtgaggatcatctgatccacgaaggaccatcagatgcagcagacgccgtgtcgtgatgtgaacagcatcctcccttgttgcccttatttatattttattacgactttattgaatgttttcttgtaggtcagctgaaacccttgggggaataaagcaaagcaaaactaaataaacgctttgagtcatagcggaggagggacggcattccaaggatagaagtgagcactcaggtaatcaggggggctttgtacagagacaccaaccccagccacaggcagcagctcccgtctccacgtggctaaacttgcttaatgcccaccggacacctcctacgttaaatccaccaaccagcatgcttaacccagcatctggacccgctccatcctcggctccccgagcctgcactgtgcgtagggcagggtggggcggggtgggggggggggtatccagagtgtggggctctggatgccagagcacctgaactccagccctgggttctgtttcttctgctgtgtgaccctgagcacagctgtcacctcctcacctgaaacgggggtcagtccagcacctgcctccacagaagcacgtgggtggatatggaatgagcgttcagcaagtacccattctaaggcccagccccccgggagtcacctccc

SEQ ID NO: 50415 - DNA, 663 bp, Bovine  19866880678869
  misc_feature (1)..(1): n is a, c, g, or t
nggcaaggtggcaggtggtcttttccccaagactgaactatatttggaggcaacccccaccctccctgtattaaaggcatccaaagaaagcctcaggctagattaatttgactccttaaacttgggagatttttaaattcttattagggagactgagataacttattagataaaataatccttgcaaagttggcaatctttggccagcccatcacttcccctgcctgcgtctccgttttcttatcaatgcaattgttagactgatagtgtcgtacttcatgaagctctgcagatcaaataagttcacataaattataaaatgttaaacaaatgctgagatttgatggtcattattatgagcatagcatcaaccatccatctcagaacagaggaaatctgcaaagtgacctggagaattaatgggaccagtgacatttatccttcaacatccatctcttcccagttgttggcgtctgtctccgggactcgacgtggaagggggtgggcaggtagtagaattgcagtgagtttctctttttggttttagcatttctggctgggggcatatgtgtgtgttgctaagggatacgggtagaatataaaaccctaggtcacgtgaggagagaactgctagcattcaagctcttccagtgtctgtctggg

SEQ ID NO: 50416 - DNA, 817 bp, Bovine  19866880679372
  misc_feature (1)..(1): n is a, c, g, or t
nccgaggaagactttgcatgtaggaccgtaagagccttgacaccagtgggcagagatgcagaggagatgctgtctgagacctgaacagcatcttggagaaggtggtgagtgagggcagccctagaaggctgcggggaggacgtgagtctgacccatgagtgcttatgggcctctgatgtgaggagctacagtttctagagtattcctgcacagagaagtgcttaatagatactggaggaatgaatgaattggataaataaagggaatggcaagggaatgagagaggacactgtgaacggatgaagacatccagtagagatgtaactcaccattggctgggctcttaatctgtacctgtgccttgacttctagtatttcatttaactggctcatcaaccatgcaggcagatgtgtttgtacaggtttcaaaactgaagaaagtaaagccagagagaggttgagagactctcccaaagtcacccagtcaggctatgagaggaccaggcttttgtccttcgatgtagctgcaaagcccttgttcttgagacgtgctttctttcctctccactgtgactcaggagaaaagtcaattttcagtggtcgtggttgtttgctaaaaagagcaattccctttcctctatctctaattttcctccaactaattgcaaattagtggtaattttcaaatgaaaagagggagcctgcatgccatccatttgtgcttacccagcaaggccctgggcctgtgacagctccgttgccaaggcaaccctgcatcaaggccttccctggatccttggcggtgctgccctagact

SEQ ID NO: 50417 - DNA, 2358 bp, Bovine  19866880731033
  misc_feature (1)..(1): n is a, c, g, or t
natgctccctctctgtgtattctgtgaaatttattttccaagtttattactgggacatgtaagaagctcccgaggattattacagtttggggaaaaaaataaatgctaaaatgtgctagttttattacccttggaaaagcagagtgtgaagagcactatataacttttagggtgtaagatgaacaggatgtgaccatgttcatcatctctttgggataatttagctgagtcctttctgccactaaatgatgttacaggaccacctaaggaaggctttgtcatctcctgtccagaccttactgcagtcaggtccagctccacagtggagagatgcctcagagatcctatccttcccccagctctccactttggggactttctcagcttgtgattagcctgaaatgcttatcattggctttcaaaagtggttccagaaggtgccaccttaaggcatgtttatggtttgagaatagctctaaagtcctctcttccttaatacgggttgaagtgaagtgttagttgctcagtgtccagttcccggcgaccccatggactatagcccaccaggctcctctgtccatggggttttccaggcaagcatactggagtgggttgccatttcctactccaggggatcttcctctgacccagggattgaagccgaggctcttgggtcacctgcattgcaggaggattctttacctgctgagccaccaggcaagtcctctaatacagggttatcagcttggatacgagtgctctggaactcaaaaggatgagaccagtgcagctacctgtctggccaaagggtggaaagccagcacaggtctcagaaaggagacctaaggacacaagattctggggctaagacttgaaagaggagtgtgaagttgctccggttttcctagaaccagcttatggtccaggctgacaggccaagaatcttagctaatatcttcaattgcctatttcaagagtttctggaccatttgggcacttcactgggcagctgttcctaaagctgtgagtatgacaggtaaagcccctatgctactgaataaggttctacaagatgagttaaaaattatttatcatcaataatgacagacattttaaagtaagataacattgtgctttattcagcctctaaattattttgattttccatttagtgatcagggatatgtaagatgtagatacttgtgtatctggctccgtctctgttccctaattttgaggtcatatcaacatgaacttcaaagggaggtaaagattaagaatgcgctatgattttatttgaccatgatcttaaatttaaatttattttgatgatctacccctaagtgaatttccctaacagaaacatcagccgttatctaccaatagatggagctccgaggagaatccatgctcggaggttgctctggttcgctgaggatctccccagagcacattagcagtggatagagatcctccttcctaagcctgttagagattccttaaaggtttacgaaaaacaacagagtttattaaaatgtctctctatggcaggaaaaagtagttaacaacgaaactgaacacttacaagtaaaggccaaaataaacagctaattaatcgatcaagtctgagtatatataaaagtatgaaaaagaaagtagaagcgacttcaaaatccagtgacgacaaatgtacggctctggcgcttgtgctaggatgaaaagggtcatagatgtcgcagctagtgcctagaggggaaaaaaacacgacctcttccagtgatgattgaacaagtttaagctgtaaaaatgatcgattctaaaatgtcaaaataaacgggtttcttctttatacacacacacatctaaacgaggcagactgaaatgtacgggtgtcgacttctcttctcattttaagagaactaggtatcccttcctgttttgtttaattaatttctccacttgtatgcctaatgccatcacttcccacagccatgcccttgatcttttcccactaagtagctcggtttccctctcacaccttcactctctcctcctgccctagctcctttcctcatcatcttatcaacatatctaagttatcttctctctctctttttaaacaatatttatttatttatttggctgtgctgagtcttactcgctgcatgtgggatctagttccctgcccagggaatgaaaccgggtcacctgcattaggagcatggagccttagccactggactgccagggaagtctctaagttatcttctcttaaaacatacacaccccttcctttcatctgctccccacagaaattcccatttttctacttctccctataagcttctcaaaaaaagc

SEQ ID NO: 50418 - DNA, 1617 bp, Bovine  19866880767485
  misc_feature (1)..(1): n is a, c, g, or t
ntttctcccacagtagactgcttcttggtataaagttgaaaaggaaaaaaaaaaagaccccagaatggcctctctcaaaaacagcagttctgtgtggagaacccagggtgcagggatgaaggtggattgcagcccagcaacttcatgctgcagaaatagaacaggagagccataatcagagacgttcccacccacccagctctgcagcgtgcgatggtgggttttgccagacaaagaagtcttaaataggggtttttaggaacatccaaactagagtttctcaccatgacatttcgttgcttggagaggttgctggggtggtttggtaagttttcaagataaagcaacacttggattatcacattcccaaatcatgactaagaagatccaggctgtctaaataaagggaaacaatcctatttagtggcctccaaatgtaattaaactgtcaagtcagtaattttctaaatgcggacacctcatgcgtgactaacaccttcgttccccaatcaaaacacactaaaggaaggaaggaaacaaaacaaaacaacagagagattgcaaaatgccctcctaagaattcagccttgaactctgcatgtgtgggacagatttctagccaagttagtcgttgctgagaaagtctctcttcttttcacgaagctggctgaatgctgatcagaatcttgacccaggcagcaggtggggctcccccatgaaggagaatgaaaaagttgtagctacagcccaagcatcgaagctgagaagcagaggtaccaggattgaccttgggtgtctgcctctgcggcctgccataccccaggcttattgccagtagcaagagctttcgccacatggacatttggtggttactggttttcctgcagcacagaggcctgcaggccctgacctagggagtagcatgtgcctgttcccttgtgggtcaggtcagagagatggggagagaaggacaggcaggagaaattccagatctgtagccctagctctgagataacttgggaaacagcagagtgtggtgagaggcagcgtccagtacctctgtgcttagagggggctgtgtccagtactgacctccctgcaagagacagccaagctgtggggaggggtccatttcagcaggaggctaaagaaagggccaggctgtttactaggctcgtctcatgaaaggagttggaaattggcagaaatttcaaattctgactgcgggactgagctatttctgttgaaaacatttgaatgactttctccccacccccacccccttcttccacaatgtcagatgggcacacttccaggcctgcctccgcacccagccagcctcccaaaagccgcctggcgctctctctgctgaaaccgtgaggagcccggctgaataaatggcccggcagagctccagtgagcgctcaagtttaatatgcacttgacctctttgtctttcagaaatgaaatttattgagtttggattccagcgcccccgggcccccactaacatctaattaaccagaccacactttgacttcaaaagtgcagggaaatgaggagatgtatttgctgcaggaacctcgagggaggggctggggagctgacgccagggat

SEQ ID NO: 50419 - DNA, 1744 bp, Bovine  19866880775077
  misc_feature (1)..(1): n is a, c, g, or t
nacccacacactatatgcaaatcacagaatcctgtgaaaaatatcattggccttccttgccccctttattccatgaacacagacaaatttgctagaattattgctctaggaagattaaactggctgtccatggagaaaagattgactaaaccccatctgattctaaaactgacggccacctaagggagaggtctggcagagagaagaggtgaggcagagccctttggtgtcagtggtcacctcagctgcatgtctgcatgtgtgcagtgctctgacagagggagtgggggcagggcttgaagggcagacaggcaccatttacacggaaacaacagctcagagaacagacctgtagtcacagacacctttacaacctagctgtgggaaataagaccagactccatctggttcctaccaaggccaactccacagccatggtccaacactcccagcgaaaagtgttaacatttagtcattgctttgcagaccctgctctgtcctgagtttcccagggagtggcaagggatttctttgccctagagtctagagaaagatgtttttcaaagcaatgaagagctatttcctctcacccacaggtagcagatataaaagaaagagaagaattactccaattacatggtagacactgaaaatgcagaggacaagctctgggtctaaatgttatttctccataagaaaaaaaaattaatgcaaccattctttctctggaccaaaggcatctgatatggatgctccacatttagagcaatataccccacaggatatttgaaagctctgatttaatctttaatttctccccaacaaggtgaatgcctgaattgaaccactgcaataagacagaagttccaattctatgactagctgttgctctgcgttcataaatatttactcaccttctagaggttctgggaaaggggaatggtcaaaacttcaattgcctccttggtacctgaccccacttatcttgctgctgaacacctccaagagtaagtctcaagacccaatgagttgggagaaaaatatcctttaatatagaccaggataacatgggcttttcaccctcagtgtccttacagagagccacttccattattgctctggatttttcttaaagaagcaccaaacttgccactgagaacattcaaatcacttggctttgactgggctcgagataattactggagaatttcccccataaaatatgtctgctgctgtcagccttgcccgctccagtccgtactccttactaagatccaggtgaagttgtaaaaggcaaatccaatcgtgtgtgtggatggtgctccacatccctgagcccactggagtaaaggacagtccactgcacacacccagtatcccatctcaagtgcacactgagatattgctttgttttttctacctctgggcgttctctagagtcacacagcccagctgaaacccatgattgattaaaattcctttgactgtgaaaattaccatcacacaaggaagaggtcaggcagagggaagaaggtgaggcagggtcctttggcatctatggtaatttactctccatgtccgcatgtgtgcagtggtctgagagaggcagtgagggcagggcttgcagtgcatttgggcattagttacatgcaaacagcccatacgtgcaaggaattatggcctctgagagcaacctccaattaatgaaggatgaaggtcaggggataaatggctccacctccca

SEQ ID NO: 50420 - DNA, 1754 bp, Bovine  19866880809980
  misc_feature (1)..(1): n is a, c, g, or t
ntatgcctcatgtggtctgtctgtctgtctgtgtcattgtgtatgtatgcagacagctatttgtgcgtactaggattctgaaatctgaggctataagccacacctagcccagtgaccgatctctagtatctcacacccagtgtcataagatctctgaaagctacacatctgaaatgtgacatttatactcttcccccatgtccctacccaccagtttgaatacttttactggatctttggtttgatagcatttaatggtaccaccaccagccctcatgggagcagggccaatgcctctcttgttcttcaatgagctcctgatccttcaaacagtgtctggctcatagtaggcactcaatagatatctgttaactgttgaataaatattgctgaatatgttgcgtaaagaaggaagggcctggtgagaattttcagaggactgactctaaaatgttactgatgatcatgttcattccataccatggtgtcctctgaagaaggaccctggggagaaggaactttcttgttttcagttcaattcagtttagtcactcagttgtgtccaactctatggactgcagcacggcaggcttccctgtccatcaccaactcctggagcttgttcaaactcatgtccatcgagtcagtgatgccatccaactgtttcatcctctgtcatccccttctcctcctgtcttcagtctttcccagcatcagggtcttttttaagcagcatcaggttcttcttattttaggaagggaaatacttttgcctctcatgggggaaaaaaaaatcacatagcttcagttgtgtggacatagatttcctcttcaggctggctgctaggaaactcaaagtgtctgttgattgaccccttgtgacaacacaagattttatggaatgcattgttttattagggtcagttcttctgtattttctctctaagcaaacatttctcactgacccctagtattttgtgattgtgctatatgtgtctttgtaaatagtcttcagttctggcgagtgaatgtgctaagttgcttcagtcatgtctgactcttcatgaccccatggactgtagcccgccaggctcctctgtccatgggaattctccaggcaagaatactggagtgggttgccatgccctcttccagtggatcttcccaacccagggatcaaacccaggtctcccacattgcaggtgaattctttaccttctgagctagcagggaagcccattatagagtataaaggatataatataataaaggatacagatgaacaaagaggtacacaaggtgagttcaggagatcctaatcccatgaattgggatgtgccgccctcccagcacatagacatattcatcaaccccggaaatgttccaaaccttatgctttaggggatttttattgaggtttcatcacataggtatgatcagtaattaactcaatctccagcccctctcagagaaggcaatggcaccccactccagtactcttgcctggaaaatctcatggacggaggagtctgggaggctgcagtccatggggtcgctaagagtcggtcccgactgagcgacttcactttcacttttcacttttgtgcattggaaaaggaaatggcaacccactccaatattcttgcctggagaatcccagggagagcctggtgggctgctgtctatggggtctcacagagctggatacgattgaagcaacttagcagcagcagcagccagcccctctcctctcc

SEQ ID NO: 50421 - DNA, 1732 bp, Bovine  19866880836127
  misc_feature (1)..(1): n is a, c, g, or t
nttgctccggtgcagaggttctcacattctggcataccagactcacctggagggcttgttgggtggaaaaaacccaaaagaacatccatggggattctttttagtaaatctggaagggggcccgaggagtcatatttctagcaagtactcttgtgctgctgaggccattcttctgaggagccacagtttaaagaaccactagctgagaaatctgtaggtcattccacatggggaccatctggagtgtggctcctattgtcagacttccctgggtgatgctgctgtatcaatccacaaatatccagactgcatctccactcatcaaatcagcttctgaatatggttttgatgacagaattaagaattattatcttaggccatagtggagaggcaaaaaaaaaaaaaaaaatcccaacaagatacagcctacatgatagatagaaaacctcccaattatttggtttgactcattgaatcagccagcaaatatttcttgaacgtgaaccttgtaccaggaattgggcagacagcagagacagaaaaatgcatcagctatggtggtaaataataggcaacagatgtccaccaaggtggtgcatgtcgaggggaagcaggaaaggtggtatcaaggcatgtgtatgtacacgtaacggccttaggctctctcactgctctcctcggggaggaacccagctgcctgcacttggcatatggttcctgtacatcattcactggaagcagacacattggttctcagagtttccttgcgtgcagattcctctacccatacagcaccatgaatatagactaattacaagcaaactctcaaaaagagtgattatgtggcggctgatttacagcattctttttttactccttccctgtctgtggctgggaaatggaagaggcggctttctctgttaaacttcaatgagccctggtccccttgcctgccttggggagggttgagatttctgtcgactgggtgaagtttcccggtggttcccctgggcaccccctcaaagcagcagagagcagccttagcacccaaactgggctgggagtgggtggagctggagtatgggtggaagatggcattttttttctccctctagtgctgcttttcttagcagtaaaaaaagaactaagacaaatgaccctattccaggtgtttaggtgtgtgtatatgtctgggtttaaaaatgtaaagacttcagcgttaagaaacctaaccttcaaagtctctgttgtgtcaattttgttgtgtgacctcaggcaattcccttcccctctctgggtctctaatgacagaattggatgaattggctttaacatccaaaggattatgaacttgcaaacagttgacccttgaacaacatggaggttaggagtgcaaaccctcctcacagccaaaaacctgcctgtaacttagagttgaccctctgtgtccatagtccctccatgtatgcagattcaaccagctggggattgtgtaccactagtgttaccactattgtggttcagtcgtaagtcgtgtccaactctttgtgaccccatgggatctttgtgaccccatggactgcagtatgccaggcttccctgtccttcactatctcttggagtttgctcaaattcatgtgcattgagttggtaatgccatccaaccatctcatcctctgtctccctcttctccttctaccttcaatctttccaccatcagggtcttttccaa

SEQ ID NO: 50422 - DNA, 1144 bp, Bovine  19866880882253
  misc_feature (1)..(1): n is a, c, g, or t
ngggagagcatgggaccacctctgtaactggcccatggtggaactccttctgatccctcttctcaaagttctagaatactctctagagccttttctcattggctttcagatgcactgtctcagtttcatactagaacccagggctgggggatcccatgcacaggagtgtaggacatcccgacaagatgcctgcatgatggtgtctttaggggagaattgagaggctgctgcctcaagtacgtgtcagggatccttccctggggaccacactcaccttctacactgaagaccctggcagaggaaaaatagaattttctaacagccccacatgctgatctgtctagataaagccttgggaaagaacattattatccaacagcgatgctggaacattgcccagatatcaatttctggatgagtcaccacagattctgcgagaatgggccagacagattctgaaaggtcccagagctcttggctcatttgcagcccgggtctaaacgtcgtcgctttgctgaggagactgagggtcatgccagggtgtgtctggcttcccatcccataggcgggcaatgaaccttccaggcccaggaccagaagagcccatctagccctgcatctcagggtcacgcctggttggggccgtgcctcttatccacgctagtggtgtctgtctttgctgctcacatctgggcacccagcccctggaccaggccttggtccttggcggctgcaggtgcgtaattgctgaccacgaaggcacgttccccactctgtgccaccagtgggacctccttggagaaattttaactcttgtggcctctgtcaattgggattacaaagacactgaaagaggaaggggcagaacatttgaaaataatccctcgcatctgtccagggaagctgtctcaagctgggttctcccagaagcaggttttgattgcaggtgtttggtcttgcgggtgatcagggaagcacctcctgtgggatccccagatggctctagtggcaaagaacccacctgccaaggcaggagacataagagctggaggagggcatggcaaccccctccagtattcttgcctggagaatcccatggacagaggagccggccggctacagtctataggatgcaaagagtcgg

SEQ ID NO: 50423 - DNA, 4509 bp, Bovine  19866880974165
  misc_feature (1)..(1): n is a, c, g, or t
ngtggaggacagattccaaatgacacaaaacagccctgcgttacactcttttccagagctgtggtaaggatcccaggctgccctttgcttaaatcacagcaatcagtaaccattttgcccctggtccttgcagctgctgccaactcatgattgagacagtgggaggtgtcgggaaaaagaaaaccagcctccagcaggtcccaggccccagaccccgctgctcactaaccagtgtgaccttgaacgtgtcacttaaaacgcctggcctcagtctccccttagtgaatcatcttcaagggatttcccactgacaataatacatgcttaataacctacttctggtttgcctacttggggcaaacagagatgcctcttacaagcccactgagacaggccagcatctgtgtgcccagacctcctcatgccctccacccatcagcatcctccgggcacggggttcaatacctggaaactcttgggagtctcaggagcctgactgccgagccaaccttggtgggctcatctggcattttggccacatttgcctctggctccaggaggaagtgtccctgtcactctgatggccaccttggacactcagaaattaaagaactctgaggcacccttctccacccacaggacgctggagacacctgccacttacggccttaagaagagctggtccccaccctggcagccggagtcggtcttaaattacctaaagagcctgagtgctgggcctgggctccatttgtttacaaaataggcactttcaaaggccctttactagggcctggcaattcccaggtcccctgctataggctgatgcataatgcataagatgctgggaaatgtgtattcatgagggcggcttggcttttgtcaaaaagaactgtgaaatattatgatggaacaattttcatttctgccacattgtttttatagcgcattcacgatggggattgagggctttccgagttttgtctggtgcagatgttgcagtgctgaaagctgcttcagacctccttattttccaactttgttgctgacaattacaggaggtggggggagggggcctctcacagggagacaaaggatgcctgtcctcaagtgatctcaccctggcttcattcaggagggtgggatggggatgagggtgaggaggaaaggaggaaacggaggggacactgacctctggaggtgctcgacaccaggcaaactgccctcctccgaggatccattaactgccttttacatctgaggaaatgcaggcccggccgggttgagccacttgtctgaaatcctatccaccaatggatggcgaagcctgggctggaatccacatcaaatgcccaagcttacggtttcttccagccccaggcaaccaggagaactcaagctgaggggaggcgctctctctttgcagtgtatccgagagacaaagggatgagaggcgcgcacgctgcccggatccagaaaacactgaggcccccaccctggggaagaaggactgggagtatgacctgagctggctgccagcattgtgatccgacaggcgcccacctcttggaactttctaaccaagaatccaccctcctgccttctggggcctgtattcaatctcaagtcttgtggacggcaaaccccagcctgtctcactgtgcccccgggctgcctcctagtccaggaaatgctggccccttcacgcccctcagcctgaaagccatgcgttcccaggggcaggcagtgtgggtggggggtggggtaattgtccctggatccctaggacttgcaaagctccaggcaagctcagggcaaggactcccacaactgcttccaatgcacccagcaggacagagaggccaggctccaggcaaactgagatgccaagtgatgagaagaatccaccctgggacagtcaggggaacaagcaagagagagagactggagtggccaggcccacctcggggctggaggacgaggaggaggcataatacaggggaaccctaaggccaccatgacttcagagcccagagcgggtgaacgcagagctgcgcagggactggaggggcgccacaggcacgggggtttcgttctcacaggttaggatggaggcagagcctcgaagcccaagctgcagggcttttggcttcggggaccagcagcaggaagtccctgaggatcccctatcccagctatggagggtctgccaggcagcacaatccacccccctgaaatgtctctctggcatgtggattcctttgcgctaaaaaagaatcaaggcccaaaagacttaggaagaaactttgaccatccccttaactgaataaaagtatttagctagagggcttgttcccataatagagtaatcaccagagacctcaggggtggggctggggccgcaggggacccagagatgagcatccactctgtgccccggtgtgtctgcagggggcccggcaaacatttatttacccagcactttgcttttccatctccttgtgcactaccttcctcccctctgaagtcctgaaccactgcccctacctcctcttttgtctttaactgaagatggtctttgaggtgaggacttcagccactctggcaggctagttttcctgggtctttctacagatacatgttcagcaagcttttgtttgatcttctcctgttaaggtgtcctacatgtcagtttggttcttataccagccaggagaacctagacggggaggggacaatgtcttcctctccagaatatgaaagtccgggggagaaacagaaacatgtggggagaatgacgtgtctcctgagaaactccagacacgttcagatctgctttcttctccatgctgaagtcatcgctgttccagaaatcttgtccacagggcaactagttggaatttcttgtgctcagccactactgctagggtggtgggtctccctgtgaatccagtcccacaaactgctcttcccatttctgaaacaaaccaaactctttcccactcaagggtcttagcattgactgttccctctgcctccaacagcctccacccacctccgtagtcagagccttctcagacttcagagctcaggttgcctagccggctctctcatccctagtgtttctcatcagagcgtgctgtttgggtttgctgctgctatggtggttgttactgtcttgcggtctgtccccagctgtgatataaagtcatgagagcaaggatcaggctgttcatccttctcccagaagcacccagcatcatgccaaggatggggtcagagctcagtaaatgctgagagtgaatgcatcagttcacagtatgctacacaagaacattaataaggcataccaaaagagatgaaaacccaacagcttgctgtcctgccacatagggggcttctgcctattcagaagcaaaccaggtcaggggcaagttcctaagcatgcaaaaacagatcaaagctcactgcaaccaagtccaagaggttgccctgaccctgctccacctcagcagtcaggtagaatcttgtcaaggatgggaacaaaggtggtttcaaatccctgcgctcccaggtacaagttttgtaatcattagcctccgtttccctacatcagcataaaggagtgaagtcatctgctgagattgccacaaggttggagtaagagcagcatcaacccccagggaacatctggcaaaagtctgaagacatttctggttgtcacaattggggaagaggccagggatgatgtcaaacatcctacaattcaccggacagcccccacaacagagagtcagcccaaaatgtcaacagtgtcgaaggccagagactgtatcagagagaccacaggcgcacaggaagcctgtgtgtctgtcccctctctgtgaccagatgcacccacaggcacccaactgcagggtgtgatcagcctcatatgaccacttgctgagcgcgcccccaacaggcctctgcccacaccagcacctcaccaggaggccctgctgtttcagtctgtttgggttgttacaacacaacaccacagactggaaggctaaagccacaaacacttctcacagctctagaagctgggaagcccgagaccaaggaggcagcagattcagtgtcttgtgagagcccactgcctggtacatagagggccatcttttcactgtgtttaaagctggaaagggccatggaactctctggagtctcctctgaaagtgcaagtgtgagtcacgaagttgtgtccaactctgcaaccctatggactgtaacccacagacttctctgtccatggaattccccaggcaagaacactggagtgggttgccatgcccttgtccaggagatcttcccaacccagggattgaacccgggtctcctgaattgcaggtggattcattaccatctgagctaccagggaagccctttacaaacatgctaatcccatttatgagggctccaccttcatgacctcgtcaccaactcccaaaggtctcacctccaaat

SEQ ID NO: 50424 - DNA, 952 bp, Bovine  19866880989312
  misc_feature (1)..(1): n is a, c, g, or t
naccgctgccttgaagctaccttgaaagaatgggatgatgagccccataagagactcagccagaatggatggggccaaagtcacgcagcatgagaggcaaacaagacaagaacccagggctcaggacccgcccccctaccctaccagcctcacttatcctatggcccagccggctctccatacagcaccattctttatccgtatcagtcagaggacccagcagggcacataatgagagaagagaggaggagcaagaaaggaaatcaaggggaaaaaaaaaaatcactctcagcccgcaagacataggccaccacgcttaagaattacagatttgattttaagatattgtcttcccccttttctccttccacaaagtggtacatggcccatttatatatttaattagaatggattaaaattaataacatcttgagtggttcctgacccttctggagataatgggagacacctggggtgatgtgcaaccaggaagaagaaccgctgacctcatcaacagagcctgcactttctcatgtgcatgtaatcagcacagcccctaatcaccctctgtatattttttttaactaagacaggtatctttatgatgtggaatcgcgtcctgtcccttgggctccagggccaaaggcatgcccttggcaggcagacttgctgaaatctgtcctgtctatgactgccgaccgatacatcactctcagatattttaagattttcttttcctttttaacatatttttactgtattatttttattgtatctccatgggtagctcaaacagtaaagaatctgcctgcaatgtgggagacctggggttcaacccctaggtcaggaagatcccctggagaaggaaatggcaacccactccagtatgcttgcctagagaatcccaggacagaggagtgggcaggctacagtccatagggtcacaaagaga

SEQ ID NO: 50425 - DNA, 1049 bp, Bovine  19866881115112
  misc_feature (1)..(1): n is a, c, g, or t
ntttccctgttgaatccacccagtcagcactgtgtagctggtttaatagtacaccatttatcacctgtgcccctttcttatattacttcctcacttccctactgatatttcctaggatcacctctccaatcagctacatgcgtttcaattttgcctcatgatctgcctctggggtaaccccaatcaaacctgctcagggcttccttttggagtatggcttcattgttgagatcaaatgagatcatgcacgtgaggcatggaatgcacagcaagtgggaatcagtagcagctgctactgctttcacatctaacgtgttcctttgagaggcatggtaactgaagtctggagaggagagggggctttttcagtgctgcttcatggctcagcatgggctcgcttttggctacacccagggtaggtgatgccagaggcagacagagcactggctggctcccttctcgctttcctcaagctgttgcagtatagggtgtgatggggccactattcaggactctcttttgtccacatgggcagggatgcccccaggtgctcacagcttgtgcacaaatctggactgtccaatggagagggtggcattggcacattggtagcgtggggttgcccagatcagaccagagggaggactgggcagggcatcaggagtaagggccccgtgctgccaagactaccttggctggactgcttggtccaaatggcaggaatcttgggtggaagccttgtcaaaatgtcagcttcaaacagactgagggataagacagatgagcattttggagcgacttctgattcagctgaaagttggactggcatctagagtggaaaaaacactcccctcctgctcaactttggtttagatggggcaggtgggaaatggtgacagatggtgacctcctgagaaactccttggaaagaagttgccttactgtgttggacacaattctgggtttggattctggccctggctgtgttcctaagtcagtggcaaaaccctaacacatcaagccagtttcctcctctgtcaggtgggaat

SEQ ID NO: 50426 - DNA, 1318 bp, Bovine  19866881132967
  misc_feature (1)..(1): n is a, c, g, or t
ntgagggcagactccagggacctcccagtcactggcagggggcagcccacattcgtctgcacctgaatctctgtcctcttggtgcagtcaacagcttcctgggtctgaaggcccaaggctgttccagcttaaccctggagctaaaactgaaacacgtggaggctgtgctacttcctgtgtgacgtcattaaacatgtcctgggactttgctggtagtccagtggctaagactctgcactcccaatgcagggggcccaggttcaatccctggtcagggagctagattccacatgccacaactaagagttcgtgtgcttcaactaaagatcgggcatgccacaattaagaccctgtgcagccaaataaataaatacttcaaaataaataaatgcgcccactaacaacatctcagagctgatgtaaaggtagtgagttccctgtcactggaggtatacaagcagatattgatctaccgtatgcacgtcagcagccgggtaccagcagctctcaactaaagccctggacttctcaatcactgaagtccctccaattccaggtgcgctggactctgcgaatttcaaatttgactcccaccactgaggtcaaaaacatccacattctgcccacacaggtctccgacactcagactggttttgcacaaagtggtaaaataacagtttaagtatttcctaggtgtcagaactgtgaggagcaagaacaaattaatcaaccaagaattccttttcaatggttttcaagccagccagtgtctgtcaccaaaccacaggtgaaatgctaataaaattcagcttgtgacaacagcataatgatttaactatggcctgtttttaccaagaaatatatatatataatatttttccaaacatggccttttcaatgtgtgaatttttttttataagaacaggattagaaaatagcagaagtctcctgacaactgcagtgaggtggagtctctactgaatggccttgggaatgatccaagaggcccgtgggcgggtgtgaatgccatcgtccttggatctaacaggggggagtcctgagagaagaggcaactggcaaaacagcagcgatgaagtcatttcacctcttcagcctaatttgaagagacgaggccatgggaactggctccagccttgcctactgactgcaaactgcagcaggagaactgacgtctgcatccctgagggtctgcatccctcacagaccacgtgctgtcccagaggcacaggcgctgccccacagctgcccttcagcctcactgcttgtggccctgcccgggggactgcctcttttctca

SEQ ID NO: 50427 - DNA, 1049 bp, Bovine  19866881185973
  misc_feature (1)..(1): n is a, c, g, or t
ngcattagaaaacatgctcctgcatatgtcagaggagggaaggcaggcttcagaaagcattaactccaacttgtcaggcagcagtaaacctgtttccattagaattactgtgccggagtccccacattcttacttgtcttatggaaatgtttgattttgaagcctggatgcatccacagactttgacatacacctttgccctgttcagatgtccacactggcaacatcactcctgatgtatcagctgggtgtatggatcctacctatgctcccagggcatttcagaggaggtagaactggggaaggagccttggaatagagctaaaatcacccctccagcatttactactttagtagttttccaaggttcagccccttctggccctggtgtctttaactaccaaaggaagaataacaacatgtgacttgtagccctgcaaggattaaccgtgatcactaaggtatgagcacgtgcatgctcagctgtgttcaatctttatgattttataaactatcaccctcggggctcctctgtgcatggaattttccaggcaagaatactggagtgggtagccatttcctcctccaggttatcttcctgacccagggatcgaacacacgtctcttgtgtctcctgcttggcaggcagattctttaccactgcgccatcctacaaggattaaatgtgatcaccaatgtagagtgcccaaaataaggcttagttaaatggccattcattaacattacattaccattggtggtgacgttatttcaaatattaggtgggttactcctggcttggatttttttgtaagtattcataaaaatgtgtacgggcctgtttcgcccctgggctttttctcccctctccaaatggagttccttgccctacagtaatcctaataaattctacagactcccacttacatgacaaatactccactggcttcagcccaaacaaaaactaattgtcccctcgtttgtctgtgagtgcctttgtttcttccagataaacatttcaggctctgttttcttgtccctggcgtttt

SEQ ID NO: 50428 - DNA, 1253 bp, Bovine  19866881196880
  misc_feature (1)..(1): n is a, c, g, or t
naaaaggtaaggtccaggcaaaaagcaatttctatcagggtcatttgttaaagtctgaaagcagttaatctgtgccaagttctgaggcccattcatccacaggcttgccttagctgagtaagacaggttatcagctgatcacctacgagtggtttctcagcttttacttcaagttccaattatactaggagatcttggtgacaagagccagttggagttatccaggtagctgtgcctaatagttctgcctcttgtgcataccctagctagtgccgctgcctcctaatgatgtgttttttaattgcaggcaaatgcaaatcagaccatggcaacctctccagcattgtttcttaatcttggttgcatattagaatcttaatcttggttacatattagaatcacctggagatttaaaaataccaacacctgaagaccacctccagagagtatggcttaatttgttttggtgcatcccgagcattgggatatttaaagtttccccaggtatttctaccatatggccaagtccaagaaccattattctagagcagacataggcaaacttttctgtaaagggccaaatagtaattcttttaggcttttcaggtcttatggtgtctgtcacaattactcaattctgcccacatagtgtgaacatgccatagacatatataaatagatggttatgtctgtgctccaacaaaacttaactcacaaaaataagtagcaggccctagtttgccaaccccttctctagagattccttactcagagtgaggtctggggatcagcaccatggacagtacccaggagcttgttagacatgcagaacctcaggattccacgagcctcccaggtgataacatatgcagagtcaaacttgcaaggcactgctccggagggttcactttgtgaatccatccctgccagcatcacagcactgaggtgatgagtggagactcatcactgtcagcattccccgtgcctgtcacctccatcagcctggctgtctcctagctgccacatttctgtagcatcttctcattggtgacacagacaatctgagtagctgtctacatttgattatggtgtttccaaagggtcaacagagccacacacccagtttctatttttcaaaataaaatgcggagaggatgggggctgtggagccatatgaggggatatgccccttctctcaggaactatccattcatttaaacttgtcaaatgtcatataggttctcaaacacccc

SEQ ID NO: 50429 - DNA, 861 bp, Bovine  19866881257894
  misc_feature (1)..(1): n is a, c, g, or t
natgagctgtctggagtgatcctggggtctccagctgggctttgtagatgctcttaggctcctggcatcattgtcccctcaaggcagctccagagtttggaccttgcccttgctggcccagaggactgcaggggccgtcgtctgtggattgaattgggcaggtggtcccctccctcctcctttgccccccgaatctagctgtagctgcacccttgtggtcttgtggaccagaaggcttatgtagatagatcacactgtggtgaatattggggtgcttggcccaggtccccaccttgagggctcatatccctatccgtcggttgctgagtatatcagttcccagctgcatctctcactgggaattgcctcgtgcagcgttatggtaccctgaggccagtacacgtgataccaagacctgcctccccagctccaaaactttcattggattggctgagacctcagctgctgcattgcaggtcagcttctccctccacccaaccctgccttcttctcttcctttcgagtgtatctcccagaaacgctccccagtaagcctcatgtgtgcaaagttccatcccagagtttcccagcgaacccgctctaggacaccatctttctggcagttctttgctaagaattggcatcttttcagcacctagaaaatcatctcagaacatctgggtccttttacggctggaaattttgcagagaaatgggccctccagctgtggctcatggcccagcgtctgctgttggctcagaaagtccccggatcgtttggagactgttgcggccacctccaatgtgacataaaacaaggagaggcagtgagaagtacatttcattaaaaagccaaatcca

SEQ ID NO: 50430 - DNA, 1186 bp, Bovine  19866881286096
  misc_feature (1)..(1): n is a, c, g, or t
nacatcatttgaggagtccaactgtgcaggttaccgtgtagctaattttgttgggaacaaacagccacacatttaagtggtgggtgttcaggggcttgcagattggcacatatctggatgttcccctttgctttgctgcccattaggaaaatgcaagtcttacaaaagcggtactgtggctcagaacatttttcattagagtaaatttgtctccaaattgactgtaaattatattgcattttgtttgaaagaactttctgaattaaagtagggagccaagtatgcagtactcagtgtgaaacataagttcaattacctacagttacgagcatgttctcctccacgtgtgcagagatggcatctcatatgtgaagggttttcggactggaagctgttttatggatcactcagttttggcattcccaaaatagagatgagaggacagagatggaaagaaaactggctgaggtcacatagcgagttaatggcaaagatggaattggcctaggtaccctgatgttgctttgtgatgagattaaagaaaaaaagaaagtgtttctgaattttcattccacagaatattcagtagttctttctctccagaataatgttagaatagctgtgcattgagaacattctagacagatctagagagaaaatatatctgaagatgtcaaatcccaattcatgacactgaaaattctagaaagggcagcagagctaccacgtgctgcagttttcagtgttgttcaaatgagcagcctaccacagtcctgctttcccatcaagtctgatttcatgaaggctgattttattaggctttggcttaacctgacacaggtgagcattcagatgaacacctaaggcccatctgatgcttgagtctttctcactccctgcagacagtcccttgccacattctgctgatttcacttcctggatctcggctccatgtctcctgctccaagcccaagtccaccactctcattggaaccatttaaatagccgcctatcagtctacttccctcccttgctgacaaaaccgacagtccagtccccagagagcagggagatttgatatttttagctcaaatctaatcactttgacctgttacccccacagacatcctcactgtggcctggtgtaacctggtccaccccagtctctggcctgctcaccctccag

SEQ ID NO: 50431 - DNA, 1260 bp, Bovine  19866881375853
  misc_feature (1)..(1): n is a, c, g, or t
nccggaggctgaccctccacttctgcacggccaggaatgtgttcaccgcataggccgctgttgccaagaagccgaatatctacaagacacaagccgggttagtccgcagggcccctgggcacttacagtgagcgaggtgcattagcctctcctggctataaccccaacacccagaccccactacatgtccagctgtcagaccctagccaagttcatagtcatgtgacccacaaaaaggcagcctcaggactctttcgaagtattctggatctacaaggaaaaagagatcacagaagggcctctcttacagaccttcatgacactggtccctgggagaaataccatgtagacaaaacaccatatagatgaaaaatcagggtctcaagtgtgaccccaaatcaagccacaaggcccagcattccatatcttagcccccagccccactgcctctcatgtgggcagctctggtgggcagcttgagagtgagaagtggtggtgttttaatgattagctaacgaccgatgaacctattgagtgataccttggagagctcatagtttagtattctcaataaaccttaaatcctctcagttataaaagtgctgcatattctttgtaaataccgaacaataaagaaacgcagagcacagagagagacagtcttaccttacctggtcccatcctctgcccccaccccccactgtgctgactgccatgtggtgtccagactgcatcttcttcatgaacaccccacactggcaggcaaggcccttaaaagcaatagccctttcagacatccagggctccgctgggcagagactgaagcagaggtgctcaagacagagtgtgcatctgagagctagttaaaacacactgccaagttggcagctctggggaaggctgagaacgccatctccaacaaactccgggatgatgctgccgttccagggaccacactttaagaaccacagcactgaagggaccggggcctccgctggcccagtgacttcattagcaaaggagaagctgaaggagaagcaataggacacaagcccaggggacagagcagcaaggcacagaaagtgtatgaaccagccttgttttgaccttttgagttcacttaccacggcagcaatttctgctccggttttgtgatttaaagcagccagtacgattgaagcaataaagaaaaagaaagtgctgagtccagtgttgaccaaatcctaaagaataagataaagtcatttgaaaaggatcatt

SEQ ID NO: 50432 - DNA, 748 bp, Bovine  19866881416464
  misc_feature (1)..(1): n is a, c, g, or t
ntcggctgctctggtggggtgaggatgatgagaatggaggatgtggaggaaatgagaggaggctgccgaggcaaactgttgaataaggatgaaggcactggagaagcaaagggaccagtttggaagcttccaggttttatctctggtcttttgactggtcctaggatctcatccacagtttccccatctgctaaacaagagctcctctcgaatgttttctcctagctctgggtatcttggagggtctgttcactccgtccccgggagcttttccaaggtctgtgtctgtttgcttttgctctctcaaagctgcaaaaccctcactggaaagaattttgatttgtggtttaaagataaatctaactttctaaagtctgttcctatgctaagcacgtgagtaccctgcttcttggtgggaggtggtgagtgagggtgctacattattaataaaatacgagtacattaaaaacatgcatcttcatgtaacttatgtaggaaacgtgattgtcggcggagctttttggcaagtggttggaagtgtgtgtttgcctctaacctttgaaagctcttgatcaggctggggtctttgtttccagcaaagcccttgacccctcgtggtttcagttctgtttactcttggcaagcgtttctggttcaaagggagaatctttaaaagctggattgggaaagtctataaaatcttaacgcatctttgacatcaaatagctctttcaaagcagtgatttga

SEQ ID NO: 50433 - DNA, 1098 bp, Bovine  19866881432118
  misc_feature (1)..(1): n is a, c, g, or t
ntatgccttacatatataaagacatacatatatgtcttacatatatatatatatatatatatatgtaagacaaaggggtggttgggaatactgccgaacaaagaaacaacttcatcttgagaatgatctgttgtgtaagtaggatgtggagggcacatatagaatgtttggtaaaacacaggaagttgggaccccaaagcaccattggaaagccttcttgggaacaactacaacacagtctgatatgggaacaatggagtgagtaatgtcagaataagttccaaggaagctaacactcagctgcccatggtgaagacagacatacatgatcagaaagtaaaatccaagctgagtaggaaaaatctgaaaacatgtccccagaccagatccttgcttccctctctccctccccaccccccatccttccttttctttccttcaagactgtgtatcaaacagctgacatatatcagagaaatacaaagcaaaagatgaggtaaggacagagagacaggacgggtataactcacacacggttttagatatttctaaagattaaaagcgagcaattgagagaaaacaatcatcaagggtgtaattagatacaattttctgaagctgaaaggatctaaatatggagatcaaaaatccccactgtattgtttaaaaagataaagaaagatctacacctagaagagcagagtaaatgccaggaaatgaaacaacttagtcagtgtttccacagaaaagcgtgtgacccaagagtgctctgcctaaatggccacttatgggtgaagggaaagaaaaaccctaaacttcaaaaaaaagaaaagaaaaactctatagacaaacacaaaacaaaacaaaaaccatactgaaattgaaaaacttccaaaatgcattaccagtaaaatcttatttgaggaaaaaagagcttgaatacaatctatactcaacaagtaactgacttgaaattagtgactcaaaaatgggaaaaccatggcattaagagtgattgtgagaaaagaaaacaatataaggtcaaaagctacaaatagccttccatttgaatgtatgttccaatgtaattctcaaaaa

SEQ ID NO: 50434 - DNA, 1522 bp, Bovine  19866880366295
  misc_feature (1)..(1): n is a, c, g, or t
ncagacaatcccctggggaagggaatgacaacccactccagattcttgcctggagaataccatgaacagaggagcctgggtgggtacacacagtccatggggctgcacagtcagacatgactgagcagctatcattttcactttcagaatcaatctacatttctgaaactacttgccacttctgatttaaaacacacacacacacacatccaccaagaaacaaagcaaacagtattccatctcttctagagcttctcacaagaaattaattagatactaaaattgggagacactgggaaaattatacccagattattattattggccattacttcacaaaagtttgcattgaattaaaataaaacttttttcctagtaaagagtttggtggtttcctgttattaacttatttacccttagtaatgaagtatacactgagaagcttatggttagacaagttttagcctgaggagttagcagcctaattataatgaagataaacaggcataaacacacgtaagtgctcctctcatcaaaataacctgcaggcagggcctctgctttgcggcttctcaacacctttatcttttaaatatggcgcctaagatggcggagcgttctaggcgtctgtagtgctgggtgactgcacttatgagggtagagtgtggctctgcatttttggagcctgagctttgaacccacagatgggtagtagcgacccttccccactgctcggttgactggaagtgtcaacggcagccagtccacaaacccctagtaggctaggtctgcctaccccaagaaaggagcttgcaccaaaaatgccaaccacccatgtcgctaagcacactgctaggttctactgacattttagaataagacctctagatcaaagcttggccaactttttctgtgaagggccaggtagaaaaatattctaggaagacttccctggtggtccagaggttaagacttcacaattccactgcgggggtgggaggtagggggatgggggggcactgggttggatccctggtagtggaactgagatcccacgtgtcccgcagtggggccaaaaaaaaaaaaaaaaaaaattccaggctttgctgaacagtctctatcacaactagtcaatgctactaaaatggccatagatgacacacctcatatgggtatgacagtgttccaatacaataaaaaaaacaacaacaaaaaacagaagttggtaaaggcaggaaatggaaagtgggttgaatgtggcttgggatgggggagacacagtagtttgccaatctctgctttatgtgaaagaagctgtttgtgatgacgttttggtgtgagttcctcatcttgagtatcgctggactaggcaatctgtggaggccagcagatgggatcccacggcccatccgttgctggggagatcaccgacacaaatgttacaggggagggtggcagcttcagtacacaatagtgtaactgatgggaaaagcggaatccttcaatttttctttcaacaaac

SEQ ID NO: 50435 - DNA, 2388 bp, Bovine  19866880371356
  misc_feature (1)..(1): n is a, c, g, or t
nacattatttaaggagggatgatggtcctttgttagtattggggtaccaagaacttcttttatctgacttttaatcaagagagaggatagacagggctgctgatctgacaggtggcaaataggttgctgctgttctctgctgtttctagagtaagaagctcatggaatttgttcatctacactccaggcagcggcttatgccctagagacatagggatcatagcactgccacattggctgagcctcagaataaatgatacagggaggaaggagcacccaccttcctacactcgtcgagtcacattctgcctcattacctttcttgccagacaagggaaacagacactgagagttcagcgtatttggtcttggagttaaactgcctaagttcaaattctggctctgttgagtatcatctgtgtagcctagagcatgttaatgaacctctctgggctgccctagtttatctgtaaatgggggtattgcctgtgactccctcataggattgtggggtctaataaaaagggaatggggaatgcttaataaatgttagccatcaataactcttattttttaaaattcagctgatctacattgataagaccgagcatctattgcacacatacccttgtagacttaaaaagtattcacaacctaaatgttatgttttatttggcaggaatttttaggacttcaaacccaggaggcagtagctcaagtaaccctgagagaactggtctggggaggcacagccaggttcacaaaagttttacaacaaagggctggtagtctgaacaaagggcaggtagtcaagagattattgtgaattaaaaggaaaataagttaaggaatttagcactgttctttgtatgggaagatgcaagagtctgggctcactaaaatcatttatttgatatgcacctcagctctctggggtcagcatcctgtgttttcacatcctgagtgtcctcagggctcaccgtagggggaagctgcagtcggatggctactagatggcaggtattcttttccttcccgagttcccccagggctcactggctgatgaccatgacagcctttgtgtactgatatggcaggcagtattccctttcttgcccttactctacggggtgactggggactataaatcatcaaggaagagggatgtaactggagacggtgtcacagtgatcagagttacagctcagttttatttagaaaataaaggaaaatacatcctcgaggcatgagggcatgccgatccaagaggagagagagagacccccggccctttggctcctctttttgtatgttttttctcctccccctgggccttccctatgtaaactgggctagccaggagagctgtttgttctacctgaggtcctcactctgaggtcctgggaccttccctggttctatttttgagggcttttcccttccttgtctcttagccacccccattctggactctgtcctattctaacagattcaaagactcttgagctgggacttgaaagatgggtagaggatagatagggaggtggggggtagattctaggtgtgggaggcaaggtaagcaaagtcacggagcatgaaagtgggggacgttgcaggggaaccagcatttattctggttctgctagagggaagggaacccaggaggaagaggcacgatgtgagaaaaggctgtgtttgagccagcacataaaatgactttttgatgaaagtctgggctgcccaggtggcgctagttggaagaacctgcctaccaacgcaggagatataaaagacaggttcgctctccgggtcaggaagatcccctggaggagggcatggcaacccactccagtattcttccctggagattcccattgacagtggagactggcaggctacaatccatgagatcgcagagtcagacatgactgaagcgactgataattaactccttgccaagaaaaggtgattcagattttattccttgtttgattatgagaagactctatgcagcccacaccttcagtctaccctggccatttcccaccttacatggattggtttctgattctgcatgtgcattgcttcagtctatcttcttattcctagagaattatggttgctatagaaaccaaatacttggaaggaaaacctagagcttgtcaaggatataaattcgaaggcaaaacctatggcattcaatcaaataaatacccatctgcgtggcatgctatgaagctttaattacagtgctcaagatcaaagtaacattactcaagagtggagaagccaaatgtaaatgaaggtcttaacctgagctcagccaagcattgcacagtacaatcacctgatgacccctaagtatctgtgtaagcaggagagtgtgga

SEQ ID NO: 50436 - DNA, 1763 bp, Bovine  19866880378782
  misc_feature (1)..(1): n is a, c, g, or t
ntgagcgaaatttcctgcctgggcaactgagaagcattatgtgttttattttaaatgcactgtacatccccaggcagccctgccctctgttctaaatccattaaatcgattcctttggccctttatttttatgcattagaaaggggcctgggagagaggtggggcttccctgatgctcaaacaataaagagtccacctgcaaagcaggagacctgggttcaattcctgggtcaggaagaactcctggagaaggaaaaggctacccactccagtattcttgcctggagaatcccatggacagaggagcctggcagggtacagtccatggggtcccaaagagacacgacggagtaacaccactttgggagagaggtagggaaagaagctaaaaaaagaagattctccgtaaacagatgagccttgagggtcccttgtgctcctatgctcttttctttctcctctcttgaatgtgtcaccacgtctcatcaaacggcaagcttgtatctggtctcctcaccccgaggaggaaggggctgccttaactgagctgaaatatataatgtcaaaagagttggcaataattaaaggacaaaaaagacatctgtgtcttcagaaactaacacatatgcatactgcttttaatttcaaactaataacaatgtcatgttaatataattaatgtctcatctattaggtctagtgggaaatgaactgttctacataattgattctcccagattcctagagtctagcatttggggactcaaattctttcaacatttttcatcggtatggaactctttctaaatatatggtatcattctgtatctttctaaatacaactcacccaatcatttatttataggtttccctggttgctcagtggtaaagaacgcacctgccaatgggggagactcgggttcaatctctgggttgggaagattccctggagaaggaaatggcaactcactccagtattattgctcgggaaatcccatggacagaggagcctggggggctacagtccatggggtcggaaagagttggtgactgtttagtgactaaacagcgacagcaacagaggtcttccatgctctgattgtttacccccttctctccccaaaccctggcaactgttggtcgtttcactgtctctgtactttcgtcttttcttgcggctggcatcattacgttatgtagactcttcagattggcttctttagctttttcttaggcgcttaaaatttcctccacgtcttcatgacttgatagctcacgttgcctaatattccattgtctgcgtggaccacagtttatcctctcaccttctgagagacactctggtctgcttccacatttcagccgttttgggtaaagattctgtaaacatccctgtgcaggtgtttgtgtggagctgagttttcagctctttctggcagttacccgaggcggaattactgggtcacttggtacgagtaggtttggtttcggaagacaccagcatgccgtggctgtaccggtttgaatcccaccatcagggaatgagcgttcctgtggctcttcgtccttgccagcgtttggcgttgtcacggttttggattttggccacttgaatggatgtgtagtagtatcttgctgctgttttatttttgcttgcttttgaatactctttgcaatatggattcatgaatttatctggctttgttcctcatactccccagcctgcagcatcggtagttgtcatgaaggatttatccgtgtct

SEQ ID NO: 50437 - DNA, 2762 bp, Bovine  19866880498144
  misc_feature (1)..(1): n is a, c, g, or t
ncgttttgttttggctgtgcctgtggcgtgctggaccttggttcccggaacagggatcgaacctgtgtcccttgcattgggagctcggagtcttagccactggaccaccaggaaagtcccctaatattctcacaaaattaggtgctgtcccattcaagtaacactgtattgaccaaagaagattgacattaaccatattcaggctaaaatgtttttggaaacaaccctatcacaagtgaaaaggtttaaagatatatcctggaatggaagacttcttgtgtagataaggaaggctttaaaggaattgaaaatatgctgtaaaaaattcttaaacatgtaaacgagtcaaaaataaatgaagatgcatgatgctaagttgcttcagtcctgtctgactctttgggaccccatggactgtagcccaccagactcctctgtccaggggattctcaggcaagaacactggagtgggttgccatgccctcctccaggggatcttcctgacccagggatcaaacccacatctcttgtgtctcctgcattggcaggcgggttctttaccactagtgccacctgggaagcccaaaggaagatatgtgataccaaatagaaaaattacaatatctgtaatgttagaagtaatgacagaaagagtcaaaggtatttacttccagcagtagataatactgagagataggaaatattaatacttaagtcctcataaatagttcgtggcttttaaaaacatctggcgggccataagtctggaggcttccctcatggtccagcgtgcaatacaagggacgctgggttgatcacttgtcggggaagatcccacatgctgcggggcaactgaaactactgagcttgcgctacagagcctgtgctctacgagagaagccagcgaaacgagaagctcacacactaccgagtaacccctgcttgctagagaaagcccgcacgcagcaatgacgatccagcacagccaaaaagaaataaattattttgaaattctatatttttttaaagtaagtctgatagggccccggggtaaatttgactgctttttttttttttttcctctctcttaaaaatggagaaaactgaagcaaaatttggagaagtcacttcgtaaaataagaaatgggtcccctgctgaccttctgaagtcacaggtactaaaaccaagcttcctcctggattaaccaggattccaatctttttttccttaaaaatgcaagacctggaagaggagccctgtcagatttccattcagcaaacaactcggggtttactaaaacttatactggaaacaacctcaaaagtgaactttgatggaaggtgggtttttttttgttttaagtttctaagcaaaaacgcaggctgagtttcttttgttttgttttttacttactctatcacaagtgccatggtaagtttaagcatcttcaggtttgagtcggtagaataaaatgtgcttgtcttatggggggtctgttgggtaaatcctcaggagatttgtgaaagaaggtacctggtcattaactgttggctcttcatctgtctctgtcctaacctccacaggcatccagggtctacttggctgctctttaaaagctcaaagccatagcatagcaatcaggtctacccagatctctccccttcttagaacgcctatccttcagaactgtatatatacctcctctttactcccaaacctaaacctaatctttaggtggcaagtatgaggccaaaaaaaaaaagcaccaccacattcatactaaagtgtcaatgactaatagcgatgcttagcaagtcatctcttagaaggggtagcttagtcttaaagagctgcttattggccaaataagtatattttccatttttttctgcaaacatgggtacactttattctttcccgcctgagagttttataagacttagttattttcagtagaaacggtagttgggatgacactgagaaaagttgttgagttggaggtgacagtttcagtacgttggtgaaggggaagaggtaagggaaagtttgagcagggaaggttttggttccttgagcttcattttctcttccttatttttatgctgatcagagctttttttccttcctcatcaacagactttttagtccttcttggccttatttcttttgctcctgctaacaagctagaagctgaattatgtactcattctgaaaatgttcctttaggctcttacttctggactttctaaccagtgcagagagtaagtaggtactgtgctgtatgcaaatgtaggcatatttgtccgtgtgggcaaaagggggaggggcatttcgcaaaatgcctttagaacaaaaccaaacttttgagatggaatattttatagcttcatgacaataaagtcaaacttttcagaaacaaaaagcacagaggaatacttatctataaaatacattggggaaaaagaaaaccacacaccaaacaaaacagaggactaatacttcaacagtgagttcacctcaagcatttcatgaatttcacatgacccacccactttttctctgtacctctgaagagtaccatatcagcggcaataacgctctgttgttctagtgccatatttacatatccacgtagccatggcattcctgagtgcagaatatcgtactgttacccttgtttgtggtttctaaatgaggttaatttttgttcctttaccctcctcacttaatctcatgccaccccctgcctctcttcaatcag

SEQ ID NO: 50438 - DNA, 791 bp, Bovine  19866880520689
  misc_feature (1)..(1): n is a, c, g, or t
ntccggagaaggcaatggcaccccactccggtacttttgcctggaaaatcccatggacggaggagcctggtgggctgcagtgcatggggttgcccaagagtcggacctgactgagcgacttcactttcacttttcactttcatgcattggagaaggaaatggcaacccactccagtgttcttgcctggagaatcccagggacaggggagcctggtgggctgccgtctatggggtcgcacaaggttggacacgactgaagcgacttagcagcagcagcagcagtatgatctttacaaatgtggtaactggagggaggcctgatgtaatgtgctcatggccagtgtccatcaacctggtgaagaaagagcagtccctgggatgttttcagttgcatatcctttcatcaagctcaagatggaaagacatttggccgacatgcatagaatgcagttaattagtaacagaaggacaatgtgagattcataaagcagctggtggggcatcttatctcttaagaatatatatttttagtccatttaaaagtttaaaggtcaaacactgaagggaatagaagagcataatgttattgtaatggtttgctttattatgtgtaacttggaatgattctgtgcccttggataaactaattcatgatggaagtgatttacctttagctacagtagagtgtaggcgaaagtctgtgtaaagtatagtgcatgtcacagagtaggacacactatagtatgttttccgaaaacacttggggctggtacagttgcatctctttccta

SEQ ID NO: 50439 - DNA, 1273 bp, Bovine  19866880535677
  misc_feature (1)..(1): n is a, c, g, or t
naaaaatatatatatttctccgaaatgaccttgatctaaccctttctataaactagatccagctgcagctagagtatgtctaatagagcgcgagcagggtggtgatgttttgacataagaaccctggtgtccctagtggctcgcggtgggaaatttgccagtcttcaacatctgattcctctctgcaggcagccttcctttctgctgaagtggtgtaagacctgcaaattagaacactaagtctttccctgacatctagtgtcaatgtgtgaaataacagaccaggaaccagccacacttgagaatgaagatactcatcacggagcactccttaagggttggctcttggccccagccctgaaggatccatcaagaagcagctggcagcttcacacctcacaggtagccctaagacagaaggatcgaggtgggatccgaaacatggaatgcattaatttccttcttgtaaaatatgcctgactgacccaagactgacatagcatcctttaggtttacttatcttctggctggaaaaaaaaaaaaaaatcagaaattatggcttcggtcttcataaactgttttcttattgcaggtcattttactctgagtcctctccaactcattctctaccttcacctgacctttttactcttaatttctctgctatatggaatttttacacaatgtacaatataggtcaacggatgtcaatggagaaaaagatgggtgggaatagtttctgacttctgtttcttgacacttgctatctagcaccaggaatgatgtactgtattttttagcagagggatcattggccccttatgttttagttcttcagcctccttggctgatgacatcattgatgtaatagagaaggtatcatctctgctctgaaaatgactgccaggaccattctgtcaaaaatgctgcaggacccaaggctcctgtactgcagtgaccataaggaaattagggtcatctgggaaatagacacagccagtttggggagcagggaaaaagggaagcttcctgagaatcaaaaccagcatcaagagaagaatgagaggctgtgagtaactagtccgtgccctcctccaggcagcctactgaaatcacttcagtacagtggacatgtgatcacgggtctctttagattacatgaaactcagtaacccataacagacttcaacaatattccctgccaggaaaccccctgcaaatatagcctgtatccctgacgcttcaaggaagtctatttctccttcatcttaag

SEQ ID NO: 50440 - DNA, 1053 bp, Bovine  19866880578532
  misc_feature (1)..(1): n is a, c, g, or t
nctgaccagagccgtctaaaatacatgtttcttcctcaatgtcttctaccacgcttctgaaaaaaggagacttcagtcgaaagctgttatcctgaaaaacaaaagatttttttccccttgctatatgctatgctatgctatgctaagtcacttcagtcgtgtccgactctgtgtgaccccatagacggtagcctaccaggctcccctgtccctgggattctccagggaagaacactggagtgggttgccatttccttctccaatgcatgaaagtgaaaagtgaaagtgaagttgctcagttgtgtccgactcaggcaggtattagaacttttttgaaaaatagtgtctccttttaaattgctataaccttgtgagtacattataaaacaaacataaacttacacattataaaacatatacaaacctacaaaggtacacatactgcctttaactatcctcaaaggaaaaaatgaacaatctggtttgtcaccaaggtcctctcaaccctaaagttctgatttggggtgaggtttcacatgaatattagagcttccctggtggctcagatgctaaagaatttgcctgcaatgtgggaaacctgggtttgatccctgggtcaggaagataggaatggcaacccactccagtattcttgcctggagaatcccatggacagaggagcctggcaggttcatgggatcgcaaaagagtcagacaggactgagctacgaacacttctacatgaatactatggcagagtccaaacgtaaaatgtattcattttctagagacttgctgaaaatataaaactacggaggagaggagaatcttttccactccccacctcaccctcagtcctttgaattccactcacatcaatgaaatggacacagaagccacagattaactagaatgtgatcaaatctctacttcattttgtcagtataagctcaccatgctaatttcctgaacatccttggatgaatttaagaaatcatggggacttccctggtggtcaagtggttacgattttgcgggaatgcaggtttgaag

SEQ ID NO: 50441 - DNA, 1507 bp, Bovine  19866880606290
  misc_feature (1)..(1): n is a, c, g, or t
natcaagtccagatgaaggtatgtgctagagaccccgcggtttcgtggctgaaatttggctcagaggatatgataccttctgttttccaggccattcagagattttgtcttggcttacatgctggttaagggcttttgatttgtcacaggtccagaaaagatgcctaggtagttctgtaaaatgcataattcaccacagtaactgcctattgaagaaaaatgagatggacattgtatacagtgataatgaataaaacaaagcactccctgctgaaacagatttttttttctttgaatcctggaaagagggaaaaaataatattactgacactagccagatttcatattgtcactacaatcaaatcctgcttcatgcttttcagctgcttattctgtgtccatgttcacaaaggtaattggctgtggctgagggagcctgagtgggctagcatgctgtttctttgtgctgtgtgatcgtcttccttctcatgtccctgataccaggattgcttgtgattgttttcagctttctgttagggatggtaggctgtccacccaatctcgtatctttcagaatagctaccaagaaggctcccaggaagttctcaaaggaatcttccagagttataggctaaaagaatctgccatgcactcaaatcttgatccttttggttatttctacccagcacaaagagaggaactagcaaatttacattttattttgtctttatttaacaaatacttataaagttcttgctatgtgtaaggcatcattctaagcacactcagttatttaatctgtataataaccttctgtgggagttattattagtacccacattttggagatgaagaaactaaggcacagagaagttaaggaactttcccaaggtcacacagctatcaaataggagaaatggggtttagactgaaaaaacttgacatcagagtccatgctgttaatcactgaactatgttgcttccctgcttccattattttaaatgatgtcaacagttgatttggctacaaattgtgttcagctgacactactagaacatttaattggcttgcctggctaaaacagatccccagtgcagtctgtatttaattttgaattatcccactagtcacattctgtacccccaaataactcagtaagtaattgcctgttcttctcttcccttgtgctgtatagatatgtggtagtaaaacactgtgttgctatggtgaccaaatgatatctaaaaggaaaaaagaaatctaaaattacatcatggttgatttttttttttttttaatcaaacccagaaacattcttccatcctcaggacctagtaacaagaccagcctaaccatattatctttaacagtacttacctggttttcaaaataaaataaataaattaaaaacttataaaattataaacataaactatgttttatcaaactgactagagttattgctttaaaataacattatcatactttaaaatagggaatagacct

SEQ ID NO: 50442 - DNA, 1664 bp, Bovine  19866880629453
  misc_feature (1)..(1): n is a, c, g, or t
naagactgagggcgcctgaccgtacttctatctgttgatgttctagaaagctaagtacaggttcctactagtttggcatttttctcagctgtggcctgatgcacttgcactccatttgtgatgagcccctcgttgagcatgaaagctggtttcctttttcctgccagaaatcctggctctctcatttgccatattttctgggtctgttggactcagctcagaaacgccccagcagagtctgtctctagggaaaagcagcccccaagaaagggcgatgaaagacagtgtctgtctctgattcttcctggcagccatgtgcaggtgaagatgtagaaaagggcaagcccacggctcacacgcaacctgattgtgtagcttagcaactttccacaagcacttgagctggtgatgcacttgcacttcaaggagacttcctcctggcccccgctgggagaggcagatgggggtcatttacctcaataatgaggtaagtgtcctacttgctgagtctggaaaggtgggtggcaagagtggtggcacccatttttttctgagaacacagtttgtctctttggctccatttcccgctggtagcctccctagacaggacagtcctggacttcaaggtcatggctaaagccctgtgaatcaaagagcactcaacagaaggtaaccagcaacactttcagtgcagttttcccagaaaacagcatcagtggcttttgcatagcctggaaattcagatttagttcagatattccggggaaatggaaagaagggtgaatcaatttagataggagttgtcatggaaaatattgtctaagtgacttatgaacagaatcagttttgacgggactcccctggtagtccagcggtttacacttcgccttccagttcaggagatgccagttcaatccctggtcagggaaccaagatcccacatgccccgtggccaaaaaaccaaaacatgaaacagaaaaagtattgtaacaaatttaataaagattttaaaaacaaaccacatcaaaaaaagtcttaaaaaaaaaaaagaatgggttttgacatctctttattgttgttgtttagaagattctaagtaagaaagatttgaatactacttaaatttcatatttaatttataaaaggtgctaccaaaaaaaaaaaaaaaaccccaacatctcaaaaatgtcttagtcatttatctggactgataaacattaattgtaggagttatgtaatctcctggagaaggcaatggcaccccactccagtactcttgcctggaaaatcccatagacggaggagcctggaaggctgcagtcaagggggtcgctgagggtcggacacgactgagcaacttcactttcacttttcactttcatgctttggagaaggaaatggcaacccactccagtgttcttgcctggagaatcccagggatggcggagcctggtgggctgccatctatggggtctcacagagtcggacacgactgaagtgacttagcttagcttagtttatgtaatctccagtatgaaatataaaaccaaaataaagatatcagtgaacactccagcacttttccagttggttcctcaagattccttttatcatggtccctaaaatatcagatactgtctattagtgtaaacttaaactgaaga

SEQ ID NO: 50443 - DNA, 977 bp, Bovine  19866880669520
  misc_feature (1)..(1): n is a, c, g, or t
nctgcttcgctgagggctgcccccctccaccagatggtccttgacagaccccttcaagaggaggttctgcctgctggttccaggtcacttcctcctgtgcccacccccagtggcctccttcccaatgctgccccagtacagggcagccaggagaaatgccaggcgtccctgtgcaaggtagcacttgcgtaccagtggaggaaggaggccttccttttgtgggaggcctggaattcttccttgacaacagttcttagatccttgcttagttacaggagatccccctcccacttttcaagttctctcaagagctgctcccacacaggcccagcccgcctgctttcagcctgccactggcacctcctactgaggctgcagaatcaactctcatcgagggccctttgaacacacacacacacacacacagaatgaccccacaaggccagtggagagaagcactccacgtggggggtccaggaggaaccagtgtgatgacagtggtggcgggcggtgttggatccgcacaaaacgacacaaaactagggcatcccacctagagatgatcatcctaagtgaagtaagtcagaaagagaaagaaaagtaccatatgatatcacttacacagagagtctaaaatacgacacaaaagaactgactgacaagcagaaacagactcatagacacagaaaacacacttctggttactgaaggggtaagggggtggggggaatttaggagttccagattagcagataaaactactatatataaaatagataacaagattttactgtacagcacaggaaaccatatcataatggagaagaaaatgaaaaagaatacatatgtggagatatatataaatatatatattaggctcctcaggtggctcagtggtaaagaattcagtggctaatgcactagccacaggagatgcagttttaatccctggatctggaagatcccctggaggagga

SEQ ID NO: 50444 - DNA, 891 bp, Bovine  19866880675555
  misc_feature (1)..(1): n is a, c, g, or t
nattatctttttgctctctgcctcttagtctgggaacttcaagggggggcgggaatctgagttgaattaaactacaggaattcctttcctgggatttttttttccccctccgacccagctgcagttcattatcggggtttctctcctcttgcatcctcagctttctaacccctgcctccccactactccgcaaaccccacccccgaggatttcaatcaccgaacccagcgcgctctgcctcagtgcgcctcacttaccccgatgcctcggcttcggcgcgtgaacttggcgctgcttcgcgcgcgcggagggagaactgtagcccctataggttctgggagagcccgtgggcagggatcgcgccctcgcggcgccgagcagttataaaggcggcagagggaggagggagtgagcagagggacaaggggcgggagagggtcagggggagaggacacgcctattccagttccacggcactgcgcgctgttatgaaaataaagtccccgggccagagcatgagccaaaagccgcctgacgtcagcgccacagtcacccttggaatgggtggtggcggcggtggtggtggtggtgggaagggggagagccagagcacccactccgctccgcgtgcggtgcatcacctggtcgggacgtcccagggcatagggtaaaggaaggggccagagagcagatgcttcctatccgtttggccagctgtcacctccaggagagagccacccccgccctcccactgggcactccagtctgcccaggacacgggctggacagttcgcaacatcccatgtgattcctgggtaccctgggaagccaggccggggaaaggaagaactggccagcgcctgggtgctccgcagtggcagtcaaggcgga

SEQ ID NO: 50445 - DNA, 4504 bp, Bovine  19866880751657
  misc_feature (1)..(1): n is a, c, g, or t
ngaaacatacttcttggattgcggcttctggcttttgtgaggccatttatctagtcttaagtgggagatacactagacctacacctgaactaggaacaattgtgaatgctttatgagtttacaggagaaaagataaatgttgtttaatgtgacttgctggattattttaaataaagaacaatttgaataataaggtcaatcccttgtataacatttggactatcccaagttaggaactgaattctatacatttgtctctttaggcatacacataacctgtttatttctaactcagaattctaagcatagcaattctgaatactgtatttctatgggggggttcaggtagaaatactgactttcaatgtgcagtaatgcaaattctgttaagaaaagaggtagcatagagaagctccagtataattccatgaaattgaagctctttcctggcctaatgtccacagcttaagacatgtttacttcttttattctaggataagaatcaagttaattctagtttttccatgtaaggctcagagaaattcaactctgttaattctaacactggcccctttcagaaaattagtttatcaggaaagttggacatgtatttgaagaaattcttaaaagagttagtcagatggtgacttaatatcatctctcttttcttagtgaataataagaataataataacagcaacaacagaaccagctaattatttatcatgagccatgatctcatttaaccctcctatccaaccagagaaaaacttaactgtatttttctcatttattgaatagactccttggaggtttagcctgacttggtaaaagaaattattgtatttttaataaaacattcatcacactggtaaaaaaaaaatatcgggagtggggtgtgatgtattatgtttctcagcaaattatggtggctcagacggtaaagattccacctgcagtgcaggagacctgggttggatccctcggtcaagaagatcccctggaggagggcatggcaacccactctagtattcttgcctggagaatccccatggacagaggagcctgacgggctacaatccatggggtcgaaaacagttggacacgactgagcacatccaaccataagacaggtactgttattaacattcctgctttacagacaaggaaacttagggagaagtaatatgcccacaatcacaccactagttagcataggagctaggacttgggactatttagtctgaccccagagcaggtacactatactattctatatcataaataatggattcatttaaaataacttattaatttaatatgactgatgtgattcagtactataggcctttgacaaaagaaatcagaaagaccgctttaaatcatttgagagcaaaaaaagaccaaattattcattctttttagaatgaccgcacatgtacatcatagcttaatgataaaataataaaaattatttcataaggaatcataatctgaaatattaatactataaaatgctatgtaatatactaattctattaaaaatatatttataatcaccaaacttattcccagcctttttgaaaaaacagttgtcttccatccaaacccataaaatcccacaaatccataatatttgtgtaactggggtcatattttgaaaataacttacgtgattttttttttctcctctgcctgcctggggaagcagttggccttggggatagagaatgtggcactcttcagagttaccaaagtgatgggaaaaaaaaggaataaatattcagcttccaaaatttaaaacaggagtgtacagcaagacaataggcttgaaatccaagctactgttttgaaagccattctcaaaattcctttatttgtcatcaaccaaatatagaagactttgctcagattgtctggtaccatagaataggccttcagactggggcaggcaaacattttccaaagggtcccagagtctgtagccagttctatgggtaataatttttagatccttaacttccacaaactgatcttcctgtgaactgctgcagtcgaaataccatgctggttcttgattcccatctagaagtttttcttcccttttaccacagactggtgaacctctcacccaccttacctcaaatcctaccatggtgaattgcttggattttaaaaagcccctgggagccaagcaaggaaacaactggaaacactgaggatgctattgagatattagttaacttgagttaacacatccttttaaaaaacaagagctctccaactactttaaacaaagctgaaagcaaaccactatccaattgtccactgagagattcattaaaacaagttctcttaaaggaaagctctatttacaaaagaatgccagctaataaatgcagaatataatattttgaacaccatttttgcaggccccagtgtaataaatgattcaggcaaggaccacaacagatattcaaactatgagatgaaaagttgttgggaacaggttgtttgtagattatttataaactttcaatggtgagactgggagagggggtcatcgtcttaaccaagtgaccaaatttagcatcactagcaatggtgggtcacagtccataggtgcgcagagtcggacgtgactgagcacacttaaaacgggacaccctgaaattagtgcctaatgtaaagcaatgtaacctacccaacattactaatgttctttctaaaaacatttatctgaatataatcaaacctctatacagtgtgcctctcagggaggggagaggggtggggaaagtagtagttggaaaaacaaatcaaagacattataagaaaaaaatcaaccaaattgagaatatagaatattctgcaaaagaactagtctggacttagcagaaggtcattgttttaaaataagaagggtgagctttgcacagattaaagagactaaagaaaaccaattgcaaagcacataatttgatgagatgctgactgaggagggagagttaaaatacatagttaaaatatataaatagtttatatatatatataaatatataaagtagctctaaaatattttggggacagttggggaaatttgtcttgtgatttgtattagatggtgtcatgaaatcattatttctattaggtgtgagaaaggaattgtagttaaccagtggattttcttattcttaggagacgttgaagaagttaaggatgaaaggtcaagatgaattcaagttacccacatgtggttaaacaagaaaaaacacgtacataaaaaatcagaaagggaaagtaacaacaggcgaatctagctgaggagtctgtgggtgtttactgtactgtactttcaactctgtcgtctgaatgaaaatggaaagtaataaattctgctctgtggtggacaaggacacgccacacagagagtaagagtctttccctctagatctcaggttcagagacaaagagataaaggagaataaagcagccagtcactggacctgactccttctagaccaaagaaggatatgagagtattcattttctcttggtgactctttcaaattactgcaaacaatggcttcaaaaaacacaaatctattgtcttatggtattgtaggtcagaaatccaacatgggtcttagggctcagattatggtgacagcaaggctgtgttctcttctggagactacagagagagaatctgtttccatcctttggcttgtaattcccttactccatcttcaaaaccaaccatcttgtagctctttaactattactccagtcacagagtaatggtaactttagccattccagagtcactccctgtgacttcgacctcagattggaaagtcactagggttggatccacgagataatccaggataatctcctctctcaaggccttatcttagtcatatctacaaagtcccttttaccctggaaggtaacatattcacagggtctgagtactagggtgaaatatctataggtgtcctaactctgcataccacaataagttacctccaggttgagaggagcactcagggcaaaagatctctgcttttgctcccctctggagacagctgccaaggcccctcacacctcatcctgaacttcgcacggccatttgggccaatggcaaattttctacagtgtacacaggcatacagagcagctgaccatcccaagcgtttcctgttcctttgaagcatggatgctgaactaacagccatagggcctgctgtggtcaggtgaagtgacttgatagcaagagccaaggagaagcagtctctaaaggggagaggctgttcctccctgggagatttgcctgaagccaaaaatgggccatgaattcgtgagatccaggcttcagcatcacaggccagcaggttccccagtgatcaggccagcaaggggcatcatgcgagaaccctgccagtgcacacactaggtccagaatgaagccagggaataccccttactcatgagtccacaa

SEQ ID NO: 50446 - DNA, 1210 bp, Bovine  19866880774083
  misc_feature (1)..(1): n is a, c, g, or t
nccctgtcctcgccccgtgggttctgagccatgatggctttgacctacctggggtaaaccctagagaagcagaattcaaaggaacatttgcaaaaatgattgacaggaggagaacagcaaagaccacaactcatttggaagagggatcttatcaagagagttgggggaaaggattgaatgcttcactacacaattatgtgaggcttgaagaagggaggggagaagaaaagccaatgtagacacaagcatacaccctcccctgtgcttaaggtgcccttcccagtaatagaacaaaactaatccaaggaaagtcaaatcttccttttgcatacaaaggtgaatgtcagacatgggtcgggcttctgttttctatttaaacctttctcttccttctgagcttttgtctctaacatgccttaggctgaactcgttgagagttaagagagagaatcctagtgtcagaatccccaggaaggaagccgatgggcgttctccacagttagagtcagacagacccaagacctcaagggaatgctttccttgttagtgcaggctggtaccctgcctggctgcgggaaggtcagatcagctctcccctctcactgacttcttgcccttggagtcttggcttctaaaaaagagggagcccgcagtgcgagcatggaggcgcgttaactccggtgatgcttcaggaagggccatggagcctcctacttgggcttctccctttgcaacctggtccccggctcccttcaatttgcactaccttcttagtaactctgccagttgaaggagagccctggttttcaggctgtagttgatacagtgtttcccatattctgccattgctcagggccgaagcttattccttggcatcaattgggaaagtaacaggcttcctgaacccccatcacagcagccgctgcatcacatgggggccgggactcggcaggcggtattcaacccataataactccctgttcttttcccaattatcccaaaccaataggtctaacgccggctccatgttttgcctttgcaatttagatgccacaggtagcttcctgtttggatggttgagaaaggaaaataataagcttgctttgctcgggccgctgcggtgggtgttccagcgtcctggggcttcacagcctgggtctatcagacccatttaatgccctttctttccaatcacaaatgcaaacccttc

SEQ ID NO: 50447 - DNA, 2022 bp, Bovine  19866880791839
  misc_feature (1)..(1): n is a, c, g, or t
ncaccaccaccaccaccaccaccaccaccactgatgcgctgcgggggccttcttctgtcccttcctcctgcagctttacaagtgtgtccgacccccgccatacacacacacccccacccacacacacacataccctcctggaaaggggacaagggaggggcttccctcgtgatccagtggttaagactccacacttccactgcaggggaagcatgtttgatccctctccagggaactaagatcccacaagctgtggggtgtggccaaataagaaaaagaaatgggacaagacagcctgaggagttgttgagtctaggtctcacctgattgatggcatgacttttctgattggacctaaaagtgctgcacatctgtttactcattcagtacaccaagaaactatgctaggtgctaggaaaaccaatgaaaagtaaggccagtaaaagggtaaatgtgtaaataagctgtctgccatattataatgaaattctaaaataattataattgacagataaggagctaagtggcagagaaaaacagggacccaattttgcttggaaaagggaagaaaaggaaaggcttcacaaaggagaccaaggtgtaagccagggacctggaggaaaggtcccttcttcaggaagacaggggtttaaaaaagaaaaaaaagtcccaaacattccaagggagagagcgagcatgtggaataacttgggggtcatccttctagggctgaccttttgggggccttttccccttcagttcagttcagttgctcagtcatgtccgactctttgagaccccatggactgcagcacaccaggcctccctgtccatcatcaactcccggagcttacccaaacttatgtccattgagtcagtgatgccatccaaccatctcatcctctgtcatccccttctcctcctgccttcaatctttcccagcatcagagtcttttccaatgagtcagctcttagcatcaggtggccaaagtattggagtttcagcttcaacatcagtccttccaatgaacactcaggactgatctcctttaggatggactggttggatctccttctagtccaagagactcttagaggtatagttttctgcagaccatactgcccagaccatacagtctctaaatgccctacaatcaaactgacctacatttttcctgtggttacaatgagaaattacattttccccattcatgggctgaaatgtagtcaccccggtggatgagaacattaacatatgcagaatggctatggttccctctttcatagagcattttgttactccttttcccggtttgttttgctttagagccatgctggatgttcccagggagctttacaaaatgttgatgctggggtccttccctagggattcagatttaattgctctggggtgcagcctgggcatcaggaggtttcaagagttccccaggtgatccccatgtgcagcccggattaacaatcactgctttagaattgcttccacatttctgtcttctcccattaactatggggtcctgggaaaagggcgttattctttgtctatgctccacagcttcctctgaagttctttacattaataatcgcttattagctattgaatgaattgacttcagaaagacagagagctgaaatacaggcctcctactctaggtggctctgctaggagaattaaaagcagagatacaaaatcactgtgtgttctcagagagctggaacgctggcgaccatggtgacagggggaaacacagctcctgacaagagcagggcaggtgaaactgaagtcacccaggtcaactctcgtttaagggcgagtaaaggcagtttaggcaacctcagacagcctcctgtacccactcgcagaaaacatggtctgccatgttataactaactaaattctagaattctaaagtaaatgttaagaaagctctcccctgctccattaatttggaaataaatatatctttaagggagtatttctgaaatacagaggctacgtaatta

SEQ ID NO: 50448 - DNA, 1613 bp, Bovine  19866880846468
  misc_feature (1)..(1): n is a, c, g, or t
ntgtgcgactctgtgcaaccccatgggacggaacccaccaggctcccccgtccctgggattctccaggcaagaacactggagtgggttgccatttccttctccaatgcatgaaagtgaaaagggaaagtgaaatcgctcagttgtgtccaactcctatcgaccccatggactgcagcctaccaggatcctccgtccatggggttttccaggcaagagtactggagtggggtgccattgccttctccacttgcctcacagtgtggccaaatatatattaatatatatatatataatatacatatgtatatatatgtaatatctatctatctacaaaatactctactgcaaaacagcagaatacacattcttcttgagtatgcatagaccattctctgggatggatcacatcttacaccacaaaactagtattaacaaattttagaaaactgaaatcataacaggtattttttctgatcataataggatgaaatagccaacctccccacccaaaggaaaacaaaagaaaaggggaatcacaaatgatggtttggacccttctagattattctagtcttcccaaagaggccataacgcagtgaggtttgttgtgaggagaaaacaatataatttcatgtatattatctgtcacagtgtgggtactcaagaaatatatgtatttccttccctcttttcaaaaatttttacttatttagcttttttcctttttggctgtactttgaggcatgtgggacttccctgaccagggttggaatctgtggcccctgcagtgggagctcggagtcttaaccactggaccgaccaccaggggagtcctcctccactcttttcttttcttctgagtttgtggcctgtcaatccagcaaagggagctgagtgagggcgaagccaccaaacactccggatttgcttcctttttaaggaaaacatgtgccaggcctttgtagcccctcaggggtcatccttaagtcaatctcttcagaaacacaagaggacatgaatatggcacttgtcgctagagactgctttctcttccaagggatagtttggaccagtagaccatcctgtctctgagttctttttcttgcgggtggtggaagaatgttccccattcaggcagcaattgttgccacccccaccctcccttccagaggctaatctgacttcaggtctctgtgttctgcacataattaaactcttttattaatagggccaccccaggggctggaggtttggacatgtgagaatcagtgtgtgactggagaagagggtttcagagcccttcctccaggtctccatcgccacctgggctgaaatagaatgggcaaattgagcccagcctggtccttgaatgatgccaattgattgatggctgggacccaagacggcgtctcccaggaactaaacgggtggtaatgaaatgaagctcagccaccttcgcctcatctatcactgtcagatgaaaaacagaccgagtctcatctccgcctctcccttcaggctgaagctgtcgacagccgccataccctctgctcccactggatggcgctaaagcctcaggcatcagccctcagggactccgcaaacatgcaca

SEQ ID NO: 50449 - DNA, 734 bp, Bovine  19866880880806
  misc_feature (1)..(1): n is a, c, g, or t
naaaaggagattctacagagcatagacagaagcagcagctagaaaaattacaattattttatgaacacgccccactgagttctcaccgttcaataaaccagtaacacacagagtccaacattctctgcccaccagttactggggaactttgccaggaatgctctcagactgtgtgctggttgccatgacaatgtaggtgagatacaatcctgtaacttccccagtttatagcatagcaccagtagcacagtgcctctaaaggttctgatcactaatattttgtgttgaaatctgacatttaatgatgaactctcagaatgacaaatttctgaaatcggagggtgctccaagggttatgactgagctccctcaactgaagagctacttccccaacagcttagagaaaagaccctcttccacatcttgctcttgtctgtagaatagcacgaggaagctccatacccaagagaatctccaccatagtctaattccattaagctctactagggtaatggacctagttcttcatctctagtgtatcctgctgacgtgtaccattaagtttatgcttgaccccaagagggtgtgggctgcaagctgagtttctggggtggatggctactcaggatctctcttcctctccttcctggacactgaaggcagggagcaaagaactttgtcaggatgggaagttagttatgttcatcctgctggacctcagcagggactgagtt

SEQ ID NO: 50450 - DNA, 2316 bp, Bovine  19866880941133
  misc_feature (1)..(1): n is a, c, g, or t
nggcctgtgaaggcgggaagtttgccacagtggaagtgacagataagcctgtggatgaggctctgagggaggcaatgccgaaagtcatgaagtatgtgggaggctccaatgataagggtgagtgtccctggaggatgggctctggtcacccaggccagtgctgcagtctcacgtcatcgatggaaagcacaggaagggacccaagatgcctgtttcagtgtcctgtgaccttgctgttctgtgtgggcaggggggctctggggagacccactgatgtcatgccggttcaggagcactgagttcatgcttctctcccgggtctgagacacaggcttcgtttgttcgtccatttgttattttttcgtcttgaagtgcttatctctggattggtaaactgggaaaggtgtgtccgcggtaagccaggcctcagaacaaagcccgcctctgcctcgagacctctgcccccaggccaaaaatctcgtcagcccctagtagctcagattctacggggttctgaagatcagtgagtgatgagtgtggctggtccctggctgtgttctggcaaataaagagcctgagagttcttagtccccttctgaaacacttgacagtccatggggattccctggcagtccagtggttagtactcagtgctctcactgctggggtccaagatctgatccctggtcagggagctaagatcctgcaagccacgtggcttggtctaataataagacttggtagtccatgctggctgcctccctgtttttgtgataaaatgagaggcctgaagtttcagtatacctgtttgtatgtaaaccatatttaaataggactttaacacttaagggcttcccttgtggctcagctggtaaagaatccacccacaatctgggagactaggttcaatccctgggttgggaagatcccctggagaaggaaaagactacccactcaagtattctggcctggagaattccatggactgtatagtccatggggtcacaaagagtcggacacgactgagcaacttttcatttaactcttaagttctctaacttggcctgcactttagaatcagtacaaacccaaaatggttcagtatacaagatgaaaaaaaaatgtatttaatatttaggatatatctcaagttgataaatgagaaagaagcttgtatcaagcttagtaatatttgctagaaccaaagaaatcaggctttggacataagtcaaccagtaggaggtcacgaagaagtcttttccttcttagcactggcataaattttcctcagaagaaaatatgtgtaaaaattataaactcaccaaacatttttgaaaataacaaaacagcaccccagtccatcttttctaatgtaatcattgtcatatttgagtgtatttttagggctttataataggtttttaaaatgtaatcataatagtatcttccttggtggctcagatggtaaagaatctgcccacaatgcaggagacccaggttcaatccctgggtcgggaagatcccctggagtagaaaatagcaactcactccagtatgcttgtctggagaattccatagacagaggaacctgatgggctacagttcatggagttgaaaagagttgggcatgactgagcaactcacacacaatatgtaatcgtagggtttgtgcaatatatcctgtttctgttccttatttcataattattttccattgtagctaactagtcctaagcatgactattcatagctaaatcatattgcatcatgtgcctataatttacttaaacatattcctcttttgaacatatctaaatttttaacaattataaattctgctgaaaggaaaatcctattccctaaatagcctttttcatattttagattatttcattaaaatcaacaattatgacttctctggtagtatagtggttaagaatccgcttgccaatgcaggcaagtggggttccgtggggcaactaagcccatgcacacagctgctgcagctcgtgtgcccagatcccaggctcggccacaaaagaagccactgcaatgagaagcccaagcatcgcctctagagaacagccccgactctctgcaactagagaagtagcccccactagagagcagccccgactctctgcaactagagaaagcccgtgcacagtggtgaagacccaacacagccaaaaatgaaaaattaaataaaatttaaagataaaatcagcaattagacaggatgtactctgttgttatttagttgctaagttgtgtctgactcttttgcgaccccatggactgtagcccaccaggatc

SEQ ID NO: 50451 - DNA, 909 bp, Bovine  19866880948723
  misc_feature (1)..(1): n is a, c, g, or t
nacaggtttgaaccctggatggagaagattccctagagaaggaaatggcaactcactccagtattctggcctgaaaaatttcatgaacagagaagcctgccaggctacagtccatggggttgcaaagagtctgacacgactgagtgattgagcatgcatgcatacaagagaacagtccagagcccattaccctatgaagacttagactcttcctttgatgaccttctacgtggtgacctcagatagacctcctgtataggggtagagattgaattaaatgatcttcgagttgggctgtgtacgagtcatggaaagcttccccgagaaagctgagccaaatctaaaatgagatgcagtgaggcacaacagcgagaggagaagagaaaacggcattccaggtggagggaagtgtataagcaaaggcatggtgatatgacgatactgcgtagcaggagctacagataatttagtaccatattttcacagtatcaaatgccaggtaagacataggaggggtgatgttgggaaagaagtagggactagccaaattctagaggtcctggtgtaccatgatcagaagcttaggttttagcttacaaatgtttgaagggcttttaaacaaatgaatgacctatagtaactgggataactctctatataaatatactgatgagcttagcaaaaaagtatacaatgcaattttgtacttggcctaattagtgaatgctggtgagattgttgtcatttatatgctatgagatcatcatatttattctttcttaaaatttgtatttattcatggatgtcctgggtctttgttgctgtgcaaggggtttctctagctgtagtgcgtgggatcctcattgcggtggcttcttgttgcaggacatggactctaaggtgtgtggg

SEQ ID NO: 50452 - DNA, 720 bp, Bovine  19866880992820
  misc_feature (1)..(1): n is a, c, g, or t
naaaccaactcattttttctcattttaattactctaaaaggtaactgttcaaaggaataataatgacaatatattgggtgtttatagcatatggataagtgaaataaatgacagtaatgtcataagggagaggagagaggacatagtattctctgttagaagaacctacactaaagtgtagtggaatagtattatttgaaggtggacttagataaggtaaaaatgtacattgtacattctggaacaaccactaagttttatttaaagaaatataattgatccaccaagagagaagataaaataaaatcatataaaatgctcaattaagaccagagaaagcaaaaaaagagactctgataatgactaaaccacagttaaaacattgtttatattaattcaagaatatcagttatcactttaaatgtgattagtctaaaaacaccaattaaaggggagagattgtcagagtagattaaaaaaagaaagctcaactgtatgttgttgatgataagcctgattcaaatatgaaaacagttaaaagtaatgggatggagaaaagtatacaatgccaacagtaatcgaagcaaagactgagtatctctattagatttagacaaaacacacttcagaagaaaagttatcaagaataagaaggggttctatataatgatgaagggatcagttcttcaggaagacttataatcttaaacatgtatacac

SEQ ID NO: 50453 - DNA, 1660 bp, Bovine  19866880997394
  misc_feature (1)..(1): n is a, c, g, or t
nattgcaagagagagcatagcttggcagcatctcatgtggaaaggcttagcagtgtgtccacagaattctgcagttgctttgtgaagtctccctgtaaggttgcctggatcttgggactgtaataatagaagcagagagtccccagctcaggagatgatcttcccattctgtactgtcctggtccaatgtcattgggaattttgccttccattctggacatcaatgctaagaagctgggaccattcgaaatggcagagagaagctaactcttaataaaatgacctgaaacactctcaatcaaggaagagaaaagaaacatcggagggggcatttcaggagtcacatgggagagggcattgctgtgtgaagttgtctgagatttctctgatttcctcaaaggtggaaggagcatgtatgtgagaaagctctggaggactggcttagggctcaatgtaaagttctccagagatggagaatgctgggcttgaactaatcccaacacacaaggacagataagtcaacatgcagctgatgtggaaattgtcagaggtctgccttgcaggtggaaggggaaacgctgtactcagtttggtttcagaaaaactccaaaaaaaaaaaaacctttaatggccagaagcttctttcttggccatcctaaaacttccccatttgtgagcagtccctgtaggtgaaggctttgattcctgttccatacaaaccttctggaggttctatcagagagtccctgggacagcaaggagatcaaaccagtcaatcctaaaggaaatcaactttgaatatccattggaaggactgatgctgaagctgaagctccagtactttggccacctgatgtgaagagctgactcatttggaaaagactctcatgctgggaaagattgagaccaggaggagaagggggtgacagaggatgagatggttgggtggcatcacagactcagtggacatgagtttgagaaaactctgggacatagtgaaggacagggaggactggagtgctgcagtacatggggtctcaaagagttggacatgacttagtgactgaacaacaatatatataaatgtgaaagaaggagagaagggggacttccctggtggcccagtggttaagactctgtgctcccaatgcagggggcctgggttcgatccctggtcaaggaactagttatcatattctgcagcttagacctggtgcagccaaataaaaataaacatatttttaaaaggagagaagtgagaaaatttaaggcgaggagagtaaagagagggtgtgaagataggaggctggaggtaaattggggaggctttaaagtgtaggaaacctggcttcatttccatttgcctggtctgtatcaccactgctgatgaactcagatgatcccacgtccactgactcagtggactgttcccagcccaggtcctggtgtcaatatctctaagcacaggtgggagcttctgctgctgactcaggcctgggagcagaccatgtgcagactcccctggctcctgccccaaaatcgatccccagtccgcaaagctggacacgaaaacctcatgccagggagagcagagggagcaggtgcctggccccctgcaccacccgtcctggcaggctgggagtctggctggcatcacgcc

SEQ ID NO: 50454 - DNA, 3651 bp, Bovine  19866881031500
  misc_feature (1)..(1): n is a, c, g, or t
nataaaatacttgtctctaggatccatttaactaaacttgacttaaatcctggtagaggctcccatctctataacagacacaaaagaggatgaatgatctttcactatcaaaacaaactcctaaatagagctaaagtttattaaattattcaaatacatttactatgctcctataatgtgcaaagtactgttccaaaatagacacccttccttagatgtacagtaggccactaaaataataatttcaggagcttaagacactggtacagtcaaaataccctaatgatatgaaatggtctctgttgctgctgcttccaaaagtgcccggtttatttctaaggaacagctcaggcatttggaagaataattcaaacttaagctttaatacaagatggagttaggcaatgattgtaccttcaaacataatataacagtatgaagtacattctggtgatctaaaatgctagcatctgtgcaaggtaacctaagaaatttgacaccattttttttttaaggtaccaatttcaaaataaatcaaaatacaaatcaattgccattttaggaaaaataaaaatataggcacgccaactcctctcccagcactgaaattacacttcctcagacacactgccatcattggtaagcatgggggatcaactgggtaaatttaaacacattagataatcacataattcaacctagcttgggtatatgtgtgatcccaaagacttttcaacatatttttcagcaatacagtggtagcaatagaaattgaagaaactggaagtattttcttagagacagcttacagatatcttacaggttccaaagtgaaaatataacacatcaccatcataacacaagctactttgtcgctcctaagacccaacttcgcaggacatcaggcttcctagtgtttccttcatatgcctctacttgggttttctttcccctgaactaaatagggagggcctttcaggtcaagtgttatctgctggccagttaccttcaggatagatatgcttgcatcatttctatattgacaagtcaagcctccatttatgaggcttaaattcagctcctggtctctttattcagaacttcccttatttacttataaaaagaacagcaaccaaaaaaaaaatccaagagaaaaaaagaactaccctcatttacttaaaaggatcattcaaaacactagggaaaaaatttccctctgaaggagacttatttaaggaacacaatactgtttacagctcatggcccaccttagaaaggcaaactcagctaagtctcctgaaaagaatctcagtagtctcccatttggaaacttgctattcctattattttctaatgtggttaaataaaattaaatgttaataataaacagtaattaaataataaacttaaaataaataataattaaaaaacatggtctggaggtttttagaaaaggtaataaaggtcaattttcattaaattcacattcctttctgtaccagtttctacaatgagcaggcaacactgccctctaacgggctgattctgttacatctcttagttcaactggtgggaaattgctccaggaagcattgacacaaggcccccacgcacattctttcttttacttctgggacacagtctgtccttgaccgtctgtgaatgacactaaagacggagcagcccctagagaggcgatagacttagagaacgctcatcaggggattacaaactaacacccattgcaatggtgttcaaacttcagcaggcatcaaattacccccaagggcttgtttaaacacagcttgctgagccccacctgtgttgctgactccttaagtctagagctgagtccaagaattggcctttctgagaagccggggcctggtgggctgccgtctatggggtcgcacagagtcggacacgactgaagcgacttagcggcagcagcaacaagttcccaggtgatgctacaagcccagagaccactctttaccacccagacactgtgcttggctttatcttactcaatacttcccaataaggtggggttttagcacccattttacagactaggaagccaagtctcacacagaataaacccaggactaactcaaaagccattgctcccttctctacagtatgaagtcaatatacgaagctgttaaccatttccctttccttcaatttcttccgtaagggggcgggacttaggtgacggtttagtggatttcccctctcagagcaccttggaggtctggctatgaagtcacctaggaaggtccactccatctccaggttggatttgtgagcagggcacgctgagagaggagggggcgcatatcagcgggaggtgcctcccttgggtcctgaaccctcctacatagttcagagagagtctgattagctctagattctggagttcttcgtactcagaaactctgccagagaggttttaaagctagtgtctcttctcacgggtgtttctgaggacctcaaagcctaatggggctcgaagaggacccagagggtgggggtgtctgcaccgttctccagcctcggctcaaatcacccgccgaggcagggacaggcacgtggcaacaactttaaatcaggagtgcccaaggaagggtgtgaagaccgaacggttatgataaaatataaaatacttttcaggtcatatatcccaccaggatcaggcaggtagaagtccctagcactcagcccctggcaggatgtcagcgataggtaaagaagagttgggagaacacactcccaccccccatcctcgaatagtttttctcatccttcgcattcagctcctagcccaacttcgtgttttcctgagggagatacaaatatggagcatcccatggggatgattttctggcttcggtcattagatgggaaaagatgttttcagaaaaactgccccgtgggccggtcagccgagatcttgaggtcgtggccgcggctcctcttcgtgtagagctggactctgaactccagctgctcgctcagctcgtccagagcccgggtgcaggactccaggctctcggccagtttctgaatcttggcctttagcacggcctggctaaccctggtggccccctcggcccgcctggggacaaggaagccgcgggagccaaagaagacgatgaagtataccgagttgtacagcgcgatggaagcgttcctcccgcactgcagcagctggcggtctccgccgccctgcccgcggcagaagaagtcgaggcagctcagcatctcgcgcatctggtcctggcaggtggccgcgatctcctgcacgcgccgcagctcccgggagttgcagaagatcagggagaggtcagacgtgatggttacggccccgccggcggtggccacccccagtcccacggccgaggccagcagcgagacccccagggtgacggggctgagcgagagtcccacgatggcggccacagcgcccgccgcgctcagcgagctgccggccacgttggccgccagggagcgccggcgtaggcgctctaggcgccgggccacctcgcgcagacgcagtagctggccgtgcagccggccgcggcggtccagcagcagcccctggaagcgtcgcagagcatccgcgccctgcagctcccgggccgccgg

SEQ ID NO: 50455 - DNA, 878 bp, Bovine  19866881059345
  misc_feature (1)..(1): n is a, c, g, or t
ntgaatttctctgtgttcttccttacatgtgaatgtatatttttctcagaataaaaattttaacttaaaaaagaaagtaaaggcagaaatgcttttttaatattacaataatattttgtttatttatttggctgcaccaagtcttgtttggagcacacaggatcttttgttgcagcatatgggatctagttccctgaccagggatagaacctgggcctcctgcattgggagcacggagtcttagccactggaccaccagggaagtcccagaaataatttttaaagtgctaaatttagggggaaaagaagactacaaaaaagttattttctcatctaattcaaaagcaaataaagttgaaaaccctcaatagtaaccatttattttttaaaaagcaaataactagaacaaaaacaatcaactttcagagtatagcagcatacactcttgcttcactgtaatgtctgatgtgaaatgactgaattcttcttattaaacataggctttaaacaaagttaaaaaggaagaccaatatcttaacattctttcgcctgtaagacacatgctaaaaatgaaactattcaaatatctgagatttgagggagccctgaagatttctgatgcctctctacatacagaacaagcaggggttaggatccaggttgcaatgattgttatgaatgcctgagaacttgggagaaaatgactaagtctgggaaaggaagagaccaaggtaatagtttgccccgtgtcccgggagataagagaagctttaggttaccaaagggatgtagactcagctgtagtctttgtggcaccagaggaaaaggcatgtggtaaaagaagttatactataatagagcctgtggggccaatgctt

SEQ ID NO: 50456 - DNA, 852 bp, Bovine  19866881133079
  misc_feature (1)..(1): n is a, c, g, or t
ngaatatgaggcttgactgctgaaggagaaaattaatgtcaaaaggaaacttcttgcattggggaacagaacttcatgtacttatgagaaagaggaaggaggggggagagaaaatatttttgatagaaaggaggaaataacttcaagcaaaatctcttaagagccctgattcagtatttcaggcctcagaagggttaccatatggaatgaggattaggccttgtttgctgtggctttgggagggcaaattagattgtggggtggtggtcatgggtaaccatcatgacataatccaatagtggatttcagctgcataaccaccagctcttaggagctgataatgtccaagcagggatgaagtgactgaggattacagaagcaattcctacttggtggggattagattgcagacctctgagaccttgcaacattgatatcagcgctattaaacacacacttgaatccccttcagctggtctgacactggacacggtggagaggtgggtgttgggggtgtgtggctctgttgtcatagacttttggtgaatggggtggcgaggaccttaggaaatatttctagcagagcctcatcagtccaagcagtctgatttaaaatatattgcatgggacttgcctgatgtccagtggttaagattccacacttccacttcagggggccctggttcgatccctggttggggaactaggatcccccatgctatgtgtccagaaaatacatgcagtgaagtgaagtgaaagttgcttagtcgtgtctgactctttgtgacccatggactatacagtccacgatctccaggccagaatattgagtgggtagcctttcccttctct

SEQ ID NO: 50457 - DNA, 826 bp, Bovine  19866881187874
  misc_feature (1)..(1): n is a, c, g, or t
ngtgccggcagagcagctcaggcaatcaaagtgctaaggtacccgaggttgccaagctttgaagaggcagtttgttgggggcagggttggggggtggggaggggggatgaaagctgtgatggaacttctcaagggagctgcctgcccagatttccctcttgaatgtttctagctaacaggtggtccctccactggaagtaaattcctgggtatttttacccaacacctcataaacaaaatggcaatgctattggctatgtcatacaaccaggcgtattgaatcatgtccccattcatcaatttgccaaacaaagcaggttgctatctgagcttgtttggagagaggctaactatgggaaggaagaaaaactcaggcatctgcctacacgtacactgtcaagatttaaatgatagatgtgctcagtggtatccaactctgtgtgaccccatgaactacagcccaccaagttcctctgtccatgggattttccaggcaagaatactggagtgggttgccatttccttctctagggaaatgatacatacaggatgacttggtgcatttttaagtgaccctttccctacataagactgcactggcagcatggttgacactctagtcattgttatgagaaccgcactataatgcctcggggaggcctgttgcactggaactgaggtagggaggagatggaacccaagcgagatgcagaatgtatccagaggataactgatttatttttttttaaaggcattttattttttaaagtctttattgaatttgttaaaatactgcttctgttttatatttcagtgtttctttggc

SEQ ID NO: 50458 - DNA, 1330 bp, Bovine  19866881195119
  misc_feature (1)..(1): n is a, c, g, or t
nctgcacacccttctgactctcactaagggaatttttcccagtcaggtgcatcctggctggccaaatgagacatgattgggaataattgtgacatgacatggtctggaatgaatagcagatgggacttgagtgcacaaaacctgtggggtccaatttcaagggaaggaagtgtggccgtctttacgatttccagcacactctggcaagagaagtcagagaggaggggtgacagccatggctgatgtggtttgcaacagtcagtgccgaaaaccatcttctgcctatccttgtaagtcatccttccaggcgtgacttgcctgggagcctggaaccaagaggggtcatgtggaagaggctgagagatgaggctagggggaaggggcctctctttgggaaagttctaaccattatcaaaacgaacccacagcatttcagaccttgcagcaggggttgaactgaaagcagaggaaaggggcagagctgtgttgaaaagagcattgaattgggggatcttctgaagacctggtccccagctccgtttctgccctaacaaggtgttgacccttgagaaatcactgactccctttgagccttaagcaagggggataagtcccttataagtctaaaatattttttaaatcaatctttattggaatatagttgctttacaatgttgtgctattttctgctgtacagcaaagttaatcagatatacatgtacattcaccccctcttttttgggttttcttcccatttaggtcaccacagagcattgaataaggttccctgtgctgtacagtaggttctcattagttatctactgtatacgctaaaatattctaacctgagcctattaaatactctgtagaaaggtatcctttctgtagaaatcaaaacaaaggtacttcttataagaaatagagaaatacaggggcatagacgggtgtctcgcttgccagcctgcgagcagagaggaatgggtctcttcctttttttctcccacatatcagacaggctacctttggttgcaagtaaaaaaatgccctgattcaactggcttaaatatgaaatctatttcataagaagtccagaagtaggccagctccaaagttggtcacatcctcaaagaccgagattctttccatctcttccctctgccatcttccaggtgtgactttgtcctcagaagtaggttccccagatggtgacaaagatggttgccgcattttcagatgtcattgccagacattacaaagtctagtagaaaaattaaaacagtctcttaccccaataccaaaactttaagagcaaagagaccttttccagaag

SEQ ID NO: 50459 - DNA, 1891 bp, Bovine  19866881208174
  misc_feature (1)..(1): n is a, c, g, or t
natcttagagtactttgctgagaaaagataattttatgtgctaaaaatttctaaagggggaaatttatattttgttaacttactctgagcttcatgtaattacacagtagcggctgcctcatcatgtaaacttctcgccttgaggttaggtaggtaatttcacacctcttagattagaggacgtttaactattgtttacatgggttataaacatgataatatagctatataataacacagctttcctctgaaccagacgtgctaacaacatcacaatctctgtttccttaaaaatgggttggcatttccaaagttccttctaaatctgacgtgaacagggaattagaagtcataacgcaaatgccaaggtcccttaaggcagtggccttcagcctttctccccccgcatgtgaagggctggtgtgcccagtattacctgaaaatccttgctcatgaattatgtcttaccactctttcccctcttttggaaaaaatacacctaaaatgcaagcaactgaatagatattaggctatagcctggaccatcggttgcgaacttccatacttctttctaccaactcaactataatagtcacataggattattcccggttcacagtgggaagaaatattaaaaacgagtccaaatgttgggttttgattcacacctccctgaagtgcctgggtgcattttgctacagcctgcatgcaggagaaagccccgagtagtctgataagcagaggttttctccctacaggtaaataataactgaccaacatttatgaagcagtgtgtgttaaggtacttgtctacgtgatttcttttaatcctgatgaaattctgagaagtagctttatcgatgagaaagcggattctgggagctatggctccagatcacattaaaccgctgaaaaaggctcaaatttaggtcctgctgactctcaggctgtctttagagggtgttttgttgttcttgtaaataatctcaatatgaacaaggccaactggctcagggtgacacgtgatccccaatcattctctttcactttctgccagattggaagacggtcttgtgattaaatatttctggccagcaatatcttgctgcctacggaaaaatgatattcccgaatccttgataattgtttcactggacacagaaacaaagcttggaatgtctacaggaaaaccgctgtttctctgtacctgtctttcctccggcaagatggaaagaacggtatcactttagaaagtggctttgggaagaaggaaaaccagggatgctgcttggctatgattagtagacactttgggggggcaggctacgcctaccactggacattttaaaatttggaagccacttcttaagggatgaaggcaggagaaccagagaaggcccaaacaaggagattggttggctgcttgattgattgacttgagataggaaggacttttactatgggcctgcctctgagcttcccaggtggctcattggtaaagaatctgcctgccaatgcaggagatgtaggtttgatccctgggtcgggaaaattccccagaggaggaaatagcaacccactccagtattcttgtctgggaaatcccatgaacagaggagcctggcggactacagcccatggggtcgtaaagagttggacacactttcactctgatttaaatatatagtgtacaacatattattatgcattgtatataacaatttaatgacattatattattataacatcgtgtaataatataatgattaatattattaagggcttctctggtgactcagtggtaaagaatctgcctgccaatgcaggagacacagtttccattcctgagttgggaagatcgccggagaaggaaatggcaacccactccagt

SEQ ID NO: 50460 - DNA, 1130 bp, Bovine  19866881210172
  misc_feature (1)..(1): n is a, c, g, or t
nccctcggcaatagaagttttgctatgagggctgagcttgggcagagctgaagttttcctcttaaagtgctgcaaaaaatttaaactgtgatagacttaacagccctccccacacacccaacacagctctcctctgtcaaacaggaaactaatacctgggcttggtgtttgcagctctggttatcttcccccagggtcttcctggccattcaacacggttaaaaatagtaaccaccagagccagaaaaaaagatgatttcattgtctgcccactgccactagtggcctgatttgggtggtggcagatggagctagtcctctgactcggcaccttgtgaattctcgtgtaaggtcaagactggtccctcccataggattgcaacaccgtggtgctcccccaggggccagcctgtcttggtggttggcggggaaggcagtgaatcaggcagagccagcttgccctgcacgtgcacacacagacacacagcaggtgacatagtcacagaaaactgccatcccctgtggctcagccagtccacgtgcagaccccctggctccccggcttgagaaggcgaggctggggcaagacctctctgccctctgagttggcccctcctgctatggtttgaggaaaatgcatcccccttggaccagccagatacaaaaatttgtacagtttactgaagcctacttggccttagggagctgtccgagtgacaggtgtcatggggacccagtggtcttccaaggctgggaggagagcaaactactttgagaaggaacaaaagatttgctggcggttaatcttggggaataaatgagaaatcagtttttacaccccacctccaactggtatgtcgctggtatgtgagttaaaccctccgagcgtgctcagtcgctcagtcttgtctgactctttgtgaccccatggactgtaccccaccaggctcctctgttcatgggattctccagggaagaatactggagtggattgctatttcctctgccaggggatcttcctgacccagggattgaaccctcatctcctgtgttagtaggtggattctttaccactgagccacctgagacgcccttaaaattctcttaacagaggtaaattcacaatgctg

SEQ ID NO: 50461 - DNA, 1529 bp, Bovine  19866881323794
  misc_feature (1)..(1): n is a, c, g, or t
ntgtgtagcttttttctttttatttatagaatgctaaaatattctgaggtcaactatttcgggcttcccaggtggcacagtggtgaagaatctgcctgccagtgcaggagacttagaagagtcaagttcgattcctggttgggaagatcccctggtggaggaaatgacaacccactccagtgttcttgcctggaaaatcccatggacagaggaggctggcaggctactgtctgtggagtcacaaagagtcagacatgactgagcacgcacgcacacacaggtgttagatttctcacttttcattattaacaacaatacaaatatcataattttattttgaaaagcaaagcattaaaggtctctgattccttgaaaaaacttccctcaaagcttataatggcattataagttatgacacagattgccacttaataaagaagatgagttgcaaatatatataagtaatctgaagtgcctttcactgctccttggttattgaactagttaacttatcttaaacttactagttaagcagtactcatttgctccctttaccagggaatggtaacaaatatttactgagtgcctgctcagcccagtcattgtactagttaatttctataaacatctcattctagtcatttagtctcagacagttttttattgttatatcctttgttgatattttgattcagcttttcttttaccatatccatttgttgttttgccagtagaaatgaagtttataaattatggaaacagtaagtaggtttcagtaacttttttaaatgcaaagatttgcctgtaaaaaatggaattgtgtatttggaatggtcagatgatcagtgagaactcttcaatgctggaacaaatgaagtttgacctacacatttaaagggtacaatgtttgcttatctttattatgtatcttgccctatgatttcaacctatagtttttaaccattttttcttttaactttaatacaatgacgttatttaatttttcaaaaaaatattgtcaccatcacactgtccaaggataacctttgggaacatttggatgtatcttctccaatttaaaagtttgaactgagaaatgggtgggataaaaattggattttaggtggcttaatttgaccaaagcatattagaaagatctgagcaaagggaccatagaacaagagagaccatattgagctatagtgacaagtcagacataagtcaaaaagaaccaaggctggtaccggggcaatggacgtggaaagcaagcaacaaatacaagaaatagttcagagggaggattaggaggacttggtgactcatgagctctggacggtgaagaagataagtcattaaagatgatgggaaggtgtcaccttcggcaatttatataaacttcaatttccttgtctgtaaaatagggttaacaattgtaccttcctcataggattgttgggaggactcagtggatgacatctaaatgcttagcacaatcactggaatgtattcccagtaagggttagctgtga

SEQ ID NO: 50462 - DNA, 969 bp, Bovine  19866881350954
  misc_feature (1)..(1): n is a, c, g, or t
nttgtctctagtttcttgaacaatcctgaaaggtgggtattattgtccgcattataagctaaggagctggactatccagttgtgagaccttgggcaaagtattcaacttttcttgtttcaatgtccttatctgaagaaacacggatagtaataaagctaccttgtgaggtttaaatgaactatactgtggctcttccttataatgattactaagtgttagccattgtgattgtcattattgttaggattattacagatgaagagtggataagcattaatagcttgcccatacagcttgccatacagctcgccatacagctcataagggacccaatttgatgccaagtttctactctttatcctaaatacactttgtattatgtgtacatgtataatttcatattattcattcagcaagtgcttactgattgaagatcgaatcatcgtttatatttttttcctttgaaaaaaaatttattccacctaataaagaagtatatgacacaaaagggctttcaaacccatttgcagatccaaacttccagatccttgcagatcctccttcggtgggaggctatgatattttcattttcaccagtagatggcagaagggagaaaaatactccagaatggggaagttttcactgtggcctatttaaagggctctttgtctgatatttggcccacagtgatgaagggcttgggggtcagggtggctatgagaactaccttcaggtatttgaaaggtgtcaaccttcatgaggatctactaggttgacccagaagatggggactgggagataaaaataaactgaaattcagatgttataagaagaaaaagttgcattcctctattatctcttgcttacagtcccagctggcattccctccttttcagcccacaagcagctttgttcttttcaaaagcctgcccttccctcctggggattttgataaagtcccttgcca

SEQ ID NO: 50463 - DNA, 1039 bp, Bovine  19866881414284
  misc_feature (1)..(1): n is a, c, g, or t
ntaagtgtagtgaatatttgaactactagatgaccttatcaactcagactatctcttcggataatacactttttcagattgtattgagggtggaatttggagaataggacacatacttagttgtctgagggtaagaaaggatctggaattctgaaaaagtttctcttatcaacagagtggcacatgagggtggacagatgaatgagggtagagttaagaggctcctagtagatgagatgggcctatggcctctgggccaaagcattggggaaattcttgagcccaggtgaggcagaccatggctgacacagacaagaaagtgtccccattcaaatctggttcttgctgtgacaggttttgccttgaaccagtttctcaagcctcttacatctttgcacaacatttgccctattgagaaactggttttgcatgaaacctcccatggctcggagcaagtctccatgacggtgtttgcataccgtgggggttttactcctcccctatgtgccaataagggtgaagcggccttcagatgacatgatatgtagtccatcaccgcgtactccaaaaccaagaatctttgaactatgtgaaaggttcataccaggatttcacaagccaggaaagactagtctagaaggcaaggttaagaacattgtctttgcccaagttctcatgaagccttctctgagtactacagccacattgatctcccctgtctccggttcctgttctactgggttgcccaaaaaaagttactacaggtttttccatatgatggtatagaaaaacctgagcgaaccttttggccaacccaatacatattgtctagactacacagttcagtcctggttgtctattgtcttctagaaattgctttgtgtgttaacagtgaattccctgagaatacagactacctcttgtacttttttgctggccagttttcgatacaatttaacccagtatgggcaagagaagattctcgacaataagtgttgatgaatttgttttgggaaatgcaaattcattataaaaaaaa

SEQ ID NO: 50464 - DNA, 1494 bp, Bovine  19866881544885
  misc_feature (1)..(1): n is a, c, g, or t
ntacccttaaaacaatgaattttatggcatgtaaataaagcaattaaaaagaaaaggcaggcctgggacccttgcctcacttcctcactgtgctccaggtaagggacagatggtgatggaggtttgcagttagggaggtgggttcaaggaatggagttccccagctggaaaagaggccactgctccaggtcaggggtagggcagggggctatactgatccagcagcttcaccagccttcaagcacacacaccagttcaggccataaatacatctctgctataatcagaggggatccaagcctagaggggccaccctatctttttgtagtgtgtaagagccccgagtcctagaaagaggatgagaatcctactaatgtttggcaccaactttcccattgtcctggtaggatggagccttgccattatttaaaggaactaacatgtacagtccacagggtcacacagagttggaaacgactgacgcgacttagcacacactcagacgacgtgtatagcaggcagaatgccacccccccccaccaagacgtccatacttccacctctgtgaatgttacactaaatagcaaagggactctacatatacaatcaaggttatgcaatttaaaatgggaagatgatcttgaattagccaggggggcccaaactaatgagccctttcagagatagaactttctcggctgatagcagagagctacaatagaagccagagacagattctaagagtgagaaggaactgatatgctgctctggctctgaggtggagggacccacatgcaagaaccagggggaagccttggggagctacgggtggcccccaactgacagccatcaaggaaacgtgcccttagtcctacaaggataaggcacgggattctaccaaccacagataggagcttggaaggggaatcagccctggagcctctacaaagagtgctgtcctgtcaacaccttgaaactctgtgagactctaagcggagaaaccggccaagcccacccagacttctgatctgcagaactgttacataatcaatggctgcaattgtgttggccaagtttgtgttcgtttgtgacagcagcaacagaaacattcaataccaatttgttacaaaactgagtgtgaacaatgaaactcataccagccattctatcaccttccactaccctaccagtatctaggatatcagaaactctccaaatcttaaagaacgtagtactttctacttcacctttaatgttagactgtaggccgagaaacccaagctataattctgattataagcactgaacagcaaattaagagacccaggtcttatttttatatcagtgtacggacctcaagtaaattaatctccctgaatctctgtttccatgtctgcaacaaaaatgagttggtccagataatttctaaggtcatgttcgctgtagaactaaaacgacaggcagacatcataacgagcaacacgcattcattta

SEQ ID NO: 50465 - DNA, 1615 bp, Bovine  19866881567051
  misc_feature (1)..(1): n is a, c, g, or t
nctccccttgtatcctctctgagtctcattttcctgtgctttccccattttggcccttgaggtcactttagagtgtaaggaagagagtcacgttcaagttgcgtcagggaaaatttctaggtgaggaatcctgagcaatcaagtgtggcggtcattacttcaaggaaacctttccgctgggggctgagacattgattcagtgtcccagtctctggcccaggccaaagatcgctgccttgggggctacagcgaacctagagacagtggttttggcttgggaattaattgccagatcttctcagttatggcttgattggcaataacagaccattcttaaggaatctggcattcttccctcaggaggagcagtataaacagtgattactgttaagctccttggcttctccttatgccatcaggcctagggtttatcttcttaaagagtcatgtcatgtcatgtgttagtcgctcagtcacgttcgactctttgtgacccccggactgtagcccgccaggcttctctgtccatgggatttttccaggcaagagtactggagtgggttgtcatttccttctccaggggatcttcccaacccagggacagaacccaggtctcccgtattgcaggcagcttctttaccatctgagtcaccagggaagtcttaaagagtgttgatacttaaaggtcatgatactccctgcctaaaatccttccattcctctgtcttaaaggaagatatccaaactccttagcatggctgtgggtttcctcattcttctccgttttcccccttgacttctgtgttctggccatgttgtacttttccctgtccttactcattctgtgttctttaaagcctctttcctcacatgagactgtcctttctttgctgacctccagatttaatttgcttgtcacctctgttagcctttcctgactcctccttcctttttcaccctgtcctacagggacctatcatattattatgtattgtgtggattttgagcttattcaggacagagaccgtgtcttctgtctgatcaactttctcttcccctcaattcatcaaatatgtattcatggtctgtgttgtgcccagcatttagtcatattcccaccaatatgggaatggcgcagagagcatttctttgctattatgtatattttttgtcttctaggtcgtgatatcatcgggctggcagaaaccggctctgggaaaaccggtgcctttgctctgcccattctcaacgcattgttggagacgcctcagcgtctgtttgccttagttctcaccccgactcgggagctggcctttcagatctcagagcagtttgaagccctggggtcttcgattggggtgcagtgtggtaagtgttgggaggaaaggactcttcacagtttcttcacaggttgagcatgaatgtgaaagggaatgaaagcaagtgttaatataagttcgccgacctaaagagctgattgggtattttagctttggggaaagttgtcattgtaagggaagagaaatgaaagtagaaatctggcattggctttaaaagatgtttagtgcatcatggaaacaaaattaaggatctctttttaatattctttttattt

SEQ ID NO: 50466 - DNA, 1282 bp, Bovine  19866881597752
  misc_feature (1)..(1): n is a, c, g, or t
naaatatgtgtgtgtcggcttccctggtggctcagagagtaaaaaatctgcctgcaatacaggagacccaggttcaatctccgggtcaagaagattcccctagagaagggaatagccggctacccactccagtagactggcagactatagtccatggagttggacacgactgagtgactcacacacacacacacgtcagggaaaggcaagaggtagtgcgttgggctgcgtgtactgtgtcagatgagctacaggtctgtggaattgttgagattatatgagggtaactgcagcttgggaaactgcagtagtccaaaaaattgtgtgtggcggggcaggagtgagtgtgtgtatgtgtgtgtgtatacacatatacacagagcttccctggtggctcagatggtaaagaatctgcctgccaatgcaggagatgcaagtttgatcgctaagtggggaagatcctctggaggagggaaatggcaacctactccagtattcttgccttgaaaatcccatggacagaggaccctggcaggttacagttcatgggattgaaaaagagacagacacaacttagtgactaaacaacaacacacacaaacatacacacgtataaaataggccaccaggtatgaaagaacacagcacttacaacgaatcagtgcagtgaaaatgaatgttaaactcctgactttaaccccatatgaatcatggttttttactacaaaacattcagaacttaccctaggacagaccaaattcagacctctgctctttatctatatgtgaaaggtgacaccctcatgttcctaaatccctaagaggcattccctagttgactagtaggaagggaccttgatatttttctttcaaacccgtgagaaagcatcttaatttcccattttgtgtgtgtgtgtccctagcacggcctgggtctcctttacctgttgcatggcatcggcggtcaccaccttcaacacctacacccggctggtgctggagttcaagtgcaggcacagcaagagcttccgaggagccccgggctgccaaccacatcatcaccagtgcttcctgcagcagctggcgtgcacagcccacccagggggccccgtgaccagctacccccagttccactgtcagcccatccgctccatctccgaaggggtagacttctactcagaactacatgacaaggaacttcaacaaggcaccagccaggagcctgagaccaaagcagctggctcatctgtagaagagtgttaggagttagggggttggagag

SEQ ID NO: 50467 - DNA, 1292 bp, Bovine  19866881613129
  misc_feature (1)..(1): n is a, c, g, or t
nccccgcaccctgtgtagagacatgagcagggggcgatgcctgaagcagactcagagctgcaactctgctcagtgtcccggcaccctgaatcatatcacagcaaatttaggactgcgccaatggagacaagaacctcagcacctcccctttgctgcctgccggatgcctggcatctgggccacagtcgctctgcagggtcgctccccaccctggaaaatgagagaggttgtttggacactgggttcctgcagatggttttactgcctcaccccagcaaagctgctgtatgggagactggggctctggcatctttttctcaaggctggggtgtgttttgggtaccagttctttccccccttccctcttggtcagattttgttggacaccagtgaccggcagtctcacaacagatacaagcctaagctgccctcttgggtttttgaattttaatgtaggaagtcatgtattcactaaaaataacattttaatcaaatgttctctagaaccaaaccgcactggggctgtaacattacaaaagaagagacaaggaagcctagatctagatgtcaaagtcagaacctcctcgtttccagtcttcacagctgtaaggaactcctatcactccatgtgtcacgaaacaagactgccagattgacgcacagccttcttcggaatggctgttaaggataacagaagcttcccatgggagttgtcattttcatacctggttttcatgcaggggtgaaattctgtatttaaattaaccaccgaggctgggctctgattaacagacttacagataattccgatttctgttcacaagcgcatgtctcattttttgtgtttttctctctgcttgtgtatgtgcataattcaatacataactgctgagcctagaaaaaggagcaattgtgcctctatttcttcctctttttttcatagctaatgtttcaaaatactcttttgaaatgctaagagactctgaaatatttaagtaaacagactattaggatgagaacctaagtgtcaaacaacaaagaggcaacgtagcaatttgctattcgggggagacagaattcagagctaccttgcaggagacaaaaaaataaaaaataaactctgtctgacaacagacctcccaagcaggtcccacagaaaggctatgtaagaacaaacaagaacaacaacaacagtaatttccttggtcgagacaagctgatttgcatagacattaaacatttttctggccataatggtggagacgggtagaagctttcacccccattttaca

SEQ ID NO: 50468 - DNA, 836 bp, Bovine  19866882049181
  misc_feature (1)..(1): n is a, c, g, or t
nattctatggtcctttcggctgtgggagattagatgttgttacataccactcatattccacagaagctaacaagggcttcaggaagttaagagacctgagttcccaatgcagactctgctcctttgatgcttatgctttttgctgttaaaagtcatgatgtgaagatctccactgtgaattgcttgtaggtaatctcctcattttcagggctttaaataccatctatatgctaatgccttccaaattggtatctgtcgtgccatcctcttccctgaacttgagactttacatccagcttgcggtggtcagcccccttcagatgtctgatatgcatcctgatcttggtgtgactgccagtgcccctctccagtgttggccatttcagaacaaggacccaccaagtacccagataccaatgcagaaagctccaaagcctcttctcttctttgccccacatcttatccagattctcttcatcatccattaggttaaaaacgaggtcccgtcactgtcacctttaagatcaaccctaaccttaacctgtctcaccaacatcctaaatcacaatcctttttcactccaccattgccatcgcctcttggctggtccttctgtgtccacgctgaccttcctgtcgactacatggcaggatattttgtattctaaaatgaaaatccaaccattctcctgttcctaattctcttttggcttcccatccctcttagatgaaacttggaatcctcctcacacggtctgcaatccactgtacccttgcccacctctctgcccagggattactctgccttgcccaccttgtccagccacctgtgtgaat

SEQ ID NO: 50469 - DNA, 1000 bp, Bovine  19866880625990
  misc_feature (1)..(1): n is a, c, g, or t
ntttaagaatgttttcataattacttatttaagagtttggataccaaagggttaaaaatacacatgtttttcttttattgaagacattttagatgtttgtaatgttttgtctgtacaaatgggcgtttagtaatgttttatcttttttttttttttaatgattccatgtatttgcttatttccatctaggaatagttactaatgtatttgagatacagcataccaaattttaaagtaaccagaatcgtgagttaatggtttttagtccatactgttaaacttttgttgaaatactgacatgattaaattggcttcatgctaaacgttactagaagtaacggaaggcagtgtctcagagtggcagcccttggcacgtgtggccacgcggcagtggctgcgccgatagctgtgcttctgcacctcgtgtatgtgtatgtattttcaatcaaaatgttgcctgcaaatatgtgatcccttattatttaagtttcctgtttatgaaccattgcccgttttaaatcacatagaagattctgaatctgtaaaaactacacatgtcaatgttttacagctacgtaattcgaattgacttgattttttcaagtaatcctagaaagggggagcattccatatagaaaccgctgaaactgccacaggtgcttctccgaacccttaccgttgtggcattgaatgctcagtatggcttcccttctccactcgaggcatactgttgaggtatttgttgcggtgattggttttaatgctaatctaggaattcagatatagattctttagatttgcatgctttgcttaccctaatttatgatatctacctttttatttgtaaactaacaatagttaagttgagatcagaattttaacagaaatattatttagataaaaattgtggttatctttcattgtcacatggcattaactaaaaagagaacatcctgaaggtgatgtgacaactcacactctaaatatacttcagaaactt

SEQ ID NO: 50470 - DNA, 1770 bp, Bovine  19866880757355
  misc_feature (1)..(1): n is a, c, g, or t
ntcggcagggccgcctcacctgaaggctggactgggctggaccacccaaggctgaggtggtcttggtgggagggcctctcctggggctgctcattgtcctcacgacgaggcagctggcttcctgcagagtggggacagagagcagaggcgtgtgtatggcctgggctcgaggcgacaccctgtcctgtccacggtgtcctggctcactcactccagcactcggagtgggaggggccgcacgaagccgtccagaccacaggcgctgcgcgggggtcgggggaaatcaggctgagggaagcacaggttaagatctgcatccccactcacaaggggagcacccacggggacacagcatccttttccaggcaccctcgaccccacgggcctttatcctcacccctgaaccccatgggcctttacccgcacccccgacgccgcgagcctttactcgcatccctgattccatgagcctttacctgcacccctgaaccccacgagcctttacctgcacccctgaaccccacggggctttacccgcacccctgaaccccacgagcctttactcgcacccctgaaccccacgggcctttacccgcacccctgaaccccatgagcctttactcgcacccctgaaccccacggggctttacccgcacccctgaaccccacgagcctttactcacatccctgaaccccacgggcctttacccgcacccctgaaccccacgagtctttactcgcatccctgattccacgagcctttacccttacccctgaccccaggggcctttatctgcacccccgaccccacgagcctttaccaggcacccctgaactccacgttaagccccaactgcacggcagctgtggtttgattgttccaagcagcgcatctgtggttccaggtcaaaagggattcttcggcgagagaggcactgagggtgatatcggctttccagggatcaccggcctggctggagtccagggcccccctggattcaaagggcaaaaaggtaaggtccagcggtcacaccgccctcctggtgcggctgagcccgcggtctccgcgggcccagaacaaggccggccggttctgcctgtcagctcgtcccctgcagtcacagccaggagctccccccgcatgtccgtccccacgtgcacacagcccggctgtgcaggacgcgcgggactgacggccgagtctgtgtgtccgtctgtctctctgtacctgccgtgacagcccccttttggcgtctgagtcgcggaattcgtcagaggccgagttacaggagggaatccctttggtgatttttcttgctactgttgtgctcgctgttttctggcgtttgtgaccgcagggaggctgaccctcggagggtctctgggctgtgcccaggctcccgtgtggacccgagaatgacaatatgcacacacgagctcttctgatgcccaggctgtgctcacaccaccaaggccacgtgaaggggacgctggtccttacccacccagccccttatctggaggccaggaggcctcggggcgcctgcatgccccctgaaggatctatctgtcccccaggctttccaggactcacagggctccaggggcctcagggagacccgggacgggccggagcgcctggcatcaaaggagactctggctggccggggaacccaggcttaccaggtaagaggaacccccccgtcccagacaccatgcctgcggagaggtgtttcctccccagaaggctgagcacaacctgccgggaga

SEQ ID NO: 50471 - DNA, 1581 bp, Bovine  19866880824976
  misc_feature (1)..(1): n is a, c, g, or t
ntgcacagctgtttgacgctcatccatcaggatcgtccatatcccagttaccagctgtgctcactgtagggaggcttctcggaggcccttagattcgagcttaccagcgtgggtcccgggacggcaggcaggacgcacagggtgcggtggccgcccctgagacctctcccccgcaggcccagcccgctgctcgtggccgccttcggcgcctgcgccctcacccgacagtgcagccagcaggccttccagaagtacggacgcgccaccaccacctccgacatggtcgccgaggtcgggcccgccttccgcaggctcttcgaggcctgagccggagccgctggagggcgggtgccgtctgcccgcgtcctccgagaggtctccgctgtgcaggttgacacaacgccagtttggaacttagcgctttctgcctaaactgatacggaacggtgttggtgaacttccctcagtctctgcagcttcagaaaagaacgtagagcatcgtgtgacgagacggtctgacagcggctcagctgggctgtgggctccgctgctgcctggagcggaccccgcgtctgagcgtcgtgttcctgcgagaagggccctcactagcaggccccttgggggtcccgtctcttgttcccaactgtgtgtgaatcatgttttaagttgaggtcccgcaaaggttgtggtggtcattctttagttcattttggcgttttaaacagttattaggtcgcacacatctgggcagaaatattcagcattggttggttaattggctgaagttttccagaatagtcagcgatctgtcagaactggaaatgctggaggcccctgggaaaaccaccgaaggaaatgacgaaccctggcccccgagtgtgcagggcagctctgggacacctcactttgacgtgtccatgcaaaggcgggcgtggtgacaggcctgcggtgaaggggtgcccagggctcccaagtcaggtccccggtgggggcccaagctgcccggcacctgctggtggggcaggacagcagggcctctgcctcgaggcagggtggggggtgctctcagaacgttcagaacgcgcgctctctgtactgagctgtcttgtcggcatggggtcggcctgtgtggcgcctggtggcccgtctcgtttctccgaggggttgattacagccctgagtgcgctatccacgtgccttctgcagggcaggcctggcccgagtccgtacatctgtcctcagtgatccctgctctgtgttcagacaaaagatcccagttgctttgaataggctggagttaaggtttctttaaaattgtggctcacttacacctaatggtagaaaagcttcgctactgccgtggactctcttcctttggggaatcacacctaataaaaggcagatgtggttgatttcactggcgagagctgtgtattttttgctcaaacagccagaattcaccttcagtttggtcctcagcgaggacgttgtcagacacggggatgaatacacagctgcccacccagctgccagtgcggtccacgggtgcccgtcgtgctgctaaagcggagggtcagcccg

SEQ ID NO: 50472 - DNA, 693 bp, Bovine  19866881038778
  misc_feature (1)..(1): n is a, c, g, or t
ngctgtggttctttatgaagataagcgtacaggcaagtactgtcagctgacagcaattcctaacaccccctcaccctcctcccaagagagaccctgcacctcccgagagaaaccccgtgcctcccgagagaaacccaatgtgcccgtaagccgaaagcaggtgaacaaaccggaggtgctaacaagtgctccgtgggagtgctccacgggcaatcagaagagggaatcactgttcacagcagaaagcaaggcaacagttcctgccacagcgcccccgcccccacatgggggcaagcacacccagaaacacagcgcgtgtgagaggtttttattcaatctgtaaaggacagtttaaaaacaaaatgttagtaacactcggaggacactggttttgttcatctgacacatcttctatcttcacagattttttattacaaaaatcagaaaagtaaaaattcaggacaatagtcgcacagtggaaccactagttgcctaaacaaaagctaatttctataaaaccataaacttaatgaagctttattaagagagattcaaaattctgttaactggatacacgtagtggtatatattttaaagcagaacaccccaagaaacaaaagcaaggaaaaaagaaagtacaggtcggaagagtcagttaaatgtgttgaccctgacagtccctacaaggagtaa

SEQ ID NO: 50473 - DNA, 1345 bp, Bovine  19866881096665
  misc_feature (1)..(1): n is a, c, g, or t
ntcatgtagaagcaaatcactcgcattcaggttgtagcaccatagaagctacaaaagcaacctcaggagacctgacctcagccaccttttccgcacatgacaggtgacatcggagacacgatagatctccccgggagcccgggcctgaagggggagcggggcaccaccggaataccaggtacccaagccatccgcgtcccccgtcctctgcaaccctgcccctcctctgcagtcactcgtgagctggctcgcgcactgtgccattacctagtgagcccacggagcacgttgtagggctggtctgaggtctccaagcccaacatgcaaggaagagtgggattttttattacattgagtgtgaggacatcaggaagcctgtatctccctgcaagggaagatggcgagaagcagcgcttggtgctgggagtcgctgcagcctctaaactaccatgtaagcctgggctcctgggatgatgatgcacaaagcagatgatgcaatggccggagcccctgcaagcggtgaagggtctagaggaaaagcaggtggagtcagacccctctcctgagtaagacagcaaggaaggcaacccccccagcctatggacgtcagggggtgtcacgccccctctgtaagcatcactgaagttcaaggtcagaattcctgccagtggtcacatcccaaggggcttggactagatgctccttcatgggtttctatctcaggagacaccccccacccctggccacgtgctcctaggaatgctcagggtgaaggagtctgttcgcgtgatggaccaatgaagagggtgctaagctggtgctttaatgagaatgagcttcaggatgggaaggggtggtcggtctagctgaggtcagatcctaagtgacacttagggccaggcagccccgcctacaagctcttctggactcctgtggatccatcttttggtctcccgaaggctctcgtcccagacacatgatgcctcaggctggctggatctcccatccaaaataatcagtgtcccagaaacaccaaaatgtgtgacccggaatctaagtctgccaataagcagctttgcccaaggagttcatttaaaatgcagattccaggagtgatccagacctgaaaggctcaaacatctcctgcttgactaactccccagattccccagcaccacacgcatcagcaagtgctcagatgaggggtctgccactcagatgaaggatccactgctcagatgagggatccaccactcagatgagggatccgccactcagatgaaggatctgatgctcagatgagggatccgccactcagatgagggatctaccgctcagatgaggg

SEQ ID NO: 50474 - DNA, 873 bp, Bovine  19866881133171
  misc_feature (1)..(1): n is a, c, g, or t
natgctggacgagaaggacgtgccggccgccgagcagatgtgcttcgagacaagcgccaagactggcaagaatgtggacctgctgttcgaaaccgtgttcgacatggtggtgcccgtgatcctgcggcagagggcccaggccccaccgcagaccgtggacatcgccagcgccccgccgcccgcacggaccagatccgggtgctgctcctgacgcgccccggcccgatcccggggatccgggtgggctgaggagccaagcggtgtcactctgtaggactgcacgtggaggaggagccgggaggaagtgccagccagtccccaagacaagggccgtgtgacgcgacccccacgtccatcgctgccccgggaggtgggcagcagacggatcgtccggaggagccacctgcagagccaggctcccggagatcggcgtcccctcgctgccccgtcctgacacctggaccctgtctccgcacctgcgtgattctccagggttcctcttcactgtgatttacctttgatctagccatttggtacttgtctcttgatgcctcgtaatgattcttgacaaatgttaatttatataaaatcaggaatcgctgtttttgtattgtttgcagcattgtgagccactttattattaaaaattatttaagaagaacctgggtttggaccttatttgtgcccccgtggactttaatgtctgtcacacggacttgcagtttctcacgtggactgtgggtgaagcatgacctcacacttctgcagcatcccggaccaaattcttaccccaggtcttcactgggcttttcagtaaagaatctgcctgccaatgcaggatggcccagatttgatccctgggtggggaagatc

SEQ ID NO: 50475 - DNA, 2090 bp, Bovine  19866881136137
  misc_feature (1)..(1): n is a, c, g, or t
nacgggggtggggtggggggtgggggggtgctctctgttaggtccgtggggcagacccttgacaagcacctgcccggagtggctgcagctggtgtggacagcggtctgctactgcagcatggtgtgtgtgttccacgcgagcaagggtcatcgcgtagccgagatgggcggccatgtgctgggggaaacccaccccagtggcggaccacacgcagtgtgtatatacagcttgaagatctatgcgctgagcacctccccatggctccacagtgactgaccagttttcaaatttacatcgagctgtttcaaagaacaaaaattccgtttttttcccatatcccagttatacacgtttgagggtgttgatcagcaacatgcgacaggagagaccgcccgttagcgagaccacagctcaactgggagagggcgagaccacgactgctgaggctcagagccgcttaggccccctcccctcctcccgaagccagcaacagccacccacctgggccaccgacagggcccgcgttccccgcaccccatccatccgccgccacccacctccgagagcgttctgtgcacactctgcttcctctctcactccgctcctctctgcttttcacattgatttatattgttgaacttaaggaatcttgtgaggttaagaattatttgctcatactttgacccaagtccagggacccacagactgtgggaaactcttagctccttgaaaaaaatgcaacggctaatttgtgctggttctgtctctgctgaagggagtgggctcagccgcacccttccaggagctggggtttcagtctcaaggctcctgctgccaggcccagggagggcgaacgtggggtgacaactccacggggtggggagatgccgggcccctggctcaggctggtggtacagccctgggaccagtcgcagggtggctgctcctcgtcccatcgcagcttccagggccgttcaaccacctcagtgatccccaacactggggaggggcttcatgtgtctttggattaccaatttgtgcaacactcgactgcgtaggaaaacaggcgcctcgtgaaggtggatgccgttcaaaagttgaaataacctatcttacctgagtttatggtaaaaaaccatagggctgaggggctaggaatctaagtaactgaaataatgatttacattgacctcaggtggaaaaatctgagcacttttcagtgaggtaacgcgcaaaggccaaggtggctctttcggctaaatcatgggcccacctgttgtctctcctgtttcctgtgctctggagccttgtatcccatggagacactcactctgcttcaacaggaattctgtaacagaaatgccctctgatgcttgcagctcgaccgccttcagcctccaccgagtgtacagaaagaagaaaaagaaaacaggagaagacagaacctgccacactgttggtgggaacgtaagttggtgcagccaccatggaaagccgtctggaggttccttgaaaataccaaaatgagagtcaccacctgatccagcaaccccactcctgggcgtacacccagagaaaaacgtggtccgaaaggatacttggaccccagtgttcactgcagcactgtttacaatagccaagtcatggaacccaacgtccatcggcagaggaatggatgaggaagatgtggtgcatgtatacaaaggaatattactcagagcaaaagaattccatttgcggtaactggatggcctagtgaggatcatactaaatcaagtcagacagaaacaaatatataagatcacttacatatggaatctaaagtatgatacaaatgaacttacttagaaaaacagagtcacacagacacatagaacaagcttgtggtcaccaaaggggaaagtgggggaagaaaaatttggaatttggaagtaacttatacacaccactctgtataaaaaagacaaacaaggacagactgtatagcacagggagctatactcaatagcttgtaataacctgcatggaaacgagtctgaaaaagaacacacacacacacacacacataaccaaatccctttgctgtacg

SEQ ID NO: 50476 - DNA, 709 bp, Bovine  19866881196467
  misc_feature (1)..(1): n is a, c, g, or t
nctccgtatcgaatacactgacaaacggatgtgtcgccaatggacacttggacttcccctccacggcccagccctgtgggatggagagcaggagtggccagtgctcggcaggacttaacggagtcggcactggcctagttccagggctgcctttcccgagcagccagggctcccccggcgttaacgggactgaggagccggaaaggagcacccaagtcagcccggagacatgcggctctctgcacctcaacgggagcccgagcagctgcgtggccagcaggccctcctgggcagaggagagcctgcagtacggccactaccacggctttggggacacggccgagagcatccccgagctcagcagcgcgctggagcatgccagccccgtgaaggcggagcagggctgccacagcgccgtgctgggcgccatgcacctgtcccacggctcgtagggccgcgggcctccgcccccgaaggagcgccacgcccgtgcggcgtctcgtgcttcagctttctggaaaagcgcgctccgagtggccggcctcctcaagtcctggtgcgagtgcaggcagggcctactcagcgcgcggctgtctccgtgggacggggggcctctttccggacgcgcttttagaacctacgttttctgctgccaatctcgatattctcttttgaataatgtcaccgtaaattgccattttctcttctg

SEQ ID NO: 50477 - DNA, 1054 bp, Bovine  19866881505286
  misc_feature (1)..(1): n is a, c, g, or t
nactgctgcacgtgcaaagttagataaacatgcgcccagcagggaggaccccgctctaactttacctttgtcccgttgcatcctggaatacctgggggacccggaggaccatcctggccaggaataccctgcaattaacaaaacgaacaagtaaacaagttagaaaaccatcaatgctactgtaacacacatcaaacatctcataaaggaactagaagccttgtatatacatacaggaagtcctgggtttccagggtaaccaggcactcctgagggtccctgtagggatggaaaggaaaaggttttgaatgggtgcgggagaaccccattttctcccaccgcaccctcctggataaggatgtcagactctcactgctggcatttggaacatcgaccccgagtagacagaggcgacggaggacccggcccaggggtgggctggagatgacctggagtttcagtagcaactcttcatcatcaaaccctggtggttaattacttctaaaatcaaggctgcacacccacaagataactctgccctcgtttcatcctttgtaatttctaggagatgagagatagatgtacagacagagagatgggtagatggatagataggcagatagagagagagagaatttacagtaaaatctcagacagttgggaagaacagggtaggcataaatcagttccctgagggaagaaagtcagagctcttcctggctgaaatccagatcttcactgcagacagttacaatgctatctgttatctttctgccccaaggaggatccagcaggctgggcacacttcccttccgagaagtaacaataacacaattaaaacgtttacattttacagcctcttctatttttcaaagattttttcaaagagctccctgcttgcacatcccaggagcaggcacagcaaagacagcagagcgtgaagaaggaagacggagcgtggatccgaacacatcaccacttttcacactgaccgaaggcatctttgatgaagacctggagacgcgtcatccgcccccccccccccccgccccgc

SEQ ID NO: 50478 - DNA, 1730 bp, Bovine  19866881676869
  misc_feature (1)..(1): n is a, c, g, or t
ntttgagacgttaaataggaagatgccttttatttttttaagtttagtatgttgatttttaaattactatctcccaaatcttgtttagtaatcaaatgtgcgtaagagagaagttagttacagagataggaagagcagctccttctttaatgaagacttgctgtaaatctgtatgctctttcatatcaccttcagatagttagtcagtgcagcaggagcagagaccagatgaacgtgctaatggggtgtaattcagtgtttttgtgtcgtacagcctgagaaatgccagtggcctgacggcagcagacattgctcaaacccagggtttccaagagtgtacccagtttctcttgaacctccagaattgtcatctgactcgtttcggtcacaatggcaccttaaacggaggccatccgagtgtatttcctagtcacgttagtgtgggaacaaaccgcaagagatgcctggaagattcggaaccctttggcatgaagaaagctcgaccagcaggtgagaccgctttgtgggcggggcaggcaggcctgtttcttctctaacgtgtgttcttcttacggctgagcgcgcctcggagacggctccctcactaagggtgctgtgccctgaggactctggtgcagtgatggaggaggctttcctgtgttgcttcttggaagattggccatttaacgagaggggaggatgtgcgagggcagttcggcccaagcgtaaatgtgtgtatgtaactctgcacacccaggtttacctgccgtgaattagagtcttcccgtttgttgtacctgcttgaaatataactattaaaaaaatctgcccctgtgcctcattttttcttcctgtgaattttcctggacttagaacaattgttggtctgatgtaaaatacagtttcacatcggggaaggtgggtgtttgcactgctacgtggcctcagctggtctgcacacctgggtgtggggggtgtgtgccgcagcggggcccggtgtgccgcctccacactgaggggtcgcgtctccaaggtaagtgttctggttctcatgtccttccagctttttatctctagatggtttcaggacggtgtaaataaacagtcagctagtcactctttgaggtgtccctttcatttagggggagaaaattaatatatataatcagaagacgttagtagcttggcaggaatgttcagcaaacttacatggaaagggaagtttagaggtgacagtgaaagtaatcacactgaaattatgtgctcagataagatttgccaaggataaatacaaaatcatgccctttggtttttaaaaaaaagaaactgttcaagtatagtctgagaaaaccggagtggctcctgtctttaaattcgatgtgtcagcctgatcctcccagcgctgtgcctctttaatgtaactggcacatatccagacaagagcatttctcccagagtcagtaaaaagtgaattctctccttcacaacatttaagatattggtcactgtgaaaagttgtgattacgcaacttttctatagaaatgaatgtatggacttaatagtttctaaaattcgtaacttgtataaattatgggcctaatccttagaaagatgttgtaaaagtcatacccagaacatgaaggtatgtgtaaacttcagaaactaatccccgttctgtttcctgcctggttagtattttggggggggggggggctggtttcactgtgtc

SEQ ID NO: 50479 - DNA, 1072 bp, Bovine  19866880341778
  misc_feature (1)..(1): n is a, c, g, or t
ncatggactgcagcatgccaggcttccctgtccttcactatctcccggagtttgctcaaacttatgtccattgagtcagtgatgccatccaaccatcttatcctctgccccctgcttctcctcctgtcctcaatctttcccagcatcagggtcttttccaatgagtcgtctcttcacatcaggtggccagagtattagagcttcggcttcaatatcagtccttccaatgaatattcagggttaatttcttttaggattgactgatttgatctccttgcaatccaagggactctcaagagtcttctccagcaccacagttcgaataggaaaagttttctgagacttgaggatttcactttgaaaaagaggacacccttacccatttctctttcactttctgcttcttcctccattcatttcctaaacctcccagaaaactatttccccagcaagacagcctgtgtttgctgcttggaagttctgcatgtctgggatccttccctgattgctaggggcttcccaagtcttcctactcaaccattcagccctggtctgggaaaaaatgatgaagccaatagctgcaaccactcagggatgatcttacaaaacctgactcttgtgtgcatctctgttcacttacgccttctgttgtcctgtggtcgctgatgctttatttatgtcgggcatgcggactgctgtgctggccctttcagagcgtctggcaccattgtgggagcactcagttctgctacatttgtgtcacacatttgcgacacactgaaaggatgaagttgggaggttcagggaaatgtcagcctgggatgggtgtgaggctagctgtgtttctctgtctaccagaagaaacattactttaaattgatttgtcgctttcaaaaccacaatcccaatgaatgtttcataagaggctactaccaacttttatggggacactggtggtccctgcagactccagatctgctatgaattgattttcagacttctgcttattctttgaactgccaatcaaatcatgcagtaacttctccttaaggaaacttagctaaagaaagag

SEQ ID NO: 50480 - DNA, 2645 bp, Bovine  19866880432081
  misc_feature (1)..(1): n is a, c, g, or t
nagtcatgcctacttaggcccttggtgttttctccacatcctggcttcatacaggatggctcagagggatgccaaccctgtgtgtgcagagtggagacacacaccacgtgagtatcaccctctcgtttttattaaaacacgggcaggatgtgcaaaatcagaaacaaggccaaagtgctgctccatctctcaccctcagggattatgcagagctttgtaagctttgatacatgtttaaaagacaggataatgcttcatttggcctgctgtactctaagatgtaccttttaaggagagttttccaaaagaactgctcttgatggatatcctataaaaaaagctctataggccaaagcacataggtatgttaaagtacctgagaagtctggctggaaagaagcagctttaactgcctgtaagtatttaatcatggaactttaggttgagtcaatattcattaatacctgtaaaacacatttcgggaaactgctgtaaagttgtgagagtgactgttttttccctaaatgttccataacgtaaacccgagtgctgtcttgtagaagagttctcttaggaagttgtgtgctaatttcagtgatgctgcgttagctcaaaatatttttaaaacttagatctctagaatctccttcaaagccttttgtaaaccacatcattaatccaaaaagaataattttacctgttattctatactagtataatttaataatgtgattattatatataatatacaattattaaatattttataaattatattataaataagatttgtagattataataaatatatattatttataataattgtaattgtcactatttgtggagtgcttttatgtgctagccacttatatatagtacctcctaaaagtcctgtgaatttgatcccacatatctagggtctaaagctttatagctgtttgttgttcagtccctcagtcatgtctgactctttgtgaccccatggactgcagcatgccagtcttccctgtccttcactatcttccggagcttgctcaaactcatgtcccttgagtggatgatgccatccaaccatctcatcctctgtcactcctttctccttttgccctcagtctttcccagtgtcagggcttttccaatgagtcagctctttgtatcagctggccaaagtattggagtttcagcatcagtccttccaatgaataatcagggttgatttcctttaggattgactagtttgatctccttgcagttcaaggcactctcaggagtcttttccagcaccacaattcgaaagcattaattcttcggtgcccagccttccttatggatcaactctcacattcatacatcattactgaaaaaaccatagctttgtctatatgaacctttgttggcaaggtgatgtctctgctttaaaatacattgcctaggtttgtcacagctttccatagtctctgcatacttcatacttcaccttaaaattcccactgcggtaaatacacacaacaggtggtgtagccatgttgactttcgtcaggggagttgattcccactggcctgttctctccacacagtgcccccctcacatccttcaagatgagagaacggcttctctcatctgaggttttcccgtctgaggttctggtatctgctcctctccccctgaaaaaaaagacaagatgatcaaaccagacaaactaaatctcatggccattgatttttgttgaactcactttaatcttggtcttactaaatcatctattttcaaaagattttaccatttttatgtcaaaagatttagtgactcgagtaatcatttgggtccaggtgatttcttctacagtaaagatgaaaacacattcagtataatgaatcaaaatgatcttaatactctttcccttggcagctacagggccctggtcatgatctatgtgctttccatgtaggtaaaccagaaagcattaggatcatggctggtggcaatgtattttaagtgcttatcctcaagtgatttttcacaagaaatattcaattagattgccaaaggaaatgagaaaccaggtttcttactcaaaattgaaggcattgtacaatggtttacttaacatttttcaagacgcaatctacatatctttttagttagggaaatgggaattaaccagggcttccctggtgccttagaaggtaaagaatctgtctgctttgcaggagacccatgtttgctccctgggtcaggaagatcccctggagaaggaaattgcaacccactccagtattcttgcctggagaattccatgatcagaggagcttggtggtctacagtccatgggatcgcaaagagttggacacaactaagcgactaacacaacaaatgcaaataccccaagaagaaaggggcacggcacagaaagaaccggtttggatgtctgtttcaatcagattgcacagtttccaaggtggcaagtgtgttagtggcaggcttcccatctttccacacaactgctcctctgcacagctccgattgcctcccaggtttctgagcttcccacagaactgacttcttgaacaatcgcctcctctccttgtcctttccttcagccccactctgttctcaccttcccatgccacccagctctcct

SEQ ID NO: 50481 - DNA, 1246 bp, Bovine  19866880634420
  misc_feature (1)..(1): n is a, c, g, or t
ntgtgttgttgctgagcgttgattattgaactcttcaactgttactgggatttccgttctaagagtttttacttcaaatattttgaagccttttgtttcactgaatgtacatttaagattgtcagggtcttcttatgaatttatttagctttttatcttcaaaaagtctctctctttgtccttgggcatgtcctttgtcctaaaatgtgaaagtcatagaactgtacccttcccccaaagtcgtacactcagtccacaggctcagctgccacacaggctgtgaaatgaattcataaattcatttaattttcatcagagccctgggaagcagatactagtatgatctctgttttacccatgaggaaagtgaggcttagagggacgaagtttctggaagatcaagcagcttggaagtgacaaagcccttgaccctgtgtccttcccgtctcctgccttgcactcttgacctttggtgatcctttctcttttactacatactaccttgtacttgatttttctgtacctgtctcaccagttcgtgaattgaaggaggataagaacctcatgtcttcaaagcgtttaacggagctcttaccccacagccagttgagagggaggaaaagagggagagatactatcttcttcgttcctcattttggaaaagaaatagccctaacctcttagaattaattgccatcaaaatgcatccttatcaataagattaatctttcagtgtgactttgttttactcattcgagtcagctggcaggaaatgtgctgtcctataaaacaacagatggcagaaaggaaatattcattattgttctgttgtccagtttattatacctagtaatgatattctttgggataatgtgttctgagatatttgctcctgttagtcttgcctataaattcttgtcccttaccagattgatttttgtgctttctgtagcattagataaatatttattcaaatgaaatatatagtctcaaataatgatagaaataagcataaggagaccctgtaatcagtaacttgaagtttcctttttattcgttaaccatacacaatgatatcttgactaagtctgttagtattaataactagggcaataaaactgttttatagaaaacagctagcagggtacatctgcttccccagggaaaggggagggtattagaacttctcgaagaactgcttaaagaggttctttcttcattagatgaagaagaaacttgacgactg

SEQ ID NO: 50482 - DNA, 1419 bp, Bovine  19866880869059
  misc_feature (1)..(1): n is a, c, g, or t
ncctggccatgggctctccaggtgcgtaaagaatccacctgccaatcaggagatgtgggttcgatccctgggtcaggaagatcccctggagaaggaaatggcaacctactccagtattcttgcctgggaaagcccatggacagaggagcctggcgggcaacagtccaaggaatctcaaaagagtcggacatgacttagcaactaaacaacaagaccctgtccatctatggtttaacaagcccttcaggtgactccacaaataagatttgagaactgctgttctagacactggctcccaattgctgttccacagatggtctgtatcagaatcacctggagaacactgacaatttcaccctcagagattttgattcagtaggtttcgataggaatcatataaaatacaagacacttagtttaatttgaatttcagataaacaatgaataattttttttagtgtgaggatgccccaaatatgaaattcatgaaattcaaattattttaactgtgtatcctgtatttttatttgcaaaatcaggcaacccaacctacttctaacaagcttctcagcagactcagccaggtttgccctaaatcctccgaccacttgtgtattcttatcacttccccccttccagacattatatttttgttgatgtgggctaagataacatgtgcttttggcagccacattatgatattgacttaaattgagcctatgaccactgaaaacccctaaattcttcctaaatatgctccttctaacatatgtctatctcactccaattttagaaagttcgtttgggacccagagtcaggatgtggcatttctcgtgatctggtttcaccttttcagactcctcccatcttttccgtctgttgagtctttttagattctgactctgaatttctgaaccttcccaagtggtggtctcactgaatctggtcatcaggttttcaaagttctctccagtcaatggtgaatatactagatcggacatgggtgaagacggagcccttcgggccttccctagatacccccatctgatatgacagggacccattcatcagctccctctgagcacaggttaatccgcccaccaattaaaatagcacagaatgttagtttccaccaacacagtgtctctccctccttatgaaatctcacaattctgtaatagataatatcagataagggcttccctggtggctcagatggtaaagagtctgcctgtaacgcgggagacccaggttcaatctctaggtcaggaagatcctctggagaagggaatggcaacccaatccagacctgatgtctgcaataacttcctggtctgctggtccagcaaccctgactaggaaagaagtgggctcagcatacaatgatttggtcttaagggcctggccgctctgctagg

SEQ ID NO: 50483 - DNA, 2385 bp, Bovine  19866880873201
  misc_feature (1)..(1): n is a, c, g, or t
ngatcctggcggcctacagtccatggggttgcaaagagtgggactcaaccggagcgactgagcacagcactgcacacaccagccaaggagatattccacaggcattcaggagcctctttgcatacaatggtctctccagtggcatttgacttatggccttctgagtgttggcattcattgccccacactgcagctgagcacgcttcacacattcctccaatcttgaaagagccacagaaacccatcctgcttcttcactttctgtcaaaaatgcgggaccagttaggggaaggagtgtatcactgggaactcttttcccttccctgttcttccttgagtggtgatggctccaccgcaatggtgcgcagcatctctggtgcacttccttccatctagcagaatcaaaagaacttaacaggtcataaagatagtcatatgtcaaactcactcaagacagacaaaaacattttcctgggtgccttccagatccaggtcttcagaattacatgtaactgctgctttggactattgatttgaactaatcattccacgtccaccctggtggctcagatggtaaagaatctgctgcagtgcaggagactcaggttcgatcactgagtcagggaagatcccctggagaagggaacggcaacccactccagtattcttgcctgaagaattccatggacagaggagcctggtgggtgatattccatgaggttctcaaagagtcagatacaaccgagtgactaatacttttactcacttttcacacttatgacaattatttcgttgtatgttcactgattttttctgacacatctttctactaataagtaaaaaacacattaagaaaattgttagcttattatataataccctgatggaagttttagtataattgaatttttgttttcccttgagacacaaatactatgaatgtttcatagattatgtaaatggaacagtgaaaactatttgcaagtcacgccatttaatgtgtccgggaaaaatattttaacctcctttcctacagagagaagcaaaaaagacataggccttgttgaaatggaaaaggtggggttttgtgctgtctctcaagaataggtttggggtgggggtacaatgtggaagtgaacttcttctccttctgatgtgagagtaaaaaccagtgagaatgaaggctggcttggggcagaaccagatgcatgttaatacaaatgcaacctttggttaaatggtgtcctcggccttgttccatctactcaaggttgtacacaccacatctaggtcacgactttcccaaggcttaaagcactcacatggttggtgattgcttctgatttcaaaactaactgatgaactaagatggacatgagaaccatgcccccccccaccaccgactccccagataagttctatccaatttgataagcaaatcatgtttttatcctgttggagggagggggtttaacttccaaactgctgaagggtgggctgtttgttaatttcgtaaaaagaaaaccagcactaaagtatttttaagctttatttggtttaagttttgcatgaaaataggcacgtttctcatgaattgatgcattgtgtttacaagtttcatccttggaatgcaaccagttgaactggttatttttaatccagagaatgtcatgcaaagcccaatactcaacttagtcatgcaaacaaaggaggcaagcaaaatgctcccaagtatgctgacaatttagcttttctcctgcaaaaggcaacaacctttaacttgagaaagaagtcccagagatcgtaaatactgttgcacaaacataaggcagcatttggtttaaatacttacatagcttatcaaaagttttgtaccatcgacagagttccattgtgctctaaacaatctattgcttcatagtcctggtttcttccctcaagtcattagaaaaaaattaggtagcagactgaacacatttctacggagtagcagcagagaaacttatggtgatgccaaaggaagttttggaaattcgttgttggggaccattttccctgatagaataaaagccttcaacttttggaaattggagctatacaaggctcttaattgttacctaaaattgtcatcattgctcaaaaattttctggcagaggaaataggggcaaaaagtcagtctaatcaaagttgggtggtaagattagaaaagggttgagatcagcattctaactcagagataaagtctagtacctgtgtgtatatgtgtgtgttaatgaccaacgacagctccttttttttaattgaggtatagtttgagcttcccaagtggcgctagtggtaaaccccccgtctgccaatgcaggagacacaagagacgcaggtca

SEQ ID NO: 50484 - DNA, 2003 bp, Bovine  19866881023568
  misc_feature (1)..(1): n is a, c, g, or t
nataatacataaaattcaccgtatctgaaattgtgtgctcctgtatatgtatatgggtttcccttgtggctcagctggtaaagaatctgtctgcaatgtgggagacctgggttcgatccctgagttggaaagatcccctggagatgggaaaggctactcaccccagtattctggcctggagaattccatggtctgtacagtccatgaagtcacaaacagtcagacacatacatacatatacgtatatatatgtgtagagacatgcatagagagatggtcctgcaaatgtttatatgcctgagtggtgtgatttaggagtaatgtttgccttcttcatatagttttgaacttcctcaaagttaaaaatgactgattgcacatctgttatatgtgaattggaaaaaaagtgatacaaatgaatttacttacagaacagaaagagacttacagacttagagaaggaacttacaattgtagggggttgggggggattaggggaaaggatagttagggggtttggaaatggacatgtacaaactactgtttttaaaatagataaccaacaaggacttattgtatagcacatggaactctactcaatgttatgcggtagcctggacaggagggggagaatggataccaagtagatgtatgctgagtccctttgctgtttacttgaaactatcacaacattgttaatcggctattgattgctcactcagtcgtgtatagatggactgtagctcaccaggctgctctgcccatggaatttcccaggcaagaatactggagtggattgccatgccctccttcaagggatcttcccagacccaaggatcgaaccccaggtctctttttctcctgcattggcaggtgggttctttactactagcaccatctggggaagcccatagttagttatactccaatgcaaaataaaaaagtttaaaaattaaattacctgattgctctgtgacatggatttcaccaaaataaaagccatgagaatatattgtaattttattacaattaattataattaaaatcaagaaaaaatgcaattacctttattttggaaaaaaattatctggttaattgatttagcaattcattttgtttcaacagtagcaattgactagaaagtgagacatagagatttagtgacagaatctcctttaccgtggactataaataatgttttagaaatgtccctatattttggagcagattttaatttggggaatttttaccaaacatttaaaaattttctcaacatataaaagatcaaatgatagtcaaatagctaattattacttgatattttgatattatttctttcttacagccttagtagaaacagtattaaagacttaaaaagtactttgagctcttgctctcttggtttttctatgaaactattttggaggagtgccaagcatgtgttcaacaaatgttttatactagaaatattttgctctaatcacaaactggtggaataaccacgataattcaagcgttcttttgttcataggcttccacgttttgttcatttgcttgaaatatgtgctttgtttttagctgaaatcaggttcatatgtgttgagaaataaagagctgtgtatttccagaactatattcttgtaacatgagctctgtaaaagattttagaaagaaggaataatcacttggcatcaagtgaaaagaaagctatatacgggatatgttttcacagtaagaacatttgattttggtcaaactcatgtcaaagaagaattagaattaattttagccttggtatgcctaagatatggacagccagattatcttaataggaaacatatttatgcattcagaattgcttacgctcaggcagagttttccattgcaaatactgtagcctcatgcagcaaatccatcatttatgggaaaacctcaactattcagatcaccaagaaagtcaggaaaaaaaaaaaaaaagagtccgaatactaaaatagaagtca

SEQ ID NO: 50485 - DNA, 1738 bp, Bovine  19866881037067
  misc_feature (1)..(1): n is a, c, g, or t
nacttaaatagatatgtaagatttcatgatcggaaaagaaaagaaggggcacttgagttgtgaacaggcctatagaagtgagatggtgattgcatctgaaggagatgagcagacaaatttgattggattagacacagatgtaggctctatatggtccccctgctaatccagtgcctctgttttgttttttattggaatattgttttgttttatttattggaatattgttttgttgttgttcagtccttaaatcctgccttactctttgcacctccatggattacagcatgccaggctcttctatccttcagtatctcccagagtttgctcaaattcatgtccatcaaggcagggatgctatctagctatttcatcatctgccacccctttctctttttgccttcaatctttcccagggtcctttacaatgagtcagctcttcgcatcaggtggccaaagtattggagcttcccagcgtcagtctttccagtgagtattcagggttgaatattggaaaatagccacaaaaaataaaataaaatactcatgagtgtctctcatgataaagttccttccactggaaggaattactggtgacttcctctttcactgaaactgcccaatatttattacacctccttccctctcatcttgtcctcctttgtctacctaaatctcaattattcactcactcagcaattcgcaggggagctccagagactttttgactcttacttctgaattttaaattcccttataaacaaaaaccccttttcctattgattttgtctcagttttctggaaactctaaatgattcttggcttttctacatcagtctcagagtaatcgctttcttttccctttggagcttcttaaaacaagtcagcataattgtgtctacttacccctttagcataaagccttcattctagtctttaaagccactcaatgatcttggaaatgttttcttcacattttttttttgttcactctttatttttaaagcaagtaaaagcaagcaatccaagtatgtgatttatttttatgaacaagaagacccagagaaaagaaaatcctttcttcctgagaagcaaaggtctaactgaccataacattattgcttcaaatgtaattccttaaaatataaggctgtctttctcaggagacaagcacactcaaagccagcattattccactgaaccatgtcagataaagtgcatctttttcttttctccaagatcaatataataccatatacaaaaggaaaattatatccatgtagacaaaaaaagtgcttttcagagggaaatctaaaacattagatgctctgtttctccttgtaaacatatatacttttttctggaaagggccacacagatctttgcagtggttgcttaagatcatagatgatgatgagagtcagttccactttccacaagaaaagaaaaatcactgctcaggtacagccaaaggtttccagcacagataaggaatttcctaagtgtttcccataagataagcagccagatttacaaaagtgtaaggatgttcaccaccacatttcattttttgaataataaatcccagaagcaatctaaaaatccattaatacagaattgattaagtaaactatggtctggttaaatatttgaatgttgtgtaatcctttgaccaatgatgtatatctacatccttagacagggaaagaactatataagaccttgatttaaaaacaga

SEQ ID NO: 50486 - DNA, 1613 bp, Bovine  19866881064908
  misc_feature (1)..(1): n is a, c, g, or t
nggatgttaatgttcttcctaaccttcttagggggagttttctcatcactacctagtagaaggctgaggagctcagaaagcctagagctgggctcttaggaaagagtttatggatctcctgcagtgcgattaatagtctctgcatctgtgtgcatgcttagtcgtgtctgactctttgtgccctgtggaatgtagcccactcagctcttctgtccgtgggattttccaggcaagaatactggagtgggttgccatgcccttctccagggggatcttcctgacccagggatcaaaccggggtctcccacattgcagaaggattctttactatttgagccaccagggaagtccctcgatacatttgatactcttttaaaaaccatgcttgccttctaaaacatgcaaataatcgagacaaatttataacagctcacactcaaattccacttgatagctggttaaaggaaacgaaccaaactttcaataatagagctgggagggattgggggcaggaggagaaggggatgacagaggatgagatggctggatggcatcactaactccatggacgtgagtctgggtgaactctgggagttggtgatggacagggaggcctggcgtgctgcgattcacggggtcgcaaagagtcagacacgactgagagactgaactgaacaattaagaaaccatcacattggttaatccatatttccagtattatttagtaaattttagcaacattaagataccattatacaccgatttactaaatacatagaaatcatgaaatgccaattttgtgatttgttggatctgagactgacataaattgttttaaataaaattttaaatgtttctggtcacattttccattgttttagtttctctgtgggaaaaaaaagacatggtgacctatgaaagtactggatataatttggcactataatcctactctatggaacattctacaaggaaatacacagattaaaaagttatttacttaggaatatttatagtagtgctataaatatgattacaaaatgaaaacacaactaggaaaacccaaatggctaagaataagagagagattagcaaagcctgtcccatgacaacagaagatcactgcaggactgtaagaaggtcaactgtgtgactgatgcatgaaaatgtgaaataaaattaattttctaaagcagagtgataaaaatgtcaactgtgaaaactctgttgacatatggaaataaaaattaaaattaatttgaaagagcagagcacatcctttcctgatttccttcatgagaaaacaacatccagcaaagatagtaagagaatttatagggaaataaatgaattgagttgggttcattggattcttgttctttccttcaaaggtgcttaagttgatctgtattcattaataaaacaagaccacaggaattttatgggcagcacgtgagatctatgaataaacagacaagttcaggcccaggcagtgtaattaggaaacacttgccttttctcctctgacatggcccatcctcaaggcaggtgaccacatggtttactggggaacaacatttcttcctaatagatatgcccagtcggatcatgtt

SEQ ID NO: 50487 - DNA, 2193 bp, Bovine  19866881134068
  misc_feature (1)..(1): n is a, c, g, or t
ncaaagcagggaaggtgggttcgatccctgggtgggaaactaaaatcccacatactatggggcaattaagcccatgagccgcaactactgagccccgtgcgcctcagctagagaagaaggccatgcactgcaactcagagttacatgctgtgactcagacccaacagagccaaaaataagtaacaaagaaatattttttaaacaaagaattgcagaggacgtatccattaattatctcttgcatcaatgatgcaataaatggatgaatgaagtagatcagagctagcactgaaacgactgcagaaataggaagacgtgactcacagccttgcaagtaaaactgtggcccgggaactgccaagggtgaggtggaatttcaaccagccatggctcagaaaacatgtgaggctcccctgatgttttttgaatcattctctggctcacttgattaatgctgtatctcactttttaccattttaatttctttgaacataaagggtaccctaaccactctcccatttccacccccagttaaagcaaaccacccagacatgctcatgagacttgggcccacttcttcaggagtgtgttgcctgtccacagagcttccagtcagcactcagatttaagtaaaggctccctggaacccatccacaaagatgtgctccattaccaaagaacttatcctccagcttcaaaagggaataaattttgtgtgcagggaacctgctgcatggggaataagaaatagtcacttaagtttataaaatcttgcatggtgctatctgcttcagttttctcttttaaagctagaggatgactatgaactttcctgatattttttccatattctcctctgctcccctaatcatacctttcgagccctgtccattacttacaggagattcgctggttccgaagatgtctctgacatccctgacagactgcttgttctttttcctcaaggtttgtgtgtaagtattgtatctcttcttcactgcagctgcctgggttcgagtcaaagtagagagcaaggctttgccatcttcctcctcatcacccgagatcagggttgataaaccaacatcttgcaaccactctgcttcaagttctccttctgtaaaacgaagttgccaaaagaaggtgagaatattctgggattggatgatgtgtatatctgtaagtctgtacacatcagtgaataagaaatatcagtaaacaatattaataagaccatcctggaccctgaggacattatgccaagtgaagtaagtgagactgagaaagacaaacaccaaacaccagatgatctcattacatgtggagtttaagaacaaaatgaagtaaaaagcccaagtacataaatacggagaatagactggtgtgcttagcagaggcaaggggtcggggtgggcaagatgggtaacggtggtcaaaaggtacatactccagttagaaaataagtaagtcatgaggatgtaacgcacagcatggtgactttatttaataacattctattgcgtatttgaaaattgttaggaaagtaggaccttgaaagttcttaccacaagaaaaacaattttgtaacaatgtgtgacaacggatattaactacacttactttggtgactgtttcacaactgtatatgtattcaaatatctaatcattatgttgtataccagaaactaatacaatgggaatagaaggctattgatgaagaacatctacaaaaagttaacagttacaaccattttttgtggtgaatattgaacccttcccctgcaaaaccgggatcacagccaggatataaactgtcattacttactttcattcaacttatatggaggccttaccagaatgataaggcaagattaaaaaaataaaaacatagaagtcagaaaggaaagagtaaaaccgtctctattccccccaaaatctctttgtttatttagaaaatcctaagacatttagtaggagaaggcaatggcaccccactccagtacttttgcctagaaaatcccatggacggaggagcctgataggctgcagtccatggggtggctacagttggacaagactgagcgacttcactttcacttttcactttcatgcattggagaaggaaatggcaacccactccagtgttctcgcctggagaatcccagggacgggaagtctggtgggcctgcccgt

SEQ ID NO: 50488 - DNA, 1133 bp, Bovine  19866881217127
  misc_feature (1)..(1): n is a, c, g, or t
ncgtgggtctagtttttccccaccagaaaggtactattttatactttttaaaggtactatttctcttttctctttttctttctcggaagtgaagaaccatgtctttctccaggtccgagggtaaggtgattctgattcacggcacaaccaaggaaacttctttccttaagcaggggtggaggatgagctcagactggttagtgctaacgactcgagtagactggttaagtcttctagatcaattagtgaaggtgctggtttgtcctggcacagagggactcgttgtaagagcttaaagtgtgtgaggggcttccctgatggtctggcagcaaagactccatgttcccaatgcaggggctctggctgggttgcatcccgggtcagggaactagatcccacatcctgcagctaagagttcacatgtcacaaccaagtcctggcacagccaaacacataaaagcaaatcttaaaaaattaaaaaataaagtgtgtgaatagttagccaggaagctcctgtggctgggcagaattgctatccgtaaataacaattctgatggttgcaccttctcagcgcccagaaaggatcgtcctcttaggcagaaacggaaagtctcatctttcccatcctttgtggagttgcccacagaggaaaagcacagaataacctcttcaagaacaacagacccaacaatctcggagcaacaagggaatttaaggtcatctgtctggctctggtcagatgcctgattcccagcatgctgtggatgtcccagatgacctgcctgttggtggggttcaggagttgtatgtgtgtgatgcacacgcctgtcctcagatcccagggacagttggacttggctggagaaacttgtgtcctgtggttgcccactttggctcccagatgccttgggaaatgacacataaaatttttattaatattataatgtatatgataatccatgtgagttcacaagaatccacacagctcattttggttctaattagaatctgaaaatgcattctccgccataaaatccgtatcatttaatcattgaattactaatcccatccacattagtggttcccaaattgtggtgcctttaatataaataccaatattgaatggattaca

SEQ ID NO: 50489 - DNA, 1703 bp, Bovine  19866881467950
  misc_feature (1)..(1): n is a, c, g, or t
ntctccttttgtctcatgattacttacgcacaacagactgctggttaactgatgggcctgacacagcaggcacaccagcattgtaaatcctttacccttaaggcctttacttgtccgtgtacacagtatacagttaagtttggtctcctgggaatacttcttaattcctttatttcacattcatattctaagttaggagaagcctttaatcctactgggcatgtgtgtgcatgtgtgtgttagtcattcagtcatgcccgactctttgggacaccatagactacagcccgccaggctcctctgtcctccgtccattctccaggcaagaatactggagtgggttgccattccctctccaggggatcttcttgacccagggattgaatccaggtctccctcattgcaggcagattctttaccatcgaaccagcaaggaagccctcctgttgggcatacccaacatgtttcctgtttgttgctacatctccattagaaataatactaaatacaaatgtccttgacttaggatggttcaacataagatttttcagttttacaaaaatttgatgctttttccacctagtgatatgcagcaagatactctctcataatgctggggaaacagcaactgagccacagctcccaattagccacatgatcatgaggatgaacaactgatacacttacaaccattctgtacccatacgacctttctgcttttcactttcagtatcttattcaatacattgtgtgtgctggccttagttgctcagttgcacacagctctttgtgaccctttagactgtagcccaccagtttcctctgtccatggaattctcaagcaagaatactggagagggctgccattttcttctgaaggggatctttctggcccaggtatcaaacctgattctcctacattgcaggcagattctttactgtccgaatgaccagggaagcccgtgatattcaaagtagggtaggtgtattttcaacttatgatattttcaatttatgatgagtttatctggacatgtccttttcattaagtcaaggaagatttttatgaaaaacaaaatttaagaatctgcagtcttatgattcttgataaaatgaattttcaaaaatcaaataatgtctctaaaaagttcaccaagctacctgaatgaatgtaactatatagatgttatgaaagaaagtgaaaagacttcttcctttctagcctaaagaacttgcaatcttattttattgtattcctgtgagttgtgaagttgtaaatcagctgcttttctgatgtcaacccaaactggttttcaaccaccattatagtctagataagaactaatgaaaggtagattttttttatggagtaaccaccttttcttcatcttgttttactatcttgtctaatggctcttgacccaccttgcaatttctgtgacagtgcgggcctcctgacctgtgcacctgctctccaagtgcttcaccacattccctgttccagtgtgagacattgataaattctctctgagatacaaggaacgataggtgatttgaaatgtatgtattttcctctgttcccacttgtttctgagaagtctttcattctgtttctgagttgagctgattgattctgaactagttgaaactcaaggtccagagcaacaagctagaaaaaaagatagaaatatgttttaaaagtg

SEQ ID NO: 50490 - DNA, 727 bp, Bovine  19866881562445
  misc_feature (1)..(1): n is a, c, g, or t
nctttaatagttccgtgttctgaaaaacaagctgatcaaatgaatcccctggaaaatgaacacaagtgcctggaggccactctgtggactctgacctctccagaagattcaagtccagactgcaatgagccctgggtttgttttctaaacagaaatccttgaagcccaattttggttcagcatcatccgtggctccagggtcactgagggacaaggactgtgctcaggcggacaggagactagggatggcccggagtccagactggactgtacaatctagctcaacttatcctaagtttttgagcaacatttagaacagacctggtctgcacaaaggcaaggtccaggagctgcttatcccttggttggtttcagagtcaagataaagtgaaaacctgactgaatattaggagagacaaaaggaaaaccccgaataattctcctggagcctgtttcttgacctgcattaagaactacatgttatagatcacatggaaagaacaaaatgaaacatatgtttttagccgtagaaatctgtcttagtagttagagaaaacaactgataaaactaaaatgaaaaaattctaagaacatgaacctacaggttaaaggattaaaaaatgccttcccttccttctgcctaaaaaagagtccagggaatatttcctataacccaaaattgcttggatctcactttcatgatcaagctgacttctataatacattt

SEQ ID NO: 50491 - DNA, 1066 bp, Bovine  19866881885000
  misc_feature (1)..(1): n is a, c, g, or t
nttttacttttatgtattggagaaggaaatggcaacccactccgtgtttttgcctggagaatcccagggatgggggagcctggtgggctgccatctgtggggttgcacagagtcggacatgactgaagtgacttagcagtagcaaacctctttttactatactgtgctgcctcttataccaaatctagaatgttatttataaggaaatgtcatttaaggtatgtttaaacacagctgccaaaacagtagttgtagggtgcttaaaataaggacagaatccaatttattagcgtgcttcaccatatattccactgacacaaaattcctcagaagtgtggctcacagccattctcagacatactctaggtctgtataaaataaaggataagcatttaatggtagttttaaaaacacagccgatagtaaagcaaaattgagtcattttttcccatacaggaaagtaaacgagactgagctatttgatgttttcatccactttcaaaaataacctgtgatgcaactctgaggctggggagaggaccccatattacagtatgattatttctggaagaattattagcacatcagataatgtaacacgggaagcataagtccatttgttaaaaaaaagaagaaagattatatttaaatgtagacaaaggggagatgctataaagagagaagccagggaggatgataggcagtaaggtttctgagatggttatcacatctccgaaagatggttaatttggagtaagtgaccataacacataggtagcaggaaagaaaagggttcgagggtttcaaagggtgtgttctgctaaggaaacaacagtttgaacacaaaatgcatcttttctaaaacaacaaagcccttttcctccagcccagcagatgaaggagaatcttcctgaagaaggaacctggaggcaaggatgacagatgacgagcagctcctcccgcagcggaggagggggacgaaggcaaagctgatgctcgctagtgagaccccctggaccctcccaggaagcccaggatcggcggggcagcacagcacacagcagtg

SEQ ID NO: 50492 - DNA, 1107 bp, Bovine  19866880964429
  misc_feature (1)..(1): n is a, c, g, or t
naaaataaagagaaccaaggaatcattccaagaatacataaataccagtgatcaaaaattaatgtcttagaaattttaagttgtttctactattaagataggaaattgctgaatttaatagttttagactatgaaaaacctgtatttgccaaacaaaaatcattcaatgtgcctaaggcgtgtcatcaaagacagataaggatattttggatttttgttggcggtctgaagatagaaacaaagcctagtcttggagctaagcaaagcacataatacatacctgcccaacgttcacagttggtttgcagaaatattcagcaaatgacagaagtgctggatcagaagtgaatgtggaaatcgtttcaggctaaaaaaaatgaagaataagtatacgtgagataataaagattcttttcattacgactcaaattgtatgcagctgtaatctactttattttttttttcacataatgtttccacaaaacccaaggctgctagagcttcattaacctattgggttgaaagtctttttttccttttttagtaatatcagcttacttcttcttttttttcgtacatgcccatcccaaactccctcactatcccttcctatgtttctcgctggcaaccataagctcgttctcaacgtctctgagtctgtttctgttttgtaagttcctttgtattacttccttcagattaaacacataagggatgtcatacttaagaaatatattgcataagctaccatgagctactgatttatcaaagggcagattaaaaccaggtgtttcttatagaagttgccccaaaaaggttttcccttccttcttaaactaactgaaaggcaaattagaaactagaatttttactgaacagattaaggaaaaaagattatcactctaacaggccactcacagaaagacaaatgctgtcataaggtcactacagtcatgaaagagaaaggacaatggtggctgccaggggctggggagaagggaatgggcagtgttaatggggtcagacaggcagctctgcaagaaaaagacagtcatggagatggatggtggtaatggtagcacagcgatacgaatgtacttactacca

SEQ ID NO: 50493 - DNA, 1137 bp, Bovine  19866881096639
  misc_feature (1)..(1): n is a, c, g, or t
nggggtccatcatccatttttcaaaattcttagcctctgtctcttcaaatgttgcttctctttttctctctcctcattgtgggatacatgcatgtctgacttcactgtacttcaaatgtctcttcctctcttttctgaatttgatactcatttttctctctgtgcttcgaactgtttactttctacacacctgtcctccagttcatttatctgctatgtctaatatgctaactaacctacataacaaattcttttttttcaccctgctggaatggcttttggagtctgttcctctaccagatactgaacctgggccatgggcaaccactgggctgccaggcaattctctacatactgaattcttagttatatttttcagttctagaatttcctttaactctttcttacagattccaaatttctggtgaaattcttcatctttccctctattttcttggaaatattagtcatagtaactccagacactgaagtaatctaagtctgataactccaatatgtggatcacattcaagcctgtttctatattaccctttttccccttatgtcttttcattttgattcagcactgatactgtgaattaaaaattacacaagttcaagaggtattttcttcctcctataaaggttaatttttcttctatcagctctgtcctagactggtcttagggctggtctgtctgggaggcttaccaaagcctccaccgtggcgggctgcgagcactgccctctgtttcctcggcactgcagtgctgctgaaatcgccgcttgtattttagtgtcctggtttcgctagatttcctgaagttttaccctgtgcgcgtgcagactaaggtttgataaacgcctcaagggaagacagcacccaggttttgcgttttgaactcctatggtttcctccatctgggattctgctccgtaagccccaggcctgggcagtgattaatccaacctccggctcctccgcccagcagcactgctgctttttctgcatctccacttcttctaacgaatctgctttttctgcctctccacttcttctaacgaatctgctttttctgcctctccacttcttctaacgaatctgctttttctgcctctccacttcttctaacgagt

SEQ ID NO: 50494 - DNA, 1510 bp, Bovine  19866881134510
  misc_feature (1)..(1): n is a, c, g, or t
ngagagagaggcactggaaagaaacaggatttgatgctggaaaagatgaaacaagtttctaagtgtcaagtggtttttaaaatgctacattatacattctctccaagattatagagcagagttaaatacatctgttaaagaagtcaggacttcccttggtggtccagtggttaaggcttcaagctcctagacttccctggtggctctgtggataagaatcctcctgccaacgcaggggctatgggttcgatccctggtccgggtagattccacatgctgtggagcacctaagcctgtcccccacgacttccgagcctgtgctctagggccctccagtcacaactactaagccctactgaagcctgtattcctagagcccatgctccgcaagagaagccaccccagtgagaagcctgagcaccgccatgaagagtagccctcagtctctgcaactagagaaagcccatgcacagcaacaaagacccagtgcaaccaaaacaagactcggaactcctaatgctgggggcgcaggctggatccctggttggggagctaaaatttacatgtcacacagcgtggcctcagtaaataaatcccactttctatcctcaaaaaatgttagagcagataatcagagcgtaattcacctaactggaaacatgacatctacagccatttgcgattgtactaggacttaacctgcttaccaaggaaaacaggtaaaaacagaaagccctgaggcccagtgcagctcgaaggacaggggtgcagtgctgctctcaccttgcagccactggtccagagtgttgtcagtagtgcatttgacaacagggaggaattccgagttcataaaaagcccgcgattaggctggttctgcagccgttcctgatggctcctggagctgaaaaactccagcaccaactttatctgccagaggtcagatgtctcagacatttctcttcttcccagtcttcttacagccttgcagagagaacagaaatccacttgaaagagtgaagattcgtcacttccttggtgttgtacactggagcacttttttaatatggtcatgagatcaaggaagggcagggggagcttgctctgtgtttgatgtagcctgtgccacagagaagccctttagtgggtttaggtacatggtcattctgttcaaaacgaacatgaacagccttcagataaaaaatggtgaaggcaaatgaagctcattcttggctcaatggctctgagaaatgaagacctaataggtctacagctgagcccctctgggaaacccaagttggtacaatgatttgtccgcgatcaggccagggatcccaggggtcaggaggcaaaacctgtattattgacaatactgttcttgggacccatctgccaaagtcaccatggctgcagccagagggatgttccactataggtacctgcccatgactgccaagagttaaaagttcagagcgtaagaaaagaacacactctcaaccatcatctgaaaca

SEQ ID NO: 50495 - DNA, 1007 bp, Bovine  19866881333955
  misc_feature (1)..(1): n is a, c, g, or t
natgatggttgattgcttttggttggaaatggtcatatgcagataattactttgatgaacagagagtgctaataattttatacttcagttagcatgtaaattaagtctttaagtttgcagaaagtttaacaatttgtaacagattttacagtatcatcctcatttctgtttctcccagactataaatagctgctttttgtattctgtctttagatttgtagcatctttttctttttgctgtaaaccaatcagtagatatttaagggaatacatgttagataaaatatctcctttgaaattcatacttgagcaaatagaatgctgccttatttaataggttccttgaatcttgacagcagagaaaagcagaacttgattatgacttgtagggactggtttagtttcaacacaataaataatcacatagcagaaagtggtgaaaactttatctcatgtgaacatagtatcgggaactacatttccaggcaatagctcccagtaatgccttgtattaaatccattcttgttttctttcaggtccattctttccaaggatggggttttatatgttaagctcagagcaggtcagctctcctacaaagaagatccaatggggtggcaaagtttattggcccagactgtagctaacaggaactctgaagctcgagctttcaaggtaatgtgattggtaaaaactgaaggatattctcatcagaaggaaaaagaaaattgtaactaagtgtgatgctggatgttagctagacttgtggttgtcatttgtcagtatatacaaatagcaaataattgtacacctgaaactaataaactgttatatatcattatatctcaattagaacaaaaaccaaaattgaacaacaagagggaataggttcaaatcctactagtccacccaaagcatatacttctatcataacatttatggtactgtttaggtagatccactcactaatcacagcagattataaagacgaacgacccggggcctg

SEQ ID NO: 50496 - DNA, 2109 bp, Bovine  19866880342571
  misc_feature (1)..(1): n is a, c, g, or t
nactctggaaaataaagaattggaatcagtttcttaaaatactggtctccccatgtctctctctttcactctggctgagtctccatctggagcgcggaacccaccatgcttactaattatgcctgggcttctaagatccgaccggggaggcctcagtgtctcttctccttcgggagaatggaaggacgcctgcggcctacgtaagtggagcaaacttcttgtcttgaagttttattggtctgccgcgtaaaccaagctactcagcctcttttctccactgaattttcctactgagctatccttattctattactctttatatctttaattaatatctaattgaagctattgtatcctgaccctcgccgacgccgtccccgcttcgaactccctggatcagccggggctggaccctggcacacatatattgaagacaccagtgtctcttaccaataacaacatttattaatattttatgcattactccagaaattttatgtggatatctagtgatatatttatagagtttcaaaaacaaataggagtaaattatgcatttcttatttttccccatttgcaatatgcttagagacctttgcctgaaagcacatgtagttctgattattttcatggcttcattgtatggcagttcatgttttatttactagctccataattttttttttaccagctctctccactattgatgattatttccagttgctagttattgcaataaaagtttgctgttgagtaattacattcatcacaaataattccctctctcttaatagaaggtagtctcaattactctccaaaatatcaaggcttttggactcccaacttactaagtgatctgctccattgtcccgtgcaaatgtcctggccatctagtctccaacttgactctctttacaaggcctcttaccagactgtcctccacccctgcaggccttgtagtctttgggatccatataacctgagttttcatcagttaatacttacaagttattgatcactacttttaaaaatgaccaaaggagacaatttaggtgatacaagcaaactttatttaacacttcatgaaatgaacagtttccttttggagaattttaaattggggtggatgggaggcaggaagttttataggctaaagaggaacaaggaaggaaggggagaatccagagttggcttcatgtttgggaaactgcctttctggtcaagtggagcatttcccagggacaaaaaggctgtctaaatattgacttgctgacatggcaccctgtgcagaagcagcttcatcttgggtcaagaaacttatttttatttcaaccctacacaggaagaacaatgtgaaactatgttcacagatggtggcagctgggaaggagggggaaacatggcccttcatctttctaccaggggaaatgatttataactgtcagaaatctgataaaaacgttagaagtacataaaatccattatataaattataaaacgtaagtcatgattctatttgtttggtgacaacttttaaaatgactaattttcatcaatatagaaaatcaatatgaatcactacaacatccaagtggttgtccccacttcctccctcccctgcaaatattatgctcaccctgtgcctgtggatggagttcagtactagaaggggaggaggctggagggagtggagggcaggcggagaggatccagatggaagagatgggaaaatgtcagagagaaatttccctcgtgtccctgcttcccccagagctgtgtctgcctggggctttacagtgaaaacggttcagaaaagaagcccaatagaggggaaaaaacactcttttgtgacgctttccaggcatggacatgtctgaaaagctcagttgtgcaggtctacagtcatgccagcacaaagactgagacggtaaacctccttcacagaaatttctggaacccaggcatcttttcagagacaaaagtcacgagaaacatacagtttctctctgttcatcgcagcctcatgttttactcactgtcagttggagaagcaaagacaggagtcagcgccacatcctgggatctatcttctggggatttcaggagaca

SEQ ID NO: 50497 - DNA, 925 bp, Bovine  19866880570368
  misc_feature (1)..(1): n is a, c, g, or t
nttttgtttatgcagcacggggtgagggctgggggttatcaaggaagtctgttccaagtttggcgtttggcattaatgtgaagcagtgggaccaatgctgcctgctaactactgtacgaatccctctgtgtcctgaagaccagcagctggaggccggcatccatacagcaaaggggaaacagcgccccttcaccggggaaaaggaattcatgcaaggcctggagtcatcatttgtaaagggagagtcggggtgtgcgcaatgctgtgaggaggctcacctttgattgcagtgctccacagagccctcagataaggccaaccctaatgggctacctcggctttaacagttaatttcagtaagtcctgtttccaaagtttgtcttttttttgcttccaccttcagtgccactattttccactgcagtgtttagactggcaaaccaccttctccagagagaacaatgtgttgctgaaaatgggcagcagaagccaatgcttttacatttgacctacaaagtattcagagtgactgctaggtgggaattaaaatttagccttccccacataggaccttgtttttgcaccttgtaaagagtgtactaattgttaattaggtgttgcttttatttatacaagtattcccaaagaattagatttggattttgtttttattggagtttggggatttttttttttaaagtatcttatttagatcgactaacatcatacttacaatataaaaaaaagaaacagttttcagttcatcttaacagatctgtctggtgaagtagtcaggatttgatggactgctttactttcattttggaaacgatagtgaagtttagtacaccccatattacataatcctgtccttttcactggtgacatcatcttcctcacatatagaaaaagaagcaacaaaaga

SEQ ID NO: 50498 - DNA, 1248 bp, Bovine  19866880583546
  misc_feature (1)..(1): n is a, c, g, or t
ntagatgtgacttgaggcaagcattgctcccagtgaaatttgattgttttttaatgattaaaaaaagaatgaaagaaagaaaaaaccaattgcctggcagatatcttactaaaacaatggttaataattatgatggtaatgatttgaatgacagctttgacaccctgaggctaccaaagggactggtggattctcctccaactgctgcttctgtggatacaaaagaatcatccatcagactttgagcattcgggacattgtgtatcacagagcagctggttggctaaataaggctgtcagctgtccctgagatccacccaacccccctaaagctaaagaatgactggggaggactgtccctaaccttcagaggtggagatcagtgatgctctgttttattgtgggaactgctgacgtcatgtgcttaaggtagtttgtgaagaaaatggaatagcttaagtcaggtgaatgagaggccacctgggtgaccacttctgctttgggaatctgaccaggatatgttttgatggtggggcatgaggaggcctgttccgggagagacgatccaaagcaacctatctaagtttgatgattttctctttgagataaccttgggctcctttctcaagtatctaagcacctcatatttaacattttaacattcccttttaacatttgcaagcattttgaggtgggggggcggattttgagctcatcttatctttacataaggagttttcttggatagaaagcaaaagaataatgcatagaatgttttgaacagaagtaatacacattaggtatattacctaaatcttcacaaggaccttggaatgggttttatgatcttcatttcagcgacaaagaagcaaaaggaaagagggatgatgagcatgttgtctatgatcctttgtgtctaactcacttgccttctttttcctactatttcttttcactctataacatcaaagatgttatagtttccccttcgtaggtaaataaactcacaagcccaaacaattgctaccctatcccatcatcattacccttacaaataaggaaggtgaactgtgctcagggaggggatggtgattagtcatgactccaaggccagcgaaaatgttcacaagcttcccttctcaattcatggtcagttcccctttctttcactttctatcttaacagtatatctacttttatcttcctccccaaactatacctacatcctaccacaggcccatattgtta

SEQ ID NO: 50499 - DNA, 1941 bp, Bovine  19866880607718
  misc_feature (1)..(1): n is a, c, g, or t
ncctgcaaatgtcacagtcctcagacctaaagtctgaggaccatacaatgcacaaattatcaaccaacaaaggagatttattgagaaaaggagaagagcaaataagataaaactcatgatcttaatgctgctaaacactccaacattaagtattaatagtatgctttttgattcaaagaagttcctagccccattttaccctcctttaacaggatcatgttgctgcagaagaaataacagggaaactttatagaagtcttaccaacacgatattttagttctatgatggtttccccttctctgctcaactccgttacttcgcaagtgtagtttcctaagacggcatcacttttagccatcttcaaagaggcaatgccacgcagtaattctgatggtgcgatttctgcactagaaaagttactgctaggcttggacatccgctgacttccatcaaagatgaaaatgttttctcctttaaatttccatctgacatacaattcagtaatgttcttcgtctccacattattaacaaaacatgggatgacaacggtttgattgcaaagggtatattctaccgatttgattgcattaaatattagttgagctgaacctggaaaagagaaataaaattgtttcatttcatacagaatactatgagatcttaggtatgttacaaattcttaagataaagagaagtgcttctattgttcacttaagcaagtaagcaactatagggaagatgggtgaagtgaaaagaacaaattattttaatattaatgtgctcagctgatagacaacactgtacctcttctttattcattcccactaacacaaaatatacattctcatgtatcctgggaataaactcagcaactgtgttagaacatgcagatgtagtatctggctttggaaactctgaagcttgtgtattctgatatttaaagaaaaatactgactttactatgagaaaatttttaaattgaaagtaaaaccaaataatatattcagtctcaacttctatacattttctccaaatagaacttgctaaactgataggaagtttatttctatccctaggttgcatttccaaaaaaggtagcaggctccactgtacttaaatataaaaagtaaatcacatgaatcacatcacatctttccactaggatggtaagccttagaatgctaaggattaagaaaaaaaaatattctctacagctatttttccattgcaaaatacagacagccacagacattcagtatgcacgtatcataaaggattatacacaattgaatggcattttcccactcccacatttcactgaaactaaggaacaacttccaaatatatattacaggtgtccctttcttctagaaaccacaaaccacccaaaacaaagacaagatgcaagctgaaaccaagatcggatactactaataagtagcatgtatcagatcaactcttttcaataatataaactactgattgttgccttataaaagagaggttgagaaatgggtcccctttcatgtggaatgtgcaaaaatgtggacaaactgtacttgttctccatattcttcagccacttatgacttctttcatgtaagcagtgagttggtgtttcctttcaaaaaaggattgacagatataaataaaaccttagttttaattgttcatctttaagaattttcctttatcaggggcacaggatattattactctaggaacataattactcttcaataaatgcccactgaattgaatgctgggctgcagcatggaatatgaactgaacaatgctcagaagcctgagaacaaatcccatctctgtctgttacttttcagggtgaaaccttaagcaatttgcttaactttctatgccttggtttactctctataagtaagaggatcaaaaaatgaacactgggctgcttcacagaatt

SEQ ID NO: 50500 - DNA, 1659 bp, Bovine  19866880654604
  misc_feature (1)..(1): n is a, c, g, or t
ncctgagggagaaaatattttgtttaatggcaaaatcaaaccaagcagattacttaaatatgacctctttgtatttacaatttctgcatatcattctatgacaacccccttccttgtctgtgaatacatttgtgaaaagcgacattttaacagcggctatttgaatgttcctaacaggcaccatgtgtttaatgaaaacactatataaggctgaactaccttaaccaccatgtactgactgtgtaacactcagggccacagttcacaataaaaatttgtcctcagccattcctcaacagtttagacaatggctcttggttgatctaatctgcctgctatgcagagaaaactcgttctcagaaacaatagaacatcagaatcagtaattagtaagatttaacaagcagtatgagaatacagaaatgttcttgggaactaatttaacaattatttagtatcagtgtttgagaaatacagggtggctttaatcagagactttttacagcattttaaaaataaaaatacccatgaatacgtgtgtatatgtgcgaacagttaattaaacaaacaataaaaaatgtgaaggttagcttctgcttcatctttgagaactcctaaaagtattaatatagaagtatctccagtttattcccattcttttctccttctaaccttgtctgccttcaactgacattggtaagtgctcttagtggtcttcctcaacatcaggaaagtggggagcataaatcccagagaaaagtcattagatccctaccgttggaacaaagcatggctgctttcaaaggatgaaggtttttattttatttttggttgaaattctaaaactttgacaggatcaaaaaatgtgctcatttaattaattaaactgctgtctttgaatgtgtcttgctttcatatcccttattatgtggttgtaagccattatggcaaggctgtcttttcccccgacacatgtatatgcatactcttctacttcctcctactcagacagtaaattaacagcagacttagaaacaaaaccaggtgtcctgacaccctgttccttttctaaggaatatatgacttcttttacttcaatcagatgaagaaatgcattttaaagactcctaggatgtcatttctatcgcacgtaaaatggagatgacaagttccgtttgcttccaaatgcgggcagagaattactgtgctgctgtttgtgaaaagtactgcatgaccctctagaagacaagtgctgtgtcaagtttagggatcagagtcatgaactggaatgagccccaggcatcactcttcagttacctcactcagctgggcttgagccgcacgatattcctgaaccaagtgctccagctgattgttgatgtacttttctcggctgccaatcttttccagagtcctactaatttcattatgaagtctgtccaaaaatccctagaaatttcatgaaattttaataggcaaagaatgcacaaatatgattttccaaagtagttttaaatgggttaaatctccctctgttcagcccacaaattcttagttacaaataaaaaagatgaaacagtttgaaattttcagtaacaaaaaactctgcaaggagaattattttagtcacactctgcagaatgttaaaattaaaaagca

SEQ ID NO: 50501 - DNA, 675 bp, Bovine  19866880687546
  misc_feature (1)..(1): n is a, c, g, or t
ntgagatagctcagtttaggcaacactgttatgattaacttttttgtgacttcaaccactgcagatctatcataatgtattcttagaaacttgcctcagccagttgaaagagtgcagactttccacagcgttttacaggttcagcaccacccaagtgtgaagtgtttgaagaaatctatatggaaaacaattcatataaagaatattaattgtgatatcagaatttttgctctccattcacacccattcaggaactttccttagtttataagaatatcattgctttcaagtgtcaaataacttaaatgcgttaggtttgggattataatttcgaaatcagtatcagtaaataacctcaaaaatagcaacaaaaaaaccagtgtgacttgggtggctgttgaactataccaagtatgagtattccaggctttaaatttaactctataaccttaaaacaagttatacatttccacttccatataaacaccaactcagcaactggtcatatagaaaagagatttagtatcatttaacaaaaagcaattagctaattttttgttgaaatattatttgggatccctgtgaaaagatagcaacaaggcagtcaacaaatatttttttgagaattgaacagaaatgtgtttggcaatatgacaagtgttagccaatattaca

SEQ ID NO: 50502 - DNA, 2373 bp, Bovine  19866880693751
  misc_feature (1)..(1): n is a, c, g, or t
nctacaaggatatgagagctgtgtacctgggcaaccttaccttaacaaaaacagcgtcatccaaacttgtatttttacaaaagagagagaggaggaatgggggctgtggtcgtcattgttgttcagtcgctaggtcatggcccactttctgtgactcccatggactgcagcatgccaggccttcctgtccttcaccagctcccagatagcatcaccaattcaatggacatgaacttgggtgaactccaagggttgtaggaattgctataaaataatcattgctatagttttatgtgtgctgctagaatacttaaatgtacacataaacatgcagtgtgagagtccctctagctcttgctcaaggatcatgtgttatgtgctcaacagggcagcatttcttatgcatttccattacttggagcagcacaaagagtggtgacctcaagcagcaggtctttccctctgccccagcaagctacttttatactgggtgtaagctcatttcccctagttaatcaatcatattaagtcccgtttgctatttgaaaactcactctgtgtgcacacagagcaacaggggaaactgggctctcacaggcacccggcaccctggtaaagagcccggtgggtgagtagacctcctggaaacgtcgagagggtcaagggcagctgcccagaccagagcagtcacaatcggcatgcgtgcctctgcaccatcagttctttctagctctgtccatttctctttcccagtgtagactagctttgttatgctagtagatgctctaccctgcatctctctgtgggtgaaataggcattcaaatgtctaacatagtcagcaaatgctttcaaacctttttggccactgtttagtagattttcattataactaagtacacacaaacatgcagatgtggaggtgaatgtacatgctgtaatatagatatatagttagacgcacacaactcatctttcaaactaaatgtcatctaactaaactaaacaccatcatcttactttgtgtgatatgctttgatattctcttttctattcttttattttacaaaaaaatcctggttataatccactaatggcttcccaggtagcactgagtggtaaagaacccacttgacaatgcaggaaactgagagacttgggttcgatccttgagtcaggaagatcccctggagaagggcatggcaatcttcctgggcacagaagcaggctacagtcagtccatagggtcacaaagagtgggacatgactgaagcagtttagcatgcacacgtgcaatacactaaatttatttcaaaacctgttgatgggtcataactttcatccgtaaccatcccctacagtgaaggtagagatcaaaggcatcagagtaaagttctcgggagcttgactgatttattattacactgtgaattaaatcagaaattagaacctgtttatatttgtcacataatagcacattacaagctccaccttaggtgaccagacagccctttggctgtactttgtgattaggttaatctggggagtgaatctatcagggagagagaagctctgcaggcctgcgagctgcccggaagccctgcctctcccattgttaccgtgatggatctgcacttccaaacagtaatcacccatcacatgaacccagttctatttttctagctcaacagggctcagtgtgctctctgaagctacaaaggggagaaaatactccctccagtctttctgcatgatgaattcttccatctctacataaagccatgcttacaggcctgtcttatgggctttttgaatgtcccaacaatgacaaaaaaggaaagaaaagaaaaaaaaaaaaaaactgggtaggagaacaataatgctgtgctgcagccaggtcatattgccttatatttttcacctctttccttataagagctctcagctctaggggcaaaaaaaagataagaggaaagaaaaacctacacaatatcaataagtttacccttgagaataagtcactttctcagatggtgttttcacaacataaatgttttatgcatttgtgcttagattttaagatattatgataagaaatcaaatttccctccagcttttattcagcaccatcccctcacatacaaactcacacatacacacatggaaactgattcctaatgtcagagttaatttctcatttaccaggagcatggagctttttctacagagtatgatcaacctagaggtattgtcgtgtgagtttaataatatttttgataactagaaaggaggaaattaacccatgagtcatgaaaaacctgaaaagattattctgatgtttgtttatcttgaactaaatttgcaaggaaataaaa

SEQ ID NO: 50503 - DNA, 1531 bp, Bovine  19866880696930
  misc_feature (1)..(1): n is a, c, g, or t
nagaaaagtaaagccagttttccaagtacacaccagcagagaagcaacatgactttaacgcaaaccacaaatgactccagaaatgccaccagcaaagttgggaaatccttggactgctgctgactgtctctacgtagccccacagcaatggcagtgtgcctgctggaagtgaggctggttgctggctttcgtttatagtgagatttattagctaagatgcaacccaaacagatgggagaagctgcaggggaactgttgtgcttgggagatggaaaatggaaggcatactgggaagagggcagcttggagtactcacttggcagaagttaacacgttaggctgctacctgagaaatgtacttgaggtgtgttcacctaagactcttttctcagtcttggaggaatgtacaagaatggggagcacaaataggacagtcagatgatcatcagaaaggcccccctgaaaaaggccattactaagttctaacaaagcagttaaaggtgatggcttgtgggtgatgttcctcccttagtaaaattttcctttctcatttcagttaataaattatagtactggaaaatcagataatatctgatactaatcagttgctgtcagaaagctatctataagacgtgaattttttagatactctggataaccaaaagagaaatacgaaaatgtaagctgtaactccttaggtcccttgggactttcccctgccttttttcacctagaataattacctatgtttttcttaaagaagtctataaaagtagaactgccaatacagagtgaattttccttggccacaggtaactaaacagcacattttctgtgataaaaaggtttaaaatactcatttagaaatctcagagaagattgacagatgtggcatttttcactgctcatgaactatgttggcatgtgccaaataaagcaagcccagacaatctgattctgacaggccaatatttaaagaagggagagggggaaagaccagagttgtaccactgatttagcctgcagaaaatcacaccccccagttaaacacatgtggcttcctaagaaacgattaaaacaaaaaacaccccaatctcttttcaggaacagatttgcaaaagactgtttcacttttcttgttcctcagagaagactggtaaaaacattcaggagtttctaatagaagcaccagagaactttctgctggggagccttcaggcctgcattatttattcccttgggctttcacactgtctgccataagacctatacctctctcagtgtgtagacctacaggacagtggtaattccagaagatggagagcactggctctaatgctcaattgtcactttttaagaaaatcctgcaaatacttctgtgcttgacaatgacaaatgtgaggcttttcatgtcactgtttaagcataatgtcggcaaaataatctgaactttggactttaaaaaatattagaacaaaatatatagttataaatatatcatctcaatataaataatactaggaatcatcct

SEQ ID NO: 50504 - DNA, 3791 bp, Bovine  19866880812939
  misc_feature (1)..(1): n is a, c, g, or t
ntctgtgcctatctggctgcctctatctcttacttacctttcctagtactttgtgtgtctctgcttagctctgttgggtttttgtcttgctcctctcattcagttttaaaaattccaccataaaacaaaagtcttttttccctttcctttctcttcctgcagtgtttgcatacattagatgctcactctgtaaatttgatgattgagtaggctgtatttcagtttccctatattgttaatagagtgagccagaaatttttctttttagacaaatttcacatgctctgaaaaccttcaaaggtgatagttttttcacctgaaaaccctaggtccaatctgttaattttctgagaatgtcagaatgaaaataatggggttatcccatacttgagagtattgttcttttcaggatgttgtagttattttagtaagtgaccaaccaaattgtgatttgacttataataaagctgaaaaagttgtgagtttatgctttcttctcgttaataagaattaagctctgtatcacctagatttctcttgtcctaacatgggtattcaaaaacagacatctgtagtgtatgtatggaatggcacaccccttgtttacctgttattggaaactagagaagtgattgttgggcaacgctttatcgttacattgtgtttaatttgatgaagattctgtgtagaaacagtctttcacgtgtcatgttttcagccactaactgccatcacccactggggtcctttgttaagtcatcttccatggctaatagggataatccaggtaacttttcagagatgagcagtgaacaggaagctttcctgcctttggcttttgacagcccttccttaatatttaagaacagctttcccataaatttagccttttgaaaagaagagagcatctgtagtgaacttctctgtaaggcaatatcagtggaatcttaaatgttgttatcagggttggtgagagacggaagcatttttgtttttattaaacagagcattatttacaaagagccattgttgagaattagattccacaccgtataaatatccattaacgattctaaataaaggaaactctggtgttgctatgcgtgagatcctctcctgggggcttttttccatagcaattaaaggtgtgctatttgtcagtagccattttttgcagtgatttaaagaccaaagttgttttacagctgtgttactgttaaaggttttctttttatatgtattaaatcaatttatcactgtttgaagctttgaatatctgcaatctttgccaagatacttttttatttaaaaaacataactttgtaaatattaccctgtaatattatatatacttaataaaacattttaagctatttttgttgggcttatttctattgctgcctcagcaggcgacaagtgcattactgagaaattttagtttatcaatgtattttcaggtccatatcctatgtaccaatgcaaatgatgacttaaaatattaatttgtaagttctttttttaaagtataacaatatccaaaaagtaaatgtttgatcagagcagagttttaattgaaagttccaagtaagtccaatgcattagttttccccatggtagagtgaatacttcacttttctagtcctgggtgtacatactccggactagcagaggacctcagcaagccaacttacctgcctctgtgtccccccttatctgtagaatcagatcagcctctttaagactgaaatgcaaattgaaatggttctccatgttaattggttatcagctaggtctagtttgattgcaagtgaaagtaaaactaaatataagaaaagtgggatttattggctcctataactgaaaattcacctgtccagctggagagggcctcccagcagtgtcctcaggatcagagtcttcaactttcagcttcagtctccttcctgttgccttcttcagagcctgtgtgtgatggcagaatggctgactgcaatccagtacccaccatctcctgagttcagggaggggagaggggagaaaaaaagagtgtctctccctttctgaatagtcctatccacccaagattgcagctcggagctcggcctgggccaggggcctctcagtcagtggggcccagtatctctgacacccaggttgggccagcctgaacctcatgtctgtctgtcctggagggaatggagctgtggactccatctgggataggggtgggggacagagggagttaactgaagcaaaatcgtgattgtaaccaaattaagatggcattagattttaggcctgtttcttgcaggtatatactgtgattctgcattgtatgtgtgattgtaaaccatttgaatggaaaataatatttggcagcaaagtaccatctcattccttacctcataggcaatttaatttttatgcatttatgaggacttttttcactcagcaggagtaactaatggagttcagaaagcatttaatagcctacctcctgtacagaaagctgttctgtgcagctcataacagcgctcaacttctttcaaactcccacggaggtgtaggcttccagatgcatctggatttcgtttttgtgtggcaacccttccagctcaaggcctcaagtctgacagctttagaaaacaatgtattatggtaacaccatccatgtaggacatgatttcaccagtagctcagagatttctgcacaattgacagagttgggtgtttgaagtgagactgtgctgggactcaacccctggtgtttattttgagaatttaagtttcatgctcaagtacccatccatcagatcagagggaaatgaagtatttaagttatggataattggattgattatttaatgccaaagacagcactgcagactacatagaagtgatcgtagattaaatgattagagctccacttattcagcatttatttagtcatttggtgataagacagcagcttttcaattctgttcatagtcacttgtggaagaccaggtatgtcgtcccagtttggagaatgagaaatgtttggtaaagagtctggtttggagagaaatgatttatatgtcggaagacccatccgatgtcaatctggaggccagataggcaaatctggcggattcatgaacctgctgctgcttttcccttacagatgttgcaactgcatgcactataccgggcgcccagatccctctcttaaaatgaccttatttaatcatagacttgtcttccaaaaaaagaaccactatcgtttgcttcctaattttctttgaattgcctgctacattcttcaaggtcaaactgacaacgtaaaatctggtaaacttccattctaaacaaatgtggttttcagagttaaagcgtatttgtttaaaacgtggattatatcttccctggatatactctctacttattaatttcttaaataaatgataattagtctttttaagccagtccataaaggccttctgagtcatttttatttaaaaagtgtttgttttgggggtgctgtggttaggttgcattatgggtgaagttttggggtacatagcaatcactgtgtaaattctgtggggtaatttttctctcatgcgctcatactgagggcaaccagaaagcactgaaaactgctacatctctttctccaacagttgtagcagtagctgccccaccgccttcatgtaagccctgtgttggaatgacttacccaccctcccaggtaagtcattctaggaatgctgctcactctccagggagtctccacccctagctccaccaga

SEQ ID NO: 50505 - DNA, 859 bp, Bovine  19866880845639
  misc_feature (1)..(1): n is a, c, g, or t
ncagtaacagaaaaaggaaaatgaacctctactcctagtacagacacatacactataaaaataagacaatccacaaaacccacctcaataaaaaagcgttataacacaaatgaaacagaattttacttcaactatttaactctcaaaaccatatttgccaactaattaggccatatcagaaatgcatttaaagtaaacaaatttgcattttataaaaacattgttggataatttctatgactttaatcgagattaacctcgagattggttaaaagataaagataaaagctgacattttacctagagagagttctccactgaaagcagagaataaataccaacatataaaacaaaactaagaggctgaaatgcaggtgaaaataaaacccaataagtaaaaggtcacacacaggaacactcaggcatgtatgtctacacacggaagacagctgcatttaaagcctcattccataaacacgaaggactccacatctggccatgcaagtaggatgcaaatgggcatcggatgagcaggctcatggcagtcacgacactgacatgcaggagatgctcgagaaagactgacttccaggacacgtggctgtactgaaccagacggggaaatttatcttctgtgtgagagaacagaggcctgaactgtagagagggaaatcttaagatgagccctgaagaggttcaagggcccatccagatcatgacaatgacaccgatgctcagagtaaagggagggtagagtgcgtatgtctctcatgccctctggaaataatggttatgtgactgaaggaggtgggaagagcctgacaagctaagtatatagacagaaaaagagagagaaaga

SEQ ID NO: 50506 - DNA, 2574 bp, Bovine  19866880847916
  misc_feature (1)..(1): n is a, c, g, or t
naaatatttggtacagctgagctggagctggaggggaaagccgcaagcttggctcagggccaggagagagggtgcggggtaagagatggcgctgtttggaaggcaagggataggtgggagtcccctgtcctaggtgaagcatccaagaatgttcagctccacacctgggtgggtctggaggttgcagacgacctgggccaagagccattcaccagaaaggagtctaaagccagacagatgaaagcggacacttgagtgggtttcaggatcaaggtgcttagctcggtgccctgtgatgacctagaggggtggaataggcgaatgggagaagaggctcaagaggcaggggatacatgtatacatatggccgactcatgatgttgtacagcagaaactaacacaacattgtaaagcaattatattccaataaacaataaacaaaacaaaaagatcaaggacagtatagccggaaatgggtcaagataaagcgaaacaggaggattgagagaaggggagaacatagtgtaaaggcatggcgggcctgtgggcacagggaactctcaggcactgggggtcagaccaggtgtggccacttccccgctgggcatttcctcctccggccttcatcctgacatcgtgcccagcatcttcctcggcttggagagagagtcaaagtcatagtttcaagtttgcacttttccacaggtctttgtctccattttaggaatgaaatcgtgccttggataaattccttttcagcaggaatcaattgcaggctttaatatatgtatattttttgccaaaataataggccattatcttagattatctgaatatgcttaagtcatatcaactcataaaattaagacatcttttttttttttcataggtattctgtggtgggaagatggaaccaggttaatctatatgccttgctattgctatagaatataaaaaagagctcacagagttctgaaagcacatttttaatcctctttattactaaactagaaagggtatcagttcccttcttcctacctgtacaatagtgagtccctggcaggagcccttatcatccttcttcctatatactaaagaagcttacccggcccgatcctccccacgtgactcagctgcaagttccttgccagtaaaaaaggatgctgctgctgcttcctgaaaggtctgttcctttcactttctgactcacatttgttatctctcttgtcacagaagctgattcaacaaacatactcagttataccctccccttcatctcaccagtagcaggagcagagaagggatgaacatggcattgaaacctgggtgctgaaatgcctttaaagagcccagtgaatattcccacagcagcatcttcaggacagtgtttctcaagtggacaggctggctggttccttacagccgtattttcaatgtgggcgacccccttgaactcttgccttcaggggtgctgggaggattatgcccagaggtcctgaaagcaaagccaaatactaacatcagtggtgtccactgaccccaatcctgttgccagctgcaagactgaggagcagcaggtgcggagtggagaatgggaaatgagaagagcctaggggagggaggaaggataatccgaaataacctggaaatggactggcttctatggcacagctcatgctgggcaggttcccggaggccagggtgggggctggcgggcagtgtgggagtataggatctgggctcgagaggtctggcaaccctcagccacatagaggcaaacaggcaatgcctctcatggcaatagaagcagagggacattctgatggctgaactgagcccaacaggaatggggcagggtccctccgaggcgcggaggtgtggtggttggtggcctgtgtagatgtgcagggcgctgagcttggtttaattctctgctctcatgaccttgaaactcaatactttttaaacaaggtgctggcattttcctttttccctgagctgtgacatggggccctgtcaagataggggagtgtgatgtttctttcagttgacggggccccaggcagcagattggggcttggcacaaaactgcattccattccacagtctccatcactgttacctcttcaccctgcttgacactttagagcagtcttcttgtcctgaaatttcaatacttattttttgtttgctgctcatctccttttgctcgtaagagcccagggcttagtctatcttgctctggcaccatccccagttcccgtagcccatcagtccatgctacaagcctggagaaaaccagggcgtgggaaggtaagggttccagggcctcagaggaatcactgggctcacagggatccaggcagagctggggaggaactcagtcctttacatgaggtttgggagtctgactcagaaaaaaagcagttctgtgtcagagaatgaggaagctggtgttgaggaagaggtttgtggtgaggccagatcagtgtttatgctcctcaccttcatctgttacctgcctccagctgactggatactgggagactggacggaacatgttggcgggagaat

SEQ ID NO: 50507 - DNA, 1786 bp, Bovine  19866880889331
  misc_feature (1)..(1): n is a, c, g, or t
ncgcccaggagcttggcccaccatgggtccatcttccaccaaggacctagctcctggcttcatagcactccttcccccatttgtcctgccatggctccctgctgtggctgatccctgggttacctcaccacctcctgttcgggttttccagttcttcataacttgtgtaatcaattcattccaagccataaattcccttggctagatatgccttccgttgtttctgtttgtgtacttagtccctgactactgcacaagccaccctcattttctatttcctaagcttataaataggctgagagaatgctgttggcactactgagtccagatttcagcaaaacttctgacaggtcatcttaaacgatgttcttgtaagcagaatgggaggaatttagagtggattattaaacattcttaggttgctaaagtttactaatgttcaaaatcaatctgattggaagggctctaaaggtttgtcagaaggctgtgtctttggccatgtcctactcaacattattaccaaagatttggaccaaaacacaaaaagcaactttatcaaatatgtgtataagaccaaactggaaggtaatttaattcagattttgaaaggatgtactttgtaaggaaaagtgaaaaatcttacatctaggtacaaaaaatataaacatattgaatggcagagaccaagctccccagcatagcatgtgggtagtccagaattttaattgactacaaacctaatccaagccagaaatttgacctgttttttaaaattaaaaaaaaaaaacagtggggcaagttcatctttggtccccattaaaagattaaggttgatatcaactgacaaatagtttcacttttcacctggagtattacaggatagctaggaacttaatctaagaaaaatgagtgttttccagacttaccgtcatttgcgagttttatttgcacacattcatttatttttgcctcataacaactcactggaggatgtactgttgccatttctcagcctttatatcctcatatggatttaagtataagctccgaggctcactgtgtggccttgggcaagtacagtgctcgcacaggaacccactttatttcaatcaagtccattctcagttcaggatgaccatactgcatatagataaaagggacccaacttttaaaaggccaggaagcctttacatattatgagcagtttgcccgggggagagactcatgggagcataaagtctgtcttctagaatttggaagtctgtcacataagagaatgagtgaattgatttaagtggcttcagggaacaaccaggactaatagggttaccttagattttgggcctccctgtccatcaccaactcccggagttcactgagactcacgtccatcgagtcagtgatgccatccagccatctcatcctctgtcatcccttctcctcctgcccccaatccctcccagcatcagagtcttttccaatgagtcaactcttcgcatgaggtggccaaagtattttagtattttattaaaatgaatttctatactaggaagaatgttaaattagataacattagataattagataagtctagagcaacactcaactctgagagtctgatttctgtgtgttttgggtttttggttagtgagatttgtgatttgtagttatttgttttattgttataatttaacttccagccatataattgttttccttgtaatttaaaattagaatgctctatttatgaaagaactttttaagagcctgaaacaaggaaggaaag

SEQ ID NO: 50508 - DNA, 2275 bp, Bovine  19866880904081
  misc_feature (1)..(1): n is a, c, g, or t
natttgatgtagatcgtacatgaatggagcaggacatgactgcccactccagtactcttgcctggaaaatcccatggatggaggagcctggtaggctgcagtccatggggtcgcacagagtcggacacgacttagcaagtttgctttcacttttcactttcacgctttggagaaggaaatggcaacccactccagtgttcttccctggagaatcccaggaataagggagcctggtgggctgctttctatggggtcgcacagagtcagactcgactgaagcgacttagcagcagcatacctgaataacctagtggttttccctactttgttcaatttaagcctgaattttgcaataaagagctcatgatctgagccagtcatctccaggtcttgttctggctgatagtatagacagtctccatctttagtacaaataatgcaatcaatcgggttttgatatgattaaccacctagtggtgaccgtgtgtagagctgtctcttatgtttttggaaaagggtggttgctatgaccagtgtagtctcttcacaaagctatgttagtctttgccttacttcattttataatccaaggccaaacttacctgttattcttggtatctcttgagttccttgttttgcattccaatcccttatgatgaaaaagataatttttccttttttggtgctagttctagaaggagttaggtcttcatagaccagtcagtgtcagcttctttgatatgtgtggttgtggcatagacgtggattacggtgatgctgaatgctttgccttggaatcaaacagagactattctgttgtttttcactttgcatccaaatttcagactcttttgttgactctgctactccatttcttctaaggggctcttgcctacagtagtatatatagcggtcatctgaattaaattcacccattcccacccatgttcattcactgattactaaaatgttgatgtttactcttgccatctcctgcttgaccaagtccagtttgccttgattcatggacctaacattcaggttcctatgtaatattgttctttacagcatctgactttactttcatcaccagacacatccacagctgaacatggtttctgcttttgctctgctccttcattctttctggagctattagtacttgccttccactcttccccagtagcatactgcacaccttccaacctggagggctcatcttccagcttcatatatttttgccttctcatatggtccatggggttcttgtggcaagaatactggagtgtgttgtcacttcctcctccagtggaccatgttttgtcagaactcttcactctgacctgaccatcttgggtgagcccatgtggtatggctcatagttttattgagttatgcaaaccccttcatcctgacaagcctgtgatccatgaaggggaataggtttactaacagggcacaaatccagacagctagaaatttcactggaatgacaggacagcacctcacacaggacatgagtggatgaccgggaactgctgactcattgggtagattgctccccagctacctgaccaacctgggcagatattgtatacaagtgagcattgcacagcctaaaatgactgctggatgaaatactggcaagagtgtctgggtcactatttggtgatatcagagcattcttcttagcagccctcttctcttaccttatttcctgcctctaatatgccatgggtccagaaatcagctaaccaaacctgttattaatagaattgtgcttcaaataagagtaagcataaatacggaagtcgctgagctgcactcaaagaagtgttgatgcttggagatggtgacatttcagtgtcatcacagagaaggaaaagccgttgaaaataatttgaagcctatcaaatgtttatactaatttgcatacataaatacatagatgtttatgtctgctgcacccacatttggctctgcttaaatgttctgttccttgctgagctcaaataatagccatgctcaacttttccctgtaaattgcctaaaacaccagggtctgatgcctggtaattttattggtgtttcctctagcaacccacactagcattacaattatctgttggtaggaatctaatactgactttcctgggctttgctacctttttttttcctgctgcagatacatttggttatagcttagcaaccttacagatattcatgtgcataggtattgtaatgtgctattttctttagcttattaaataaaacc

SEQ ID NO: 50509 - DNA, 1141 bp, Bovine  19866881085819
  misc_feature (1)..(1): n is a, c, g, or t
ncagacacatatatgtataatgtacagttatacatacacaatacatatattcaaattataattttaaaatgtgtacatttaacttaaaagcaataattcattaataaagctctcacccaatacccagcaaccacaaatcacagcatagtggaacccaggtcccctcccgctcctgtggggggttgtgagcaccccgcttgccaacacttctcacgcagggcctcggcagacagagactgaaggaaatgagaaatgcaaagcaaagacagcagtgacggcagtgcacaattatttttatttttatttgtttgtcaagtgcatcttctccctctccactacaagggcttctctttaagcctagaagccaagggtgattctttcgaattagcctcgtggtcaacatcatggctccaataaaatcaatgaaatgactaattagatgcagaaaatcatgctatcgttacagtccactaatgaacaaaaatgtgaatgtctcagcttaggaaacttatggcctaaaggaaatacaaacagacttcaatttcctttttttctcacttgagtgagcatatcttacacagctctgtcaaatcagaaaggctctgtcagggagaataagctctttttaatatgtatgcagaaaaacctgaagagttcatgtggtgaacacaatagagtcaccttttcccaaaggctcagtgaggccctgttacaagaaacagccttggaatagagactgctcgctcttctcagccctggtgttgaatccaaagaatgtgccatctgcctaaaagactgaggaaaatcatcttcaagagacagaagatgaatggttgtgagctccctaaaaagatgttttattttacttagccaaattacgattattttcattggaaatcatggtacttcacatctgctaacttaaggctgtgatgctgtgtccctcaagggagaggctctgggtacctgaagagccatctctaatggatagaaatacgaattgtaatgcctttcaatgcttttcccagaaggcagccctctcattccaatgaaagctgagcaacatggtgattctacatgaagagcccagagtaaaggcaaactgattggaagaaagagttaacacatctccgagaataaa

SEQ ID NO: 50510 - DNA, 1735 bp, Bovine  19866881092478
  misc_feature (1)..(1): n is a, c, g, or t
ntaattttaatcttaaccagaacaaaactggaagggtaaatacatgattaaaaaaataacatttttaggtttatgcattatatcactcttttacggaagctggattcttgacaacagagccagcatcaaaagtgtaacatatatattaaaacatgtggagtatttgtagtttatttgtatgaaagtattttaattgaacaatgtaagcacttccccccacctcaggatttcaagagggtgggatttgtccaatgtatactttttcaaaacaaaatatctggatttccagacgttctactaattttatagaaggtattacaaatttctctttttctcaatataactgattagtcagttatttctcctcagtagtgtgtctatcagtcataaatagacacagcagttctgttcctcagggaacaatgtctggagatatttttaactgacaccgtttgggggttattactggtatgagatgtgcagaggtcagggatggtactaaacattctgttgtgtgtggagcagtgcctaacagcagcaacttacctgacctaaagtattaataatgctatgattaagaaagcctgatatatataacttcattttaggggaataaagtatcacctataaagtcagcatccatatttatattgccgtgataccatttagccattgactcattatgaaagagatttgaggtggcttgacatgatgtggagttttgtttctcaaaggttattcaattatagtaagttatcagtttaatctttgtaccttgtaagttacataaatggctttatttcttgtgattgagttcatgtaattctttgtgtttttttaagcgcttaaatataaatccaattatacgaaggagaaagccatttttctattagttgctggactactgctcactgtccttgtcattgttggagcctttcttttcatcccaggtaagatatacagttattatgagggaaaggaggattgataaggttgaggacatttctggagaggtgcatgttagtttcctagggctgttgttaacaaattaccacaaactgggtatcttaagacaatagaaattctctcaccattctggaggtcataaatctgaaataaagatgttatcttacaccctcctgacccattcaggaggggagaatccattccatgctctcctagcttctggtgtttgctggccatctgtgcatctccttggcttgtggtaacgtagctcccagcttcctccatggtcacgtggtctcctcccctctgtgtctccacttaatttcctgctgcttctctgttacaaagctacctgtcactggattcaggacccacctgggaaatccaggggacattccttctttcagatccttaacttcttcatgtattttactatatacattaatatttacagattttggagtatctgggaggtggacatatctttaggatggccattaggccactacagaggcacactttattagccaagacttggtagcgggaatgaacttgggaacccagatgggtctgaaattgcagttgcccatgaaagatggcagtatgagttggggggaagggtctgcatcacatgaaaagagcagcagagacaggctgggactcacaagtgcaaactggaagaagccttgttttttgagcagaatacagtataagcataatgtttaggaatatcaacatggtagctctttttgccattggagttagtaaa

SEQ ID NO: 50511 - DNA, 1706 bp, Bovine  19866881130144
  misc_feature (1)..(1): n is a, c, g, or t
ntaaccacatcagtcccttggtacatagtcacaggttcagagattaggacgtggacttcttttggggggacactcttctaccttttgcacgaagtatccagaccaaaaaaaagccagtgtaggtcaggcctgagccgccccagtgtcagggcatgtttaactagtcctgcaccaggcgccagggagaggggctagagcagaagtcaggaggtgtgagttctaatcttggtaagaggacttaaagtatataccaagacctgccttgctttttaccttggttaaaagttgatttgcattcatcgtgccctaaaaccatgtagcaattactacaatggtccaagataccaaattagcttgtacacatgcactaaagacagcagagaggtgacacagaggacctgaacactgggagtgcccctggcatgaaacgctaacatcaacagcatagtcgactgaacaaagggatgcagtaagcagttaatcccaagctatagttaacattcacacatttcaaggaagactgtcagagtggggaaggttaataagctttggagtggagaggtgcaaagaggtcagggtgggccgggccctcaccacttctctttcccccgacaaatccactgagctcgtcctgacgagagatggatacatcagacacatagcctgaggtcctgaagtcctcaggtcatgtaactaactgctctttcctctgattccaggcctgccatgaaaccctgggataactgggctccccagggaggcccccatgcagggagagggacgagatgtcaatctttggtccacttgacagatcgactgtgtttctcctagaaaattaacaaaccggagtacggacttgcatatattaatgccttgagagtttagttggcatgagtcagcacctcaaagctgtcaatctctggtctgtgtgaaagatatatactctaatttctcatgaaaattagcaaacagctatgctggtttgtatttattaatgccttaggagtttctttaggatgagtcagtgtctaaacactgatcagatctgaggtaccacccctctctgtcccccacccccagcacatgtcccaaccctcattctgggccacgtcctcacacatctcctctaattcacacagagcacaccatgcaaggtgactttggagctggacagccctgcagcattgccccgggtcacccccaagcattcttcagggtgtcgcttaaatgctgcttcttttaaaaaccttttgtaacccttcagcattcttcagacatccctgctttttgtttgaagaatcctgcattttcctctcttcaccctcatttggcatctttcccaccacaagaggaaccaggggagttttactcatttttagatgcccagtgcctagcataataactggcacaaagtaggtactcaatgaatatttattgaacaaatgagtaaatggacactctcctgatcacccctgatgcttcttttcatccactagagagtggaaaacagatgctagcacaccaaaagattcaagagtagatagtataaattaaaagaaaggtcacattcaatatagcagagatgcctttgtggagctaacagggaggctgtcttcccaggagccttggagagacagcccatgagggtgacagcccagcagtgacaggacaagactgctgcagtgacacggcagcaataaggcgtc

SEQ ID NO: 50512 - DNA, 1175 bp, Bovine  19866881184179
  misc_feature (1)..(1): n is a, c, g, or t
ncgatgttcccagtagaaaggaccacatatgccatcctcatggaatcatgatcatcgaggatcccacagcactaagcaaaccagagaagctaaaaaagaaaaagaagaaaaacaaaatggatcgacacggaaatgataaatccacacccaagaaggcctgcaagaagaggcagtcctcggagtcagatatcgagagtgtcatgtacaccattgaggctgtggccaagggagactggggcatcgagaagcttggagatacccctcgcaagaaggtccgcccatcctccagtggaaaggggagtattttggatgccaagccaccaaagaaaaaagtgaaatctagagagaagaaaatgtcaaaggagaaatcctcagaccccaccaaagagtcaagacctccagattttatcagcatttctgccagcaagaacatttctggtgaggtgccagagggtataaaagcagaaccattgacccccacggaggatgcgctaccacccaccctgtcaggacaggccaagcctgaggacagtgactgtcacagaaagatagagacttgtggctcccggaaatcggagaggtcttgcaaaggtgctctttataaaaccctggtgtctgagggcatgctcacctctctgcgagctaatgttgacagaggtaagcgacttctcaaaatctggaaagaacatgaaaacctagcagaattcctcctttagaggtattgagaagcaattaagactacagtaaagaacattagtatcaaaatagtatcttagacttgtatgagtctttgtggtttatagaatatatacatttgtcattttaccgtatgttttagcaccacagaggaatgtttctattcattttagacataattctcagaatgtaagtgttctaagttactccagtctttttcctttttactggtgtcagctgactttttgttttgaaggatcagtattgcatgtgtagagctcttagtctggtttttaactgatggaaatacttttcagaatcacgcaggtattggttgacagactcttgacctgtagactctagaaacaaggaaatgtatctagccctccccgctagataatcagaactgtaatttgaagtgaatagctctttaatacataacagttccagaaactagttaatgtgtataccctttattt

SEQ ID NO: 50513 - DNA, 2789 bp, Bovine  19866881329613
  misc_feature (1)..(1): n is a, c, g, or t
natttctttgtccttctttacatttccaaaaagaagattaattcttaccatagattttggcaaccacagagaaccattttttttttctttttgtattaagtcaagaactttcaccttttcacttaaagttggaaagcactttacagttcctttttggatatccaaattgccagcatcattaccttgaggccatcattaagtaaaataagggttacctgaaaacaagttgccgtgtgatacggcaacatttggtctgataacctaaatgactacctggcggaatacactcaacaaagggctgatccacctcctgggagagatggagcgagatttcatcatgcttctcccagcaacatgcagcttgtatgtctgtgtgtgttcagctggttagtcatgtctgactctttgcaaccccatggactgcaacccgccagactcatctgtccatgggattctccaggcaagaatactggagtgagttgccatttccttctccacaacacgcaacataaaatgttgcattcagaaatgtttatttctgaaattttctatttaatcctctctgaccaaggttgactgtgtttgattgaaatctcagaaaccaaaacaacttgtaaggagggtcttactgcattctatgccatactggagagattttactttcgtttttcttctcattttctcctgctgctgatggaaagggaatttttcatgttggtttcaacctgaacaatggattccctcattgagtaaaacgtggatgccacagtactttctgtgtaatttttgcacctggactgtactgtaaggctgtacgctgtagttattccttaactaaccatttacagctgatgctgaatgggcttccaaagcgcataaagtgatactgaaacctatgtctgctatcttcaagtgccattttcagcagtttgtcagcagggccttctagcctcataaaatgactaagtagaaggcataagtgaaaaccatctggcttccaaaatgctgctcgtctctctcctcactcttctatagcctctgaaattcttagcactgttcattcattcttcaacccacaagtatttattgaggtcctccaaggatttcatgacggaactaggtggaaactcatatagcagtatatgtatatcaatatacatgaggctgcagcacacacagaactcacagtgggcacaggagggggacgactaagcaattattacaataatgggtgctcagtgccattgcaggaaaagcacagtcctcttgtgaacctttctagaaacttttagcctgtgagggtggagggaggcaggagacgcttcctggaggaagtgggattttaacagtcctatgacaccattcttctgaactaaggcatttcttttaacctttgttaaatgactcagtgataaagatttcacctgcaatgcagagacacaggagatacgggttccatctctgcgtgggaaagatcccctggaggaggaaatggcaactcactccagcaatcttgcctggacaatctcatggacagaggagtctggtgggttacagcccgtgggattgcaagggatcggacacaacagaactgctgagcaagcaccatcaccataccaaaatgcaaaccacttacttgaaagaaaaacacttttagatcataagaactatgggaactagttcaaactagtgttcacaaactgaggccctgaagaaataaatatttgaattgttaaatattggatggtggcagaagggaagttaagcctaaggtggcgttgataaaagagctgggagccacttctgtggagaattttgtgtctgcagagatttgaggcacccgggtgggggtgaggtaggaatagggcttggggctcaaaaccctgaaacaagatgcagctgcagcaatcatttcctccacatttagttttgcctacagccttctccactcttgagctagtccttacaagtcccactcaacgaggaaaatgcctcaacttggcttctagatagtgaaagtgaagtgtgagaggaaaaatatctttaaaatatctgacaatatgtccaaggtatctgagagccaagacaagtttggctggaaaaatccatcttgttttcctgtaggttatctctgtgacccctccttctatgtaaattgtttataactgtgtgattctataactcaacataaaaattgatcattcattatttggttacattatatgaacatgatctggcatctccatcttcctcattcctataacagttcagaaatgccaataagtgaatctcctctttattatttataaaaactttcagccaaacataattgcaacataatttacacaggtactctggatataaaaaaaatccttcaccttaatctcaatttgtgtcatttttgagtccacccaaacccatgtccattgagttggtgatgccatccaatcatgtcatcctctgtcgtccccttctcctcctgccctcaatcttttccagcattagggtcttttccaatgagtcagttcttcccatcaggtggtcaaagtattggagtttcagcttcaacatcagtcctgccaatgaacacccagaattgatctcctttaggatggactggttggatctccttgcagtccaagggactctcaagagtcttctccaacaccacagttcaaaagcatcaattcttctgcactcagctttctttatagtacaactctcagatccatacagaccactggaaaaaccatagcctgactagatggacctttgtgacaaagtaacat

SEQ ID NO: 50514 - DNA, 1151 bp, Bovine  19866881397138
  misc_feature (1)..(1): n is a, c, g, or t
ntgcgtgtgtgtgtagagctctccttttttaaaatgttggctcattaaaaaacaacaatgacagtctgtagaccaaataaaacatgtctcctggctggatttaatatgtgggccttaggttggggaatttctgaaataaaactacataaagcttcccccatttcttgccttatggctagtaagaaacatggtgtctcttgtaaagagataaatatttaattcttacgatgtgcacaacacaccctatctactctaagagacacataagaaatgctgagttgttctctgccttctagaaacttaaaataccgttgaggcaataagctattcactcaggaaagtcaggtaacggtgctatgcagaattctggtatcaaggcctaaacagattcagattaaatataccaaagtcaccttaaaaaagaaagaatggctcttagatctttatcaaaacctgactgtagtaaagccagtggtgtggaagtatctagggtattgttcacttttatattcctagcatttcatacatagtaaatgatgttaaacaaacatttctcaaataagaggatcacattaatgagttatagagggaaaaactaaaccttgagagcttagaaaagttggaggggggtgggaagagaaaagcagatgttttcactgttgatgacaatgtccaatggagagacactgaaattggaggccagagcatttggttagtggagtcctcattcctgctagtgagcagaaaggaatgtagccagttctcgctgttgttgtttagttgttaagtcatatctgattctttgtgaccccatggactgtaacccaccaggctcctctgaccatggaatttcctaggcaagaataacagagtgggtttctatgcccttctccaggggatcttcccgacccagggatcaagatgacatctcttgcattggcaggcggattcttcaccacctgagccaccagggaagcagttctcactgtaacccatgttaaatagttcacaagaatattttccttctttgctgaaatgtctagtcaacctcctgatgactaattaagcttctctgacatcttgatggaggaagaaaggagcccaggataggggacccatgaattctgctgagaaggctgcatttttttaca

SEQ ID NO: 50515 - DNA, 1194 bp, Bovine  19866881403198
  misc_feature (1)..(1): n is a, c, g, or t
ntaaaatggaaaaaacaaaaacaaacacccaactgttgtgtgtttgtataacctaaagcagtgaataaacacctgatttagcttatcttcacttagtggtgccctgtagttactcgggtatttaatcagtcttacaaagctgcaccttaaaaaggaagaaaattttaaagctttttgcatttgttttatacccttcctactacacatcagacgtcctttgatatagcagtcatgctgccaacagagatttgtttgagaaagaacacataccatcctctttaggataaactatgttaaatgaaagggccaactgcttgcctctggctaagctgagaagagaggaagtttaaactgtagttgtttttctaacctcatctaattctatctcacctcttttttgttgttgttctacgtttttggcttttccctatcttcttctaaagagggatgaacatgggagaggcttgaagtaagctgagaagtcaggggtactaaaaatctgaaactcgaaagaaaaggagatctggcatggaaattttacctttcagtttattttgaaatcatctctatgcccctttgcttagttttctttcaaattcagttagcatcatcatttctgtcacccagtatgtcccaggcctatgttaatcacggtagatgttgaaaaataagacaggactcccctctgtccccgccgcccgagagggactcatcataatgtgggggtgtacaggtaagcaatcattgcaaaatagtaagtcactaaagtcactgaagactcatgaaattacaattttattttattcccatagtttaaaaatattctatagtgagaggtaaaatgacaatttcaacacactactaagaattaaaaattctcagtgattccacacttttcacatggtccatccctgggctgggaagatcccctggagaaggaaatggaaacccactccagtattcttgcctgagaaatcccatggaaagagaagcctgcctggtgggctatatatatagtccatggagtcacaaaagagtgacacataacttagtgactaataacaatataaggaaagctatgtattcacaagaccccaagaccatcccaaatttctacggtttgctaggagaactcccaggactcggcagattgtcgtactcctggctaatatttatttcagggaaaggtataga

SEQ ID NO: 50516 - DNA, 953 bp, Bovine  19866881420996
  misc_feature (1)..(1): n is a, c, g, or t
nttctgaagctagtgccctcaggacttgctgtcagaccagatgtggggtgtgagagaaaccaaggaaagtgacgagagaaaccaaagatgactgtaaggcattttgcttgagcaactggataaacagagtcaccactactgaaataaagggagaaaacccagcagggagattagtgtaggactgagaggagggtatcaggagtccgtttgggaaatgaaaatgcaagatgcctttaggataaaggaattgggccttcagttccctctaaccctctgtccagtcctcatattctatgattccacaactgtgagagaataaacagctaccctagtggcttctatggtaattgtgttcttcagagagaccttccactctgttttaccccactttcccaaatgcaattggtgagtatgctagctagagatcagttgctggaaggcaggcacactgaaagggagcaactgccagccaaaactagcaggagcacttggaagagcagcatgaatggtgtgcgtgctgaggaggctttgagagctggaggcaaattcctgtgtatcttagtttcctggaggttactcataatggagggttgtcagccgaccaggctaagaatgttcaatttgttttcagagaaaaagcaaaacatcttcttcgacttcacctcagctccactctcagaatggccacacttcagacccactcaccctctgcatagacacccgggagccgggcactgatcccgacagcccctggggaccctcaggacacagacgtggtctttgccactagcttctgcaggcaatttcctccctcttttctctcctccctgggaggtatatcctctgtctgcccgaattctttccacccaagaagtggctcggtgccagtggggttgtttgctgtgtggggagctggcaaaccactttgagagtgagctgatagtaatatattt

SEQ ID NO: 50517 - DNA, 1741 bp, Bovine  19866880187683
  misc_feature (1)..(1): n is a, c, g, or t
nactgctgctgctgttgctgctaagtcgcttcagtcatgtccaactctgtgtgaccccatagacggcagcccaccaggctcccgcgtccctgggattctccaggcaagaatactggagtgggttgccatttccttctccaatgcatgaaagtgaaaaatgaaagtgaagtcactcagttgtgtccgactcttagcgaccccatggactgcagcctaccaggctcctccacccatgggattttccaggcaagagaactggagtggggtgactcagttgaactaggtatgtctaaatttattaattaaggaaagagatggcagagcaacacccatattttttaattgtatcatataactcaattcctagcccatgtggcaatagtggtaagtttgcctggcaatgcaggagacataggtttgatctctgagtcaggaagatactgcctggaaaatcccatggagagaggaacctggcaggctacagttcatggggtcacaaagagacgatcacaactggtgacttagcacacaacacaattccaagtgggctttgttgagagctttcttagaagccttaaattaatgttctgtatatagagttttaaaggagtacaattctggcagaagaatagtgcttgacctgggtctttgcagtttgagtagaattttgtgacacgtggggtgggaagaattgggaaagatatttcagagtggaaaaaagcatcagtaaagtttgaaagaaagagaatgtagaaaattatcagggaggcagggtgggggtggggggtagtggtggtggtagtggaaatttctgccacactgatgtactcagagtcatggccaggttggaaagtagaccaggggtctggagcttgccatgaaacagggagtagagttatcagtaaaggaaacaaacaatggtatgagtttggttgactgagagtctcttataatcaaattttggcaaagttaacctgatccctgtttggaaaaatacattgtccgcttgtttcagcagtatacctaagcatgggaaagcgatagaggggagttttatctgagtccttaaggaggtaagggtttagcttcactgggaatattgtttaaaatttgaattcaactagataccaaattaggactgggaagatgctggcttcaagccagaacacagaaatacaatggtaaattaacttaaagtggtttgaatcattttaaaataaactcatttgcccataagaacttgagggctgtataagggcctgaaataattcacaagtttgcattttcacagtgacaggagcagctgacaatgtctattctgattttcctcctgagggcttattttaacacagtcctattttctcagcatataagttttaacttttggtaacgaaagctaatagtcaattctaaaaaatgacactagggttttcaggctctggggcttttgtcagtctccatctgtatcacctctgcttttattatatctggatggtacttaacaaataactattgtccccagggaatcatttatgccatggaaatagaaaaatgaatgaaatctacatgctttcttatgatagcagctgatcttgcaaaaattcactccatgaatttttaaattacttaaaataatgtataaaataatgtgaactctagctctggagaccaatgaaagtgaaaagtgttagttgcgcaatcgtgtccagctctttgtgactccatggactgtagcctacca

SEQ ID NO: 50518 - DNA, 703 bp, Bovine  19866880412561
  misc_feature (1)..(1): n is a, c, g, or t
nagagaaaaattaaaatatcattgaatatcgctaaagttccctttttgctggttcattttcttagctgctatactggcttccttgatggctcagagggtaaagaatctgcctgtaatgcagaagacacagcagatggggttcgacccctggatacaacagatcctctggaggaggaaatggctacccactccagtattcttgcctgaaaactctcatggccagagaagccttgtggcattcagtctatggggctgcaaaagagtcagacacgactgagtatacacactgatatttatctcccccctgaccctcccgtactttacttcattcctttgtttccctggcctgataataagccttaaactcaatgaatattctatgtatgctggttaatggagcattctggcttgagtccattaaaacaacttgcatgatgcaattatttactacttcatatgtcgtttcatgtactaggtgcaattttccttttatccaaaggggatgaaaatttgccaagatagctttcccagtaaacatagtttatattctttcactttagggaaacccccaaaggaagtttaaaagcatgaaattcaaaaggaccctatttctaagcaaccgatcaatttgagtgtggcaatgcctttcagagatgtagtatactatttctaaatagacgagttcagccaaccttctctcctg

SEQ ID NO: 50519 - DNA, 1068 bp, Bovine  19866880440280
  misc_feature (1)..(1): n is a, c, g, or t
nacttttatgttccaaccaagaaatattaccattatgttcttgttccagaaacctggaaacaaggggtcaccagcttcatcatttccaccaaattgctccattattcatcaaacacatattgattatctatgtgagttgtttttctgtgcaagaattggcagtggtgctgtgagatgctgaggtacataaaacatggctgcttccctcaaattactttagctctgcctgagagagagaggaactctgagtcatatgatgcagagtatccaatccaaccactaattttatgatcttttcttgtgatattagatgtttctagtaattaaataccttatcaactgataaacagtgatgagctgttttattaaaaagatatttgtgatgaactaccatgtaccaattatatgctaagtgcagaagatacaggcaaaattgaagactggactcttaatgaactcatagcctggtagctaagtaaatcattaataatgcaccatagactagatatgatgcccaaagaggaattctaaatgtgttttgaataacagtagaattattaaaatattgaaaacttcttaaaagactattttgaatggacaaaaataaatctacgtttatttggaaatgtggtttctggactgtttagaaaacaaaaaaacagcatagcaagatgcaaaagactcagtccttgaaattctaagatctggcttctagtcctattctttctgtatggtttcaactcttatccactctaggccttagttttctgtgctgtaaaattaagaagtttgacagattagtttctgacatctgggtcaattcaatgaccacaactgcatagaaatcacagacttccttgatttccatctgcaaggtcaatagtgaaaaaaaccaaccttgttggtctaaagttacaggaccagctgtattaagagcttcataaaatgaactgagagatggaatgtagaaaccagagggacttcccagggagctggtgaaaatcccttcttccccatagcccagttcctagcttccatttcagatctaacagttttaataagagaaag

SEQ ID NO: 50520 - DNA, 1240 bp, Bovine  19866880572673
  misc_feature (1)..(1): n is a, c, g, or t
nttggtagttgatgaaagtaagggcagtgataaattgacaaacaagaagctgaaaccatcaggaaaggtaccagaatggcaagagggagaccagtagatggcactggtaaaaatgtgacaggatgtggggatcaagtaagtgactgtacaaggactgtttgtttcctttgtcttattttggttaaatattatcattgctgccagattagcagtggatacattagaaataactgaaaagtcagtggcttgtttttacgtcttgcaaaacttaccacatgaatctttaataaaacttccatgaaaattgaagattaaatactataagtttatattgttcactgaaagattccactaaagttatttgggtttcctttcatatgatgagaaatgcatatcctttccctattatcacctctgcttccaagaagaaaaatagcactgtgcagcataaaccaaggtaacgtgacttaattctgagaatttcacaaacattgatatagagcaatgactaatgacctgatatactgtttaaccagatttgggaatgtgctgatctggcaaattaatctctattctattgcctgcacctgtgaggctatatacattgcaataaacactaaacagcaatctaatgctatttcttccacccaggaaaacaaaaccttggaccacatcctcacatctatatccacatccgttttgagttacaagcaggaaatctcaagccatgagctacgtttcctatttagctttcttcagcactacagtcctagctttgggattcttgcagaaagcattactttgggaagttatttttcatttctcttgcatgtctgatgtccttcaattctatgaccctggttgctggtagcaacaagaaccattcaatacagatctgtccaaatgtatgaaacagtgaaccaaatttagcagccaagtaaaacagcccactgattcacattttccccacaatttccatggaactcaggcacagtgccagaaaaactgggacaatggtggccttggaaaggctgactcaaggtcaacagacctgatataacagtttggttgtgcttgagtacaacatagcaacaacagtaaggcactagattcatttgacattccgctctgcccagcccaaaagcagaaatgataaaactgggataataagaagacacatatgcatagtattttgaaatatacaaagttcttatacagctaatacaagaaagaaatatct

SEQ ID NO: 50521 - DNA, 1727 bp, Bovine  19866880726764
  misc_feature (1)..(1): n is a, c, g, or t
nacaggcagattctctgccactgagcctcttgggaaggaataattatgtaactttgctgttgtttttccatccttaagttgtgtccgaccctcgtagtccctggactgcaacacaccagacttccctgatcattatctcccagagtttgctcaaactcatgtccactgagtcagtgatgccatccaatcacctcatcctctgtcatcccccttctcttcctgacctcaatctttcccagcatcaggatctttcccagtgagttggctctttgcatcaggtgacaaaagtattggagcttcagcttcctgcttcagcttcagctttatgtagctttaaaaaaacaaaaaattgaaatgtatgagtaccctggaaaaaccactgaattgattgctgggaaatcatggggtgactttgagcaattcacatgggtttcaactccagtgggtaaaattaaagtgctgaaggtgggaggcatgggggtacaggggaaggctgaggctcacaaagggctacaaatgtttatgtcatgtcttacttttcaccatatcatactgcttttctaagttaattttaatttctctctcaatatttttagccctgcactacaatgtttcatcttaaagtacaaaaatgaaactgtattggaaattgagaatcagtgtgagatatccactcataggaattcgctctgaatccattgaaccttggtagcacttagcttctcatggttagtgcaggatccccaaagcttaccaggtgtggtttggcctcccggtctaccagctggaggtcttcaactcccgccatcgttctgtaattctcgatgttctgctgcatttccatgtgctcggggttggccatgaaaaatgtgtgtgctgctgccactgccttttccatctggttaagctataaagagggggagaaaaaaaggaccaaatgaaggcaaatatttctaaaccacattgagtaccagtccaagggtcacagactgaaagtgccagggctgggttcattccctccagccagcctccacactaaagggcaggaggttaataaacaagcgctcctaaaatgatatgtgggtatgggtattttggctatggtgaaaacggataaacgtgctttgttctaagtttgttctcttctccctcatttcgaagccatctgtgtttcctggcaaattgaatcgacatgcttccgtttgcttttcgattgatcaaaattaaaaactgccaatgctgtgccatgtctgattcacattttcaatatttttgtcttttttatctgattttctttgtgttccttttggctttaatccttacaatagaggaataaaccgtgactttctgaaatatgatattggggatacattccactacaccaagtttgctataaaggctttagaatatgaagaacacagattttaaaataattcttccaatccatacaagatactaaatatagtacagaaaatgtactactatatttctttgattaagaaattgattccaaacttacacttggattctcgtcagtacaaaaagaaggattttcaataaaatacaaagacactataaatctcctcttaaaccacttaatatgctgttccccatgtaacatgcagtggtgtacttttttaaacaaaatgaaattaaatttgtttgatttaatacattttgccctgttttctccatggagaatatctatagacagagtctgacctcaa

SEQ ID NO: 50522 - DNA, 1623 bp, Bovine  19866880811238
  misc_feature (1)..(1): n is a, c, g, or t
ngtatttagctgtcagctgtcttttctgagtaaaaggaactgcatgtggaataaactctcatggttttatatcaacagcaattcgtatgtctgtaaggtcactggagcaaggagatgtgaaatgacataactttctccccaacagcttctaattttttgagattaaagaagtttattgcagaacagaaagaggaatcttagactctttgaagccctacagatgttttgtagacatgcagtgctttttggaacaaggggtcctgtaattaggcacacaggggcctcaagggactgatcttaactgccatctctctctggtttttaataaagattacgaccccgtcatcaggctcccctcagctgaaatttaaaggaaactgggagtagccagagaccgtagaacctaatttattgtgaggtaaattagagagggaatctcactttacaaatagattcaggcttctaatttgagtttgaatctaataatgaagactcatgatttcttagtgtaaataacaaaacagtgtaatttgtcaccttgtcattgtattagaagggtctgaagatttggaatgtaacttctaattgttttatgcggaggtaattctacattgtcaagtacctcaaacaggtgtttttttgtgggttactcactgagtttgcaattttggttttactctttatgctgttttaccagtatcatctggactaaatattgtggaaaatagaatgaataatatgaagacaccatttaaaacgactttttgttttactttggagtagtttccaagttgtattacatagaaagaatcgtaattgcttaacgtaagaatcctcatttgaatttgagatgtcatttgacagcctcctgaagagtgtggttcattgagtagaacacagaactcaggacagcagtggccactgataagctgtgtgatcatggggcgagcgactctgcctctgctcatctattaatgggtattgtaacatttacttggtaggattgctgggaggcttaattaaagtttactaagtgctttgggaacctgagaaatgaagctcagaaaacataatacgttattatctgcatttttgtctttagatttatctgtgtgaatagtacatatccatgcttgtaattcaggcagttttttgaggttttccatttataagcagacctgaaatgaagcattataggtgtacaagtccctagaaataaatgtaggatgaatatatatgtttgcatagatgttatttttttcctaatgtaaaataacttcttcttaaagcctgttagatcttataattgttaatcagatgctgtttttcttaagagtctcagtactttattggtaatatttcagcaaactagtaacagagtttatttttttaaagtatttgtgtatgttattaatttatatatttttggctgaagtgggtcttcgttgctgcatgggcttttctctctttgtgggaggcggggactactctctagtgggggccagattctagtcctggtgtccggtcttctcattgcagaggcttctcttgttgcagagcactggctctagcatgtgggtttcagtacttgcagcacatgggctcagaatttgggctcacagc

SEQ ID NO: 50523 - DNA, 1358 bp, Bovine  19866880850128
  misc_feature (1)..(1): n is a, c, g, or t
nctcatttgtttttaatctaaaaaaacttttaatgctgaattctatatattattaacataatcatctttttgcctgtcctaagacccaaatttgagacaccttggctggtattcaattttaaaattccagctttttggggggagaggatgcttatgtgaagtctaactttaaagtcttttctttaacctgcttacttcctcaatttcaaagatttgacctctgatgtttcacaaacatcaatttgaaggaggcattcaaaatccaaaccttgaataactctcgtttgattttgtctttatctttgtttacttccattagtacttctctccctctctttccacttcccaggacccacatttttttcccttcatgatggcaaatattgttacagtccccaaggcaggaaacttctattcagactgtaaaaggaaatgttgaaatccttagctgtcctgtcaacagtagtggaatgaaaagtcgttggattgctttggcagtggttctgaagcaggcacaattggcaaattattattaacagtgctgcccgaaaatccccatttgcctcaagatagtggcatttgttggcagaggtctatgaaaggtccagcacattctctttatttaccatttaaggatcagtctgacaattgacttctttctgcatattcattccctttgaattgtctaagttggactgttcccaaatgacctttgaaaggatatagtgcaaatcagaaaagatgagaggagggtgatatctcttaaccctgaggtccagtctgtaacaatagggtaccaaagctgtttactgtgagaagagtgatctcagagatgacatgagaactatcttcatatttcatacagaccatcttgtgggatattctagaaactgataagtgggacctaggaagcaggattatgatcagaggataagaggattcagggatttggatggcagtttaagataagaaagaacttcttatacttaaaaatgcccaaggatgggaagcattgctctttgacatgtactaggagggactaatggagaaggcgatggcacccacgccagtactcctgcctggaaaatcccatggacggaggagcctggtgggctgcagtccatggggtcgctcagagttggacacgactgaagaaattcactttcacttttcactttcgtgcattggagaaggaaatggcaacccactctagtgttcttgcctggagaatcccagggacaggggagcctggtgggctgctgtctttggggttgcacagagtcggacacgactgaagtgacttagcagcagcagcaggaggaactaaagtgaatattgtgaaagggattgctaaagag

SEQ ID NO: 50524 - DNA, 1401 bp, Bovine  19866880870089
  misc_feature (1)..(1): n is a, c, g, or t
ntacgtttagatctttaatccattttgagtttatttttgtgtatggtgttagaaagtggtctagtttcattcttttacaagtggttgaccagttttcccagcaccacttgttaaagagattgtctttaatccattgtatattcttacagaaagagaaattaaggaaacaattccattcaccattgcaatgaaaagaataaaatacttaggaatataactacctaaagaaactaaagacctatatatagaaaactataaaacactggtgaaagaaatcaaagaggacactaatagatggagaaatataccatgttcatggattagaagaatcaatatagtgaaaatgagtatactacccaaagcaatttatagattcaatgcaatccctatcaagctaccaacggcattcttcacagagctagaacaaataatttcacaatttgtatggaaatacaaaaaacctcgaatagccaaagctatcttgagaaagaagaatggaactggaggaatgcaggcagattctttacagtttgagccaccagggaatccctccctacctacttaaccccaactgaatgctaacctaactcaacttccctttaaccgtatctcacaaatatgacacccaacttgaggggaagagtgattaagggggagacagaatggaaaggaacagcacttctaaccaatttcagttaaataaaatttatttttgaaaattaagggtgaaaaagaagcaagaaaaattgacataggaatacattgctagggcccctctcaaagcctcagaagggacccattaggggaggtactttgaaatttaacctttattagcttcatatcaaattcattctggcccaaggattgtggaatgagtaataaatttggagtgcaaaatcttgattctagtcctggttttcccagtgattcattatatgggccttggacaaataattcatccctggctcctcagatattcctttacaaaattggagttttgaataaataacacccagagttctcttctccctctgacattgagttgcatccagtagagctggctacaatagcaaaatacacataaaagggcaccttcttgccttcacagtctcaggtcacgtaggctctaggcctaaattagaaggcagaagcaatctgggctatctcctctattttagaggcagcttggttttcaagaatgccttggttttcaagaatgcaggttatctcttctcaggggaaaaggtgtagtctttccagggactctagcctcctgtgtatcccagtgatcctgtgattcactacaagactgatgaggtacttgtttccatggtgaccacttctgctcttcccagcagctggagggcttaacccagtcctgacacagcttcctcagttggg

SEQ ID NO: 50525 - DNA, 985 bp, Bovine  19866880962888
  misc_feature (1)..(1): n is a, c, g, or t
nttcctgaagggtcaattagcacctataaaatttatctctgttgtcactaatggctattatactaaagtgaggactaatgaagacagatccccccccctcctcctgagattgctatttaagtggaaaataacttggaactctctacattgaacatcccaattcatgattagtttaagattcataaactattgtatagatttgaggttaaattgttaaagattctttcagataaggagctctgctgagtacctggtaacatgcacagttaggtgcccgcttggccattaaattaagttggcaagactgcctaatgatatgataactgacctcccagatgtatgggagttctgaagactttcaaaactcaagtggcacttcagcacccagtagtccagcatactgtctagactatgaagcaacactgagattcaatcttacctctgctgttttgtagtctcttgatcttggacatgttaattagtccatctgtgcctttgtttactcacttattagaccggactaattgaagtaccaaccttcaggagttgtagtagatgaaaacaatgaacagaaaatactcagtgggcaataacatttggtgactatgtgaacggattttttttttttttttttttgagaaaagcaaataatatctgaagtcagtggtgaaattttttatagtttgaattgctattatgtttaaagaatcttttcttacatgaacatctctgtcaaattatcatgtaattataggtatacatttcctatagacagtaggtaaaatgattcagtatgtagatttttgctttgggtcttatttatatcttctgataaaattagcacattctaaatctgtttctgaaaaaccaacagaaacaaagaaacaaaaataaaaaagaacttcacctatatacaatcacccaaagacatctgttaccttgtcacattctctttaagcaatttttaccatcaggaatactactg

SEQ ID NO: 50526 - DNA, 1019 bp, Bovine  19866881083806
  misc_feature (1)..(1): n is a, c, g, or t
naacatttaaatcattccctcaatttccgtaagagtcaagaatattaacctcaataataatggttacacttcttccctctgaaactccagattattcctaaagtgctaaagaaaggtcaaagtcttcagttgggcatgcaagaacttagtatggtgctctttccagtatgccagattcagttaatacaatatgtttaccacctactacatgccaagctctgtcagagtccttttactcatgtctaataagaacagtgatgcagttgtttattgctaccaccaaaaccacttgcttttacaaatgaagaaattgaggctggatgttcagcactttttgctgaaacttcagaataaatcaccacagtgcctggagaaatcaagtgtcctgatccccagggcactacactgagataattctattctaggaacacattctactttcagtgcactgagagcaagtgtcatctagattttccacctagcattatccttacccattaggcctgtctctcttcttcagtcactttcaggtggctttgatttcttaccttcaacttgtcttcagcctgacatgtggctgtgacacaagaagcaaagaagggtgggggcagaggtggggagtgttggggagggctggggcaaatggaaagtagatgactgggtgctgtttttgttctgatattattgtctagttaagatccctctcttgttgctgtgtattctttgctttgtaactcagaagtgtttatcacgacaagctgtgagcagatggactggagagaggagagaaatttgacccaagaaagatgtcacttaaacagctgaggctagtatttcaccagatgtccaagcatttaacccattaatggctttatgtagatcagtagccatgcttccactggctaaattattaactttttttatgctgagttaatggtattaagtatttgcctgttataaaacatattttgtttttaatggcatttgtatttagctttctttaggatgcattcttcaat

SEQ ID NO: 50527 - DNA, 1188 bp, Bovine  19866881134196
  misc_feature (1)..(1): n is a, c, g, or t
nctctcatttgaaaggaagcaagtagtcttatccttcagaacaaactatgaccaattctaagacaaatcatataggtttggtttctaaattagtttctgattcaccactctttgctatggaggtacaaaattgagatggcaaaatacatgctctctttctacctccttaagagggtgtggtgagaaatggcttgaataatacccattaagagctctcagcttcttgggaggacgataagtaaacacaatgaaataagaactgtttttttaatctataggtgaattacatgtctttcctaaacaaagaatgacttggatagacaaaaaagaccaaaagcaaactcacatcactgcagacaatatacttctgatggccacccaactcaactcacctttatccacaaaggaagtgagaggctcatactacaaagctgtctctccctctgtctctctctcgcatggtgtgtgcaagcacacacacacacacacatactttttactttttaccttttaccagatgaagagtctcataatctttctaattagaaataatcaattcagctatgattttatcagctttgttttatatctctatttcaacattttgttgtcatggttcttgttttctaactagtggatgtatagctttacctgtcatcaggtcataaagtggcctttcctggtggcttggatggtaaaagaatctgtctgcaatgtggaagacctgggttcgatggaggaagatcccctggaggaaggcctggcaacccacaccagtattcttgcatggacaatctccatggacagaggagcctagcaggctaagtgcatggggttgcaaagattcagacactaatgagtgactaagcacagcacagcacaggttatagagtgaaaggactctcattttaatctctattcctactccaagagctggttctggtatattctcaataaatgttggggaagaaaaagtagacagtgagcaggtccttatctgacaagaacagtcatccaaagagatttaatcataatcccaacacactcacttctcttgacaataagcacatggcatggtggatagagttttgccaagagaatgcactggtcatagcaaacaccctcttccaaaaacacaagagaagactctacacaggacatcaccagatagtcaacaccgaaatcaga

SEQ ID NO: 50528 - DNA, 1206 bp, Bovine  19866881135908
  misc_feature (1)..(1): n is a, c, g, or t
nagttaaactgaacacttttccgaagcggccccagctcgtgtgctgttttccctttgtgaaaccttctgacacagggaatcctcattgtttcttcaatttagtgataggaaaacaaatgagaagcaaagagaaggcagtcctgttggtacacattttataaagaaaatgaggagtctggctcttcaagtgaaatataaccaagagtcccagaaaaagtcaaattaaagagaacacaaacttgtaaagaaattgatgcttgaaaacaattcatcttaagtgtaagggaagttgttttactaaactttaagtatttcacatggggaggagaaggactctgccattccattcagtccagagagcatctgtctaaatgttaacagtcgcatgcccattccattacatttatacattcacattccactgccgaatgccatgtccccatttgctcttcagataactattaatctctttacacttatccccctgctgacaagagcagctgttagtctcgcctctgctctccccggacttcccacagctcccagtcctcctcgcctccttcttcacctttcccccttgacaggtgaggcagactgcaggtgagacagctgtgagagaaaaaaactaaaacgtgaggccctgatgaaggtgtccacaaccctggctgaattaaagctcttaggtgtctaagcctgggggaatggtctaggaaggggactgaaaagaaattattatttgtgttcaagttaagggtcagtatacaaagcactcctgagcatcctgtaggaatcagataatgctcccagaggcacgtgcttccctgaagcagtacaattagggaggcagtcggccctgacaaaagggacaaagaaattcgctgagcactttctcacaggcagtaaaaaagcctgttaggtcaatcctgtccttctcctcctagctacacagaatggaacttcagctaattgtgggcctggagaagaacaaagaaacatggccctttgaatttttttttccaataaatataaagagaaaagtttgggacccagctttaaaagccagtgagtaaacactcagtgttacttgaaggacttaagagagatggaaactccatttacctcagaggtacaaagaagacctttctgggacagcagtgagactgaacatattgggggcactaaagaagcagaaaatgtatttcaagt

SEQ ID NO: 50529 - DNA, 1797 bp, Bovine  19866881175252
  misc_feature (1)..(1): n is a, c, g, or t
nttaaagacataaaaaatactcttaattctttataatttatggagcatttatatatactttatccaatttaaccttacaatggcccagtgaggttcagaggaaaggcagttgttcatcatgtccattttagagataatactaccaagggcctagaggaaaaaattgattaaacatgaccacagagctatatcttacttcctacttaacactactctacattccttctctgaataaaataattataatttaattatacacagaaaattctatatacactgtaagcaatagacatagatgaacacaagtattgcaagttttcaacaatattacactataatttttgctaagaaattagcaagaggaaatagcatcatatggttaatataaatacaatgcattctttctaatataaaacagctccactgtttactaaaaaaattctataaacctattatagcttttgtctatataaaacccaggttgaatcttatcatttttttaacattacatgtttttaaagcacatagattctccacaaaaactaatttaagagtgatgcccaagctgcctcctaccttgcaaatttcaagaaacttctcacttgtgtatttcatggggtgctcagtgaaagtagcaaaaggcatctcagtggaccacggattccagcggactaacagtgactgttgctcaggactcccccagtagatcctaaggccttctccttgtctcctgcaagaaagaagctttcccttagattagtcatcttcattagattaaaccaaaaaagaaaaggatgcaaaggaaatgtactaccccagtcagcctttgtattgatgctgagataagaggctgacctaccaactagctgaattctcccaaggaatttaagaggaaagacaaggatggatttggtctcaaacatgatgagtgagggacagagaggcctggtgtgctgcagtccatggggtcatgaagacacgacttggcaactgaacaacaacaactgatgagttcaaggtgttgttgagaattctgtaggttaatgcttggttggaaatgttactctggtgttctggacagaaactaaggctggaaataagcatactgaagttatgccaatattctgatggtcaaagctaaaagagaaaggaagaaagaagagtcaaggtggcaggacaggaatcgaaacatggaagacatagtcaacatgggagatggtttcaagaagaaggaaaataatagcaactatagaatctaccaagcagtaaaaccaggcaacaaatgactgagaaaagacattgggacttctgtagaagaagggtatgtttgatctttaagagaattgatggccaatttaaaatgccctgtgacctcagcttttatgtctcctggttctctattctctgcacacatttcatccaccagaattgcagcagcacacatgccagagctctgcctggtcacagttctgatccacagtatgtgggaggcaccactgtcttttagaggccaagcccatttagtaaacctaagtgcagagcaagagaaagtaggtttgggagtgatgataggaggggagttgtgggaggggaatgtggtccactgaataacaagtctataatctctgtggcctcttctttttgccggtacccttcagaatttacagtttgtggttttagacatttctgaatgcaaagaggtccctggaggttaagccaatctcaggtgctttgcattcgacaagctttaaaactaagttacctgtaattctaagcagccccaggaacatcacagag

SEQ ID NO: 50530 - DNA, 1004 bp, Bovine  19866881180411
  misc_feature (1)..(1): n is a, c, g, or t
ncgcaccctctccctctcccacagtagtccaaaagactgttgtatacatcagtgtctcatttgctgtcttgtatacagggttattgttaccatctttctaaattccatatatatgcgttagtatactgtattggcgtttttctttctggcttacttcactctgtataataggctccagtttcatccacctcattagaactgattcaaatgtattctttttaatggctgagtaatactccattgtgtatatgtaccgtagctttcttatccattcatctgctgatggacatctaggttgcttccctgtcctggctattataaacactgctgcaaagacaccttatttcaacaagtggctgcatatatactttttttgaaataattgcttctgagctcagttttcttttcatcaatttacagtgtctaatatagtattttatctctcaacataagtttcttgacattttcccttgcaaaggcagaattaagcacctttatttgctctcctttatttctttctttctgttacacatttaccaatagtctattaaggtcaagtatttttgctttttctatgggatttccccctccctcttgtcggacttagcagtttctactttgtgtcatgcctagcctagaggataatattcacaccttattcatctttgtatttccttgccatttacaacccctacccaacacagacatttccagtatgtactagatatttgctgaatgaatggttttttcctcttgtttcctttggcttttctttttaactcaagcatggacaccacctctattgtatctgctcaaagacagatttgaccactttgaccacagtgggcacctagtcattagaaatctttccttccccgtgcttactagggacttcagccatctaatttcagctgtgtaaatgaagagtcaagatcacaagactgccaggatatttgtggttaaaccactcgaccaccttgggattgtgttaactctgtattatg

SEQ ID NO: 50531 - DNA, 1123 bp, Bovine  19866881236338
  misc_feature (1)..(1): n is a, c, g, or t
nacatcttttttaaagtaggtgcttggatctacctcagctctagaagaaactttcttctatcgactagcaacctgcatgtcagtcacgaagacctctgtccaggtgtatttctaatgattgatgagggaagcctgtaaatatgaatacacaaggaaattgcttttcagagtgtcctaccaatctgcccgttgatggagcaaatatcatctcaatttttgacagactgtaaaatttaaaataataatagtactttaaaaatgttttaaattctgctgaatctctgaacttaatggcaagagtcacttttggggaaagggggttcatgttgggcagctgtgagatggtggtgctgagtgatcagtgaacatttatttgccaaataaattgttttaggtaagattatctacttcccatttgtcattaaaacttaattggaaaataaactaaagaaaaatgttccttgccaaccatctacttactctgatcaaggcactggaaatacaaaaatgaacaaggtatggctgtaatgtttaactctacaatacttacatatttaataacgaacattttcctcatatttttaaccaccgtcagatatttcaagttctgaattattatatttttctgtctagacttttagggaataaatgaatgaataactggaatatcactataagaaagaatcaaacaatattctgtttgattcctcaggagtgaatgggtttgagctggtttttctaagcagacaatccttgtagttctcagtttacaaaatctattttaagtaagaccaaatttaatcattccataatcatagtcatctacatagttaaatttgtctttttcctgaccttgtctttagaaaaaagttataaaagagaattttcataaaaggaaagaacaggatttcttgttatttttagctgtaagctaccttaatgcatgaatttccttttatcaaagaatacaataaatgagagctgctattatcatttattactgaatgttaatgccatttccccaaaagccagttttaatatacatttcaaagtatgatggtaatcattctctcggttaaaatttagatttctaagtttttttttttgctttttttgccctttg

SEQ ID NO: 50532 - DNA, 2562 bp, Bovine  19866881264542
  misc_feature (1)..(1): n is a, c, g, or t
ntgctgtggctgaatgtttacaagtgcaggaatgatgccagaggggcttatgaaacattgaaagaactcttatcatcaaaaccacctctttagtaagaccctgtgggctgtcaggttaagagtccccattagtctgccttatgggttaaaaccctgaaaggaccttagagtcttttagaagtcccctccaagagtggtctttggagtgactctccgtttgatttgcagccatggtgctttcttccatatgagctgaaacgaaggctttgaaatactttttgaagtaagtctctccacccttaaaagagtaagaaaaagtttgtatttcatagaggaacatggcatatttataccaaaaaggtgcacgtgtgaaagtgtttgctttgcttgtttgcttttcttacatttctcacagtggactggtttgggtaggaagttaaattttgtttcataaacgcaaaatggaagggagaccaaaatgaaaagatgttagaaactgtcacaacatgggacttccctcgcggcccaatgattaagagttcactttccaatgcagagggtgctggttcagtccctggcggggcagctaataacccacatgcctcccagccaaaaaactgaagcataaaatagaggcgatattgtaacaaattcaacaaaagactaaaaatgatccacctcaataaagaaagagaaattgcaatgactgaatttttctgtatactcactaaactctaaagcccctccccaagtcatcagttttggcaagctatctcttagtgctatcctagtactgttacaatttttattgaggcaaagtccagtatgttacttcctttccctggcacatactcttccatctgtggtccacttaggatacctgagtgcttacaagagaaacacaacataaacgcaaactctgagtctcagtccttggttgtcccattccttctcacctatgacaagcattttatacccgtcacttttttatttcacgaatccatgcaactaacatacataaaagtttggaaaagcttttctattctcaagaaataaaaaatcagtgtcaaatctattttaagctttcactgctgatttttaaaggatacctttgaagcagaaagcccgaatttagtttatttgcatttgcaatcatttgtcagtcatttgacagataaattaaaaagattgcacctttgtacagtttggagtgaaaaaaaatgtgatctggctgctgatgactacagagacataactctggttgtaagcaattaggctgttggctcgagcaaagtgatggctagctagaactttcttaatgggtcactagggataggcagcattcatctccatttatcataatgaaaaccaggcagaagttaagcatgcgtgaacagttagaacaacaaactttgtttttataccatcgagttcattaagggccactcagtctgtgccagcactaatttccccgtgaagctatagctcattgttttattataatgtgttcttgtaaataatagtcaaccacttttgtactggacctaaggtgaggtaggggtgcatcttccacatttttcaagaatttcacaagaggaattgattatacacttgataaatgatcatttttattattttaatttttatcagtagtattgtaaattgtgttgcaaactatgcaatagtatacaaggttaaattcttattaacaatctcacaaacaaaatggtgctcacattatatgggagtcacaaaggagagtgcagttctgagctcacaaagagaaatattagatttttatttatttatttatttttcaaaatcagacatgagtaagattctttacatggcagtaatgactactacaatagacatgtgacattggcaaaactggagttgaacatgagtgacagccaccttccaaagacattttcaaagaggattaaagctgtgtctccaaaaacagtagcaggaagcaaatgtcagagaggtcttggcccaaacttacttttcggtaaccattagtcattctctgacacctcaagggagacttctggacaataccacagaggttgagacgctttctcagtagtgcagtcttaccctgtcctaatgtttgaaaccaaaaataacagtggcataccagtaaaccacacatcaatttcatctgatacgtggtaagtagggcttgtccacattgcatccctgagatagtcctctctcctcacccagcagccagccaagtcttggccgctgtcttgttaggaacttagacaatacacagacagcttgagagatttggtccaaattaagcacacacatgttttttggctagtgctttgagttccctgtgtgtgtgtgtgtgtgtgtgtgtgtgtgtgtgtgtgttttcctcaaaaagtcaaggactttttgttttaaatagtctctaatatgaaataacatgtttaaaagttttgcttctttactttagtgttttccttaccctaaaagatggtttttatttagataagaaatcttctagcatgcttaactgatagatttgttgttccacagagctcg

SEQ ID NO: 50533 - DNA, 550 bp, Bovine  19866881284332
  misc_feature (1)..(1): n is a, c, g, or t
nataaaatattttcccttgaatttatggatttttctgtgaagacaaatggtagagtgcaaaagaatcattcttttctaattgctaaaactgatctggtttcaaaacccagtggagcagagacctaactttttgatttttttttttttttctttagggaaacagttactattttaaacaaatgccttcaagatctaccttctatgcaaatatatctacaactcagtttgtgttttccttcttaaaagaaaaaaaaattagagaaaaattgctatttttaaggtcagattaatctttcaaattggtttgaaatctttcaaatcctatctaaggaaacaggaaggtagagttacagtttagtcctagttctattttgtgtacgtggacagatcagtagatcttgagttgacttcccagtctataaaacagagcattaaaaaaatatcccgagaccacagggatattatgagttctactgcttgcggagcactctgcattctttgggtgagaggtgttgggctcttatgaagacactgcacttacataatccta

SEQ ID NO: 50534 - DNA, 1009 bp, Bovine  19866881298201
  misc_feature (1)..(1): n is a, c, g, or t
naccaggaactgccaagaggatatttcaacagcaccaattacacttgcaacatttgctagtgctgtgttaccaaacaaggtgacagcagctaaatcctcttcaaccacaactatggagggagatggctgtgataatccctgcaacaccatggatttggttaccgccgagtaactcactgaccttactgagctcagtgtacatcctcacagtagctgtacaggagaagctgaataaccggtccggtcccttgcactcaggggtgtggcacctgtagctcttgaaatgtctcctttcacttgattaatccattgtcttccaccctctctccaaggacccgctctcagatggtagataataggtttttcccacctgagacaggtgggcaatagaaagccgggggcatctcggatgacttcccttttctgaagggaaggtactttcccaaatagaagagtctagaacagcttccttctgttaaactgtctgttctcgtatgactaatttgagaatccacccactctgggggccattaggtggttgtgcagaaagatttccaagtagtgttctaatcacacactttatcggtacagggctttgtaatcagatggggattgacccacctttggtgtcattttccaggctgcgaagataatttatccctgggctgagattcaatcttagcccaataatgaattgtctctgtcatcttggctcaacggtctgcctccttcacatggaattctcaggtctctggtacatattccccacccccctcccccaaattgcaatttccaccatggttttctttcccttgttaatattttattccttctgggccctgtttaatggcaaagttggattctgcttcttacacaccattgactggtggactttgagaaaaccgtttcttagagcatccttaaagagttctgagtctgaggccttcattttgcagttagagaaaataagaactagagggagaaattagttttctcaaactcacccaaa

SEQ ID NO: 50535 - DNA, 439 bp, Bovine  19866881309662
  misc_feature (1)..(1): n is a, c, g, or t
ntgagatggaccctgggatggtggtatgtgataagggcagtaaccctctctgttcctcctgcttctgttcagttcctatgatgggcacccacatgccaatggctggagacatgaatggactcagccccacccaggccctccctcccccactctccatgccatccacctcccactgcacccccccacctccgtaccccacagattgcagccttgtcaggtgagtccacagcatgtcccctgggggcctgtcctaagcatctctgggtggtggagggtggacactgtcaaagttaatagcatagttggaaagcaagcaagcaaccctgtggttcaagttcagttatctctaatcaatggagtcatcagtagtatttaatcaaagcaaccataataatcaacatggggaaaagtgaaaatgtgagtttataggcatatgtgt

SEQ ID NO: 50536 - DNA, 1176 bp, Bovine  19866881312434
  misc_feature (1)..(1): n is a, c, g, or t
ntattctcttaaagcttgttcaaagtacttgatagctagttcaaagtcatcggcctcatagtgtttgactcctgcactgtaactctcctagaaagaaacagaaaaaatttttaagaccacccaagaagaacttgaatagcaagatgcaggaagattctagatcacttaggaagtggggcaggggattctttcactgtgaaagataaagggtctcactgggagataaagggtaactgccctggcttcagttcagttcacttcagtcgctggcttcaactcataaatgagaagggattgactgagtaagcctatgctgcagcatcaatcaatttcattcccttcctgagatcactcaagactttgatttctaacctgtttgaatgtaggtagggctatgcaaccaagtgcaggaagacttatgtgggtggatgagatgctcatttccaagcctggttcaattttttaaaaaagaagaaaaaagacttccatctaaaatcttcctctcttagccttttcttcagtcccttgaaggtcatactttgagaatagtgattttatttaaaggaataattgtatgcatgcatgctctgtctttgcatggcagaaagcaaagaggtgctgaggagcctcttgatgaaagtgaaagaggagagtgaaaaagctggcttaaaacccaacattcaaaaaacgaagatcatggcatctggtcccatcacttcatggcaaatggatggggaaacaatggaaatggtgacagactttgttttcttggggttcaaatatcattgcagatagtgactgcagccatgaaattaaaagatgcttgctccttggaagagcagctatgacaaatctatagagcattttaaaaagcagagacattacttttccaacaaaggttcagatggtcaaagctatgatttttccagtagtcataaatggatgtaagaaggctgagtgctgaagaactgatgcttttgaaatgtggtgttgggagaagagtcttcagagtctcttggactgcagggagatcaacccagtcaatcctcaagaaaatcagtcctgaatattcattggaaggactgatgctgaaactaaagctccaatactttggccagctgatgcgaagaactgactcactggaaaagaccttaatgctgtgaaagactaaaggca

SEQ ID NO: 50537 - DNA, 764 bp, Bovine  19866881313933
  misc_feature (1)..(1): n is a, c, g, or t
ntcccctggagaaggaagtagcaacccaccccagtattcttgcctggagaatcctatggacagaggagcctggtggattacagtccatagggttgcaaagagtcagtcatgaccgaagtgaccaaagcaggcacccagcacacatgaaggcaactttgagcctggtccttttctttccattgaatatctggaccagaacctagggaaaaaagtttttcccttaaaatcgacctccaggtttccttgcatctacttcaggatgatcactcagctcccaacctgaggttttcaccaccaaatgagaggaggtggagtcgtggaaaggattcaagtcctctgaggctatttggtgatgtcaacccaattaccagagacagcgctatctgcccggcaatgcccttcaggtatctgcacctgtgtggctctgggtggaattcttgaatgtgacacttggctcatagaaattctgcccctccctgcctcttttttcccctcctgaaaaggaagcagaatcatcagtggagcaaagccccagctgccttaaaagagtttcagcaattacaaggaacctctgcaactttgggtattctgagaaacgatattgcactcttatgtaccagaatggctctaccagttattaaataattccagcagcccagtccctgaatcagcctaacacctaggacacaagatacctcaattcctcctctagaatccctgggacatcttcataatccagtaactgatactggtaaaggcttgta

SEQ ID NO: 50538 - DNA, 811 bp, Bovine  19866881409225
  misc_feature (1)..(1): n is a, c, g, or t
ncccagattaagtctaaacttcttaagccttacccacaagatggcatatttccctctcattgtaatctattccatttcctgccatcagccttggacacactaaatgccccacaatattcaaaatatggcctttattctcacttttatgcttacttacatgcagtccctgcattattagatacattttccataattttgacttcctaaaatgggctggtcactctgtccatattaataccttcaaaactccctgtctagccatctaccaccacatttataatatgtaagatgattgtttgatgaactctctcttttctacaggatgttaggtttttcaagacagaatacatctttcacagctttgtattcctggcacccaggaaagtaccaggcaaatctaaggtaccaaataaatgttgaattcctaaatgggagatagagaatgaaagaatttcttttgggcaatatggccatatagtctagagacattgtcacagttctagaggaagactacattgtttctgtgggctcttctcacccactcacatcccatgtggcggtcagaatgatgtttcaccaactgctatcttgcagttgttgaaattgcacatgtctaggatataatcacatcttgttagtccctaaaactttgaacctatttttcattctaggtgacatgtctgaattctgcagatttccttctggtgagaacattgagtgctttaacactttgagagcaggtgctgaactgttgttattccaggtcatgcaaaacagagattctacaaattcagaagtagtgagatggggg

SEQ ID NO: 50539 - DNA, 924 bp, Bovine  19866881426692
  misc_feature (1)..(1): n is a, c, g, or t
nagaagtggggcctaagaaggatggggagaaggaatgatggggcctgggagggatacaggaggcctggagcgatttcctattatctgtcagggcagatcatacattcacatcttccttcagctccccccaaacaagtatcttttttattattattttgaaaagagattacgtttagacagaagtggcaccaatatcctgccaacctgattaaaagcaggatgaagataaaatgatttctctatccctcatggcccgggaagccaacacctcccagggaaatggccctcacccagcggcagcctgctctctacttttgaagctgcttctaaacttgtttgctttgggagccccggtaagatctgtgctcgctgcccccaggctggccctgtgcggctgctcctgcagagaccatggctggcttcccagatgaacaaccacaacagtgaatgatatcaaaccaattagaagcagggcccaccttgtgccaaccaggctcacctgtggtcttacccacttctggaaaaagacccctgggccttggatagggggtgggggactgttaaattgaaagactaaatgtttagtagtgacttcctctcagaaccttctgtcttagagataagcgaggcaactggaaaaagatcaatctcttacaccatcatctgctaaataggctgtagagaatatggttttcagattcttctactggataggaacacagtcttcccttagcaccttgtgaatgatcagaggtggaggtttatcagatctggccccagtaatgaggctgtgtttgccctgcctctcacagaacccgcactaaggatgggccatctctgtggaaggagggagggaggcaggggagtggggccaagcatttcccttggctccatgctctcagttcccacctttacagagaatca

SEQ ID NO: 50540 - DNA, 790 bp, Bovine  19866881457145
  misc_feature (1)..(1): n is a, c, g, or t
naaatgggcacttttccccagcttttctatttcctgtacataatatggatgtttgtttgtttttacaagttaacagggccaatgatttaaattgttattgaaacatgctttgaacaatcaagtggcttatgttggcatagatttgcttgaaaccactggtatttctctagggagaagtgggaaatcctttacctatcaggcagtggatttttaaatttttatattaagtatatatatgcattgatttgggtagtttccccaaatttctaactgtgtaatcatttttgaaaatccacatctaggttttaaaacccaaaacaaaaaaccaacttctgaaagcttttcctgaagctttactttttgttgcaaagtgtaaaataactttctgaagtgccttctttaagtcctggtggtggtacgatctgtggtttgtttggggagattttgttttcaggaaagagtgtgttttcttatgaaagagacaagggaaagtttttacctgtctctctcctgtgttctttttttctctctctctctttctttccttttcttttaaagattggtgataaggaattctaactacttaatgagatgggagaggcctcactccattggagtggaggagtccaggtggaagttgatggattggacaggtaaagagaagagtcccgccccctcatgcctatagttgggtatatatgagggaacctaaaattatgtacagagagagaaagagacagaaggacttgagttctgttatcttcctagtagatttctactgtaagggtct

SEQ ID NO: 50541 - DNA, 857 bp, Bovine  19866880370453
  misc_feature (1)..(1): n is a, c, g, or t
nttaatttgtcattgtttgttttgttttttgtttcagtgttttgacggtcaccatatactataggtgggtagaaatagaatatttggttttaaaatagggatgaaagtatagtttacattgtatagattataaaatttgcttgaagactatctaagattggttcgctcaagaatggttttctttgctatatagtcttactttatgtccagattgatggggatcagatatccagaaattctagccgttcagctggttgaggaaacacaaggtttatacgtcaggaaggtatctcgcttggtaaacagtcatagaagatactgtagcatgcacataatttgaaagtgatcagcacccattggatggataattcttgagcagagtagtctggtaagagcatctaaaatataatttcaaaatgctagctttttggcagataatgataatttcctaatatgtatacaagaatcaagttgattaatttatatatctgtgaataaaagaaactttttcaaccatgtcatactaccttttctgaagtaaacctttagtaagccttgagttggttagattatttaaattgttagtgtaaatgaagtctaattttatttactatttatagaaaaaaacactatgattaacttataaactgtcatttaagacttggtgtattcctgaatagattggattaaagcttctctgttacaattttacactcagtattttaattctgtattgatagcaggtatcccctcattctaccatcttaaaaatcttttttttttttgcctcagttgagcaaaccttagatattcaaatgatgaaaggctatcctaaagggaagtgttgagatgatata

SEQ ID NO: 50542 - DNA, 855 bp, Bovine  19866880406608
  misc_feature (1)..(1): n is a, c, g, or t
ngggtgagacctggcctgagctgatgctttcagggtcactcacaagtagatcctcccatctcaggatccacctcctctagccaactagatgacaggggcggcattccaaatccaagactatgtgatccacgtggggagcataggatttcactggttggatgtgcaagatttgtgtcttccaccgttttccatgcacttgatgaagaagtgtggcaattcgagtctctgcagctttggcccacctctgccactctggcttggtggccactgacagcgttttcctcctagaatcactggtagctccattattcaactggttgctgataatctgatgaggagaaggccaatgctcctccatctcactgcttccaggaggctggagagtcttccctgggaaagactccacattttggtgaatatgcaaaatgcctccagcatcctgttttagcactctgcaggcaatgggccagccttcttcagagctgggaatcagccccagattcacccggtcggcaacgtttgatagcttcagttttctgttatccccaaagtgtatttggcatcgatcagctactccattgagttcaaggttatttctcagagcaactaccgcatggggattccactcacaagcgtggacgaaagcagcctcggcatgaaccaggaaaggcaaggtaaaataaccaattcccgcatagagatccaccagcacttctccgacgcagggcagcgacgccacacgaagcttctcagtgatgtttccgaaggagaacatgcactgggtcacgtcaaacttataccgaatcccattatccacatgctctacccagccgtggtcgcccagcagcagactca

SEQ ID NO: 50543 - DNA, 1389 bp, Bovine  19866880453996
  misc_feature (1)..(1): n is a, c, g, or t
ntgacatggggttcttaggcactacttgattatatccagtgatggggaggtcagtacttctagagaggcccattccattgctggagagttctgttataacaattatccttatagtaacctgaaatctctcttcctgcagcttaagaactgcaaaggtacccttacctgcttttagatggcagtattttcaagagtgggagacacctgagttactatcacccttcatccacaccctcagttttctcttttctgggttaaaggttaaactagtcctgattcttcaggagttttgtggcttctggacccaggcccagctctgccagcttcctgtagaacttttttatcttaattgcatttagaatgaaagatgttctgctgtaaacagccagcagtctactgacttatcagacaaaatattgaagatgacaggctcttttgtcctgcctactgtacatgtctaaaacttctcaagacagtagggatgggaaagttgtgagcaaagcattgtgagattttaggagagaaagggaacatgttcagttgtgacggatcaggcagggctgttggaaggaggcaacgtttgctctcggcatttaaagatgggtagagttgggacttccctggtggcctagtggttaagaatctaccttgcaatacaggggacatgggtttgatgcctggtcagggaactaagatcccatatgctgtggagctactaagtctgagtgctgcaattactgagcctatgtgccacaactgtagagcccatgtgctacaacagaagatccctcatggtgcaaggaagatcctgcatgccacagctaagaccccatgacaaagccaaaaaaaaaaaaggttgggtagagtttctaaacgcagaggtagatttgaatattgggctactctagagttcattttggctacaaacaaacaaaaaacaaaaaccttttaggtggtaagatttgacgggtgtccctgaaacgacatttagctaaaatcctgctagagggtgaggtaaagctgtgattctttgcccacccttacagccatccctgaggttcgataaccaaatgtcagtgtgccccagataagagtgaaggccagacaaggttcaaggcctagaatcctctttgatgggcttgtcttgagcccttttcgcagatttagcctcaaagagaaatctaatgttgccagactcactgctccgtctctcccaggtctttcaccacaagctgataggaagtgtactgatcggctccttcaaagtggacctggggaccgtgtacaaccaacctggtgagaaaaatttgcctcccagtctcccttgctcttcttctcttcttctgacacctaggagtcaattcatttaggcctttatccacttatcca

SEQ ID NO: 50544 - DNA, 1533 bp, Bovine  19866880571419
  misc_feature (1)..(1): n is a, c, g, or t
nttaaaaggtttatttattttatcttttggcctcgaggtatgtgggatcttatttccctgaccagggattgaatctgcaccccctgcattggcagcttagagtcagggaaatcctgggatttccttcctttttaaggttaatgtctcattgtgtgtatagactacattttctttatccatttaactgccatggacatttaggttgttcccacatcttggctattgtgaacagtgctgcagtgaatctatttctgttgatgagatttattgagtgcttatttactataggccaggaaccggtctaaatgctttatgtataatagtgcaggaaaaactcagaacagccctatgaagttgatgctccctgtatccccatttgcaggtgaagaaacagaccccatttagtacggccaaagctcataccatgaatcagttttcacccggagcttgaacccaggcaatctggccctacaagcagtgattctgatagttataatactgatagtattgaaatcataataatgataatgatcaaaagcaaactatgtgtcaaggttattggcaaggtgaagatgagagttatgcgtccaagtgaccctggggacaggatccaggggattgcccaagagatgagttaattctagcagtaacactcatgacttggggaacaggggtggagagggagacgataactaacaatggggcagggtggcccagaggaaaattgccttctacagctgtgatattcagctccatgcgtcgctttggtttatgcagttttcaaagccagaccttttcctatttctgagtctgctaggagcctgtacagcattttgcacacagtttcttttgttaccctctcccacctattttcctttcctcctgctttgcgcttcaagggtcaagggaacagcccaggcctgggggcttattttcaggtctttgcaaagctacttatttgactcccctcctccttgtctatttggtgttgatctaaatgacagatctggttgcgtgattaggcggtggagttgggaaaacaaacccaccagctcccaaattaacctgagtccattggtgctatttccaggttaaaactcccagcggggctctctgcagtgacaccacccacccggaagtcctcagagcgcctgaaaaaccaccgccaaagtcaggggcagtcagcaatctccataaactgatgagcaggacacagaagcgcagtgccatttattttgcaatagcaaaatcaatccactttcccataatcctgcaacttattgaactcggcatctcgctgcaggatacgcccccgaactctccctaattacgtatttggctgcttgcaatcgtgacttggctctgcagtcctgatagcagagaacgggcctcttagaagcctgcagcagcaacagcagtagcggcagttttcccgccctaccgagcgctccctagttgcaaggtactgcgctaatcgtgccaccgtgcaagtcccctgaggccgacggctgcaccctctgtgccgggcgctcg

SEQ ID NO: 50545 - DNA, 1553 bp, Bovine  19866880597145
  misc_feature (1)..(1): n is a, c, g, or t
nacagaatctgagctttaaatagtgtggtaattgatacctttggctattatttatttaaagttgccctaatgtcagaagtgggcttccctagtggctcagtggtagagaatccgcccaccaatgcaggagacatgggttcgatccctgggtcaggaagatcccctggagaaggaaatggcaactcattccagtattcttgcctgggaaatcccagggacagaggagcctggcaggctacagtccatagggttgcaaaagagtcagacacgacttagctactaaataacactcacaatgtcagaagtagctgttctgaacaggcagaaaaatcatttttatggcagatggtggaattcatctctgatcattcatgattcatctttttgcaatagtaacatcaaagatcattgatcacagatcaccctaaccaatataataatgaagaagtttgaaatactgtgagaattaaccaaaataggagatagaggcacaaagtgagcagttttttgttggaaaaatggcaccttgctcaaaaaatggtaaacttcatgcaaagttgctataaaccttcagcgtgtgtgtgtgtataaagcagtatctgtgaagtgcactatagcaaagcacagtaaaatgagttgtgcctgttatttgagcctcagcttgttcttttctagaatgagcagaagatacttcttctttgatgagacattaagtaaaccgtaaagactgttcatgttagtcatcaggtttgcgaataggtgggtcacatgttgctcctcgcagagtaattgtatgaattatgacttctgtctgttaggacagcatctgagacctagatagattccccactggttacagttaccttgttagtagtgaccaagctgggtttagggtgaaggttcttggtggtgttggcataagaatatgcttcatgtggtttagtgtgaacctttgaatgtttatacttaataaaactcttgcttttcttaaactctttataattttgatttatccttttctcctgatctctgctataaaatttataaacgtgccttgcatttacagacgctgttaatcaccatggaaaatggcagagactgagggctaggtgggaacttttgcttctgttatgctttgcaagacagtgaatctttgctaacgatgcatttcttttaaatgaagactggatgggagaagaaggtcaaatgcttaaaaataggttaataattcatctggccaagattctcttcctcagggtcttgttggcaactgtcctcagaaatgcctcaggactgtcctttctttctttggagttgagcctgctattagctggccagttagtgatgctgatgtacctcattaccctcatgtaggggagtggtaagatatttccagaagcatccgcccagcaccgggagctctggaatgtaaataacctgagacgtggctgctttgcctgaatctgtgataggaaagaggccttttttttttttgtagccaaagcctccatctgcctcccaatgggcactcagggaatcagtgagttaagatt

SEQ ID NO: 50546 - DNA, 1596 bp, Bovine  19866880697700
  misc_feature (1)..(1): n is a, c, g, or t
nctttcccccaccccaaaccccataatctgtggagtaaagtgagcacaggattaggaagagagggggttatttgaagaacctttcccttcccaaacaaagggcttctttggtaatggctgccattgttccatgaggttgaacaaaacaagagcagccatggaaggtggctcctcgcaggtcttaaggacagagctggtttctaattccagccactgaatgctacctgcagattcataactgtcacctacatagagcgcaaaggaccctggtggtgttgttaagccatttgggaggttgcacatggcaaaaacacaacaacgtgctttgtgttcacaggctatacacacagcgcacacgcatgcgtgcatgtacccacaaacccgccaggatgtgcctccctcctttttttaaatttctggctgcacctcacagcatgcgggaccttagttccccaaaccagggatcaaacctgcacccctgcactggaaggtggactcttaacccctggaccccgggggaagtcaccatggatatgactctgtagtcacccctgcagagcatcattaaggatggcttctcccagggccctgggcatttttttttagatccatgcacatggattcttgggcaattcccaggagggtacatgtatgtagcccaggttgggagagggggatggggtgagctggggggatggctatcataaaagtgggtgcaagtctgactgaaggggacccccacacctcacccacatgtcctgctaggaggagcaacccggcctgcagcggaggcttctagattcaaccgacatgaaaaggccacctccaagtgtgtctcaccacttcccaggtggctttggacagcatctgtatctttcatcagtcactctgggcaagggcagtggtacccaggaccaccatcctgaagcaagcttaactcatttcatacaagaaggagtcagaaaagtgtgaagcaaagaatctggtccagtgtgctcgatgccgtataaagaatcccaaaagcagaactggaaaaaatgaaaagggtttgcacaaagagatcgtgctctcctcaataccaaacacccaactgagggctgattttccttggaatagatgtgatacgaagacagcaccaatgagcaagggtcgccccaaaaggctgccacacagctccccaggattacccagtcttttttttttaaacttatttggctgcaccagtcttagctgtggcccgtggaatctcgctcttcattgcaggattttttttagatacagcatgtgaactcttagctgtgtcacgtgggaacccagctccctgaccaggaatcgaacagggaccccctgcattgggagcttggagtctcagccactggaccaccagggaagtacccccacaaatgttgttaatcaggaacccagcattcttttggggaagaacctagaaaaccatcttaatggtacttcatcagcaaactctaaagtcagaggcaggaattagctccaggaagaattggcgtcagtttggtgagcatcccacagagatggggacggccactccaaaccagtggtgacaactgggggatgacaaag

SEQ ID NO: 50547 - DNA, 1305 bp, Bovine  19866880761970
  misc_feature (1)..(1): n is a, c, g, or t
ntttgggcagctgcagaatgttctgacttatgtccacgagacacaatgctagtccctgcagggaaacccctgctgcatttttttccaagttaatgagtttcttctctctttggatgcttcccattacctaagtgggcttatttttcctaggacgcagaccacaattgaagatggcagttggcacatttggaacctactagcccaaaaaaagattcccagcctgaaataccacttgatttccagacagtggtttatgcactagagggcatgtttggggatgggggggttctgttctctcctgttattcttttccatattccaggcccctagcacagtacctgacacagaggccgggcttagtagatgttagatgactgagtcagaggaggaagtcggggactaaacaggtcaatgtacaaacagtgaattctgaccaagtttatagcctattgatgactaagactttctaggttggccagaggcttgttttgacatttactgacttgtgtttacaacaagaccaagggggaacctgttagggcctgctggtcctagctttcagttagggtaaggggcgctgtcagccccggcagaatgacctatgagcttcgggtgtaatcagtgtccagagccagccggttcagctcagggacagaaccacaaaaccactgctgctaagtgcctgtaaggtcacagcattcaggtttgggatcatgacattatttccgggacttctaatcatcccccactcacagcatgctggggtataggttcagaggaggttgcacctggaagggaccagtgttttatcgatgggcctgctgattacaagcatcagaattacctgggatactgattcactttacatgagaaaaatgaagcccagagagggtgagtgatttccccaaaggtcacacagctagtttgcaaaagatgattatactgtggtatcattagagctgtattctgttttatatgtcatcacaaagtgttttcatctctattctcctatttggttttctcatctaccctccatatgagaaaatggaatgatttgctttcatgttagaaggaaatgcagtttttctttctatttctgtgtcagtagccagacacgaccttctcaaggaaggtgccactagcctgtatagcacctttttgcaatggcacaggtctgacccatgtgacagagtgcaggctggacttgagcccctactctgtcttggttaaatggtttgggcagtttccaacctgcacaactgtgcatggcagtcctgctctccaggagaggaactgtcttatatt

SEQ ID NO: 50548 - DNA, 1288 bp, Bovine  19866880763601
  misc_feature (1)..(1): n is a, c, g, or t
ngattcactttgctgcttggtcctttgttttggccagtattccagaatgccataggaaactgtcggaatcaagactagtatcagcacaatggcagagcctatgcagtgaacccccgggaccgcattcgtggtgactgcactcattatttcgatggattcggacactaaaaagcaggtagacagcagtcgaatctgggtaccaatcacatttcatcttcctgtgtttgaatctaggcccaggcaggagtatgatcacagctctagcaatagtgagagcttcaaatatgtgggtgatcccaagaggttagaattaacgtttaaaactgagtcaggaaaaaaaaggcttagctgatgatgctaataatggacagtatgacaaatgctgatttttctatcttatgatgttttaaaaaaggcttcttacatcaaagttcatcagcatggtattcattgcagaggacgtttttggaatactgatgtacactggctaaccagcatatattgtacacctgctgggagctaggtctgggggagaggaacagactagagagacgagaaagttgtagtaagtgccctgaaaaatgtcagtcattcaactgatggaccattgggtaagacaggcctggagaagtggatataatacaggggttggtgtggtcagacattgactcactggagtaaacgaagggctctggaaacagagaaggaagccagctgtgtatgtgaaacatagcacagtgtaaggaacattacctttggggcaaatagatgatgtcaggaatcctgcatctactacccactgatgtctttacctcgggcaagtcagcctgacctccctaagcctcagttagcccatccctgaaatggagtattatatttatcagcagagtcttaatgagaaatggatgagataaaatgtatacagtgtctaatgacgtagcacatagttggtgctcaaaaatgatagaaaatgttaatatagattttaaaaaaaacatttatttatttggctgcatcaggcttagctgccccttggcatgtgggatcttagttcccctatcagaaattgaactctcatcccctgcactggaagacggattcttaaccattgggccaccaggggagcctctaatataaattcttaagtagggttattgctctactataacttcttttctctttctaataaaaagtcactatgtcctgggctatcttagaacttctccaaaaagaagttctgatgtgagtatttgtgcctcaataacggaggacaactctacaccacgca

SEQ ID NO: 50549 - DNA, 1936 bp, Bovine  19866880776653
  misc_feature (1)..(1): n is a, c, g, or t
ngctgccgtctgtggggttgcacagagtcagacacaattgaagcgacttagcagcagcaggaacagcagcagcagcaggatcaaaaaagcagtctgaaaactgcctttgtcatagttctcaccaacatcattcaaacaatttatgggtattttctaattttttgacaacatctctataacgtaggcttgggttgattttccttccattgtacagaaaaccctgtgtcctctgactcatgatttctctccatggggtgttgtctttccacttgtctaaccgcgatctgtttgggaacctgcacaaaataagaaggggtgtacctggagagccttcatccctctgatcctctctaggctgtccacaatctgcagtcacgactcattatcctgaatgcacatcagaattacttggatcttttttttttaaagtaattctggggccccaccccaagtttctatcaagtattaggtgaggcccaggtgtcttctcttataaagctctccagccggttcccttatgcagtgaggggcatgacccctttggtctgcaaccttgattgtgaatacaagtgttggaatttttttaaaaggcgatgagaagaggtcacaccaaccagtcatgtgtacagcttcttaacagtcattgaaaagcatcctgaggacacggtcattgtgaaattggggggtttggaggtaaacttgggcttagggtgctgccttgtcctgcttcaggtaattatgattcgggtgtgttttgacaaccgagtgtaaaccttgacaacagattatatctgtgtaatttctccttctctttgtctttttgtgcaagtgctttaatcgactgtctgataaacccacttcaagagcagatggaagaatggaagaaagtggccaaccagctggataaagaccacgctaaaggtacggggcgaggtggctgatgcacgtcagtctcagatggcaggtcgccagctgctgcctgtgcctctgctggggtccctggtgtcacctggaggacgtgcttctcccccgctgctcctgtgggcgtctcagtgttggaggatgaaggatgggaagtgatcccaccacaggactcagtgctgggtttggggcatgcagcgtcactcagtggatgccgtcattgtcccatggcgtcagttgcgatcagctgaattcaaagtgattgtaaccttacgcttaaatgctagagactcacacttcaggcatttcagcacattttgaaaaccagacttttaatgatgtaagttagccttcggtctcctgcccagaactggccattctctttgtatataccttcaaccggtgggtctcaaaacctcacgtgttggctctagggactgagtggtccagacggacatcactccgtcagtcttcctggaaccaaagggtaggggtgctggtggtgtggaagggtcaggagaccctgctcccagcatcgtacaacctgcagtgaatgtggtggagggaaagcgtgtgggccggcagtgatgccaagagcatataaaagagagctctgatggatgccaggagcatataaaaagagctctgataggctcagggcgggcgggagggaaaggatgggggtggctttgtgggaactggtcaaattggtgattaatcgactatgagggtagcaaaggagagaagtatcagagccaactgtcatttcagatgttcgtgcctgggtgacggaaatgccagcaacagaaatgggaaagtttggggtgggcatgagctgagcggggcagagagaagtgttggtggggctgtggccgtgtgggctgccccgccactggcgtccacagggtccagcctcggtattaatgtgaatgtaaggcagccaggcctttcgcacttctctgccatgggtctagtttctcctgtagtctgagatgctcatttttaattgtagcat

SEQ ID NO: 50550 - DNA, 983 bp, Bovine  19866880798963
  misc_feature (1)..(1): n is a, c, g, or t
ncacagccaaaagattctgcttctgctatgtttatatacttggtagaagctataatggggaaaaaacaaaataaaaaacacataacatgtaaaattaattgtgtaggcttttgtgttttcttattggcaacacacacacgtgtacaaattacgtacagttaatgacagaacaaataaataaatacatattatgagtaccatattttacctgttaaatatctattgacatcaatctttttctctcttatacctaaagactgatatcataaaattgatctccatactagaaataataaaaaatcaaacttccctgaatcaaatttcagggaagttatctggtcacatttactttatcaaacaattttttaaacactgttagggaaatgtgattatgtcatttttattagacatctggattcaaaatcctctttccttcctcaacacatcagtatccctgactgctttcacaaactaaaacaaacaatatttgatttaaataaaaatgtaacttggcctcttcctaccaaaagcacaccataccttgtctacataatctgtacataatctggatgacctgagaaaacagaaatgtaactaggaagagctaatgtctattttaaaaatatatttagcttcatctttttttcctatttgcatcttcagcacattgcagaatacctagtgcatagtagatgctcaacaaacattagttaattaagttgaggacatctaccttggaaaggaagaaaattccaaactaagacaattgagggaagactgtgaaacagattaaaagctgagcatagttaagactttattctaattactctataaatctgccaaggtatagtcaacatccactcaactgagggctttttaaaaataggcatcaaagcatttagttttataccacatcaaaaaatagtcccttaaaccaacggttagttatgtgtttaggactttacatctttcttcttttaatg

SEQ ID NO: 50551 - DNA, 774 bp, Bovine  19866880810880
  misc_feature (1)..(1): n is a, c, g, or t
ntagaatactctgaaggtttctctgtgtgtggtccctctggcttgctcattcatcctaaagaaattcatcatctttgttgcttctgatgtctcactttgctgtggttatttcaacaacatttaaaatatgttatttaaatattagtgattctgtcttttgttaagatcataaatgcaatctttcagtcaattaaacatgcaattattagtcaattatgtccacaggtctagggttagataataaaaatagatgttccaaagacaatggaacactgaaacactgatgtaaacaaacaaaaaaagactatcactataatcaaaacattctatttcaaacaagcaagaagtcctgtcaaatagatgctctttcacttgcaataaacatctgacaatcaatactgcaatactgtactgtaccaaaactatcaggggtctctgctgatgacacctccttcgctcgcttcacaatggcaatctcaggtttgggatacctgcatgctaaaaatattttaaatcaatgtattcaagcaataacataaatatgtataaaactttaaatgtatatgaaattttgaagtgaaacatgctagtatatgggcagtcctcactttgtacaatattgtggggacataaaaatgacaatgtaagtgggaaagaaatcttagtaactggtggggaaaatcaccattgttctgtgatttttaaatttcttttcaaaacattaaaaaattctcttactagtagttatacatataaagggaaagtttttaaaca

SEQ ID NO: 50552 - DNA, 996 bp, Bovine  19866880812267
  misc_feature (1)..(1): n is a, c, g, or t
ncctggtttcttttagtggtgaaatggtattaaagaccaagatcttgggtgccaattgtactcagggcttctaagctcttttagcaagccatatccttttttagattcatttttgcttagaggactaacttgatcttctgaagtttcaatgaactctttttagaagcaatagaattggaattttccagaagaattaaaagtgggaacacttaacatcatttgcatgcttagctcatgctttatggaccctagtttagggcatgtgtttctaaataggaattcttgcccctctggtcagttcagaatttggctgtgaagtttttatagtgattgaaaatcgggggagggaaggaaacagctttcccatggcacttaggttttcgtaagatggcactgccatgatggagaggaagtaaggtaaagcaaacgtatttaaagtgaaaggttagctcgaagaaacaccggtagacagttatctttttggatcagaataaagacttttagctttaaatcttagaaagtcttagttgacttcctaggaaataaagtgtttttaaaaaattattctaccttattttaaaaaattttaatttttatttaaaaaattgaaggcaattctcaatattttcatcttcgacatttttgtttcatgttgtcagtctttcattctgtgtatgtggttgatcacaattcaggttttcctctggatctcttgcgctgtgaaagccttcttgggttggaccctgcaacctgcagcagagttctaaacaaaaattacacattgcttgtttccatggctcctctcaccaatgaaatccggcccgtcagcagctgcacccctcaggtaaagaaagacccactgggaagcctgctctgccattattttcttcttcctcatggcaacttgaaggggaggtttaacagtcttatgtattgattctcaaattgtaggcagcagatactaaaatcatcaactcagaaagcagttttgtacgt

SEQ ID NO: 50553 - DNA, 2242 bp, Bovine  19866880825733
  misc_feature (1)..(1): n is a, c, g, or t
nttttgtttcgttctgggggtaggaggtaggtaccaaactatttggaagaatgatatgaatgagagaatttcagtattttaatacaatgtatagaaaaggtcagggtaagcccaacatgcatgtactgctttgggacccagggaattcagcccctgttacagaactcaagtggcccgcacacagggaagccagtctgctgacaccaggtggtggggagggaaagtgttcagtgcagagccccaagcaaggagtccagggcacccagtgctgcctgttacactcctgcacgggtttcaggaaagcatttttaaagacaacgtaagggcgaggcatcccaggatatgtaatgagcttgtgtacaattctctgattgacggtgaggtaacagggcggtgtcatgggggttagctttaccaacccagaggcgtcagtaagtctgggggctactcgctcatggtcgtcaaggggtcaatttcttccatttgctgagggatttagcatctgtaagtcaacttgggaaatgtgcatcagtactgttatctaggtacttcagaggggagctaccgcagaagatatgggggaggggtctgtcctgggaagatcccatagggtcctgctcggttaccccccaccaccatggctatggcctgagactcagctctgccatcatcacctctgagggtgtacttgtcaaagacaccctctgccgtgccagattcaggggccctcatctagcacaagttggtgggtctttgatggatttcacctgcttgttcaggtaacgcgtctccataaagttacacaagtgggggatcgttcttcgtcaggaaccagtgtgtgcaatcccagtagtgactgatccacgctcttttttgagtgtaatgtgcacttactccattgcattcagcccattctcagacatcatggtccagtttcttgatttcctgaaagaagcttcagccaccccattgttcctgcagcttcatcattttctcagcatattctctcccctcctgagattagccaagagaatatttagcagaggtcctccaagcccgtcatcacggttcatgcagtaagacgggtgaacaaggcggggccagctccaggcccagtgttgtaaacgcttgtctttggggtgaccagacactgcatgtgatacctcagtgctgatgctgtgtttcctatgttctccctctagttaaaatatttttcacagcaggattcttttactttgctttcacctcctttatgagaacaccataaggcagaaggtcttcaccctcttgagataggtgggaatagctaggactgctgctgctgctgctgagtcacttcagtcgtgtccaactctgtgcgaccccatagacggcagcccatcaggcaccctgtccctgggattctccaggcaagaatactggagtaggttgcatttccttctccattattttgccatatgaagtaatattcacaggttctggggatcaggtcgcagacacatctttttggaggctaccatttagctcactataaaagccacctcctggagaaatggatttaggaaagagagtgtttgcttgcttcttagttttagagtcttaaatcctgacagcatttgattgtcagctacaaaaccctctttgctgtttttccaggaaccctctcatggtccatccttgcagattctaaaaggagagccttcatggttactgtgtccctggaaccacgatatatatacagcctgggggtgagtttgtgggatggagggatgggatggaatacactagagtgactagagatatgtagatgggagaaaagaactctgagaaagaacatcaaattttggtgtacattatacataacagtggggatgctatagacccaagccgtgcatcgtgtggtcttaccttatatacttggacatgaacgaaatgatgattaattcactcttgacattacgtggctttgatgccctcaaaactattgaatagagtattactcccagtctctgatcactgagaaaggagagacactatgttgcgcaattcaggatggcatcatgcacacagtagtcgatggattggtgtaatatgatgtcaccagtgtcttgaatttgcgtgtgcagtggctctgtgagtgaggtacaagggttagaagaaatagtcctgcctgtgaggtcagaggtctcaagcagagtttccaaaccaggatggtaagagtagagatagagagtctcacctt

SEQ ID NO: 50554 - DNA, 1459 bp, Bovine  19866880853745
  misc_feature (1)..(1): n is a, c, g, or t
ncatggatgtctttatagttttttccatggtcatatttttggaaatgattattttaaaaccacgcactgagtgcacatatagcttacaaatatgctaatatctgattatgacttcatataatatcatgattacatattgaataaccgaattgattgggatgttacatttttcctatagaagcactgtgagtagacaatgtctggaatgatccaataccataaattgttccacaattccctgaactgcagaaaagaaagaagttaaaagttttctttactgctaaagaaataactaataagaagtttctgaaaaagtagtatagaaagatcatgcttatgaggtacataattctttcctccattcctatccacagatcaaagaagcactttcaagtgcctctggcaaatgaaacgtctttttccaaataaatgggctcgtaacataaggaatttatgaaatggttatttacctaccaaccctgaaggaggagaggcataaacttagaggaaaaaaacacaactttcaaacacaccagaatgtaatataaaacagcagcaatgtattttgtttgtatcagggtatttaaatggcaaaggtattttaagaatgagtgattgatcactggtccctttcacctcttctggttttccgactttttagctctttcacttggactcaaattctgacctaccagcattctgcactagttttaaaaatatcctcttttaacatgttagcttaaaaatagcttggttttcaccattccagattatttttgagcagaagtctgctttttattgtagagtcacagatttccagaaaaaaaaaaacccttcctatctactgcattctttcatcctctgaggaaacaacagaaaggggagtttaacttgggtagcaccaaacctatgatggactgacttgccagtctgtatgtgctattgttggtctactccactctttccatttcccaggaaaatgtttccttcggctgttcaaatgaatccaactggaggcgtgtacaaacaggcagctgagagtatctctgccttaagaagcgacatcccttctttcggacccacacatcttcttttgataaccattcaacaaagtttcctcctgcctgtcggcttagccacctgcacggctgcacgctcccagaagcaacacgagctaggggacaggacgactagcgggtgtgggggtcggaggagagtgaacacggcaaatctaaacaaaatcagattctcgtcggttggtaactggggctgaagctccgaggaaccagccaagcgttggccccggctgcctggcacgatccgcggctgtcctacctgccccggggacactcaggaggcggaaagttccccctcctccgacgtcccaggcgcgaggccaggaaggcgaggggagcggcggccaggggcccaggccgaggggcgagcgggggaaaggagg

SEQ ID NO: 50555 - DNA, 1486 bp, Bovine  19866880941922
  misc_feature (1)..(1): n is a, c, g, or t
nattagtaaaacaaatgatcgtcactgatttccctagttctgtaaaatcagcgtttttcccaggtgagaactgcgtccaggcaccgtcccaggctggataaagaaaggaaggtggctgaaaacagagtgtttttggtgaagcccggtcagcgcagccttgagacactcaccaccgcgtcactgtcgtacagctccaccaccactaagggtggggattctgccagctccttctggtctccatgcagcaccaggtcattgaacaggagcatctggttccaggtgggggagagggtctcaggaatgacctgtaaggtggggccaagagaaaagccaacactcactcgatcaagttggagggggctctgggaagggtaaagaggacacatccttaacatcattgctcacttgatcaacattcaagcaacaaaggaaattaatatactactaagtaccggatgctaggcatgcagactccctgccctggaggagcttacctaagtttcatgagtagtaccccacctgattgccaccctatttgcaaacacgagtgtaaaagtgaaagtcactcagttgtgtctgactcttttgtgaccccatgggacttgagcccgccaggctcctctgtcctgggattttccaagcaagaatactggagtgggctgccatttccttctcaagggatcttcctgatccagggattgaacccatgtctcttatgtttcctgcattggcaggcaggttctttaccactaggagaatttatatgaaaaaaagaaacataaaatatatcattaataatattttatattgattacctgtttaaataacagtttggacatcttggattgaataaatgtattattaatttcacctgcttattttttgcgtttggaaaagaccctgatgctgggaaagattgagggcaggaggagaaggggacaacagaggatgagatggttggatgccatcaccgactcgatggacttgggtttgggtggactctaggagctggtgatggacagggaggcctggcatgctgcggttcatggggtcgcaaagagtcggacacaaatgagcaactgaactaaactgaaaatgcagactataaaattctatacgtgactcacatttgtggctcacatatttctatccaataagactgcttgagatcattactgtcaagagaacacaaactatatgaaatcctgattataacaacaatatcagtgattttgctgacataatggcaagaaagataaattttacggagtaaatatgtgatcatttaagcattactcacatcttgttttttacatgattttgacactaatctattctaactttctcatgattctgatgttatcaagtcttttatggtagcatttgaggtgcaatttacatacagtgaaatgtcctcatttaagaatacagttggatgagtttggatccgtgtaaacacgcatattcccaacccttgtatctagat

SEQ ID NO: 50556 - DNA, 1282 bp, Bovine  19866880948415
  misc_feature (1)..(1): n is a, c, g, or t
nacatggggtcgcagggagttggacacgactgagcaactgagcaggtacacacatcctatggatcacttcttgtttctgaaacacaccagacacttctattcccatccctttgcctcaccattcctgctgctctctctgcctgggatgcccctttcccattcctgtcttataaattcctactctaccccagcatctagcatagttagaagatgaataaatatttgctcagtgaataaatccctcaaaatccagtttctctctccccaacccccaccccattccttttctccctcccaccaccctccttcctctccctcagtcagacctgattcccccaggcagagcaattatttgcttgtctccccattaaaatgcaagcttctcatgtgcagacaccatgaatgacacagaaccttagcggttagtaaacatgagtaaaagtgaaaaacaagttggttgggaaaggtattattatctccatttaataatgactcttaggttttgaaaagtcccaaagaacttgcgaatcatcctggaaggttaagtaactcgcccatcacccagggccccagcagcctcattttctgacctgaatctgagccatcagatcacagttctccttggcatataagaaaaaggacttacttcacaaatcctaaagcacgttttccaacatctcagaaactgggatgtggttttctttcttaaatgatccttaaaataacaataatatattttataagcaacgtgtccttagatataagatctgtttatataactcaataacagggaaagctggaagcaacctgcacttggcagctgttgattaaagaagtgaagcacttttatgtaattgaataatacaaaataatgataaatatgtccataattatgattaattataaattgtgtgtgtatcaaggaaaaccactgtgatactttgctttactaacaaatctttgcttaaatctgattttttcttcttttttttttgatggcttaggtgcattttgaaaaacaattctgtattaatagccaccatttggccatctcatgcgaagagttgactcattggaaaagactctgatgctgggagggattgggggcaagaggagaaggggacaacagaggatgagatggctggatggcatcactgactcgatggacgtgagtctaagtgaactccaggagttggtgatggacagggaggcctggtgtgctgcgattcatggggatcgcaaagaatgggacacgactgagggactaatctgatctgatctg

SEQ ID NO: 50557 - DNA, 1583 bp, Bovine  19866880972436
  misc_feature (1)..(1): n is a, c, g, or t
ncgcatgctcatacgcagtcacttcaggcgtgtctgactctttgcaaccctatggactgtagcctgccaggctcctctgtccatgggattctcgaggcaaaaatactggagtgggttgccatttcctcctctgtggaatcttcccgacccaaggactgaacctgtgtctcttgagtctcttgtattgcaggcagattctttactcactgagccacctgggaaacccatccaagactttcctgtctaaatagttgaccatgaatctaattaagtttttagagccaactgccaattacaggaaatataagacaaaaaagaataagttaaatgaaccacaaagaagcaaacaaaaatccagaatttggttgctgaaaacaactgattcagttttcataacatgccaatagtaaggagggagaggaaaaaagatgggaagagttgggggaaggaggctactgggaagaaccaatctagatttttcaagagtcttaagaaacattaatttgacatatggacattagttgaagcaaataactgtaaaaggacatttatattattctttcagaaaaaaaagttctgtcatttttgtctgataaagagttctttgggatatttataggaatggcattattgtggaaaggagcttatgctgtaaataagaaaacaaatacgaaactatacagtgagatgtgtacaataggacttaaataaaggatatacggctgggcttggtggaaaagtaattagtgcagcttgggggcagacagaaagcgtcgtgaatggatgacgccccgctgggtcgtgaagttggttggcaaaaaatgtgggacagatgctccaagagagatttgtgtaagcggagttaagaaagaatgaaagtgcacggtaggcaaagaaataataaacatctcaaacacttatgtggtcagagcttagtcgaagttttttgttcctatgcctgccatcacacttaagtggctgttgctagaatataaggtggagaaatggtggtatgtgagctgaacatattgaccagagggaaactctatttctgtgaagatgagatataatctaggttgagttattaataaatgataaatttgtttaaagagcttcaagggcactagtatgtgatactacgggatgggaaactataattttaaattgaattataccactattttaagaggatggtatttcggttagtggtacttttttaaaaaattgctcatcagggacttcccttggtggtccagtggttacaaatccacctgccgatgcagaggacacaggttcgatccctggtccgagaagatcccacttgcctcgaggtcactaggtctatgcaccccacttactgtacagtacactgaagagcagccctgcctggccactagagaaagcctggctggccgcaactagagaaagcctgcgcgcagtgatgaagacccagtgcaatccaaaataaataaaataaaactgctcatcattttttactcctgcttttttcatccagaacatagaaaatttaaatgaagattttaccccttacgaattttgtttgcacactgctgctgctgctg

SEQ ID NO: 50558 - DNA, 1776 bp, Bovine  19866881004024
  misc_feature (1)..(1): n is a, c, g, or t
ncttctcagctgtgcaggattacaaattggaccttccttcctcagaggaggaaaaccatctcaagtttctggcattaaaaagcataaacaaatctctaggctctactaggacttgacttttttttccccccgttttcctgattttaaaatgcacacacatcctacaccaaatcccaagatgctgaatatagtcagcattctgaacctgctccatttactctgcagcatcagtcttttcagttgtgacttatgctccgactgtgattgtcaacttagtcaattaacttcagtcaaaccagatatttattttccattcttattcttatgaggtattgttattacataattattttagttatatgctcatggatccacttttcaagttggtcctgtttcatatacctattgcttatagacagaccctcccccaggttgagtggcttaaaacaactaactttgtatttgctcactattctgaaatctagactgggcttagctggggaaaccctctgctgattttgatggtggtcactcactagctgtattgagctgtgggttaacttggggctgggtggagttgatactctgggatgacagaatttctctcaggtcacttcacataccctctggcatgatcgtcagactccttatatggcagcatagaccctcatgagcaccgaacccaaagccatacttccccacaaggtggcacctgacatgctgccacttctgccacattccaccagttaaagctagtcataagcctagcccagattcagggaaagaagagcacacaagacggtgaatgccaggaggcattgtttcccgtggccactaatcaaacagactgcaatactttgctctctgatcctggatggctcacaatcctcccatattccaagacctctaggagtcgcatcctatgacagcaccagcctcaggctctaaggtcttttatctaatacaggttcaagtgtaggtgagactccctcaggtatattttcctttagatctgaaaacctgtgaacttaagagacaaacagtttttccccacatactggtaagaaagagatagggtgatcataatagatattcccattcaacacagaaaggaatggcaggcacatggtaattgctggcccacagtaattctgaactgctatattctgggcctatattatgaatttcacccctgctccagggacagttctgattcccaagttatattttcattgctcatctgtcttctaaatgatcctgtctctagacacttctgggtagaaaatgtacttgtcaggccttgtgtgccatgtctggttgcaagctcattagaagacatcaagtcttactctcttgttctcactacaacacccctgcatcttcacagtcctttgaggctctaagttttcctcctaacagcttccatccattggattaccctccttgtttgaccccacttctaccaatccggcattatcacggctgtaacccctcctggtcccttcagggctgaaggtggcttgactgccctgcatgtccagaactttcgctgggacgaagcagtaggtgtaaccatgtaattcaccaatgtgcagaaacacaatttaaaaagttgcgtgtgtgttcttctctttttcctaacacctcctttcatctgatgtttcccacctttccttggctatcatctaatcttccctgtaggctctgaacacatgcatcccaatctggtattcttttctttttcacctgcagtaccacctcagcagcatctgggtg

SEQ ID NO: 50559 - DNA, 3842 bp, Bovine  19866881011964
  misc_feature (1)..(1): n is a, c, g, or t
naaactgtttaatatgtaattgactagagatgagatgacccatccattaggttaaaggactaaagcttgtgagctcagccttggtaatattaccttgggagaaaggaaagaaaatacaggagaaaatgaattcctggtttcctgaaggagctgaaacaagatatcccaggactgcctctaaaaaatgaattaaatgtaattttaaaaaacctccactgtccattaagtgtatttaaagtacttaacattactttttctaagttaaccctggagagacggggagacatatagcaggcttgattgggattcatttgcctttagctgccttagcagctcctggtggaaccacagtctctttgaaatcaagtgaggttaattgacctttccgacccaaaagagcaaaggtcattgtgttaccacctgggctgagggagaaggaagctggggttttgtctgttggggaacatggacaactgtttccactgaaagcttagaagtgctcagaatagtaagatgcatgtggtcgttactgctttctgggcactcatgataaggagttgaagtcaaaggcctgggcttgaaattagaagtcatgctgagctgtaacagagaaaacgagatttggggaaaatagttaaaaaacaaaacaaaacaatctggtaaaggggtatgctttccacttgagatttcacagtggatacatgttattgtagttgctctcagattaagtgtctggggttcttgtggggaagaataattccaccagccaccttgtgtgtatgggaccccctgttttgttgtgttcacggaaagacgtattttgactaatgtgagggggtctctgagtcaggtgaatttttttgacttttgggtccccagtacttatcacactgccagactaatggtcaacccccactagatgcttatggttaaatgactgtgcatgacatgcctaactttatccatcttatctagccagagccatcctcaaaaatgactcaaggagtggacaaaacattttaagtccttttatattaatagttggacttccctggtggctcagacggtaaagtgtctgcctacaatgcgggagacctgggttcgatccctgggtcgggaagatcccctggagaaggaaatggcaatccactccagtactattgcctggaaaatcccatggacagaggagcctggtaggctacagcccatggggtcgcaaagagtcggacagttaccaggtcataaatggatgacttcagtttcctcatccccctctttgaaattatctcctggtcgctccataagtttctgtccataatgttcagatgtcaaagccatgctcacagcaaggcaggtttttgttttcctcattttgactttcacttgttaaaattaggtctgggaaacacctcactggctgctcaattgacaccaggtggagacagtaggtaaatgtttagacatcagtactgtttaacaaagttggagacttaagtgtaattttgtttttccttccccttatgaaaaagattaattatgtttatgtgatgctaaaattaaattttggtaatatgtgaaagtcagacagtttggaactcaaatggtgaatatatcaagattctgctctttatgatccgttgtgttatgaacaaatgtatccatttgtgaacaattttgttaattagaacttcttagcgagtgagtgttctgccaccgtcggccactctggtgctggcagtgggtctcagggactttggaggacaaagatgatttcatctgtagctgagatcaaagaagacagagataaggttgccagggaaacaaaaatactgcagaattaatgtgctactcatgcatttcaatgtggtttgtggtttgggagctcccgcccacacacacacacaaatgatgatacatatgtggaaaggggtgatgcccatgtgcctaggtcttcaaggaaatgaccccaggcttagtatagctcaaactgtgggcctcaggggatcatattctgtgccctgtttctgtgtgctcgagcatcagctactaatggtgtccttccagttggttttcatgaaaatacactgtgggatctctctttcagtactttctctccatcccacacacacacttcacaaaccttttttttaagcttatactttatttatagttattataaaatattgcctatatagccatgttatacaataaatgtacccctgtggcttatgtaaatagtttgcacttctgaatcttctacccctatattgcccccccttctctctcccacaaacttagtaacgttcttcttgatttttaaaataaattctttgtacagaattttaaaaacaggaagcagtcttcctcttacaaatgtataaaaataacctgtaatttcaccatctggaaatacctaacataatattttgttgtacttctaatattttccataaatatggatatacatatatacatgcatatgtgtataatttaactgtgtgaatgcatactattttaaatatatttatatattacatataaagtctctaagtttggggcacaggttttaatttttaaattatatatattgtgataattctgggccacagaaacattaacacatgtgaacatacaactgtttctgtagccatttcctggctgttagttgtatccttcttgtttctagggatccggtattataaatgatgccacagcaagcattcctgggcatctttctgcgtatcttatttccctaggttagagtcctaaggttgaattactgagtcagggcacaagcatttttaaggcttttgttctgtaatgccagatacttcttttggaaggatttggcaagatacctccctactggatggtgggtgagctgtctgaataggttttactatccccatttcacagatgagtacactgaggcttagagaaacagaggctgatgactgttttcatattttctttaagttacagtgaagacaagtaaggctgcctaaagagattcatatttccagattgggtgggttaatgcatatgttactagctgagaaaatattggctattttaaagcttagtgagacccacatgggttgttggaagaagacgggaattagctgaaactgtcggagaagggtaagctgcctttggctactgtttaaaattgagatgtttttctccccagaatgtagtgtcccctcccaaggtgttttgggtgtgtctcattagcactttgaacttttgtttaagaaaagtctacagagttggtgaaagccttatttgcagtggttgattcattaaaaaaaaaacttaagatgtgttgagctcagggctttcccttctgcctgtgttttcattcatatcacttccaccacggaaagtatgtgttccgcacctgtttcatttcagagcttaagcatccttccagttaactgtgcattttatgcaatgctaagtacttgaaaccaagccacatggttgtccttctggaactactttccgtttcagacttgctgtttattgacaacgaaaggtgaataatttatcttttcactgaatttagttgtctgtactttaatctgccctttggaaaaaagtcacatgcattctatgtatcctcattctcaataactacaattggaaggaagagggaaaaaagatctgtccaccagtgagccagttcttttgtttaacatctggaactgatactttcttttattttctttttgaaggtgcagatgatttgtttaaattaatagatttaacctgtttactagatacaaaataaatatgcaaaaatcaagtgaatttctgtattccagcaaacaatagaaaaa

SEQ ID NO: 50560 - DNA, 965 bp, Bovine  19866881013364
  misc_feature (1)..(1): n is a, c, g, or t
ntaggataacctcctgattttaaagtcagctgacatccaacagtcgtaattcccctttgccaggaagcctatggaatccatagtcagagatcctgggattaggacatggacattggagggggaggcactattttatcacccccaccagttaggtgtattactttaggcgttacttatcttgcctaaattctcctttcctcatgtgtaaacagtatgaatacgtatccacatgttgctgaggtgctctaagaattaaatgaaacaattactcatcgagtacttagaaccataccttcttccttcttctccaggttgctcagttgtgtccgactctttgctgccccatgggactatacagtccatagaattctccaggccggagtactggaatgggtagcctttcccttctccaggggatcttcccaacccagtgatcaaacccaggtttcccgcagtgcaggcagattctttcccagctgagccacaagggaagcccatacctttgcatatagtaaatgttcagtctttgttgtgcactctttccttcctctaaaaccaataagtacccaacgtagaattccaaagcctatatcctgaaccttaatgtccttagctgtgatgtcctggaacatcgaggcctctgctcggagtctgccgtgtgcagagtcacgtgttcctctccggcactctgggctacccccgcacaccatcctcgaggtttttggcactcagcagtgattgttctgggaaggaagtgctcttctggtgtccccttggggggacaattgaatcactgagtgtgggcctggcaaatggttcattcttctaagaacagcgacagatatccaagaggaaagagcactgagagcccagagacctgctctgaacacaaacgaaaataaaagtgatatttactattccaggtgccctcacacttctgatgtcacttaagcctcataattggg

SEQ ID NO: 50561 - DNA, 2587 bp, Bovine  19866881064935
  misc_feature (1)..(1): n is a, c, g, or t
ngtctccttggatgggacaggagaggcatcacattttaattgaagacaaggtttaaagctcaagagaagtacttgcctattgggtgaaatagaaggtatcagggagtgggtagaaaagactctagggtccttcttgatatccttgaaattacaatcctaagtaggaccctgcagtagtcctggaggtacaaggttgaaaaacaaatagttcctttcttcaaggaccttatgaaaaataatatctctgacacattgaataagccccttctgcttttgatttgacatacattattcatgactctgaaatgtaggttcttttgcccctgttttagaagaggttcagagagggtaagtgcttgctcaaggttacacaaccaatagatggagaaactggcttctgaggctgggttcgtcttacaccagagcccaggctttcctaccccccgggtcagcctccagtgaggagccctcactgactgtgcagcagggaaagaataagctggtggagatttagggcagctgaccacaggcatttcagaggacctggctcccatggctcattctaattagagtcttcaacccacaaagcaaacagggcaaagaggaatcaggcctctcctggaaagtaaatagcgtccatcctgctgaccagggcctcaccctgcagattgacaaaacagagtctacggaactgagtacaagttggtctttctttcttggcatgactgggggaagttagggcttctctgggtgaaacgtttagagattctcaaagtctgtggctcttacatctgtgtattttgagacctaatggctatgccttaattttgtaaaataccagttacctgggcttcccaggtggctcagtggtaaagaacctgcctgccaatggaggagacataagagacgtggatctgatccccgggtcagaagaaaaccctggaagaggaaatgactaccctctccagtactcttgcctgcgaaatcccatggagagaggagcctggaaggctgcaatccatggggtctcaaagagcagggacacaactgagcttgtaacataagcacgtacccattaattagttacccaatgagtagttgttgggtaccttccacgatcatcattcatttaacaaatattaatggcatgtcttctaagtgttgggtgttgtgccagattctgggtatacgatggtgacactggataggttagagggaggacagtcctgtgggggactcttccgtttggccctccagatctattctccacccttgttggtctgttctctgtcctaggaggctgacccccctggatgcaccacccaggtcgctttcccagtggtgcaccccagcacgaggtctgggagagggaggtcaggacgtgtccccaactggatgatggttgacccccttctagggcagcccatgggacccaacctcctctctcctcaggtcctagtaactattctctctcctcatctggagggtctccgagtggcatcagcttggctgccatgagctccagataactctacaaccctttgtggtttttctacacccacacctttgtaaaaagtcctcagaacatcctgtcctggttgggccatctgttatccatgggggccctgatgagaaaactgtattacaagtggagaaaaagtgctggaaagaaaacagactgtgtgcctaaggggagtctattggaggatttcttttagtgtggttcgagaggggctccatcggcgggggaaatatttaagttacaacatcgaggatgagtgggagcctgccagggcagtgagagcaactcaggtggagcagcctgtgaagaaaaactccaagcaggaggtggcttgttagaagggatgggagtgagtaactagaaagcaatgagggcaggaccagaggagcaggtgggccaggaggagatggcagtcaggtaggtagggaattagagtcaatggcacccaactccactactcttgcctggaaaatcccatgggtggaggagcctggtaggctgcagtccatggggttgcgaagagtcggacacaactgagagacttccctttcatttttcactttcacgcattggagaaagaaatggcaacccactccagtgttcttgcctggagaatcccagggacatgggagcctggtgggctgccgtctgtggggtcacacagagtcggacacgactgaagcgacttagcagcagcagcagcagcggacttcagacatattctaagtgcaaatttccaaaagaggggttttcaaaagagaaacataatcttttttttttttaaaaagaaggttacagtggatgctgcttggttacttgattggtaggacacagtatttcagtgactgaatgaatgagggagtgaatgaatgaatgagggagtgaatgaatgaatgagggagtgaatgaatgaatgagggagtgaatgaatggatgactgagtgagtgaatgaatgagtgagtgaatgaatgttggctatggatgaagcttcagctgactgccttcccacctccaggtcggtctcaccctcctgcatataaacccctacagagaagggtccatgt

SEQ ID NO: 50562 - DNA, 1308 bp, Bovine  19866881136639
  misc_feature (1)..(1): n is a, c, g, or t
ntgcttacaggactgaacccttctaatattcagacctcagccccaaattctcagagaggtcgttcctgaattctcagtctaatgttctctcttgtcctgctatcatgggaggttttggagttttttgttttgttttgtttttaccttaaaaatagcttattactaaaattctaaccatcatctgagtcttcagctagtcagaatctttttgatggtggtacactctgcccgctttatccccctggaaaaagtgcaggcgaagcttccacttgggaaagaactgcttgacaactgtcctctgtgtccccaacaggctgacctctccccccatattttgtttttatctctattgtttatggtttgtttgcttatgttttgctcctgctggaccatgcatttctactggagacatggagaatcctactgagatgacatgaataatatggggcaataatggcacggttacacttggcctggatcagtggttttcaaagttctggttgcatcccaagtgcttgttagagaggtgtactttaatccccagtccacatagtctcattcattttgaggctgggagatctgcattttaacaaccctggtgtccctgatgcaataggtcaggtgactccattttacaaaatacagtctgggttcctccagtctcctctgtcctcttactactttgggctgattccctccagcaaaggaagagcctaggatggtatttggtgaaattcaaatcagggggacacatttgggtaaaatgtcctgtcctaaaagtcaaaggcacaggctaaaattataaatatttgttgatgttatttatacccgcttgctctgatttacttttccactaacagtaaagaactggccgtatttaaaggtgtgctggttgacttttttttttcaaggcacactgtgaataactcctcaaagctagaagaattcatgcatttgataattgaattgtgaggagcttatctgtcagctgcatggtgtttccgcagtcttcctgttctgggcaataaatccatcgttattgaaggcaagagctgttcattagttatgttcatacagtccagttggaagccccagattatccaaactgacagtaattacaatagctgggttgcacagtggtaaagaatctgcctgccaatgcctgagatgcaggaaacccaggaaatactgattcaatccctgggtggggaagatccccagagtaggaaatagcaaccctctccagtattcttgccggaaaattccaggccagaggagcctccggtaggctaccatccaggggtcaca

SEQ ID NO: 50563 - DNA, 811 bp, Bovine  19866881176558
  misc_feature (1)..(1): n is a, c, g, or t
ntatgaaacgagatgccagtccaggttcaatgcacgatactggatgcttggggctagtgcactgggacaacccagagggatggtatggggagggaggagggttcaggatggggagcacatgtatacctgtgatggattcattttgatatttggcaaaactaatacaattatgtaaagtttaaaaataaaataaaatgaaaaaatatataaggacatagctcagttttgaaactaaaatatttgcttgacataccactttttaggaaccttttggtgtgtgttaaatttgtaaaataaaggaattgcaaaataactgcattattttgggtttgctcttatgaacttgtatcagttcagttcagttcagtctctcagtcatgtccgactctgtgcgatcccatgaaccgcagcacggcaggcctccctgtccatcaccaactcccagagtccacccaaacccatgtccattgagtcggtgatggaatccaaccatctcatcctctgtcatccccttctcctcctgccttcaatcccttccagcatcagggtcttttcaaatgagtcagctcttctcatcagatggccaaaatattggagtttcagcttcaacatcagtccctccaatgaacacccaggactgatctcctttacgatggactggttggatcttcttgcagtccgagggactctcaagagtcttctccaacaccacagttcaaaagcatcaattcttcaacgctcagccttctttatagtccaactctcacatccataaataaccatggaaaaaccatagcctgactagacggac

SEQ ID NO: 50564 - DNA, 1420 bp, Bovine  19866881220437
  misc_feature (1)..(1): n is a, c, g, or t
nccctttttggtggttcctgctcaggtgttattcctagcagcctgggtggggtttggggcttgtggagtttggtgggagggaaaatctgttgaagtgggaggtgccagcatccatgaagtgtacacagagctgtaaggttcttttcataggcatttttattgctggtgagcttgggtaggtgggtgagggtgggcgtgtaaggaggcaaccgctgattatccgcaaggctgtcatccacttgaggacaggggtaattcgtggattaggcaagctccaatcagaaaataaaagcccaggaatggttttatggtggaggggtttacgcagctcctttcatcagaggaccttgggagcccttcatcttgctggatggggtggggaaaggtggctttggggacaaagctgtgacaggtacccacttctggaagtcgaagattcctgcctcatgctttaagaagcgtggagtccagtggtgctcctgctttggtcagaaacttcctcttgaagctttgtttttgtttccctgaaggctgaactcacctaggggtgtccctggaagaaggggagggatgctgtggactgtacccctcacactcaccctggggagggacctggtggcggggctggggatggaaacctggagagatgctcggacaggctcccccacctcctggtagaagccaatcagttccagtgtccacaggaaacctgaagatatgacagaatcagccataatcacaccgctgatggtggtgactcaacatttccagtgtgtgtctatctggtgtgtgatgttttctgcacaaagggcttttcttttatgttttctttttcacatggttctggatcctgaccatttctaaggtgacattacagctcgcccagatcctttgcagttgtaatcgggggttatttgtttggggagcccttgctcgccattctactttatctggttttcttattgttgttcagtcggtaagttgtatcctattctttgtgacctcatggactgcagcatgcctggcttccctgcctttgacaatctcccagagtttgctcaaacccacgtccattgagtcggtgatgccatccaaccatctcatcctctgtcgtccccttctcctcctgccttcagtctttgccagcatcaggtcttttccaatgagtcggctcttcgcatcaggtggccaaagtattagagctttagcagcagtccttccaatgaatattcagggttgatttccttgaggactgactggtttgatctccttgctgtccaagggactctcaagagtcttctctagcaccacagttcaaaagcatcaattctttggcttctactgaacccagatataaagcaggatccagcctgcctactgggcttcctgcagcctagggccaggtctgtgtatcttgctg

SEQ ID NO: 50565 - DNA, 592 bp, Bovine  19866881345706
  misc_feature (1)..(1): n is a, c, g, or t
ngcttagtgactaacgacaacaggcagatgtggagcaaaagcccgggctggggggtcagtcctcacgtcataacatccgggcacctgagaggtgtaaaaggcatggcatccccgagccaggcacgcagcccgtgcaccacacacatgccaacgtcagggtcctgggagcctcacggtccagcgggtctgggtctcactgggtgtcacgcttcctttccagggcttggaagcctctgtgtgggcgcagctttggggggaaaaaataaccctaactctgcttctctcatccttcccttttctgtgtacacatctgtctctctctctctgttgcgtgaccttcctcccccctgcccccaccctcccccatctttttattttttacggatgttcttttttggtggcacgtggtcccctcgtgtggtccctcccctgctgcagaactcgtccagctcggcctcctccgaagcctcggaaacctgccagtcggtgagcgagtgcagctcgcccacctcggtcagctcaggctccaccatgggcgcctgggcgtccacggagaaggtgaccggctggggtcccagcctctcccccaaca

SEQ ID NO: 50566 - DNA, 1585 bp, Bovine  19866881361345
  misc_feature (1)..(1): n is a, c, g, or t
ncatgccctgctttacccctgctgtatcccacagcccaaggctcccaatgtgaaactggcatccaatgatttgcttaaggaatgctccttgtcaaaagcctccagtgaacctccactctatacacagtaaaattaaactcagcaacacattcaattcccaagtcagctttccaatcctagctcacaatatccgtgccctcccctcgcccccgccccccacctttcctgagtgcgtggtactaaatgcgcgtactcctttagttcctgtcgaattcttcctctcttgttctaccgatgctgaaaggttagtgtacttgccaagtacagaacttgtttctcttcccattgtcctccagtttccccaccagatggtgatgccagcagattaaggacagatctgtgttcctaggacgatgcctggcccaccagaggcgctcagtaaatgttatatgaactatgatacgaatacagtgagtgaacacgtccctcgaagccatacccgtcctcctctccgccaaacaagcgggaaggggtggaaggtgcacgtaggctagaagcgaatacaaagtctggctttgagttttttagtggttgttctttttttctttttattgaatacaacaacatattggaaagagcacaagtcataactgcgaagttcgtcaattttcacaaataagtacaccggtgaagccagcacccagactgagcaccagaacattaccagcacccagaggcctccccgcgccctcttgcgcggagtgcacgttcaacccggcaaagagctggagagctcacgtcctgtgccctctagcagcggtgcgcgatgcccgggaatcgaaatgccccaaatcctggcaaactcttacccacgaatttgaaacgactcatgactgcagccccaggttctcctcggcggaagcggaaaaggccctctatcgccccgccccctcgccgctgacatccggtttcccgggagcccccagggccgctgaaggtgagccggccatcatggcatttttgtcgtcgggggcctatctgacccaccagcagaaggtgctgcggctttataagcgggcgctgcgacacctggaatcatggtgcatccacaggtgggagatggggacccagagtgcggggaggtgaccccggggggctcccacagaggccgagaggccctggtaccgggcggctcaaggacttcggggacggggtgggaacgcagctcctcgcccccaaagcccgcctctagacccgggttcgaatgcggaattcatcgcccacatctgggagaccttgaagacttgtttatctggctcgggcctcggtttcctaatcaggaaaacggacgcggtacccacgcagagggttgcataacaagagaaagaaagtaccacagatggactgtgttgtgcctccagcgctcactcaataatagcttccttcgtgaccgcgttcctaatattggcagtcataacaagtgcgttcttttctttagttctcgcacctctgggagttagggatgatttagccttattttatagatgcgaaaaggcaagagaataacttgctcaaggccctacag

SEQ ID NO: 50567 - DNA, 773 bp, Bovine  19866881418291
  misc_feature (1)..(1): n is a, c, g, or t
nagtttcttgaatgtgaaaattttaccagaatccttcctccctaagtcttcatccttccaccacaatcttctcactttcctcatttatgtccgtaagtttgccttctcttagctcttctggctaagtatctggagtctctcaaatggcaggagttcaacagcagtatgaatattcccaatgtcagctatttcttctataacctcatttacatttgattaaaatatcacatcagcattaccacttttaatttctttgttgcattttcaccctttttttggtcaattctcttttgattatcttttttttttacatgtgaagcatgggacagttggaaggtcaaaaataaaagtaataaactgtaacctattaaacaataagaatttatgaacatatattgatatgaattcataacttgaatagttgatgaggactggggtatttcatagactcaaagtacctccccacaaaatactaaccacaaaagggaaacagaaactctacagtggataaatcagactgatactacttagttcagtgttcaaaggacatggttaaccaaagaagtggttaatatcatcaggaataaataaaaatcatgagcaactgacaggatggaaaaaagaacataaaattacttctgtgatattcttgcctaagatgcttaactggaaggtattcatgaggaaagagaccaaaccaaattgaagtactgctacaacataactagactataatcctcaaaagtatcaacgtatcaaaggcaagggaaaga

SEQ ID NO: 50568 - DNA, 1126 bp, Bovine  19866881429167
  misc_feature (1)..(1): n is a, c, g, or t
nttggtgctaagcttcggctacatagtcttatgctttaatacataactgcattggatgtgaaagaaaccatacctgtatagtcactgttctatatattaacatttaacactgctgtgatcgctcaaggacattttatgttatggctttaaagcaaaggcatgattattagaaactatttaaactttttttctttgaaaaacaagctccttttacagaatataagcaacagtagtgcctgtggtttagcccaccaatcttgatgactaaaagtagctgatgcattgtgcatatgatgcttgagatggtttttgcaaaagcagaaatcactgcaaggtaattacgttagataaaagtggtattttaaacctttgaaataaatggatgtaactgtaccttggtacagcttttcacttgtttagtttttaaacgttagtataatctgaataaatgtaatataaaatgttgccaaattcaatgtagaaagaatgtgacaaaacaccttgggtagttctgtttgtgtttttgcatattgtaaaagcagtgtcacagctaaaaataaagaaattgtttctaaaggtaaattattgtggtttagttgctggtttgtactgagagttgacctctccctgtgcagttttttgttctaaacttgtataaataacaactgtgtgacgcgtctcccttctaccttgtaacagttgcttcagcctacattataaataaagaaccactagaaaaaaagccctgcatttcaagtcttattaaaatttaggctgaggtcttggtcaaatgttagaagatgggctgaaacatttctgtgcaccctaagaacatttagttgcctgacctaagtgttaggttccagtgagtttaatgttaacagctccagtgagttactaagaactgcaactagcagggttcggttaatttctaaaacggctttacctttaggaagaaaaccaaaacacttcatttcgtttttgccgcccttacctttgtgtctgcagacaatccaagctccagtagagggagcaaagctgggaaactgcctttgaaatgactgtcacaaaagtgccgttcagatcaaacactttaaccccagacaccaaactccaatcctagaac

SEQ ID NO: 50569 - DNA, 3065 bp, Bovine  19866880350458
  misc_feature (1)..(1): n is a, c, g, or t
ngcctgttgtgctaacaatgcctgctccttcatttttcattaactggattagtggtaggggtagggggaaactagaaacaaagaaggatatgtgactctcttagagcacaattgtgagtcagtcaggtccacacatcttctgagagaactccatcaacatagaaatcagttaacacatgtttagtgctctttggtataactggaatagtttaccattgcatttggtttaatatattaaataaacatttaattttaattaaattctctttacttttatcttagaagaccaaatgccaagtaaattttctttagggaaaaatcaatcttacatttattcccagttctctaaactcccaagtcgcctgacctatatttcttagatctgaactctttgaaagtacttatattttccaaaatgaagattgaaagattgactccatgactgggaaccactcttaactgcatccaatttatcttccttggagctgctggactttttttttttgacccaaactaggtcatatttttccttttcttaaaacttttctatggtttcccaatactcttgcaataaaatctaacctttcaaccttgacctataagatatagtgtgacctggtcgctgcttgccatcagtcttacaccactgtctctcactcctgtgtcattgtcaccctggtcttctgagaatatagcaagctcttttgagcctctgagctttaatgcttctggcttcatctgctctgaagtacttgctcttccttgattccacccattgctgctgctttcattatttaggtcagagcttaaaggccttcccttcatggatgccttttcttcactctacttaaagtagatggcagaatttccttctccctattttcagagaaaaattgtgctgcgaaattaaacagacaaagaagacttgttcaagactattgcaataaaggagagagattgaactccattgaaacaaaaagcagggaagtgtttaagttcggaggtgagctaatggatagcttttggaggaaatttggtgagaagggttgtcaggccagctgtgttcactgggtgaagttaggctcctaccctccaacagagcctggaagatagggtatctatttttcttgatcattgcagttcaaagggatacccccggtccttgatgaagacatccttgggttgtaaagctggtcagaggctgcgagaagattttcatctcaaagggactgagaaagaattgcaattacaagttttctaaagtaaatcttctaaggaaagggaattcagctaactatagtcagaaggaaactggtctaaagcttggttaagaagaggggaatgttcagtgttggtcaccaatatgccttatcacagcattccagttattttcttcatagcattttaaaagtagttaattattgaattattttctgtctattccactaaaaatacatgaaaggagggactttgttatatcctcaattccttggacagtgcctagaacacagtaagtactcaagaaattttatttaatgtataagtgaatgagtgtaggcatagaggcaagtggggtcttatagagatattctgtacatattaatgttattaacaactgggtcagcagctagacttctttgtgtgcttatgtatgtccatggtacaagaatactgaaaatctgaattaatgactactaatttgaaatttgcttaaatgaaaaccgatgaataagtattaaagcacattgagtgggaacaataatacaacagtacatttaattacttcatgtcattcctttatgtgctgctccatattcttccatggcagatttgctgctaaagtgagaccttatactttttatatccatggtaaacatgtccattccaggactcagagaatgttaacataatcaaatacaattaagaaagattcactctataagaattcttaatattagagctaagacccttaaagaacttgggttcattccagattcgtgaaatcatcaaggcatcagtgtgactgtcataattaactaaatcacaacatccaagttgtaatatattcattttatgcaaatgcatcagtaaagagcaaaatgctacagtactggaaaatcatgtttttcatgaaaaacaaggatgactcattaggcatgcatcccacaaagtctgttttgtattcagaaagccaagaaaatatagatcaaatctaatttctgaaaatgttattagaaacactggttctggatgactgacttttgaaagctgagataatcaatcagaaaatgatgacatccttttcttcaggttaattgtactctcaattgccttcaaaagatcatgattctatggtaatgaggtaaagctaatgttcaaaaatttagaccacttaagtgaagtttttaacaaaaaatgccagtaaagagtaatatgtacttttacaccagacaacttttatgcatcgttttttccttaaacatacactatgtttgattgagaagtgaagcacagcctttaagatcttaaaagcttcaattaaaagaagttaaagtcacataattgcttaagaatatacaaagtgatttacttctaatggaaggcacagaattttatgaggtatattcaattatgttttaaacctgaaaaaaaatttacaggtttaaatttacatattttcctttaaatatccaaacacatactagtaccctggttattctagactctattctttttatcttttttctttatacagttttgctagtagatctcacccctcccttagtttgggagccatctgggcacatattttttgtttttgctcttatcagaatataaatcacaccatttgcaaggcacaacaaatcagatcaaaatatgacaaacaggaattctggcatcaggaagtaaatctacttgttctgcagggtctccttagatatgagggagttgaaggaatggatgggatatctgggaagttagacagcagacaccatgtgaaaatcaaagtaggcaatggcatacaaaaaggaaaagggtaggtacaggggcagcaaatcagggat

SEQ ID NO: 50570 - DNA, 1307 bp, Bovine  19866880507625
  misc_feature (1)..(1): n is a, c, g, or t
natcctaactcactcatgtgaccttagacaaattatttaaccatgcctcagtttcgcatctgtatcaggggataataatagtatctgcctcacaggattattttagggactaaagggatctacattgattaatgtgtagaatagctcctgacacacattagttactatataagcatttattaaatataaatcaatcaaagtcttaccccatgtatcatgaaaacatgctttctaagaaaatcttttttttccatgagaaatattttttttaccctcccataaggcaagatagtcctgactttaaattttcttatgcaacttaaatgttatctgatcagctaatcccatatctttgagagttctagacactgaccagtatggagcattttatatatcacttcatttaatcaacaatggaaatcctacaaaagactggtgatttccctattacaaatgagaaaactcaggtttaatgaagttagattaatttgcacaaattcactgagttggtaagtggcagagatgggtcagcagatgacatctccaaagtcaatgtttttaatcagtccattaccatcaacaaaatactacattaaaagataatttcacaggacttgcctggtggtacagtggctaagatttcacactctcaatgctgggggccccagttcaatctctggtcagggacttagatcccacatgtcacagctaagagcatggtgcaacaaagaccaaagatcctgtatgctgcaactaagatccagcacagccaaacaaaattttttttaaaagagagaatgtcacaactcttcaaaactataaatttgttccatccaggtactcttagcctgctcctggaaccccagcaatgtaaaatttgaatttgtcagtgcctgcgggcgtggttcctctgcttcctgaacaccacagacttgtgtatgtgattgattctcacagattactaaggttctttggtggaaatcaagcctacattggcagcaggctctagatggtgcctggaaccatatgaaaaatgatcttttgcagcttgcccatacatgtctgtaaaattctggcactggagcgttcagacgcagcaggagttttttctgaagccactgaacagctttgaaaagtgcagtttatctcatcctgttagcctaatgattagtcagttctaatgcagcagtctcagtgatgaatgtcctattactgatgggaaatactgactaactctgggatggccttttttaattctgaagctccaataaaatgtctccactcacttggctgggctcaatcactaa

SEQ ID NO: 50571 - DNA, 1554 bp, Bovine  19866880602275
  misc_feature (1)..(1): n is a, c, g, or t
ncaatctgacttgcttttctgaaactgctctctccaaggttgctaatgatttccttaccaccagatccaataatatcttctagcccctcatccttttaaaacctcctagatataatttatactgatgaccactccctccttgaaattcttttctccctcggggtctgtggcacatggtgcttcttcctttcattttcttctagctctggttcttccatgttccttcttgtttcctaaacgtaggcattctttttgctttttagtttgttcacaaagagaagaatgggcatgtttgtttacttatttaacctcaactttatctatcaatgggcttccctgggggctcagacagtaaagaatctgcctgcaatgcagagacccaggtttgatccctggtttgggaagatcccctggagaaggaaatggctacccactccagtattcttacctggagaattccatggacagaggaacctggcacacagggtcacaaagagctggacacaactgatcaacactttatctctcaagagtctcacttggcaatgttattcaacagttaacctacttccaccatcacctacctgtaagtgcttcctgaatctgcagtcttcatttccaattgcatatatgacatcagcatttaaatgttccaccagcatttcacattcaatctgtctaaaattaactcattatcttccttaccaaaccaggcccctcttttttaacttcagctcccccacgttagggcttccctgatgtttcagtgggtaaagaaaccacctgaaagtcaggagacctgggttcgatccctgagttggaaagatcccctggagaagggaatggcaacccactccagtatccttgcctggagaatcccatggacagaggagcctgcggggggctacagtagtccatgggttgctgagtcagcaggactgagccactaacactttcactttccccctagttaatggcatctcctgaagctgaaactccagtactttggccacctcatgcgaagagttgattcactggaaaagactctcatgctgggagggattgggggcaggaggagaaggggacaacagaggatgagatggctggatggcatcaccgactcgatggacgtgagtttgagtgaactccgggagttggtgatgacagggaggcctggtgtgctgcgattcatggggtctcaaagagtcgaacacgactgagtgactaactgaactgaactgaactgaacctctcagttatccaagctccaaaccttagagtcaattcttattcctcaatttcctttgcttacctacctaatcatttgattttaaaaaagaaaaatacagcttctacctcctcttaccccggatctatccctttgtctctgttcattctacctcctctacttctaaccagttcaggcttcccctacattgatgcaacctgctgtacatcaatcctatctcttaatgtttcatttcttgcaagatctagcatagtgatttctacagagtaacctcaacaaatgtttgttaaatgaattaaataaag

SEQ ID NO: 50572 - DNA, 2653 bp, Bovine  19866880657915
  misc_feature (1)..(1): n is a, c, g, or t
ncctggatattaaattgggaagaaaggtcttagagatgataactttaaatttttaaatatattaacactttgtagcctgttttgtgacagagtaaagagaaaaatctgacaaatgaatttcttttatcattttgaaaagaaacatgacatagtcttaatcctttaaaattcctttaaattataaagaaatttcactgaggtattcacaattatgattattcaaaattccagaggtatgatttttaaaatctagtggcaatcttttcggtatagtatattctttcataattttgttcctcaagcagaattcccaaagccctaactttcagtaacttagatgtcagtatgaaaaaggtcattttttttgccacagattaggaggtgaaaaccatttttaaaatagaaatgcatactctccctttctgttggtcacttgttctaggttagtgacttttttaaaataatctattaaaaaatccttctgtacaaaaatccatagtgagagtcattcttatcaagataacttccagaaattttatggaagcttctttttcatatatagctttagattttagtaacagttggggctgttatatacacatttttaaatgtttagtgacagctttagaatggagagagagtgctttaaatgaatgactgcaaaatctttagaaatttatcctagcctattattctctgcatttgggaaggattgtttacttcctgacacacattttcacataatgcatagaatgaaaattctgcatttgtctatcatgagattgtgcatttggcaaaaatctgaaatgtctgattaatttttaaaagaagataattgctacttgaaataaaattatatatatttattataagaaccaaattaaacagattgcatcagtcttcctaatccactgatcaatatagtaaatataatatgccagagcttgaaaatttctacatttcttcaaacttttagagtccttcaagtgcaatgtacatagtattttgctgtttgctttgtctctttactcttaacctgacaaccaatttttctaagtttggtgatataaggaatcaaaaagaaattagctatgaacaaataatgttttgatctgaacaactgaagtgataattttatatctgagaatttgtagatgatataaagcttttgactattactgtattaaacatactttaaaaaaaaccctgttggtggaagattcagacttcaatgttttctccagtggggttaatgaactaaatggaaaatatctcattaatttcttaaaccccccttgtgaggcaagaaaatgacattctcgtctaacagctggaaaaaccgaactagtagatggaactgcactcaactgcaaaggaaaatagtagctttaatataccctgagttgtggatatgaaagaatactgcatacatgcagtattccctcccttatttttaaggaatcaatacctgcttcttacaatttaaggaaagttaaactcttggaacttggccgtatacctttttgcaaagtaaattattgtttcaaagccaggctgtgcagttaccctttaaatttacttttaaaaagtttttccctaatccatacaacctaagattgtacatatcatagattttcagcaaacttatttgtcacttatcctatagcttttttaaaactgtaaaaattcaggaaataataactcttttgcaatgtacattgggacagtaattgggaagtaacaacaaattgaattgatttgtagttctgcagaaatgaatttgacatttcacttacaagttgcaaaccaatgtatagttttaaacacttctgaatttccttgttttgcgaaaaagtagaatgttttcactagaatggaaatgccctcaagttatttccagtactgctgtagaattgatttttctagtttaagggaatgccaaagttaggacatatatatatatatatatacacacacatatatatacacacacacacacatatatatacatacatatatattaatcattatctatttttcttaactgggtttaggacatggcaaaacaaatcaggaaactataactttgtttcaatattaccaacatagggctttgtgtaatgactgtgacatcatgacagtgaagtattcaattttaagctttaaaccagagaaagctttaccttggtatgtccaatagaaatacaatatgcaaattaacccatattatctgtatgctgattggcttgagttcccccgaatgtcacaatctcaccacccagcaatgaggtattttactgctgtctggagatcaaattattgctgtacagaagatctttattttttctgtttcattaacagattattataaagcaataagcatgcaggaggagaagcagaccttttaccttgggaattaatgaaagcatttctgatcatttttttggaggtggggaattgtttaaaatcttataccacccccacaaattcttctgaaatggtaaaataaggaaatgtatgattccagagacacgcttaactaccaggtgtcaggctatgtgctgtctcgtgatatcatcggaccttttgaacgggtgtaagttttatgaatcgttatattcctagtatttttcttccgtaaaacaaaggggag

SEQ ID NO: 50573 - DNA, 1230 bp, Bovine  19866880701304
  misc_feature (1)..(1): n is a, c, g, or t
ngacacaaacttaccaaagggtaaagggatggagaagggacaaattaggagtatgggattaacagatacataccactatatatgaaatagataaacaaggatttattgtataaaatagggaactatatttgatatttgatataatatcctatactggaaaagaatctaaatacacacacacacacacacccctattcactttgcggtacatctgagactaactcaatattgtaaatccactatacattagttaggaaaactcattatagaacagactatcagaataactttgatatttttggtctcaaatttttatagcaaaactttttacaaatatataaaaggggtgtagaactatattaaacccttggcattttcagaatatttgtggtattctctgcattcattttcacaaaatccacatcatatgggtttaaattaagataataaatgcactgcagtctataaagttgtgaggattaaatgacatatagtagagcactgagcaagactttaaatgtcagaggctgaaagtctgcagttcagtcttctattagggaagaacccactgacgggatccactaattgaattaatgattggctccattgtaaagattcttcaagacttcctgcatatactagaattcctccaaatgtgcttctgtgcctttgatgatagaaaactttttgccctcaatttgaacaattgaagagagacagcacattggttagaaattagatttctcagccagaccacctagatgggatccttctgtttcctactgaaggatcctagtgatttatcatagccctctgcctcattttctctttcctgaaatattgataacaacagtacctccttcacatgattgttgaaagaaatcaatgagttaacatataccaaggcttacaacagaggttggctatgttagctatcctctaggggtaaagtaaaaaatatctcccaaatcaatctggtttctggacatttatttttaactcagttgcagtaatggcaaagctagccttaacagttttgtcacacctccaactataaacaaactatcaaaagcatgtttgaaacctagttttctacttttaaaaaatatggctctctattaaaagcaaaaaagagctattccaaacaactctaaaaagctcaatggattatttactgagactaggaattgacattttaaaaccattggaaaactaatgttttggctcatt

SEQ ID NO: 50574 - DNA, 2859 bp, Bovine  19866880738001
  misc_feature (1)..(1): n is a, c, g, or t
nggatctgtttatgggcctggcaacgaggtcggattctcattcttattcaacaaatgtgtatgaagtactctaaatgatattgaattctctccatatgttctaccccccaattacctatgaataattctcataggttcaattatgtctaatgctggtagtcccaggtgtctgacttaactcagatctcctccactctagactagcatataactgtttacttgatatctgctcttggatatctgagtcgcttgtcaaatcatggtaatggaactcttgacttcttcctactccaccctccccaacctgtatccatctgttcctcccactacaataacacatcttccccatctcctcattataagtagcttctcaagcctgagattatcctggattccttacactgtcagtgtttatgttcaggtcctcagtacattctgtgaaataaatggctaaaattcatcttggatctgccttcttctctccatctttgttgccttcatcttggtctaagtcttcaacatctctcatttgggatcagttaaataacctgctaaatctttccgacataccaatccattacccacatacaagtgctcttctcaaaattcaaattaggtaatatcaggtggtttagtcgctaagttgtgtctgactcttgtgaccccatggactgtagcccgccaggatcttctgtccatgggactttccaggcaagaatacaggagtgggttcccatttccttctccaggggatcttcctgacccagggatcaaacctggtcttctgcattgctggcagattctttactgactgagccaccagggcaacattgggcttcccaggtggcactagggtataacactgcaatggtcttctattgtacttaaaataaaatccaaatttcttactatagtttctaaaactatctacctccttacctcattctagaccatgctctcttcatttattgcattcacactcactggccttttaaaattatgcaaataccccaagcatttcctgattcagagccccagcacatactctttcttctgttagctgtttcccaccacaaaatgcacacacgctttttacatagatagctatttctcttccttcagatccatcttttaatttcttctctcagaaggacatactttgattaccctacctaaagaagcctctcttctactattccctatttctgctctttttttaatcatagaaattattttatcttgaaataattaaatgttttaaatcccctgttgaatgtaatatacaaaaggttagagactttgtggtcttgttcacctatcttctgtacctagcatagggtctggcacatagtagatgttccatgaatattttatgaataaatgactcttggggatacagagaagagtaagacaaagcccctatattcaagccatcactgctgagtgagaataatcctacagaaatagccaacccatacctctttagtgctgaatacaggcttacacaaatttctgtgcatgtaaaagaaactgaaagtgtacagagggagggagcatatggagaaatatagagaaattaagtacatgtcattattaactgatattttaacagagagggaacttctctgtgactaagattcagcccttaagaagaatatgagtgattctctgaccgtcccttctgcccactcctaccatgactctggaactatatatgtgtaggaaatgaaatctatagcaatggatacccaggcaagtcactgtgggttacatatcccttctataattttttctaatcctctgtttagaatctttcctaatgagtgggcagccattatttctaatttaattaatttactccctttgaaaacttcatgtttggttatttttcctgtctcagaaagaacattatttcaagctctttgcaggtctagtaattgtggacttgtatttttcttctgctcagaatatcaggcataaaaactcaaacaatctctgccaagagagtttgttttctatttgttgcgtcttccttactctgacacctttgtaggacataattatcaaagatgctgacttcttttcacgtatcttcatctgtacctgactatgtaaaatagggtaatgctagttgctgtaacagctaaaccttagagttttaatgtgatgtgatgaaactcacgttttagttctcacaacttagtggtttatgtttcacaaacttaatggctctctatgaatattcctgggcttctctggtggctcagtggtaaagaatctgcctccaatacaggagtcataggagatgcaagtttgacccttgggttgggaagatcccctagaggtgagcatggcaacccactccagtattcttgcttggagaatcccatagacagaggagccttgtgggctacaatccataaggtctcaaataattgaacatgactgaagcgatttagcatgcacacatgcataaatattcctggtgggctggagtttcctccatgtggtaattctgggatccacactccttccatcttgtggtttttacatcccatggggatcttaggtgaaaagacaaagagttagtggataattaacatttgtgtttttaaaactataccatgaaggtgacaaacatatctgcccacatccacgagtaagagctaaaccagtggttcttggatgcaagaggaatctgggaaatgtagtttatgggtgagttagtagctcacagcattgaatcttccatatacaagggaaatacagcattttgttggagattagccatctataacttctggagtggtgcagtggtaaagaatctgcctaccagtgcaggaaatgggaggagatatg

SEQ ID NO: 50575 - DNA, 1249 bp, Bovine  19866880898900
  misc_feature (1)..(1): n is a, c, g, or t
nctccggaatgaggaaactcagaactctagaacctgaatccgagatctaaagaatgttaacttgtttttccttaaacttcctgtttttccctacaaacgtattaaacactttccaaaacgtcttattaatcatattttcccccactgcttaaaaagaattaacaaatgtcataagacatttaaaagatggtgtcaaaggattccctccttcaaaaatgttagaagctgctagtttaaatgtatctgagagattttccgctttgttccaatgatctcttcagactgaggtgcatgcatttcagtcaaaggacaaaaattcttgtgtgtcttgaaacctttaacagcattaaaaaataaaagaaaaacacttgctgtcattttttgaccttttttttcagtgagcttccgtacaaatacacaacaccactttaccagtaacaggcttggccacgtgaggaaaccctggagctcgcctcttcgcgtcaccggtacagccggaccgtcatcccacagccagttacatggaagcgcgccggagaaccctgggagttgtgggcaccggggattgtgggaaatgtagtttggagacatcgccctgctcaccatttctgtaatggctgcttccttgaaggtaatgtacgagcttgtctccgaaggctccttagcttgcccagtgtatttgtcaaacggggcaaatttgcaccttgccgggccaaagcagggattgtttttaaagtcttactttcaagtcctgggacgaacttggttttcggttgactttttctttttttttttttttagctttttctttataggcgaacaaacgaacttttaaatctagttcccgtttgaacaaactgtttgtctttagtttttacccattcttctcccttccatacaacctccccgctctgcgctgactctagatgcctctttaaaataataataattaataatgtgtaatttttaaatcctgctacgcccctctgatagtaggcgctgtcacgtggaatctcttagcctctgcatccggagctgctggaagggagtcagatagaattcagtaccgctttctttggtaagtcttaactatttccccacgacttcacagctatatgttgtttgactttgctagatttgtctgcatttcctggatggggagaggtcctaagaaaatataattttcactctctaggacaatttccaagttactggcttgggcatcatcatctatctttcttatgttcta

SEQ ID NO: 50576 - DNA, 1842 bp, Bovine  19866880969690
  misc_feature (1)..(1): n is a, c, g, or t
ntccctgagaagagaaagagcagtaataatgtgcaccctatgacttctgagagaaatctagtatctcatatgacatttactttttccttgcctgtaaagaggaatgagataccttggtgatgaagataaatgagatcaactaccgtgtatcatttatatctcaagttgcattttttttttaaacaagccacatggacctgttaaaattggaatttaaacaaaactgcagggaaataattatcttaaggtgaattgcttaagagggaaattgcagtttgacactgggggctgggtagtttatgagtgtagaatcatagaaatagtctgctctgaacaaaagtagcatttagctgcaggttctattatgtatttgatattactgatcctagcaaagtgaggaataaaaattgagcatttatacacaccaagctgaagaaagaggcctttaaattacctttcagactgtgagtttaattgaatttctcacatttatttcagtataatgacagcaggtttgttgtgtggatgtcaccattctttgaaagctgctttattcttcccaatagcacagaacctgcattcttcatttttagagagcattcccaacaataagtaatgcttgcttataaattggagtgcaccagagtcctatttaaaggccagcctcactgacagccttgcaggatagaaggggagaatatatgttttatgctcatacagcttcttgaggaaatggagtatatatagtcaagttatgattacagttatggttaggttcatttatttgtcaagtgccaaggaatacacttgaaaaagcaaaaaaaaaaaaaaaaaaaaagacgaagaagatcaagacaatatgcttgtttcatagatgatgttactatagaataaaagtttgtatgaatccccaagacagatacatgccattattttttatcagttgagtattatgtgaagttgttttatattttttggcacataaagcttttccccattgaaatagttgattgtctttatcagttcaatgtaaaatatagtggatgtttgctcttcagagaggatgatccttataaaaactccccaaattaaaaatatatatattgtttatatactcctggatttcctaaaagtcatatttccattatgctacacatgcctgctatgcaagttgacttttcacaggttgctaagactttctctctcatttaatgagctatctctgtcctagctggaatagtcatgctaattctatctgaatttatttaaacaaatacttatatagtactactgtaaacgctttataaatattaactaacttcaatcctcattataacactttgagagatcattattttcactttagagatgagaaaaataagcaggtactgctgagaatttgccagaaatcagtttgattaaaactcaagaagtctggttccaaggtctatatgtttaataattatgctatgcccaggagtttatagcacatacacatttcttcttatcaatgatatgctattctttaaaaattctttcctgcaaagatctatctgtttctttgactttttatttacttctatcaccaattttaaaaactaactttgatgtggtagtgggggatggtgcataagtattattccacatgtataattatggtcatgttttcattgctcagctgctgcccaggtgccttgatggactgcaagactcgctctgatattctgccctttcaatacatgtaatcaaattgtttctcatcaaaattacagattactgcatgcaagggacccaggtcagtctacagtagtcaaacctatgaatgttaaacccataagtgcc

SEQ ID NO: 50577 - DNA, 1981 bp, Bovine  19866880977121
  misc_feature (1)..(1): n is a, c, g, or t
ntataggaaaaataacaaggaagctgtaaaacaataaaactcagtaaaatcataattgtagagacccagagaccttgtgaaattctcctttaagttaagacacaaagtctttaattgaagaaataacacatgtcttcatggtgtccactatatgcttgatatttagcaaaagctagagttcaactcttgagatggctaattagttttctgttttacctagtacgttgcactgcagagatgacctcctagaagtgtaatttaggggttaacaagactaacataaaattttttagctcctgctcattcttgctggtgtttcataatctacggtagaactttagtgttctattttaagactttaatctctggcaaaattcaaatcctctcaagatttagcatgcatgagtttctgatgcttcctgagaagtctctaaagtaggaagaaagatagaagctctttcttgagagtgtctaatatagaagaaagtgaccagtgatcagaatgggggagtggtgtgaaatcactgagaattccaaactggggagaaaaaatacaaagtaatgactacctgatgagaaaggaaaatagtatgatggggaaggtgatgtatgtaggaataaaaaatagactcaaagactcattccctactatataaagtttcccaaagccctctgccttcatactataaaaagaataacattctaaatgtggctctttaacttacatttctcagttttgtcccattccatgttttttctgttaagaaaagaaaggaaaagaaatggaggtggcagaagttcaaccaaaactattaattagccagaaagaagagaatattattctatattgaacataacgttaaaaatactaacttactgaatgcacacttatcaattgcttatatacaaatgggaaagacaagcaataaacacatgcaaaagtatattaaatacaaataagatagagatgagtgctaggaagaaaaatgcagaagagggataagaaagttgggggaattggggcatgattgttgttgttggggttattttatatggattgacagagagggctctaaaataaactgatattggggcctagggtcaaacaaagtgagggaaggagctgtgttggtaggtgagtaaagagatttccagttagagagagctgtaaagtgcaaaggctctgaggcaagtgtatgcttagtatgttcaagaaatgaaaaggaggccagtatgagtggagtgatgtggtggagaatggaagtgagagtaaatgaggttcatgaagcaatagcgtcctggtcactcataccttgaggtaattgtaattacttaggctttacttcagagaaagtgatggcaccccactccagtactcttgcctggaaaatcccatggacagaggagcctggtaggctgcagtccatggaactgcgaagagttggacacgactgagcgacttcactttctcttttcactttcatgcattggagaaggaaacggcaacccactccagtgttcttgcctggagaatcccagggacgggggagcctagtgggctgccatctatggggtcgcacagagttggacatgactaaagtgacttagcagcagcagcaggctttactttaaatgggatgggaaatcattggagggtactgagtagcaatctgatggctttgctgggcaaagactatggaaagatagatgtgtgccaggaaacttagtgattgatttggattgggatcagggtggatcaatggaggtggtaagaattggtaaaaaaaaaaaaaaaatgttcgtatgtttggtcacaaattcatttattaaagcaaatattagtgacagaagtcacagatcatgttccatgctggagagataacaaacagaacaaagtccatgcctgccatcagtaaactcatggcttaataggggcaaacaggtgaacacctgcctttaatgcctggtaagacaaatgaat

SEQ ID NO: 50578 - DNA, 848 bp, Bovine  19866881030267
  misc_feature (1)..(1): n is a, c, g, or t
ntgttttgcctctgtgtggtaatcttgtctcccctcttagggataatttccggagggcagcatgtctgcatggtgaaaagacactggaacttaataaattcttgttgtttcatagaagatacttcccaacagaggcctgacaatcacttaccttgtgtggaccttcctaaaagcggggtcagagaggctccttccagggaatttctccaaatccaaaagaactacaagcccctcactagagtcagcagaaaatttctccctcacctcaaaccctactcaccttctttatgtgaataagaaaaggaatggccactctcattaaccacgttcttaacaagtgctagatgtcactctgtccaatcttcacggcaacactgtgaggtgggtatttttctcattttatagatgatgaggccaaggctcagaaaaggtaagtaactcagccagtgtcacacagctcgtgagcaacaggtccagattcaaaggcaagtccttccattccaaagcctaccatcttcccaccatgaaggtggccccctagctgggtggctgtttctcccaggtgtggcccccagctgtcctatgtctgatgcaaccattcactctcccttcagcatcacactgtattttaactcttgccttctttcttccttcaaattgtcctccttcctccgaaataaccaactgccaccagatgtccctcctctcctattagtccgcaccacttggttctgttgcaagtcgaggcaatgcaggcagcctggaaacccatcctagcttaatccagttacacaaattcccattattgagccatcagttatagcctggggatgcccagatgcgaacat

SEQ ID NO: 50579 - DNA, 1984 bp, Bovine  19866881114578
  misc_feature (1)..(1): n is a, c, g, or t
ncaaccagtccatcctaaaggagaccagtcctgggtgttcattggaaggactgatgctaaagttgaaactccaatactttggccaccgcatgggaagaattgactcattggaaaagactctgatgctgggagggattaggggcaggaggagaaggggacaacagaggatgagatggctggatgcatcaccaactcaatggacatgagtttgggtaaactccgggagttggtgatggacagggaggcctggcatgctgcgattcatggggtcgcaaagagtcgcatacgactgagtgactgaactgaactgaaagttcaaaaactaacctaaataacgtgtagagaaaaaaaataaacaaaacagcatgatatttgcctatggtgggaattgtgggtgtggggaagtttggagatgaaaattgatttaaaggaggtataaaataaataactttctgggaataaaacaaattggggtattttttaataatcttgatgattatgtcaaacatgattgatcataaatataaggtctgtgtatttcattgaatataatgtggtaaattggggagaagaaaacatcaaattattctttcagttgacatttagattcattatatcaaatttcaaaaagaaaagcatctcattgggattgctttgagttgctctcttttcttaaggagaattaccacgtttataataactgcacaatttgagggttctccactcttactgaaaagttttcctacccattttgcatctattgttgctgatataatgttttcttttctaatgtgtcattgtttctctgatggagtgcaacatatttactgtataatcagactctaatatcaagattgctatcagtttttatttgttttgtgttctaggcaaataatcatatctaaaaataataatacatttattttctttctgaaaatgcattttatattgatgattgattatctaatggaaactatcggaaaatccagagcagttataaattctaacagagagagaggacagctttattcaacactgcatgatctctctggttactgcaggatccttgccacatttcaggtgccctgctctcaactgtggttgatcaaatcaaaagttttttttaaaagtactgtgtctttattggctctctatttatctttgcctctaaaactctcctcaaattaggcaatttatgttctccagggtgttctccattttcatcttgggaatactgactcattttttccttgtaaggcggtgagtcaactttcaactaaggactctagtctggactcatccattattttatatcagaaattcctgggagtttctgacatccttatggacctttctcagttttcagacatgctatatgtttgcccttattttcatagtttgttagtaattgaattagcaatctaagaaagagacagtgaaaattctgtcattagtcacagaactcagaaatcttgatatattttatctggggatgcttcttcttccttatttgaaaagaagaaaacataataaagcaatcaggttcattagccagtggatgcattcatttggccatatatttgtggctgacaaatagattcagctacaaatgaggaccaaataatgatcatgtattaccaggagaacgtgagtgcctgctaagtcacttcagtcgagtctgactctttgcgacctcatggactatagtctgccaaggctccactgtccatgggaatctccaggcaagaaccctggcgtgagttgccatgtcctcctccagggcatcttcgggacctagggatggaaccccagtctcaggtctcctgcattgtcaggagggttctttaccactagcgccacctgggaagccctgtgagacaacactatggggcaaatggaattggggaattcaatggagaaactcctgctaaaatattcttggtgaaaggggttaacatggactctggagatggttgatggtgtg

SEQ ID NO: 50580 - DNA, 1462 bp, Bovine  19866881137027
  misc_feature (1)..(1): n is a, c, g, or t
ntttaagttacttttacagccatgttaattgcacagcctcagttgactctgtaaagcctcaatatctttaaaaattattgatttatttggctgcactgggtcttagctgcgggacacaggatcttcactgcagcatgaaaactcttagctgtggctgtgggatcagttccttgaccaggggttgaacctggatccccctgcattaggagcacagagtcttaaccactggaccaccagagaagtcctaaacctcaatatttttattacatacaatcaaacaaggcttttacaagtaaaaatttctaaatttagaatttcctttagtggacacaaaagttccattataatcgtggtttgcaaagggtggtcccaggaccagcagcatcaacatcctctaagaacattttagaaatgcaaatgtttgttccccaaccattgcccatatctactgaatcagaaagtaaagggtagtattcggcaacctctgaataagacttccatgtgattctgatgtttgatagcacatcacagagagtatttataaggtccttgaaattaagaatggtgtctttttcatctatatcattcccatgtgtgtctaatactataccctggcacataatagatatttagtaaatatttcctatgtgaataaatttaatgtgtaatcatttctgtgatttgtttgacactgtcttctcctgacttctctcttcttcacacttatcatccataaaattggggtgatagaataaagaaatgttaagtgtgaaccgaacatgactctcaccaggctgtcactgttccccccacatgatattctcacagtgtccagcgttttaaattctccatgatctgtattttttcagaatgcttagaagtatcttgcataccaagcaggaagaaaacaaagaaactgcaggattttgtactgtgcagagcactacattacacttatattatcacatcttatttctctgcacagtgcaagagagaaagtctgtcatcaaataaacatttagcagtttctgcaacatcgtacccaaaatatatagccataaagaataacaatgatatgtgaaactgtagatataattctctgctccagaagtagtatttgcctgacctggaaagtatacaaggaacatagttaatgggtctttttcttcaaagaaaaaaaataccttcatgaagctatcaaaaacactgtatttctatttttcatgaaatatttacagataatgacaggtttagggaaattatgtaatcagcaattcctaaattgctaccattataattactgtttatttgaaaatcctcagagaaagacagaagacatgtctccagttttgtaatgatctgagatagtctcctgctgctcttccacacacctgggctaataccaatgtaaatcagataatgctaatttgagcatattgatgagggtcaagcgttactgttc

SEQ ID NO: 50581 - DNA, 1825 bp, Bovine  19866881215213
  misc_feature (1)..(1): n is a, c, g, or t
nctgttctgtgacattggcacaagtcaaggtacagtccgccctctgaaactgcagtttccatgcccacagagctacactgtatttacaactatgtacacagcatttacattgtattatgtaatataagtaatctggagatgatctgaaatatatgggaggatgttcatagattataagcaaacagtatgtcattttatataagggatttgagcagtcgagcattttggtattgggtgggggaccagtcccctgtggaaatcaaggaagggctgaataagttagtcagaagagagcctaaggctttaaacagactctccctatggctttaaacagactctccctattgttccaaagccacttggagacacattagaaagaggagggacctggatctggctcagacctccaggcccatttcagaaagcatctcaggtgggagacactcaaccaccctgtacctcgactttcccaccaattagatgaaatgaatcaggatgcactgctcagggccttctcacagctaacttcatacggttctctgactttgctgacgcttaagttctgggcaagatttgtaaggcttgactcagaaacacttaagagaagcaatccttcactcttcctgtcaaaaacgaacaataagattttaaatatcttattaccttaataagatatctttttaaatcagataccagcaatgaaacaaaataaaatttaaaaacaagacaaaataaactgtagcaatatccactgccactgatacttagtatttataatagtttgtgggaagtcaccaaatctgtatttcttcattctcctccctttctctgaaagacttatatcccatgctcatcttttgggaaagtctctcgtgggtggggtcttagtcctatcctcattctccatccccttttatgattgcttctgacttctcttcaacttgccccgttttaactctgcatttaccataaaattcaactccttctcctctgctcttctttctgtatattcacttttcggggaaaaaattcacactttctcatctattaacctacattttctgttgtaaagatttttccaatccacatccctgtgcaggttctgccctaatcacatgcatctgtctctaggacagatatttatatattctgacatcatgtcatcctaacatgatcaaaattaaatcaattgtttcctgccaagaaaaatccaggctagatcatctctctagttctttcattttcattaataatactgctcttctctcaagttattagactcaaaagctttggctttttttttttttgtattctgttgtggttaagggggagtcaaactacctatgtttaaatctcagcgtggccacttgctggctttatgacctcagaaagctattgaacatttctgtgccttagtttcctcatttgtaaaatgggaatggataacaaatgagaagtgcaagaagtaaattctaaacatgctaacatatttagcatatgccttacacccaatgcataaaaaaggtagagatgtctaagtgacagcttaactttttgaggtatcatgaaaggcaaccatgatctctgaataatgtcccttatcactgtgaggaatagaaagccaggttgcaaggaattctaaatctgaccaacaatccaacaattcaacaagcagggttttttcaagtatgaatatgtattcaaatggtggtcaggcccaagatggtttgggtaatatgttttaaaataattttggctaataactttttatttaagcatgacaattttcatttttattggtttaaaatatttccttcaaatatca

SEQ ID NO: 50582 - DNA, 1426 bp, Bovine  19866881244487
  misc_feature (1)..(1): n is a, c, g, or t
nttagaactgtgaactgtgtgcatcagagcaagaaaatataaatgactcagaacgtgggatgagagagaacacatgtggggcatgattacctaggcatttgtatattagatggtcacatttcatacactgggtttttcccccaaatctctagagcagttggagacagtttcaattaaccgtatgtccatttgtgtctttgccagtcttggagaacttaaaatatgtctacattaaatttgtgcaacatccctgagcttgatatttggtgactttagaaatattatgtaagtttttaagccaaaattcaaaagaatattttggcttcagactggaaataatgcaagattgtagttttcttacagaaattcctaaagttagagtttgacttgcctcaggaagaaattcataattcagaaattcctgttagctttttggaaacctagagaagcttgagtctaactcatatactatcaaactatttttttttttttttttgcattttctcccccaggagtcatttaactataaaatctcattaatcattttcataaaaaggatcacaatatacagaagagattaaacatttttaaaaaatcattctaactcatgttacattgattatacccttgactcactgtgcttacagtacattctgttctgaatttgtgccaaagagctagaggaaaaaaagaaaaaagatagaaaaggatcatggtaccagaaaagcgaatacacttccataaacccatggaaaagaggcatagataagctcatgccaaataaatgtgcatgtcttaggaccaaatataacatgaatcataacccgattcccgccccaccccagtgtatatcaatgtgatttgccttcttattgctataatggattatgtttagagaaggtaacaatttcttccagtttaaatatttttctttttttcctattatgagtagcatttactctttttgtgttaaaaatgtgtggagttcatatcacgtttaaaatagccaaacagtaaagaaaatgggaagagttgactcattgcaaaagaccctgatgctgggagggattgggggcaggaggagaaggggatgacagaggatgagatggctggatggaatcaccgactcaatggacatgagtttgggtgaactccaggagatggtgatggacagggaggcctggcgtgctgcgattcatggggtcgcacagagtcggacacgcctgagcgactgaactgaactgaaagaaaattgaggcaaggaaagaaaatcgttacatttggcttattagaattgtctttcttctagatttttgtggtctctgtatgtccctcacactatcactgtggcaaaactatcagaaagacatacttcctcttctaacaagatgtattcagatctaggtatgtacacttaaagtggggg

SEQ ID NO: 50583 - DNA, 892 bp, Bovine  19866881276214
  misc_feature (1)..(1): n is a, c, g, or t
ntgaggaggggggttctggatggggaacacatggtgcgcccgtggctgattcatgtcgatgtatggcaaaaaacccactacagtattggtaaagtaattagcttccaattaaaataaattaattaattttttaaaaaagagagactcactgaagatttgtggcttggaattgttgctttctaattggagactgagatgaaagtaaggatgctgagcccactagtgtcactcatctttaagcgctccacttgtcgatagaatgttttatgggaaaataagtaggcgtgggagtgaacttgggttaccatacttgtgcatttcacacctatacagcaaaaatgtctttgtcatctctttgggaagaaacaaaattgacagggacagatggaagcttcgccttctttctctgaagaggcgaattaatacaattaaaatgagagatgtgcttacatggactgacttgctaaataggctaaccttgatatttaaaacatataagtattttaaaaatatagataaatatttatacaggttcaacattaaagggaaaaattaaatgaatcgataagtggtaagggtgagggtcttcactaggcttctaaatactagtagacatccatctgagaatatagctatagcttaatttaataaaggcaaacaaaatttatgaaaatagtaatacagaataaaaatccttaacaacatgagagaattcaatcacctaatagtaactgaaataaagcattataaaaatgcctgctttaatatagaaaatattgtctattgaccacaataataaagccctacttgttaatagaaaaaataaaaacaaaattttaataaatgaattctagcttcttaaggtgataaagggcaacatataacaattcaa

SEQ ID NO: 50584 - DNA, 971 bp, Bovine  19866881292931
  misc_feature (1)..(1): n is a, c, g, or t
nctggtctggaaaatcccatcgacagaggagcctggcaagcttcattctgtggggtcctaaagagctggagatggctgtcaattttaagcaattgacacagtagttcatcagctgttcttccagagctcagtctcaccatatttagtattcacagagggttcatttcagctttcctcagtatcttgctgagttcctcccggctgcagctctcattgacagagataagtgctgtggtgtcagagaataggtgaaaaatagtctcataatctctatcgacacagggattgacatgctacattaccatgggaaggaggactcagttgagagctttggaagagctggtgctaagtacagataggctgattttcaagtagaaatgtgtgctgtatatgtgaatcttccccacggagctatcatggttaattaagaacagggtcataagatcctcgataaccaataataatctatgctgtttggcatactgaggtaagcagactcctttctttagaaaaaaattgagatgaacaaaagtttgtcagaatttgttaatttgctacaatgtggagtgacttttaatgagctataaaaacccattgctgctgctgctgctgctaagacggcttcagtcgtgtccgactctgtgcgaccccatagacggcagcccaccaggctctgccgtccctgggattctccaggcaagaacactgacgtgggtcgccatttccttctccaatgcatgaaagtgaaaagtgaaagtgaagtcgctcggtcgtgtctgactcttagtgaccccatggactgcccaccaggcttctccgtccatgggattttccaggcaagagtacggagtggggtgccatcaccttctgcgataataaacccattacatgttaccaattattttctagaggatttatggaatgtttaggatcttagaaaccggactatttgagtaattaacagatataga

SEQ ID NO: 50585 - DNA, 943 bp, Bovine  19866881552284
  misc_feature (1)..(1): n is a, c, g, or t
nagaaattaaactgcacatagaggaaggtgacattattgatcaaaaacagagaaattttaaattttgttctttctcttctttacttcaaggttggtcttgccaataaagtatgtagggatttttctgtagacaattgcttttaggccaggaatgtggggcttcccaagtggcacagtggtaaagaatctgcctgctaatacaggagacacaaagatgcacattcaatccctgggtcaagaagattccctggagtaggaaatggcaacctactccagtattcttgtgtggaaaattccgtggatagagggggctgagggactacagtccatggggtcgcaaagagttggatatgactgagcatgcacttgcctcgtgaggagtaggatgtaaatgttaataagggtagaaaaggcccctttggagtgatgtacatatcccacctgtcaggctgtgacatcttttcccagatggaagctggcaaatgctgcctgtgtcttctccacacataaagaataaatggactgtggaaacagaagtcatgatcctaatttctctttgtttcttggcctcctctgactctcacatcctcttttgagttgtgaaacatgattcattcttcatgcatgaatcctcaaagaaatggattgtaacaagcttattccatgaggaatatccttcctgaatgtggaatactgctgctacagaacatttattgtctgatgaacgaacagggcaggtcaaacaatcaaaacacaagttaataattgaattatggtttcttgaatgctaaaaatgtctaatgttccatgccccaaagtggtttcaaatattgccaccaaaaggctaagttagaattctattccacatcctcctcactgattccacccaacttagcaaacttctttaatatcgatgagatgggaattcgaattaaattaaatt

SEQ ID NO: 50586 - DNA, 691 bp, Bovine  19866881619016
  misc_feature (1)..(1): n is a, c, g, or t
naggcaggtcggtggtctggtattcccatctctttagaattttcccagtttattgtgatccacataatcaaaggctttggcatagtcaataaagcaggacaggttaggtcactctaaactgtgatcctagatagaacatttagtctgactgaaaaatgaaagcctagagccacaggagaaagccagcaaattcaatgattcaccactacaatgaataacctactggtaacatactaatttatcattcatgattcctgggggcagtgggacagtagcccagcttttgatacaaggggtttcataaatcattaacctctatcttatttgtagtcatctcttctcctaatcaagcaaaagcacagtgaaaaccaagctggaaagaacaatttcgaactttagaataaactgtttttcaaatatcatgaaagatgtttacaacaaaaatgtttggttggaggagccaagatggcagaggagcacgacagggagaaaactttctcccccacaaattcatcaaaagagcatttaaacatcgagtacattccacaaaacaacttctgaatgccggcagaggacatcaggcacccagaaaagcaatccaactcttcaaaaggaggtaggaaaaaatataaaagacaaaaaaagagacaaaagagggagggaccggagtttctgtcccaggaaagggagt

SEQ ID NO: 50587 - DNA, 775 bp, Bovine  19866881642466
  misc_feature (1)..(1): n is a, c, g, or t
natgttgactttgtcatgcataagagatgttaaaaaataataacaatgcactttgaggaatgtttgcatatgcctctgattagaaagaagacttgtcccagccctgcagcggccaatgaagaattatcaatgccttattttctaggcatagattagagaatgtaaaccagacaatttgtttactgttataagaaaactaccagtttgcttacagaagattatttttgtgaacaataggtttgagttcaaaaccatttgaagaatttcagactcacactcagaaaagggaaaaggaagaagtctgcttaaaatgagtatgtaaaatttgcttatcgtacatcacatttagacacttggctgtgacctgttaccagtatcgcagagaaacccaaagcactgtttaggtacaaacattcttcatataggtaactgtaagaagctagagcctacaacttgctcctccatgccttgctgggagcctctgaaagcactggcaattttaagagtctttctcagggtaacaatgttttcttaataaaaatgttttcagctacaaattcctcccaaataaattgtcttccctttcaaaatgtaattttatgaaagaaatgtagccatttgtcattgatttaggctattttcagtattgagaaatgattttgatctctgtagagttaatgctctgtcatgaaaacaatttttcagatctcctttagtggtaacacttttttctatttgaggtcaaaggattggaaacagggtcattttttttttt

SEQ ID NO: 50588 - DNA, 929 bp, Bovine  19866881654030
  misc_feature (1)..(1): n is a, c, g, or t
ngctcctccccctggaattttctaggcagagtactggagtgggttgacatttccttctccggggatcttccagacctggggatcgaacctgggtctcccgcattgcgggcagatgctgtattagtgttgcagtaatcactcccagagggtaccattccctaagatgtgtggactcaggcagagaaactttttgcacagagtgctggtttagagccagctcgctgattttctgaaactcacaaacataccactgccttcagctgagggtgcttttcacttggaatttggatcaaatttagcaccaaaagtcttctgaagtgaaaggtcagctatttaatagaatagttttaattaaatgataatggcttttgtgttgtataaaaagaaagtaagcaagttccaaaatggaagcctgaatagctaattctagtgaggaaatcagacttatgaacacagcaaagttcttattaattgctttctttaatgaaaatttgttttgttccatttacctcggcattaacttttataagtgagtgtatttttatcctctatttatattatggttttagttacaataggtgttgctgagtcatctcactcagaatgtgaaaaatagaataggaatactgaagatagattgttgttgcaacttgagatgaacctttaagtacattgattaaaactcaatattctatttcaatattctttttcaaaaccaaatttttaagccagatatattattttgaagttaaaattatttttccttcaaaattacccatttatattgtcaaaactgaaattgtttatttctgtgaatagaattttgggatgttcattattgagtttatggttactatggttaaacaataagaaccagaatgatgttgtgaaaatttgtacctcaagtgaaattaacaatggaataatca

SEQ ID NO: 50589 - DNA, 1125 bp, Bovine  19866881774386
  misc_feature (1)..(1): n is a, c, g, or t
ntagacaatggggcgattgaccagatcactgaacacaaggttaatattttaaaagtcaattgttttttctatatacaagaaatgagcaaatataaaatgaaaatttaaaacaattctatttttataaaagcaaaaaaaaatcaaatagctagaaataaatctaacaaagggcttcctaggtggtgcagtagtaaagaatctgcctgcaggcacccaaaactggtgctacgtgacaacctggaggggcagggtggggagggtggtgggagagggtttcagaatggacaggacacctgcatacctatggcaaattcatatgacaaaaccccccacaagactgtaaagtaattatcctccaattaaaattaattaattaattaaaaaaaaaagtccacctcccaaggcaggagacgcaagagatgtgggtttgatcctcaggttgggaagatcccctggaggaagaatcagcaactcacttcagtattcttgcctgggaaatcccatggatagaagagcctggtaagctacagtttgtggggttgtaaagagtcggacatgactgagtgcatacacacacacacacacacacacacacacacacacacaaacacacacatatctaacaagagatatgtaagactgccaactgattgcataatggattaaattgcaaatacactcagtggaaatttatacataaattctttaagtcttatattagaatgcaaagggtcaaaaataaccaaagcaatgtaaagaacaaacttggaagtctttaaacgtcaactttttagtccacagaattatttcactatcatatttattctatcagtgtgctctacttagctgagacaaactgatgctttgcctaaagccctccagttgtttgaactcattggtcctgtactatgttactaaagatctctgaagaactgtgtagcagagcagttaataccatagttacagtaggggacccaacccttcaggaaaccagatataccttgaactttgtcttgggcataaataccttatttcattttgtaagttttccttttgattttttttctcttataatcgctaagcttcttgcctttactttagccttttatcttaactttaatattt

SEQ ID NO: 50590 - DNA, 2192 bp, Bovine  19866880607295
  misc_feature (1)..(1): n is a, c, g, or t
ntttggagaagtcggtcgatgtcttttaaatcttaccacataagcaaaccactttctctgccatcgtgtagggccattcctccaaggatatttgccttttaaaaaactaagaaatttaactgtagaagactgttatttaatgcaaacttagttgtgatcccacccacaaattgccccccacagtttcccgtaggcacccacagtctagccctgcttattttatgtcttttagaaaagccaaaagtgacctgtaattacaagcaaaaatcactagtgtgagcttgtgttaagtgtttctcttacactttgaaaagaataattgtatcattaaagcaattcctttggacggtaaagacttagatttttttatttttcagagagtagcagcctaacaaaatatgggccccacccgtctcagactcctcctggagcagggacatctagacttaggtccaggtgtcctacataatcgccatgatatttcgtcactccctccctatagccactgtctccaaaaatttcttgagatcacatgttatttggtttgtaaaaatcaagaaaatgaaacagaattttgcgttgaatatttagaagaatttcctaatacctttgagacaatctcagtgcttggtgttgcaaaatcaagctaggagatcattgacacagaagccagataagggatctcatttttccttaaccatgagcctcacaataatttctcctcaatcattgcatatattcttatgcagggtctctcttctagatatacaaccatcaaatgaaaaggatatgtgaatgctgaagacacaggtgatgctttctttcataagcaacaatgtgctgaagagaagatcagtggaatacttttatttgcaaatgcaaaacccttatttggaaatacatatatgtcaggtcagggcttccccagtggcacagtggtaaagaatccacctgcaatgcaggagccacaggagacatgggtttgatcgctgggtcaggaagatcccctggaggagggcatggcaacccattccaggattctcgtttggaaaatcccatggacagatgagcctggtgggctacagtgcatggggttgcaaaagagtcagacatgactgaagtgacttagcatgcacacatacacatgtcaagtctcacactctttatattttctttaactcccttgccctccacacggagtgttgaacttgtttgtccataaagattcctacctgtcagtcagtctgctgagtgaaggactcggatagctattgtccaggctgctgagaacagacatgatcatgggccggtgtcctgctcttccctcccctgcagggaaagactcaggctggtttcacagctttttgttcacatgactaaaaatgaaaggaaaacctgagggagctgttacaaaaaaaaaaaagacttaaaaagtttctggcttagaacatttcaacatccagccattagtttaaaaacatcttcttgagtgcactctgggggttcttctcattcttctccaccagtcactggaatgttctttaaaaagaatacccacctaggccattaaagtgagagtcaaagcagcactgggctgtgacctttttggcagggtaggctgtcctcacacattacctttacagtgatagaattttgctttttccccctttttcctgccatggaacaaccccaaaggaaacctgagaaagatcccaattggctgagtcccgaatgaagtatttcaactggagaaggctcacttccccatctttgctttgtttctcatttgttaacttcattttgctccactataatgaacaatgtcatgtggtaattcattagaggttatccattttttgctaattaacatctttgatcaatgcaatgaaaatttaaacatttatcaatatgatcaataagcttagaactccaactattgggctgatccttttatcactaaatatttgtgcaatatatccatggagacacacaaatacatccatgcaattacatgagctgtagagcaagaagcgtgtaacagaatttaaaaaaaaaataagattgcaattttcaaaccagattaagttttaaattgaaaggaattgagattggacatcatttaaaactaaccacttaaaactatatttaaatttatacattatatacagtttttcatattacaatgatttaaa

SEQ ID NO: 50591 - DNA, 1420 bp, Bovine  19866881239344
  misc_feature (1)..(1): n is a, c, g, or t
nctgtatgcttggaaatgtacaaaatttaaaactacaaagaaaacctattgtgaaaaataggcagtttttaatacaaaatactgccaactagcactattgtgaaatactattttaaataaagttcattctagaactcaaggttagtttactattagaaatctatgcttacttattaagtaaaaaatttaaagaaaatattcataaatcacaagtatactgcaaagccgtttaatgaattcacctaggactgtaatattctagagggtatgcagaaaaaaaaaaaaaaaaacacttaagtatgataaaaatttagtgtggcccaaatcatatatgtgtttaatttatccccaaagttgagttcatgttccaaaaaataaaataagtctaaaatacattcatgttcaagtgtcaagaaaaacatcataggaaattaagatacaagtacttcacaagaaccagatttgaaaatgaaaaatgaaatctggaaatattactgtaaatgtctctttttggtgtgcatgaagaaaatattattctgggaaaccacaaaagccaactgacttaaattacagaatattttatatcagaagtagctgttctgtgaacttttccctttatatttcaatttttgctcagaataaatctcaataccagaatactttagatacctaaatacaagacatgatgccataaaactcctagaagagaacacagaacattctgtgacataaatcatagcaatattttatagatcagtctcccaaggcaaaagaaataaaagcaaaaataaacaagtgggatctaattaaacttaaactaagttttgtgcagcataggaaaccatcaacaaaatgaagaaacaactacaaaatgggagaaaatattttcaaacatgcaatcaacaaggtatattatccaaaatacacaagcagtttatatagctcaccagggattatctggtggttcaaatggttaagtgtctctgcctgcaatgcaggagacctgggtttgatccttgggttgagaagatcccatggagaaggaaatggcaatccactccagtattcttgcctggagaattccatggacagaggaacttggtgggctagagtccatgggatcacaaagagttggctatgactgagcgactaacacttttcacactttcatacaactcaataccaaaaatccaaacaacacaaacaaactgagcagaactaaacagatatttttccaaaaaagacacataactgaccacaggcacatgaaaagatgcttagcattgctaattattagagaaatgcgatgactgtgaggtataacttcacccagtcagaatggctatagtcaaaaagactacaaatgatgaatgctagagagggtatggagaaaaggaaaccctcctgcactgctggtgcg

SEQ ID NO: 50592 - DNA, 1655 bp, Bovine  19866881333604
  misc_feature (1)..(1): n is a, c, g, or t
nctaccaggctcctctggccatgggattttccaagcaagaatactggcgtgggttgctattttcttctctagaggatcttccccaacccagggatcgaacttgcatctcctgagtctcctacactacaggcagattctttagggctaagccactggggaagctccagaagcttcttgaggagtgttatgtgactttggccttacgcctagccccaaccattcctcagtgctctctttcttcagtcagtgtaaataggttgtcaaaaaagatttcattgaaaaattgaggaacaacatgcccccaaatatgtttactcaagtgtccaccatatgccaagcactgtatctgggaatataaataaagactcaaggataattgatgctattttacatattatctctttttattataatttgttgtttttcggtcactaattcatgtccaagtctgcaaccccatggactgcagcatgccaggattccctgtctctcatcatctcccagagtttgcccaagttcatgtccattgaactggtggttccgtcctctcatcctctgtcaccctcttcttcatctgcctttggtctttcccagcatcagggtcttattttattataaaattatcttatttactataataccaggaaaatatttaggaaataattatttattgagttttctaccatgtgaacatcaattctaataataattctatgaattaagtgctgtattatttcccattttcagatgaagagactaaggcacagaagaattaagaaactttcccaaaagcatacatgtggttgttctagagccaagatttgaaccaaggtagcctggctgtggagaaggattctaaaacactaaattatgtaatgaagtcttgcttggtgatgatgagaaaaatcttgccatgttaggtgattcgtttgagaagtgtatttttagactgtaatatagctctttctctggtttagccaagagtttcatgtaaaacaatcacatatttgctaaattgcccaaaagaaatgtatccatgtgataaaggctttttctctgaattatcagtttaacattattcctttacaagccttcgacaaattgtagcacccacacaaatacagtaattagttttaatttccctttgtcaatctaaaataaaagtggggtaattgatattccggtatggagaatttcgctctacctaaaagcaagttagctctttagtaatttggaagagtgtttgataattgccaataatcttaaaattctaatgacctctgcctgaaagtgttgttttatgaactgaatttcctgttatgtattttacaaatagattctaccgcttagattttggtgatatttatttctgtttggccttggtcttctggctctaagaacgagatttgaagactataaatacaaagaactgcatagttctttttacctgaaagtgaaatgacatctggctgagtggattcagtggtctaagaaatgcctctcagtcataaactttcttttacatttaacttgggctttgtgctgtatatcaaaatacttgattgttccacactgttttgccctccttttcatgggcattttgaagtctttctcaaatgaatattcatattcaaaatgtgttttaatttctcatc

SEQ ID NO: 50593 - DNA, 609 bp, Bovine  19866882117855
  misc_feature (1)..(1): n is a, c, g, or t
naacatttttaattactcgctttctttaagatgaacttttcaaaagcttaacacactaaaagatacaatgaggcatcttatgttggctttggtcaaatatatatgttagtttttcttttaaaggtacatgttattcggatttgaaaagaaaaccatgaagtttttgatatttgaagctgctaaaaataaccaggcttcttctaccagatgacagaaaggtcatatttgtgatgtaaacctcacaattacacgcaattcaaattttacaaatggaaatttgacaaatttttacaaatcattgtaatcagtgactaaacttttattcatgtaaaaatacaaaataatacgtcagatagtcttcccccatctttttaaaataagttgttaaatatgctgaaccttaatatgtaaatccttggaattttagcaaaaagaatattttgtttttactgtatttagccactttccagtttaaaaaaaaggaatttgatttgagtgtgtaaaactgaattttctttttagtcacaaagtcattactttttcagaaggattcccctttaaaactactaatacattttattttcaactaaaaaccataaaggaattcta

SEQ ID NO: 50594 - DNA, 1157 bp, Bovine  19866880349010
  misc_feature (1)..(1): n is a, c, g, or t
ncattgatgtgagtactgtgtagtgcctaacctagggcagcatgtgattagtgataaatacatggtgtgctcagccgctcagtcatgactgactgtgcagccccatggactgtagaccaccaggctcctctccccatggaactttccaggcaagaatactggagttggatgccatttcctactccagaggatcttcctgacccagggattgaacccacatctcttaaggctcctgcattggcaggcagattctttaccactgcactagctgggaagccatatgtctccttaagactaaggataacctactttaggtcctccatgtcaggaactgtgaagagcctggtactttaccttacttactagctgacaagttagcccaccataatttcacacttgctggcagaagacacgagactcctggatcagagacatgaacatagctcaaggcacagcagatagcatgagcttcatgtttgcatctgtttctcttgtcccctaagcccacacgggcaatgtgatgacagacctagatggatgcaagatacacagtggatttgtgtcagttgtaagcttaggaacccccaatcttttgaaagaaaacaaaccaaattttgccccagaaagacattttatttactatactggtcagcacacatatctgttttctacttcagaagagtgcagtatctttatatatattccacaaactctataaaaggttaactcagaagccaatgcctccacttccaaagtgtacagaaatgcaagaaactcatgaaaaactgtctcccagcaccccacagcacttagtagtctagatacactgtaggaattcaataaatgttgaatgaatctgaccagagaatcatgaagtcattgctaaaattgacatgaccacttatttatgtgtcctctgtgctgatttccctgtcacttgcgtttctgaggaagacactaagaactcaaatatttgtataaaaatgatgttttccaatactaagggcccacgtcaatcaaagatagcgatgaatgggaacaaaggaattagttcagttagtattaccaataaggagttcctcattggttatattaacaagagttataattagtggtatgcggtgttttacagcggcttatgctaaaggaacaaggcc

SEQ ID NO: 50595 - DNA, 1386 bp, Bovine  19866880361692
  misc_feature (1)..(1): n is a, c, g, or t
ncacctggctgccctgccccaggtagaaggccttctctgatcacccgtcactgcaaaggcccagctccaccccaggtgcgggggtgcttgggcagacaggactctatcctccaaacgagggctaagtaaaagtcgctcagtcatgtccaacgctttgcgaccccaaggactatacagtctatgaaattctccaggccagaatacttgagtaggtagccgtgcccttctccaggggatcttcccaatccagggatcaaacccaggtctcccacattgcaggtggattctttaccagctgagccaccagggaagcccaaacaagggctaagcggccagttatctctgctagggaaatcctgtgtctgcttcgtgggtgctttagagagcttatctttctgtttgtttgtttatcttcccaatccagggatcgaacccaggtctcccacattgcaggtggattctttacgagctaagccactagggaagcccaaacaagggctaagtggctagttacctctgctagggaaatcctgtgtctgctttgtgggtgctttagagagcttatctttctgtttgtttctcctgatcgaaaccgctttggcccatggacaaaccagcaccagaactgacccagcagcctcaactgagagttgacttgggggttaaaggttacagtttttgagaaaggcagtcaaacattaatgatgggtaaagttctttccctcttgccccatgagctgactgggcgatcctgtttgttctacaacgtggacagtatttgctgagggtaattgaaatccaccgcacaaacaacctccctcatctcctgccgcctctgggccgccgtgtcaggtgagcaccgccaggcgttatcaggcagccggaaacagcctggtcctgtccccgacctgctcttcatcagctcccacactggacagatgctgcgtgttctgcgagacccgctggaccagagactggagtgtctcagatgctaggagcctcatgggtttctagagcttagtgttgttgttgttcagtggccaagccttgccccactgttcgtgatcccatagactgcagcacgccaggcttccctgtccttcactatctcccacagtttgctcaaactcatgtccattgtgttggtgatgccatccaaccatctcatcctttgttgtctccttctcctcctgctctcagtctttcccagcatcagggtcttttccagtgagtcagttcttcacaacaagtggccaaagtattggagtttcagcgtcagtccttccaatgaatatacaggggttgatttccttactgtccaagggactgtcaggagtcttctccaggaccacagcctagagtttatacctcacttgcaaatatgca

SEQ ID NO: 50596 - DNA, 1905 bp, Bovine  19866880658016
  misc_feature (1)..(1): n is a, c, g, or t
nattttcacataaagaataacagaaaaaagtaagaacattattgaacttagttaatttaatttgctgacttgtcctcttggttaaaaggataagacggggaaaagaaggcccaaaattgtaatagaattactgtcacggggacctatagggcttttgtggagaaagatttttttttttttacaacagagatgattaactgctttcataggtttatttcaagcaccaaaagtgatctttctgcccattaaaaagtcaacatagctataatgcttttcagttcctacagacatgccatctaagttgtgagatgttggccctgagaaggagcctaactgattataaacactcatcccaaaagtctttgtgtgaagttgcgccctcacgctgagcagttccacacaggtacctctgcctctggtcaggacaggaccagtgaagtcctgaagaaacaccccctgctacttgtagctccccttttctgttatcccaggctagttttggggttagcacttcttcctgtgttcagagcattttctgatgtgccaggaacagtaacaaagattttaggtgagaaatacacaatatagtacaaggcaataaacagattcaatgcaatgtctataagtggcatttttcacagaactagaacaaaaagttttaaaattcgtatggaagcacaaaggcctcaaatagccagagcaatcctgagaacgaaaaacagataagtggtcaagatggtggagtagaaggacctgaagctcagtttctcccacaaacatatcaaaaatgcatctgcacatggaatgagtcttacagagtgcctgctggatgctggcagacgacttcagagagctgaaaggacaaagagaatcttgggcttcagaaatgagacccgggagaggactggggttggctgtgcagaaacagccggggagtggtgggcatctgctgcgactacagagggtgtacacggaggacggctggccacccttgagaccaggtgccagtgtctggggatgtgcaaggcaaggggcaggacccgccgttttccccatatgcatactcacagagggcaggacacagcctgcacaggatccaggagccgccatgagccaccactgctgcctgcccagacaccaggagggtcacagttgctgccgtctccttctcggactccaggtgtggtcgcaagacaccatcatgtgagccaccacccgcccagatgccagaaacagccacaaaccaccatcgctgctcccctgggactccaagagtggtctcgagctgcctccacacccaccacgtgctctgggggtatgcccaaaccacccctgccaccagaaactccaggagcaggccagccactgcatctgtacacacccatcaaggggacatgaccggcacacactgaggagaggcggcaggcattcatgctaaagacagccctcgcaccaaatatattaaaccttcacaagtgacacagggatgccccttcatataaatagccccccaagaccacagtttctcctaaactcagaatgagagaaatagaagtaaaataaagcagaggaaccgtttcccgttaaaaggccaagcgaattcccctgaaagaacaaacagtgaaagacctcttcagtcttatagacaccagttttaaaaaggagatgatgaaaatattgaaggaattaagaaaggctatggacagaaatgcagagtaaaaatgaactagaaatataaagaaaaaccaagaaaaataagaaagctcatttgcagagacaaaagctgagctgaaggcaatgaatagcagaatgaataatgcagaagaatgaataaatggcctggaagaatgaataatggaaatcacccagtcaagacagcagagagccaagttggggggagggggg

SEQ ID NO: 50597 - DNA, 1257 bp, Bovine  19866880698503
  misc_feature (1)..(1): n is a, c, g, or t
naatatgattgcagagttcaggctggaagggcaggccggtcaatggctgcagcaaagagaggggtggccctggaccccagggctgccccgagactctgttcggcagttcctgagactgcagactgggggtacctggggcagcaagagagaggagtgatggaagctactgtgattatgaaatcagagcgctttcctgacttttccgtctcttgttcacctttaggcagaaaaactgaaccggggtccggctcactcctgtgtctgagcctggcttctcagaggaagacaggacaggatgttttcctctcattttcactggaagtgtgaggagtgaggatgcccctcctgagcatgtcctgaggagagtttaagttcctagtttaggttctaaaactgcaatctgagcccattagagagagcctgggctgctgactcgcacgggaaaacagtgcattagcctatttccttcccgtaaagacctgtgaaagccagtgtgatttttgcagaatgaggttattgcagccagtaatcagctcgggcagcaccagcaggcctgaaatcaagcagatggggtcaaggcaggtctgtgtgccagaaagggggagcagggaatgaggctgtctgcctggtgtgggatgtgagcgaatttatctgcatagtcacagttacccgagggcgtcgggatcagccccattttacagacagggaagctgaggctcaaccctcttggattctggtccctggcactgggagtggagcagcctgagggaggaaaagcctcccaaacgagatggcccaggctggaatccctcctccacacccactggccaggtgatctggggttgcatgttcttgatttgtgggaacctcagtttcctcaggggcagaagggaagagagaatggacgttgacagtggagactggagtgcgagtttgaatggggtgtggagacaaacgtcctaagtaacgtggttggctgggcacactgtccctcttctgtttgaggccctcttctctgtgtcttcttggccgttctgctgttgcgtgaacatctcacgtgctccgagttctttacagacctggaatatttgttggtgtcccatgtgttagaatcccgaatgcctgaacccttgtctcagctggaagaggggagagatggtgggtgtggccaatgggcggttattgagtgatatccacagagcagcccaccccctccatcccatccctctgggccatcacagagcactagatagctcc

SEQ ID NO: 50598 - DNA, 1239 bp, Bovine  19866880716456
  misc_feature (1)..(1): n is a, c, g, or t
nctgaaaaatacatacaggtgacagcagaaccccatctggggttttgtaaagcaaatacagcacctgagctgatgaggcccaaaaggaaaacagtcctgggaatattcagatttccaggcccatcagaggttcaaaaaaaaaaaagctcacagtaaaaacagctgggattgtgggtatgtgggtggggggaggattccctttctgtttgttttattagaagtggaaagggggtgcagcagctgacagctgtcccctcaggtcactagaaaccgcacacgcccccccacccgggctcaccggcgtatccggtggaattctaagcaggggtctagcaggccgctaattcctctcgctggggacgctctatacctgggcgaaactgggttggcacacttttctttttaatcctccatttatttctgctgcaaaccctgccagagctatcctgaccagtgatctactgctcattggattgagtcaacatattaaaccttgcattgattgttttactgaagggccttgacaaatagtgcgactggagtcagagcagcccggagccccgcgtctccaccgagtctgtcccgggtcgaccctcggcagaatcccccaactcaagagctgttctcgctcggccccaggtcggggtcttctccccaaaagaacaggttcaatcgcccggtgccccggggctgcagaaagatctaaagggtctggggagttgctcggaggtgtttaatgccccgcaggccgactttgttcaggtaaaaccctttgcaaaccacaacaaaagcgccctgggaagatacaggccggatcagagggagctccccggagccgctgaaaggagaacacagcctcaaacaatgcaggacaaggcgatcttatcaaagaaaagccctttcaatgccttaataacaaccgcgttctgtttgaattaccactactgagcaaatggcgggccggccttcatccccctccccgccaggcgcattaacatcaacacggcggcgggcgcatttgaatgcgcgcggtggccccgaccctgcgcccgccgggaaaggaaaggcagctgacacgtcctgggaacctgcgctaccgcccccagcccgcccgcggtggtggcccctgtgtacagaggggcaaactgaggatcagactagatcaccacgcagatggtgtacgggggccaggtgggagccacaaaggacacctccccgggccggagagccgggcgcagg

SEQ ID NO: 50599 - DNA, 1369 bp, Bovine  19866880741021
  misc_feature (1)..(1): n is a, c, g, or t
natgcctttagtagtctcagacttatgtcttcatctatgagtactgagatgaaagtagatacaaaataagccagaaaaatgaccttttaaacagtatcgtttgaaatgttggcacagatgaaaatggggagcggcttttccacactgagcaggcggccactcacggcactggccacccaagtgacagcccacttggcctgtctcgggcacatgaaactcattttatgactcagtgactgaaaacagagctactggaagccacctgaggcagccggctggctcacagtttgggcagacttcattctttattacagctcacattctgacaactgagaacctggattctgaaaatgtgaccccacgagggttaggggaagacgggttctgagctgagagaaatgtgacaaactcaggggaggaggcatttaaatattaataacaaaaggacaagcctagtgggtttggccctgtgtgtcccagctgcgtcagcaggccctaacagaaacttgacaaaaccaaaggggtttctttccaagacctaaaaaaaaggaagctgttcgacttaacaccaaattcaaaatctacaccaggctgccaggccaacagatgacggtcagtgtgactttgtttctctgctccttcagcatggggaccagtgccgagtggctcatgcccacggttgacaggccgttcacagccacgatcatgtctccacatctggacaacaacagacagaaagagtcagtgttttcacggtatcagaaaatgttgtcctgagatttgtttggcacacttacccattaactgtcgatgatcaggctatatgactttctttgagaaatatctgggtgatttttaagcctatgttggctttcccttgtcaacacccccatgccagcctctcctgtaactggtggatgatttcaaaggaaagcagagtaattttcacagaagcttaagcaatgtatagttaagagaatacatctgctgcctcctttaaaaatatcacatgatacatttggagggggctgctactttcattcattttttacagcccattcattcgaggcttcaattaaatgagacccacacctctttcagccaaggatgcttactgtccttcggctgaattatcacaaatggatggtgaatctgaaggcctttctatcttttataatttttagtctttattttgaatatgaatatgttactttcttgtgatctagttcaacttcttttaggaagtggaagttaattagtctaaaattcacatgagacccagactggttgaacccttggctgagagaacggttatttcatccccgcctcccactcttttctctgaagtgatttttccatctctaccagg

SEQ ID NO: 50600 - DNA, 743 bp, Bovine  19866880750244
  misc_feature (1)..(1): n is a, c, g, or t
ncagaacttgataacactttgctaggtcaatgttcccattccctgtataactcagcaattctatcagtaagtaccctacaactgcttctgtacatgaacacaaggagacatcccataaggacattcatagcaggatgaaaatggtgtttccaccttcttttctgcaagcattgaatagatgcagagtctatctctgtggatgaagtgacctagaattttagttatatgaataactcattagggaactgcttaaaaataaacagaagattttcatagaactacacattccttttttactctgggtaattttaacatggcatcagactggcaggtcacctctaataaaatataaactgaaaacagatttttttccttcattgtctagactgtttaattttgttctcctttgctattttgtctagtttcaaaaggagcagcttcatgtgaaatttgtgggaaggctgctattcagagtttaatgccattatgtagtagccctgtgaaaatccagcaggaagaatgtagatacttctagaagatgctgaaaactatttgaaaaatgaagaattcatagacataatttctctaaagtcattgagttggagattgaatgaatggataattgaatgaatgggtgattcaaaatacatcattaatgaattggaagtaatcaattatgtcacctggtcctaaaaatattcctctaagggcttccctagtgactcagatggtaaagaatctgc

SEQ ID NO: 50601 - DNA, 765 bp, Bovine  19866880792296
  misc_feature (1)..(1): n is a, c, g, or t
nctgtgttgagagcacatccctcccaatccaagggtcacaccagaaaatccagggtcaaccagatggcctgaaatactcagatatgagcaagagcagccatgacgtacagagaagtcatcagaagcccctaactggacccatgtccctggatttctaagacacctgcagccaggagctaacccctgtgacctctgagctccaccaggacccagggacgcaagccagggttcagtgacctcccagagctgagcccatgggcttcagccggatgagggccctccccacccccgtgggaacccctgcttggggagcagcttcaggaggagcccagtcagctcttcctgcagccccggggctctggcagcaagagaacgataaacagggctggcgcagctggtgcagggactttgtgtcaggtccctgggaaaagaggactggcctcagcatagcagggtgatctgtcatcattttctgggggctaattttaagccggaaaccagaactttgccaattttgccctctcctctgaggacagcagacagctgacaaaggtttcactttgggcaaaatggtccgacatgcccgtgatctagatttcccggcctcaaaaataagatcaaatgatttgtttgaaactgggccaccacaacacggcgagaggtgctggacgagccaggggctggggaactggtggtgtcctgggagcctgacagatcacccagcttgtcctctgccttcagacaggcacctgctcatggagtctg

SEQ ID NO: 50602 - DNA, 1669 bp, Bovine  19866880988770
  misc_feature (1)..(1): n is a, c, g, or t
ntgtgggctgcacattaaaaagtgttattcgctttgaagtttttgtctaatggctctaaactgaaagaaaatgttttcctattacttaattcaatcatagcggagagacttggtaaaaagcccacggattctgccccaaagtgtgacagagttctctttgtgtttgcttatcctctgctgtcacacactttaattcgcctctctttatctggcattcaaaactttcttcaatgacattcaataaggtccagaggctggagggaaaaaaaaaaaaactggttattcccccccacacccccagatattctttcccagtagctttggccttgctcacattcaggggctcttaaccccttcctccctgggcgtgggctgcagtccctggagagagctcctcactgaccctttgcgggctcccagctgcccctttcaggcttccgggtcctacctgcaccctgcacctctcccacccacctctgcccagaagagatgccctctcccagctctagtacccttctgggcccagtcttcgaggtcctggccagcccagattttccagggggcaattagaactggcattaagctgaactgatgcaccctggcttgtccgccaacacctccccctgccccccacatagtaggagccttggggaagagaccttggagttgagggacgccgctggcaccccaggcgggatcgatccatcaaggaagctccgagtccttactcttcctgataggggacaggccctccatctcgattatttctcccctgcccctctcttttatggaatctgttatttctcctcaaataaactctctttgctttttgatcagctatcatctgctgctgtttctaccacagagatgtctcggatgatgaaaagccgtgcgaagacttccattcgggccgtcttatttcgtgcactgattccctgttcagaaagcttccctctccatctctcgcaattcctttcagggctcagagcaggtgactgcagcgactcggttccaataaaatcgaaagtaaacgtcttcctcaaaaagtctcaggctgtacattcgaaaaatgtatgctaatatcccattgtatgggaaaagctcctgcctgaagtagcttggagcccagaggacgattttagaagctgaagctgtgtacacaacgccaggcgtttgcagttgtttaaccattgtgtgaccagaaagaagagactgacgcaggtgacaggagcaggttttggggagagagaaagtctggtagagcatggccagagtcagcagaagctgggcacagagctgcccctggagccgctgctcctctatggctaacttcggggaaggcaacgacttcccagcgcacccgcgggtctgttggggcgcgggcccgtggaaagagcgcccacactctccatttctggtgttgtgtaagatctaggtctttgccggccaggctgtcctcccattccatgtctctgtccgcgattctccgtggctaatttcctctttacagccacgatcatctcccgaacaaagactaaggcgttacaggcagcatcaaagttaagagaatttgagaaacttatagaaaagagggacagcgatgcggctagtgctggatagcaaataccgaacccttctctctgcccagcgacgccacccctgcaggagc

SEQ ID NO: 50603 - DNA, 1772 bp, Bovine  19866881013563
  misc_feature (1)..(1): n is a, c, g, or t
nagagctgcacccttacctgagccccttctctctgccacatacagcctgctgtgtagggcttcccaggaacatattttcatatgacaaacaaaggtcatcactttaggcatgagacatcggtaagggaacaagcggtaactccgcgccaaagccatgtgatagcatttaggtgttgctggcccgggggctgggtattctccatagtgagcgctccctctcaggctttcaattcttgctctgtgctcacgcatcacacagaattagaccaagtcgtacaacatccacagactggattctagcagggtgggttgggagggtggggggggaaagaaaatgggcaaccaccatttattcccataatttgcagctagtgggcaaaaccagatttctgcacccaaatatcagcccttcgtctgaggctttttattttcctagctctccttgagcggaggggggaaaaattatttcttgccctggatgagaaagctcactgttttatccactctcctgcactctgagtgttaaacatctagcccaccgatgacctcccacaatttcagaaactctcccgcaggtaggcaggaccagagactcagtttgcttggggggaacattcttgactcccttgggtggggacgagtctgtgaatgaagccgggcagctgtgggcagctgcagcccctccctgctgttcaggatgaacacgttgtgctcctttgtggcctgatggaactgagcaggcggcggactctggggagaccctacagagaggacactgtgactgatctccctcccagagatgctagcagagctgcagggcaggatttcttggggggtcaaaccaccccttatagaggcttcctttatgtgaggggattgctgacttcgtgccgttattggccccaaaactctccaactccaaactacacagcgaccgagtagtttttcccacagcagtgtagactgccaagctgaatggttttatcagacaacactcttccttgttgctcttccttatttctcctgggaattcaggtcagtgcaggttgaaagcttcctgtgcagggcaagagagggagtttgcaagggcagcgctctttggatcatttccttgatctgaaagggtttcagaaagtaggttcgcttgctaaggtggaacagacagcctgccctacctaggtgtcaagggtcacaggtgccccagttccaggagccacaaatacggggaaaagcagagttcccccccaggctggagcaaacactggggacctttgagcagagaggcagccctgtcaatgatctgtggattcaaggagtgtctcatctccctggaagaatggcccgccccttccggtgcctcctgctccccacccggctcagtgcccctgcccttgccagcagccaggattctggaagcccggaccctctcggaggaatgtggagtggccccgacgctgtcagtaacaaagagacgtccctttgataacctaagtggagcctgccccggagtcttctggacccttttatttacctggtttctttcttcccaccctgtcctgccctaagcagcctactcaagctccatggggtcacagcctcaggcccagccccaccccagccccaaacttccctatgacttggagacccaggtactggtaggctgggccagagccttgaagagtgaaggctggggacaaccattgagggtgattctcagctcaagccaagaggctctaagaaatgcaccaggcaccttggtctctgctggaggc

SEQ ID NO: 50604 - DNA, 1206 bp, Bovine  19866881084764
  misc_feature (1)..(1): n is a, c, g, or t
ntatgttggggacataatgaatttatgaggctggagggacagttgagggagagcttgttgaggggcctggtgtgtaaagagtgttgggcttcagagtaagactggtctcacggttggtagtaggaataccaaattgtcattctgtgtctctcattatcttcttgttcccactgactggtttttcttttcttttcttaaatttatttggctgtgctgactcttagttgcagcatgtgggatctagttccctgaccaggcccaggccccctgtattggaagctcagagtcttaaccagcgggccaccggggaagtcccccctctgacttggtttgcaacccggataattcccggggagaggagtagctgatggtttctctaagccgggtaggaggagatggctgccggtccagtccttgctgcctgctgcctcctgcctccgaagggcagggagagagtgtcttcccggtgctgtccgtgcaggaccagcggaagacaggcgttagcataaaatggagagagagagcacaggccggactcgcattagcagacaatattgctttgattgcagacaacacacatgaattgaattgataaaggaatcttcccatcaaagccagaaatgagtggaaattaactttaacaaagtaagcaactgtgatcgagacagatagaagaaacccaactgcatactttgtacgtgtcagagacgtcgagccgcagagcgttcaggcccatcagcgcgcgggcgtgattaataaacacttaccgggacattcatctgacgggcgactgacaaagccccacaatgatggagagaaggggcattgcctcttgatagatgcatctgaaatgctcatttactcctttttgatggatttaaatgtccaggtactctctctccatataaattgattctgaaatggggctgggttaaaaataagggctagagatgtaactgcgtcaacatggcagaaaatatattccttctagacatccatgcagagatggacacatgctggagttaaccaaggtttgcgagatgctggggtggggagggctgcttattttttaagtgtgaagtgggatagatggacacaaaaatccacctgagagtctgtaaataatgttggaggctgtgacccaaacattagcctttttctttcttgtccgaaacggtttaaacattatctgtggggaaaagatct

SEQ ID NO: 50605 - DNA, 771 bp, Bovine  19866881095565
  misc_feature (1)..(1): n is a, c, g, or t
ntgccacagccacagccacaggacagacagcccagagtctgctttacatcaactgtgcttcccatcgcacccctccaccctgtattttatttctgatgtgatcacaggtgtttttttccgcacacaggcgagtgaggtgcaactgaactgatgcctgagatttctggtaaagaaaaacacaataatttatgaaagggacctgtgtgtttgccccacttctggctggctctggcttgtcgcctgaatgaatggctccctttgaactatgccatgtcttagctcataaacgtaatccagtatcaaaggtccccaggcctggtgatgcaaaactgtttactctcgggtttgatgtatacaaaaagatgccctttatctccctgagctccagggaaagatgcagaatagatctggagaaacaagctgcgggttggcttgaaaaggccgagctgggagcgcggaggcagctctgctggcgaaacccaaacttggacacgcatgggtcactggttaggggtgttgattgtgaagagccagccagtcacgaaatccatctcgacagtgtgtgctgatcgatcgtgaccttgcagcagcaacacttagcaggctgggcgccagagaccgagtttgctcgtttcacttgaacatgacgctccccttgggtcatctaaagccacacacccactgtgtgactgatgtcaagacaccccaaaaaggaagctggagcctgggtttccactgccaaaggggattatagccagtacctccttccag

SEQ ID NO: 50606 - DNA, 1258 bp, Bovine  19866881109510
  misc_feature (1)..(1): n is a, c, g, or t
ngttaagagtggatacaggatttgcatcggacagcctggccccagagcccaccgtcttggtactttatatgaatgtggattctgttccctaaggacctatcaaaaaggtgttcataatagctaccattcactgagtccctgctccatgcaggcgcactgctgagacagaaagcaaattctagaaagcctggactgaactgggcagaggggaagcagagcgagcaaggcagccaggggcctgaatggcgcgtgtttccaacatcagagcacctttcaacagtgctgggtagcataattttcctctctttccactgatgtattttgaaattgtgattgatagatgcattctttttgaagttcagtaatccacgattctttcttgtacttctgtctaaattattctcttaaattgcttcatctggactctccctttgttttatgttgagaatactgatatcatacaaatcttattcatcaaatgcttagattaattctggaaagtacttactcttgtacttgtcttactgactcatatccaaactcatcacgagacaaaagaacacgaagtataataaaaatacagtaatttctcagctattaacctgcagatattatacatgacttaagctacaaataaagtcaaataaaagattcttcgatgtcacttaataaactaacatttaaaaatcatccccttttagactaataaccttgggaaaattcaatactcaatatactcaataaacgattgatgggcatgtgaaaataaccattcttttttaattctcctttagctattctttaacaggagaaaactcttctccatttgcattttgaacaattagtaaggtgaactttcagtccaaattaagctatctttccccatgaaattctgtcatacatttttatgctcctctgcttcttgaataatcgatctcaccatctttttaattgagagccacatatgaaagtgtgactcatgagtataaatcctacacattgtaactttgaaccaatattgcaaattagattctctgagccatttttttttcatgctgatgcactgtaatgatacaaataatatcagctgcaggatataaaagctatttttcatagctaaattagttatagctttgaactacccaactagtacttgaatatgggagcagtagagtttctatagtatcgtgcagtactgtaagaacaaatggtgaagcataaaaaccactccttgtgttcagtcactcagttgtgtccg

SEQ ID NO: 50607 - DNA, 1609 bp, Bovine  19866881139274
  misc_feature (1)..(1): n is a, c, g, or t
natttctttgaggattgactggctggatctccttgcagtccaagggactctcaagaggcttctctaacaccacagtgcaaaagcatcaattctttggcactcagctttctttatggtgcaactctcacatccatacatgactcttggaaaaaccatagctttgactagacagaccttagcatgaaaaaaaaagtgtgcactgtttactctggacaagagaaaggccactgcaattccaggtgggtttctttttccatcctgggcaggtatgtgctaattcctagcctgagtgccttgacccaccccaggttaaaacgcccatgtgagtacagtgagaacatcagcatgtttggtgagaaacaggctttatattaaagctgcatctttttttaaaaaaagaaacctgaccaaaaagaaagattgactttctcaggatgctttcttttcaagatgagggggatgctccttgctgtgtctatgcagagctcaccccaggctagtacggttctaccggagatgccaaggaaagaagatgcactgagtttttaaaatgagatgcaggacacatctgtcaaacccacagtccccaaaatgatgactttctcgctgaaatagcaaatcaacatttaaagaacctttcctagttcctagtccctttcataggacaagatgatttcttttctccacggatacaaacagattttaaaatcggcttgttcaataaaatcacccagatgcactcctgagtgtatgtaggcccaggccctgcaaaccctggagaggaatgacagataatgtactaataatgtgatgtatcgggcgggggggcgattcataaaatatttatcctaaagcagaaaatgtgtctgtctgccttgttcatttatcaaataatagtttaggggaattaggtaccagctgaatcccttagtcagtgtggttggtctcacccagagtccattagaccaggttatgtatctgctgaggacgaggcatcctgtcagcagtggtgcataatggatcatgaaagataaatgggattaggcaattgaataattagaggagcgcccaccagcacggttctaagtaaagggccgcagggatttccattagaaacctccatttcactggttagaaatccatctgggaaaatttggccaatgctgaaagttggagcccagtgcggaactaaggaaaaagaatctcccccagggagtatcctggcacccaaatgccaaagtaggggtgatctaggagacaagatgttggcgagccttgagccttgcccccttcctccacctgagtaggtctcccaagcacctgatttgacggaattgagcatttccctagagaaggggaggtctgatctgctcctctgtcctcaggcttggagcccttggccatgccttagggaagggctgtgctgtgaaggctgtagcctgggggttgtgcaatagacaacttatacaaccgtattctgtcaccctccaagggcgagacctccaacactgaacgtggtgcctggcacataaaggctgctcaaaaatatttaatgagtgggcctcccttggtggtccagtgggttaagaatccacctgctggtgccaag

SEQ ID NO: 50608 - DNA, 2298 bp, Bovine  19866881334542
  misc_feature (1)..(1): n is a, c, g, or t
natttgctgaatatgctttggggggttttctcagtaaatccctatagatagattttattgtattttacccttttgtctgtttttttgtgtgtgtgtttgaaatttctcccttattcattgaccagtaactttctgtcacccatctttgacttttctccttacatctgcatttaagctgtcatttacttctgctgttccctcctctcagtatctgacagccaaagccttcatgtgcttttatccctttgtgtttgcattatgacataacctgtgcaaagtggcctggctccccaattcttgtgtgtaaaatttgcaacattttttgagacgggtcagtgctcatttttgggatcctttctttatctgagtaccgtgttaaaactttttgcagatgtggcctattcaggagcaggctgtggctgcacgcagagatggggaaaagaagaaaaggcctccccattttgcaattgccatagtaactcagacatcgccagtgtgtctgctggtccggcggccgcagcctgcgaggttgatgtcctgtgcaatcaagccctctaccggagaccccggctcgtgtgacacagggctacacagaggacactgtgcttgttaggcctgaaattaagcatttcactttaaaataatacccatttgtatccattttgttcaacataacaacagctgctgtccctggaatgacagacttgcctttttaaccaaagcttcatatgacatttatgaatgaggctggttccattcacttgcagtttgaattcacagtagttatttttgctgttttttttttccttccccagcatatgggtgaaattcaacgtgattcaagtaattatatacacagttcatggggaggaaaaagcctgctttgtttgtatcatctcttttaaactagttagtgggctttagcttttttttttctttaagaaggcaaaatatagaaggtgaattgatggtaactttaaaatgatgattgcttaaaaatagtaaacgataaagaaagaagaggcaatgtggtcactacgttttgtttattcgtttttggataaacaactaaacacatcaatccaagttcctcagtgaaaaggggcagagaaatcctggacagaacccgccctccggagtcattacaaaaccacagctcccaactcccgtcttgcctgccaagtgcccagggcccagaaaacggacaagacaaaacgacagagtgttacccaggtgaacattcctgacttatcacaaaagaccaagtagaaattcttccagaatcttctgtagtttcacaatatttctaatattaagaaaaataatcagtgttgccatcaggttcagcaataaatgcagcataatggagatgaacaacagctggataggtagctcttctgctcttcgtccttctcttctttccctttctccttcttcctccccttctttaccaccagcgtcttcaccatgatcattgctatcttcaccatcatcctcaccattctcaccgtcatcaccatcaccctcaccatcagattaacacagccctggcagaaggcaccacttttcatatcgtatcatcaaaaggcttcactcccaactcgaggattgaagaagcaaaaagaaatcaatttgggcctaatcctcactctttaaaccattcggctcacgataaaaaacagcgctgtgaactccacatcacttaacgatgctccccaacctgaaaagaagaagaatccaagaggatggttttcataataaggaagttttcatttctctcaacatggaaaaacatttagaaaatgaaaatgattgcctctggccacaaagttttggatgagctatcctgcttcctgctctgtagccctaatttatagaaaataggattgaaaagtagcttttataggagcaatttcaacagaaagtatctttcttcaagacttacagttttttgtttcccagatctttttaaaaaataattttatttatttatttttggctgtgctagctctttgttgctgagaggacttttctctagtttcagcaagtaggggctactctctaattgtgatgtgcaggcttctcattgcgggggcttctcctgttgtggagcaggggctccagcgtacactggctttaacagttgcagcacatgggctccaggacgcaggctcagtagttgtggcacatgggcttagttgctctctggcatgtgggatcttcccaagtcagggattgaacccatgtctcctgcattggcaggcagattctttaccactgaaccatcagggaagccct

SEQ ID NO: 50609 - DNA, 830 bp, Bovine  19866881367470
  misc_feature (1)..(1): n is a, c, g, or t
ncttaaagttctgctaaagctttgtgacctggactgcctcctctttatgtgggtcaaaatgcaaggcaaagccattgtgtcaaacggccttcattaaattcattgatttgacctgtattttaaagaccaaaagtcaaatggaatgggaagttaaagttcccatacaaaaatcttctcctgggcacttgtcggcttccttgaactctctggtgtggaggcaaaggacattggcgaggctctttggagtctagctcgcagctacacaagttttttggcgaaaagttggagtttgtgttgcattttatgtaagaacaaaacaaacgctaaggttgaaggaagctattgtcttgaacttgattttcttcccaaagaggtactgatagtttgtctgccttatacagcatccttgcgagggtctgttctgtgttgctctgcacagaggtctctgttcctgctcagaactctctgaatgaattgtcattcttttcatcaatatgcactttttggacttaaaatgaggttaaattttctggacgttttgaggcacgtcagcattcaaagccctatcttttccttgtgtgtgtttttatggctaaaatggccacaaacagtgctcgttgaaaacagggggtggggttctggtggagggagtgggaaacaagggaagaggaattttcaataaaaaaacagaaaagggcccttcatctatgagtctacatcagcccgctatttctcctctctctcatttttagccttcatcattctcctttactttccaatttaaaagaatagaaaaactggacttctctggtggtccagtggctaagaat

SEQ ID NO: 50610 - DNA, 1298 bp, Bovine  19866881513788
  misc_feature (1)..(1): n is a, c, g, or t
natgaagacataagtctgagactactaaaggcattttttttaaataatgtaccattattagaatactgcagaataaaagatattatccaatgaaaaaagaatttgggaggtaattatagtttagtgctagagatgataaaagctgcatttacttgacagtctaaaagatttcatttccaaaggaatgttttgttatgtaggaaaattttgaagcagtttttgctaaaaatcattttctagagtttgtattatacttctatcagcaaacttggctgggaatgtttttgtgatttatgcaattagatgataaaaataaaggcatattgctattaaatgcacactcatatatcacagctaagtagaagataggccttttaaattttattctcttgagtgttttagaagcccttaatttcccccattattgctttacttatgttatacacttacttgtttcaggaaaaagtctgaaagatattaatgtctgaaaccacctactccagattttaaaaaaaacttttcaatcagtccttgatcactagactgtctcatgttttctgacatgtttttgaaaactgaccagcccattttgtttatcctttaatcatcacagttgtcccctggaagaacacatggagtgaataagaggaaagtctctaccttatggatattatgcatacttgaaaagtttcatttataaacctagttcagaatctgagctaatttacaagtgccctctgtaataaacggtgttaatgatcagagaatgtattttagaacactacagtatattgtgaagcatgaccatgttactttaaaacctagccattgcatcatttctgtagcgtgtcacagattattccagttagtttttaaattgtttttttaaacatatctctttactaaataagaaatggcaacaatgactgttatgacactctaaggtcaatagttaaccaagatagagtggaatgccccttgcagtgtgttactattctatggtgactggcttctgaagcagtctggtattgttacttgttactctaattgacatggaacaagttttttgttttttttttcccctgttccccaaacagaattttgtagcccattttgcgattttttaaaacattttaaaagaatgtgtcatccttggcgagtggcagtccatcagcaaacatcctgaccaccactttgttataaataaaaggcttacagcggacccaggggcgacttttttccaatattattttactgtggaaatcttgaagtcaacttaagctaatttggttttacta

SEQ ID NO: 50611 - DNA, 3270 bp, Bovine  19866881151372
  misc_feature (1)..(1): n is a, c, g, or t
ncaacttttgtgctgcctagtggggctgtgtccctgcccagctagttggttggcctgaggtgcctcaagagtggcaactgcaggctcttaggccagggcaggactgggtcctggggctaataagctagagggaggagcagcagtatccctgtggtagaaggagctccccaaaatggctgccaccagtgtccatgttttcagagtgagctgcacttgcctcctgcctcttggggagaccctccaagaccagcaggtgggtcttacccaagctcctactcaattatggcttttgccctgggttccagagcttgtgagattctgtgtgagctcttttgtgaagtctctattttccccaatctaatgtcatgtttctgtctcagcttccttgccccctgcccccaaatgtaaagccccttttggctgaactctatatgcttcatctctcttttctaggtcagacttgctttcattatttatacaaaattctgactcagtagtagcattccaggatcctgaaccaaactctaaactctctggaatataacctaggaaaaagaatctatttcattattatgtgagctttaagctcttgcacacttttgctttctcagccaggactagctcatctccacaccatccttttaagtctgagtcagcagtagtgtagaacattaactcattaacaatgaaatcctctttcctaactcttgccaggctaaggttgttttcaattagcaaatttggagagagaggttttttccccccctttattgcacagcccttccttttacagggtaactgggatctctgaactctgccacaaccacacaagcacggaagagagtcctgggcttccacacgaaaatgcagctcagctgacagcttagaagaccctgagcagaggttcctattacaccatgatacacttgtgacctacagaactgtgaatgaataaatgggtattattttaagtcatgaagctgatggtaatttgttaggcagccagaaaaacgaatacattactgaattctgtcccaggatcgtgaagctcctgaaagcatagatcatgtcatcttcatggaaaaggcccacagtccctaatgcaaagtcttgtgtccagtaagtattccagaactgctcactgatgatagatcagctcactagtccaggtgcaattgctcaatctgctcacaagcttagagtatcattgagctgcttctctgatttcctgccactattaaaatactggctggaagacaagggccagagagctaagttgctcagcttcggttctctcttcccctgaaacagataggaagtgtccctcaggcacacacgagtttaataacaatattgtgtggtcttaaatacgacaggctgggcccctctgggatctgggaggtgatgggagtggtttataaaaataaaccacgaggcactttctgccctcattcttgggctgatgagcctgatgatgaacttacactttaaacacgatcatgagaatggaccactcatctttcagttcccattagggtctttgtccagaaaaagtttgtctatgtagagatgctttgcaaaatgtgagaagggtatagcaacccactccagtattcttgcctggagaatctcatggacagaggagcctggtgggctacaatccataggattgcaaagagacaaacactactgaagtgattcattaggcatgcatgcatgcaaaatgcagctctcttcctattcttggcaggaagggcagcacggtgctggaaatggcttggctttcccttccaccttcattgctttctttgcttccttcttccctgccccctatacctaatttcactttttgctattgagctgctttttggggacagtgagagccccagagctgcagcaggcaaaaacaaacaaacaaaaccacaaaaaaacctcagcctctcagagtaagataaatacccttcaattcttatttgagtttctcactgcctagagtgtaaggatagaaaatagaactgtctaagagaagcagagagcaagaccttttccattgtgtttggaaaatactgaaaaagggagcagaaagggggatgaggtgaccctgtttctgtccctcagcagtcagtcaacatttctggagtgctgtgacatttactgtcatttcatgtaatgtcattaaatagggcataaggtggttttagtacatgtgtcccctgtgtgcccagatgtttgctacctgttctggtgctccaaaagaaaaagatgatttgggctatgcccttgaggagctaatagggtttcttgggagcatagaacccatgtatgaaaaacacatgcagaagataaagacagccccaggaccaggccacaaaactggggacagggtgtttgggggctggagtagaagggatgtgacttgaggaagcaccaatgatggttatagagatgtgtgtgaaggatctttgtggaatggggttgggaaagaagttggaaatgcagttgcatagatgcagggagcgacttagcagcagcagggtgaatgaggataaacattctttgtacccagttgtcacagttttcatgttcttttggactgatcttgttgttgttcagttgtgtccaactctgcgaccccatggactacagcacaccaggctttccctgtccatcaccaactcctggagcttgctcaaattcatgtccattgagtcggtgatgccgtccaatcatctcatcctctgttgtccccttctcctcctgccttaaatctttactaggatcagggtcttttccatgagtcggctcttcacatcaggtggctgaagtattggagcttcaacgctaatactttggactgatctctgttccctcaaatgtatatgttgaagccctaactcccaatgtgacactctctggagatagggcatttacagaggtgtgtggctgttaaatcatttcagttgtgtccaactctttgtgaccctatggactttagcctgccaggcctctctatcagtgggatttcccaggcaagaattctggagtgggctgccatttccttgtccaggagatcttcccaacccagggatcaaacctgtatttcccgcgtctcctgcatttaccactagcaccacctgggaagccctctagagaggtaactaaataaataaagtcatgaggtgggacctgaatccaatagtattagtgtgtgtacaacaaacaaacaaacaaacaaacaacagacaccaggaggcatgtgcataaaatgtg

SEQ ID NO: 50612 - DNA, 877 bp, Bovine  19866880372188
  misc_feature (1)..(1): n is a, c, g, or t
ntttgaccccaatctgagacttgaattcccatgttcttcctgtaccctgcacgccttagtgttggtaagtggcacatctcagctaagatgatgaaggataatggaaagagttgcagtataagaaggggtcaagtctctgaaattgcagtcttggcctgaaacaggaagccagcccttggaagggaatctttaattagatgagctcaacttcctctctcaggagtgtctggctggtgctctcactgccagaggaagccccgtgtcagcttgtcctcccaaggtgcagtggcttctccccccaccctcctccccattgccagcacgccttttccaaaggtggtttattggagtttgttcccccagggccacttcctgagcagaacacagagacagcagtgagatgcttatgtggtagttttcttcctcgggcaaacgttagaaggggtgggcagcccgtctgagtaagcaggtctgggtagcctgggacttcaggggccaggatgcttggagctgctaagtcaggctgtccctgcctctgccttgctgaaccctctgtgggaccaaaattggaaatggcctccttgtcgcctccctgcctccttcagcagccctcccctcccctttggtggcatcacactgcatcctggggcccttgaaaggaggaggggctggaggccacggatcatggcaccaagagccaggggtctaagaatcttgtgtcagctgcagcctacgagctgtgcagcctctgggcagttactcaatctctctgaaccttgattttcccatgtggaaaattaagaactgtaagtgctctgggagctagaatttagtatccaaaataataataaaatatcttttttttaaaaaagtcacc

SEQ ID NO: 50613 - DNA, 2554 bp, Bovine  19866880478582
  misc_feature (1)..(1): n is a, c, g, or t
ntaaagttccttcctttctgcgacattcccacttacggcttatattttgatgccacttgctgatcttatcttccacttctgctgcatgaaagatgcagattctttttttttttttttctttttcaaaatgtttatctacagctgtgctgggtctttgttgctgcacttgtgctttctccagctgcagagagcagcggctactgtctagctgtagtgcacggccctagggcacatggctttcagcagtcacagtccctgggctcagtagctgtggctcccgggctctggagcacaggctccgtagctgtggctcaccggcttagttgcactgctattggtggatcttcccagatcagggatcgaacccgtgtcttctgcattgacaggaggataaagaggcacactgttatactgagctactgggagggaaatttctcttatttttaaagacatccctcttactccccaccgcagcttgctttctttttgcaccaagaagcacaacaatgagactcaaatgagtgtttccatagtcctgggcacacttctccatgctcagtttaaggcagattcctagatggattatttctagatcaaggcattgaactgcagcctggccctgggagccagcccgctccctggagtgccatatgggcctgctgtcgaggccatcagcttctacggagcatccttcagggaagggataatctgagtgacgactgtgtagggggatgccagcattttacgactgagaaagcaccttacttccaacgtctctacatagttgctaccccttgaaaggtagcaagatcacatggataataacagggctgctggttaaacagccatctctgggcatagagttctaaaaggcagagtttggctggacccagttctgggactcccactctccctctctgtcttgtacaccaaactgtctgtaattacagaaaagcacatgaggtcctaggtcgtcctctgttccctcagtgagccacatatagcgagaaagcatgaaaagggtttccgcttggagcctggatcatccggaacacccagctgtagactgcccagctgggcttctgggcacctgtgtgtaagtggctgacctggccttaggttgaccattcacttacacaacagcagagtcagggcagagcagacctggggggcagcaggcagggaaactagagaggagtagcttctggttctgtgtgagtcactgactcactgggtggcctgaagcaagcctctctgcgccagtatccttatctgcatctttatctgtatcagcatctttatttcctatctgtaaaacaaagggtttagaatcattgccggccaacctcctctgagctctgacacccatagcacggtgatctatctttagccatctctcactgggcactgtgatcttggccttcaagtctctgggtttccttttccttctccacaaatactgaggcttcccaggtgcctcagtggtggggtatacacctgcagtgcaggaaacacaggagacttgggtttgatccctgggtcgggaagatcccctggaggaggagatggcaacgcattccagttttcttgcctgggaaatccttggcatgttacagtccatgggagtcgcagacattaagacatgattaagcatgcacgcttgcctgactgcttccacaaatacttacggcagtcacaacactggcttctgacctcatgtttggtcttctcccttccctctgctcacagcagaacctccccattctttatttgatattttttaggggctggtaacaaaaaagtcacacaaaacattttttaatattaaaactattttagtctgggtccttcagaaaaacaaaatcaataggagataaatatcaagaaatttaccgtaaggaattggctcacatggttaggaggctgagaagtctaagatctgtggttggcaagctgaagacccaggaaagccagtggtgtaagttgaagtctgaggctgagtccaaaggcaggaggagactgatgacccagcttgattttccacatcctagctcgaagactacttcttccctggtggctcagatgataaaggatctacctgcaatgcaggagacccaggttcaatccctgggttgggtagttcccttggagaagggaatggctgcccactccagtattcttgcctggagaatctcatggacagaggagcctggaggtatgcagtccacagggttgcagagctgacgaaacaactaacacacacacacagcttgaagccaatcagagagaaagatcgaatgatcccttcctcagcctttctgttccatgtcggcctccagtggattggatgatcttacccacagtagggagggccatctgctttgttcagttcatcaattcaaacactaatttcttctggaaggtccttcacagacatacccagaaatcacgttttaaccaaatatctgggtaccctgattctcagtcaacctgataacctaaaattcacggtcacagaaatgtaattgatttgtgcatcttaaaagtccagacg

SEQ ID NO: 50614 - DNA, 1926 bp, Bovine  19866880478900
  misc_feature (1)..(1): n is a, c, g, or t
ntctacagtctgttgctggctctttgatgctgtaaatttgagatgaaacaaagtccactgaattaagaagtggagaataaagaactttgtgatcttgatatcttggttttagatatcttgataactagtttcatgagttctccccaaactgctaacacagcccccaaattataccaacggatgaagtaagagctggttcctaaataatttatgtatgatgttataaggaatcatttggaaactttatgcaaggtgatgcaatgtaccagattaaaatgcctgtaaggtattccaatttttgaaggtgctggcaacagaatattgcccagagtctggtagacagccagattttaaatggaaaacaaagaggttttctatttctctatctctttagatataaatctcttttagttagaatgtaccttatactaaatatagtaccaatcctctatataacctagagggttatataaaaacaaaaagctagttcccagtgttatcttggttttggtggttacgcattcattttttagtcttttcttagaaatctcatttagtttctggttttgaaggaaaggttgtttatggggttatagtttggttgcttatttacagtttaaaaaaacttctccaggagtgtacttcttgttgccagatggaattctgcctgattcatgagctgcctaattaaattaaatctcgagagaaaaaaaaacttctcaaatgaacactatgtatttctttaccctcaccttcttccttaatcagctgaagcactcggcttgatttttattatgactaggttgtgtatgtgcgtctttgttgaaagtagggtgcagagtaattttataaatgagtgtataaatggaaaaataagccgtttttatctaaattacaagtactgtgcgttagtaatgctgcaagtgatactgatttaaattttttaatttcaaaataaacatctcagagctcttgaaaacattaaatgttatgtgttatggaaaataaaggttaaactagctttgttgttattgtttagttgctaaatctttctgactgtttgcaatcccatggactgtagcctgccaagctcctctatccatggaatttctcaggcaagaatcctgaagaaggttgccactaccttctccaggggatcttcctgacccagggattgacccgtgtctcctgcattggcaggcgaattcattaccctgagccaccagggaagcccaacctaaagaggacatggcttgaaactgccatttgctttaaaatttaggcaattttgcatcaaacttcataatattgttactttaacagtgatacatatttccagaagtgtctaccatgtttatcctgtagctttttgcccagtgtcatggagctaacttaagtactatagcttgaaaagcagaaagtactttttctttggtttattcatccagaaagtattcattgaagacctgctttatgccagacactgtgctcatgatagtcataccacagacctccatttgccatgaagtatgatatgtacagaaaggaagcaggatatagtggttaactccaccttaagatcagatagagaatcctaaaatacatgtgtcagagctgaatttggaaggattaaaaagtcttaaagcagtgttaaaatacagttttttaagtaaaatagtatgggtcttatacacatatatagtaagcatgtgtcaaaaatgtaattaactcattgatgaaacaacaaacaatatggtaaagttgattcaaagtcatataagagagacgaaaatcaatgaaagacctgatgaaataagactgcaggggcttccctggaagtggctaagattccgagctcctgatgcagggggcctgggttcaatcccggtcagggaactagatcccacatgccacaattagggtttg

SEQ ID NO: 50615 - DNA, 1270 bp, Bovine  19866880504202
  misc_feature (1)..(1): n is a, c, g, or t
naaaaaatgtcctttagaggattgtgtgtgttagttgctcagttatgtctgactctttgcagccctatggactctagcccaccagactcttgtgtccatggaattctccaggaaagaatactagagtgggtggccattcccttctccagcgaatcttcctgacccagggatcaaacccaggtcttctgcattgtaggcagattctttactgtctgagccaccagggaagtcccatactccttacattagtttattgatttagttcactgtggctgctccatgttttgcctggataggaagcagcacttttctttgaagacaagaagcagactcacagtgggttctcgagtccctcagtgccaaatgtgcttaattcttcagactctgtaagactgctctctcccactgaaatcctgggggttcaacattgtgagttgtagggctgccaggagggtgaactcaaaacatctattcccaaacctcttgcttcttgggattttaccacctctgagcctggggttcttgtgggaacctcctaaattacctccctcctctagactctcctcatcaccactcccatccccaccatctcccctcccaccagagtgagggtaaagttcaaactgcagagcagacaacacacgattctctgagatctggcctccttgagtgctggaagcagggagaccagtgagatggcttctgtatgctgggggagggatgacagtggcccgtaaaaaggcagaggcagctgagatgctgagaaactagctgttaagaaagctcacaggaggtagaatcaacaggaagtaaagacgaatcaacaagaaataaagtaaaatccataggtaggaggataaaatcaacaggaagtaagatagagtccataggaagtccaatcaaaccaacaggaaataaagtggaatcaacagaaagacaatcatatggatgggtttacgtgggggaggagtaacgaagggaaaggaaatggagaggctctcttcctagattgtttcctgggaccagcgaggatgatgttgcctttacctgtgacggaaacacaggaagaggagcaggatgacttagcctgggccccctggaaacagaaccctgagagaaaggttcctagtggggctgtttattggagaacatagtactggagagcgggagggagggcttgaggaaatgaaacaggaagggagaccccaatgccaggaggcctaattaagttggccaccaccctgagtgactggctgcttgatcccatgaa

SEQ ID NO: 50616 - DNA, 995 bp, Bovine  19866880568012
  misc_feature (1)..(1): n is a, c, g, or t
natggactttcagtttccgggatcatatatgagtcttcccagagctgatattttgtggtctgagtgagctgccttcaattggttggatgccattgatgttcataaatataccatcatcttgatagccagcctcaacttataaaataattatgaaacacatcatggacccttatctattccaaaacatttaactgccaaaggtgaatcggacctacaaagagttggttgcagccctgggctcagattggctccattctgcaccacagcactcttaaagtcagctcttttgttagaaatcaaatattgatgtgacaagtgaataattcatgggtgagccttagtgcctgagaagctctgtggaaatccctgagaggtgcttttggtgcactgatgactctgtgggcccagctccctctgccaagttcaaagtgagaggcgctggttccaaacatgggccctgggatcaagctgcctggacctacctgccaggttcatcacttattagcagtcctgaatgtcttccatttgcttctctgaatctttttctactattctccactctgttctgtgttccaagaggctgaactctatgacccgcagcaatgcctcccttgcctctggcttccagttaagttcaggcaatgggaagccccagtggagaatgcaggaactgagaagaggccatccagaaatttattctccctgctccctccctgatggatcctatgtggcccatccaagggccacattccctcttgggtggcttcttcatacatgtctctgtatctgggctcaggtaaccactccctcttgctttttcagacctagcagtggccttatctccctaaattgctagcttcagtgttctgcatgatcatttattgctttctctaaatgctgcctttacatttgtattaagtttaatcttataaaacttgtcattttgaaagccagttgaaagatgatccgataccacaatgtcatgttttaaccaa

SEQ ID NO: 50617 - DNA, 3397 bp, Bovine  19866880611167
  misc_feature (1)..(1): n is a, c, g, or t
nattgagcgcctcctgtatgccggcaggatgctgggtcctgaggatggaggagcaggacagcaggacagcgagcccccccgccttcctggggtttaagtgccggtgggtagatgcacaatgagtcagcaacaagttaaacatacgattccacatgtcaaacatacgcatccacaaatgaaacatacaattccgcacatgccaggagaccagagcacggagcaggccgcacccacgcaggagcccccgtcgtgtttgctgcgttcatcatgccaggttgcaagttgggtcccggtggccgtgagctctgtctgcggcgccctctagtggccacccggatccttcttgtgtctgtgctggactgatgtccctttaacggtgggaccccaaggtggtctggagagtgagatggctccttcaaaactgtcctgagcacaagctgaaatgtctgtcccagccctaccctgacaacactgattcaagtgaagtcctgggtctgcatttgtaacaagagccccaggtgtgcaaagccagctctcaggcatccacagctcaggaaagtgtttagtttaaggcaggatttctcacccttccgaaccctgtgtgtcctattttaataacaagtatttctggcatcgtctttgcaatcttgaaattcatagatagtacaaattacccacatgatttacaaatttaatataatgctttttctatcatcaaaaagagaaataaaagcaaattataagaaaataatatcttaatgctgctgctgctgctgctaagtctcttcagtcttgtctgactctgtgcgaccccatagacggcagcccatcaggctcccccgtccctgtgattctccaggcaagaacactggagtgggttgccatatccttctccaatgcatgaaagtgaagagtgaaagtgaagtcgatcagtcgtgtctgactcttagcgaccccatggactgcagcctaccaggctcctctgtccatggggttttccaggcaagagtactgtaatggggtgccattgccttctccgtaatatcttaataataacctataatggaaaaagactctgaaaaagtaaatgtatatatacagacatctgtatagatgtatacatatttatattgatagaaatttaacaaaatcacattgctgtacacctgaaacattgtaaatcaattattgttgttgttcagccgctcagttactcagttgtagtcaactctttgcgaccccatggactgcagcatgcgggctaccctatcctccactatctcctggagtttgctcaaactcatgtctattaagtcagtgatgccatccaaccatctcatcctctgttgcctccttctcctcctgccctcaatctttcccagcatcagggtcttttccaacgagtcagctcttcacatcaggtggccaaagtactggagcttcagcttcggcatcagtcctcccagtgaatagtcagggttgatttcctattcaactatatgaaaaaataaaataatgcttttcaataaagtaagtgcttctagatggccaaagacacaggcggcgaccagaatacacccgctctcttcagccgcaaagtgccgttcgcgcctgttgtgctacatgcaggggtgaagtggttgtgccgcacagatgcctgtgttcggctttagtaggcaccgactgatggtcttcccaagtggttgtaccagtttacaccccacactggtggtggatgagagcacccatcgcccacaccctcacccagacttgatacttcccatgaaagcagaacaggcttagaggcactttaaaacagacttggtctttctggggtcaatttcttgcactgtgcagaaaacatcaacctctcatgggtggggagccctggaaaccatctcaccctggggttctggcagggctgagggtcctgcagggtggggtagctgagggtttcagcccgggttcccctggggctgttccacaggacctcctggaaggacgccagcagagcctgcgggaacactgcaccttcaaccacgagctgctgaagctgcggcattggatctctgtgatcacacagaagctggaggctcatcgtggggacacgggcccatgggacacccagtcccgggaggctgaggttgaggtaagatgactctcccgacagaggtgcttattctctcccctgcatcccaaaggcaggttcgggggcagagggtggtgaacggtactctcataccagggagcagacaccaccccaggacttaactctgtgtgtgtgtgtgtgtctcctttagagactgctggctgaattcccggagaaggaagcccagctgcttgagatggaagcgcttggccggctggtgatggaggcgtcttctctggagggagctgctctggtccagggggagctggaggagctgaccgagtcatggagggccttgaggcagctggaggagagcctgctgaggtgagagggcctcctgggttggagcctggtctcggaaaaccctccttcccagtagggagagctcagccgtgttcttagaacagatggctggggttctgctgtgtgccaggcgtggtgccaggcgcctccgggcatccccaggcaattctaagtagaggcagtaagagcagggaagcgtcccagcttagcctccagcccctgctggctggggcctcacctgcatcgatagatatatgccccttgatgacagttacatgagtcttgagcagggaactggaaatgcaggtgccctggggagcttctgaccaacctgaaggacaggcatgggcttgttaggaccagaagtcacctccctccccagttctgttacttctcctgtgatctgggaagtccctatcttgtcatcacgttgactgggcggatttgacttctcagcctcatcagaaaccggcagctgcagaggatgacagaagtggattcagggaagaaaatgattttcaccaacaacatcccaaagactgggtttctcatcttccccacggatcttacttcccggcatcgccgtcaggtaagtccatctcatgggcttctgaggagggcccagatccgagtcagttgatggtgggaaggtgtcaccagcaaagccccctccccatctggggccacatgctcagctcaggactgggccctgtcctgtcttgggtgagtctgcccagtggtgacacaagagtgccctgtgccactgggcagagggactctgggaccccagacccagtgtctgcactgaggaaggtcctgggcatctccagggcaggcaggccctcaccctcaaaaaatccgactgcttcccttgcagggaagagagtgtcagagtgtgaagcttcctagcagcactagactgcaaactaaaagtactcaagatag

SEQ ID NO: 50618 - DNA, 1525 bp, Bovine  19866880611636
  misc_feature (1)..(1): n is a, c, g, or t
natattccttatattgtcttataaaagttcttaagttttccttttcgcagttgtctgtaatccacctggaactggtggaatttggtttgatttttttctatatagttacgcaattattccagcactgggaagctgggataaatgggaagcccaagtcccccagtgatgagcagtgtccatatatgtgtggctcttcttctgttctttggacgtattttcctaagggttaactcctaaagctgtacaataattcatgatgtcttataaggcaagttccctttccttatttttccttaataaataatttgcctattattatctctctgcactttgatatacattttagaatcagcctgctgctcctgctgctgctgctaagtcacttcagtcgtgtccgactctgtgcgaccccatggactgcagcctaccaggctcctccatccatgggattttccaggcaagagtgctggagtggggtgccattgccttctccgagaatcagcctgctgggtagcaccaaagaccctgtagaaattttgactgtagtagctctgtatatagatcaccttaggtagaaatcatgttttctagatactgactctcacaatccttgaagatggtgtgtcttccttcttatataggtgcaactttatgtctgtaaacttttctttttaaagaattttacatatttttgttagattgatttctaggtaatttatatttccactactgttgcaaatgctctctttttgagataaacctctttattgagataaaatccacaaaccactgcattcacctcttcaaagtgtacaattcagaattgtgcaaccatcaccaaaatctaagtctagaacatttttatcatgccccaaaaaatgcctttctcattagcagctaactctcactccccttgccccactccagttcctggcaggtaggaatgagtgagggaatgaatgaatgaacttatgcctatgcatctggcttcatgtcagacgttgcctagtccccagctttcctttctgttttattttggttctgttttcccctcccatctctgttattggtctagttttcagctaatctcccaacctctttcattctcctccactccctgaccagacagcttttcccaaggaaaaccgtgttccaatcacttctctcgaaggaaaccctcggtggctcccttgggaacccggctgcactcccaacgccatttctctggggagattcaggctgatgactcaagccccttggaggcagacttttggaatgtagctcttgggagtcggagaaggcctcttctgggctcttggtttgctgcagagacctcagaaagtaaacacagtcgacctgattattctcctccacttcctcctgagtcagagctgtcttgggttaactcggggaagaggctaaattaagccttgaaaccaagcagcctccatgactggtactttgttttgcttgagtgactgcgatgatgggtgttggggttttaagggcagaactaattgtgtct

SEQ ID NO: 50619 - DNA, 1058 bp, Bovine  19866880611918
  misc_feature (1)..(1): n is a, c, g, or t
nccaaagattcctttcagctcaaaacttttaaaagtctgtatgggttgcagatccacagaccgcgtgcatgtgatatgtttcttagtggacccactgttctaaatctgtccctcatcaccttggcctgagatcgatctaagcacctactctgtgcccaccaccaggcttttacatattttattgtactcaaacttcacaatgactctcccgtttttgtgacagaagacacaggctccaagaggttacagactcgcccaagtttgcaccgcacataacgaaattaaaatttagtccttggtgattcttcaagctcttggcagttttagggtggaaattccctgacatagcacgagcagaaaaacactctccaacacggatatcgacacaaagccactgcgggcatggacccaatgtcacgtgtagatccaccgtgcatttccagtgctcagagggttgtaacttgatcctcttcagtgaggacaaccccgcaggcattatcagggctgagcgggtatcagaggcccctgggccagcagtcccttggctgacttccagcccataaattgtcctaaatggcctcctggttttggctgttggtggagggtgggagatggagaggccctgagaggcagtatctttcccatctgttccacattatgatgctgttaaatatttcatgctctccattgtcccaacaaacacaaacagaactaatctctgtgcttaagcttccttgactgacattgctggtgattaaacaacgtacttattttcccataactggggaggactggttcttcaggaggtttggaagggaaataggttctcacccacaaagctgggtgagaattctcctcatgctgacagggtagaaaaaagtgacatctctaaagatgagggtggggatgagacaggctttgcaactgtttctgctttggagatgaaacctagaggaaacgaaaggttttctgggatgtccatttatccatctatccatttatttatccatccaaccagccagccatgtatcattttatcccttgttgctgcaagggag

SEQ ID NO: 50620 - DNA, 1472 bp, Bovine  19866880713971
  misc_feature (1)..(1): n is a, c, g, or t
ntcctatttggccctctggggaagcgttggtcaacccgtgctcgtggtattgcttgcacaatttcccacccagccactccatgtatctgagctgttgaccatcaccaccacccgccccctgccatacccacagtcccatccaggtccttctgtaaaaccagtttccctggctggctggccttgactcccttgaaggggatcagggaaagagcacattggacgcggcgtcaggagaaattgcttccagctcccagcaatggccactaacttgctttgcgactcttggttaactcaagtagcttttctgctcctccattccctcactgtcgagtggggagttcgggagtgaattactctggagactgcccacagcagcgctggcccttttcaaaccatcgaccacgtcctcacaaggaacacgtggagagaacaacgcaccacgcagggctgaggaaccgctggatggagcccacgactcgtcctttacgctgggaccggggacaaggagccgtggaggcacgtgtgcacgcccacacagacacacacgctacacacacatgatagctgcacacacttgcacatatgctcaacatacacctgcaggcagcacacacatgtcacacacgcaccaaacacacacttacgtgcacacatacagacacactcacaccacacccagacatcacaaaccgacacacagacacacagaggcagacacacatcacactcagaggcacaccccacaccatggatgcacagacccacagagacacctgtgacttttcatgggtcattaaacagggagctccccccgcccctgctgctctggggcatatccctggggagccctccttgactcctggcttgattaagtcaggtcttcaagaaaccagaaaattaaatttggggccatttctctgttccggatattgtgcataatttgaggattactctgggcaaggaaaagagaatgaactttctcttttaaaaaactgggcttgaaaaggaaaaccctgttgtgagggttaacaagtgtgctggcgggtgaggtcaggaggggtggggccacagagccatagctgagcaccaaccagatcgcctgctggggtcaggccagtaatgcaggggctataaagaaagagattgcatttaattaaagaaacatcttcttacaatcttcattttgctgaaatgcaagtccaacccagaacaaacacccagaggccaaaacacaaattttgtagttggggttgctagaaaacctcccatgagttaccttttaacacgtgtcagaaccagaattcatccagaagttgggggaagggagggagggagcccttcatttgatgggtcttgcataccataggcggagaaggcaatggcaccccactccagtactcttccctggaaaatcccatgggctgaggagccggaaggccgcagtccatggggttgctgagggtcggacacga

SEQ ID NO: 50621 - DNA, 1715 bp, Bovine  19866880736523
  misc_feature (1)..(1): n is a, c, g, or t
ngcacccccaggacctgcagctgtggagggagctggcccagagactcctggatgtcaccgccagcctgccagacccgccctccatccacaccttcctgccgcagatcgaggtaagcctggttctgtcgggagggatggtgggtgcccccgggggagaccaccagccaaatgtggcatttcagccatccccgcagggaaagaaatatctctcggttctccgggtatctgggtggagctcactgtagcagtctggcaagtcccacgttcacacttgtaattatcagggacaaaagtcaccctcaattcttagagaaaaggcgaagcctggtgcctggtgtggccccaggactctgcccacgccggttctcttcccgaccctgctgcagacagtcctctgctggaagtctgaggatgtcaggccgttatctttactgtgtacccattgggatgcatgtgacaaggggcagaaaacctgactttctggtggttccagagctggcttgatagctcaatggtatgttccagaacccaggctctttccagctctaaactgcatctgccttcatggtcctggggtggctgccagcactgcctgtgtgcatcctcacaggtgtattgggctcatgatatatggctgtttgtcctcgtattttcagttgacacatctgagctttttctcagcatcctgtaaaatggttcaatagcatggctcaataattcactttaaatggatgcagaatattccatttgggggcatgcccttttatttattttttaaagtagccataattcgattgttgaggttgtttgcaattttcactgtcataatgaatgtacactgaatatgtatgtacactgatttttatttccattgctaccattctcctcattttactgatgagggatctgggccaaggagaagtgagagagtgtgttcaaagtcttgctgctcaagagaagcagagctggggccagaatggtgggttatagagtcttggctaacattctcagccctgtttacactttggcttctggaaacagctttgcgaaacaagcagaacgattcttatcatttgactgttgaggagccacttgcttgaggttaacacagccgttaagtgacagggctggctttgacccaggcctgtctaactttccctgctgtgtcaggatattgcctcctgtgcttccaactggggcagaaagcaaactgggaccttcttgaggcaggagagaggtcctgtcgttctagagtgggacccaggactccagggcaggactttcactgagcagtgggttggaacacgtggggccaggactttgacttactcacctttggagtctgtttgctggttgggagtgtgtcttgcggagaaggcaatggcacaccactccagtactcttgcctggaaaatctcatggatggaggagcctggtgggctgcagtccatggggtcgagaagagtcagacacaactgagcgacttcactttcacttttcactttcatgcattggagaaggaaatggcaacccactccagtgttcttgcctggagaatcccagggacgggggagcctggtgggctgctgtctctggggtcgcacggagtcggacacgactgaagcgacttagcagcagcagcagaggaacaggagatcaaattgccaatatctgttggatcattgaaatgcaagagagttccagaaaaacatcta

SEQ ID NO: 50622 - DNA, 847 bp, Bovine  19866880787853
  misc_feature (1)..(1): n is a, c, g, or t
ncaaaatatcattttctaggaaatcagaatctcctttcttttaaatcaccccacgctgaagatgctttttgttaggaagagaatggagcctgttcctgtatttgtttatgtgcttaaatatcttggaaacaagtaattgttacattcatttgctaacggtttgtcctcttcgttggctggctgttgcaaacaaggaatacagtactatttcagtacttgtttttcatgtaaatactagctacgtaatatataatgaactcatttttatcagtccatattaataatataaatagattcaatgaagcagtgaatttaaaaatttgtgccagggaaactagttgataatttgtttccaataaggctagtagcaagataattactacaaagttagtctgagctagtagtaaacccctgatttagcgagctgaatcaaagtctgaagttagatcattttatttcctctattactgtgcaaatctagaatttcctaggtaagagagagcgctggcagcctcaaagtcctataataagctaatgaaatactgcttaggtttctgaaatgcagagatactatatgaagaaatctgaatgtcttaatgatggtgtcacagcagtgaccttaggatttctatttcctaaatgaatcagaaactaagaaagacaattcattgatcaatcatcaatcaaaagcctacatgtgaagcaaaaaaaaataagatacaaaatcaaagatgcattttctgctatgaccatatgcagcagtttcaagctgtatgtcaaccttggggtaccagcagcgagccccctctaacaggaaaaagcttagtcatgactgtccctctctttt

SEQ ID NO: 50623 - DNA, 1441 bp, Bovine  19866880834885
  misc_feature (1)..(1): n is a, c, g, or t
ncaacaagatcgttattagcaccaaagaaaacacaccttgttgtgcaaggggaagacatggcctactacatggccctacatgtcagtagcatttatctagtcataataacatgaaagagagtaaaagagctggcctaaaactgaatgtttgagctttaagccaactttttcactctcactttcatcaagaggctctttagttcttcttccctttctgccacaagggtggtgtctttatacaaggactggagagttttaatgaatttctttgcattctattcctctgctattagacatttacccccaaaatactgttgtgtgtgtgtagcacgacaaacaggttttgtgtacaggaattcatttgaaacttgccttagacctggataattgttctcgggcatttgggctcctaaattctcttttcactctttgttagtaacatctttttgacaaacttgagcacttcgggttcataagtttgttttgttttaccttcataagcattttaaaaaattttaattcagaattataacaaattcagtaagtctaacaaaattaaatattcctgaattatctccaggatatgagtatgtattggacacaaatgtgatttttatgctttttgaaactaaaatgacaataatttcagtgcaaaactccgattaaaaaaataacccatagtttttcacttctgaaagttgttcccctttagccctatgctcctctctgagtgaggactgaactccctggctacacataggcctttaaaatcagacatctgctggacttttgtctattcagaaccttatttcatttcgagggaaagaacccaaatgatatctcctataaggtcatattaaaaattaaaagttaatcataaagcatgctaagacttgagtaaaggtgataaaagaattgaattctgcttagctgtttagtgaaacattttaatgttttgtgttatgtttctttattaacaggtagattccataactcaaactgttactatgttccagagacttctgagaaggtgcctagaccacagaatttcagcagcaaggagccagggctgttgtgtgttgcgcattaggacgatttatctgttggcaggagtctatgtctccctctgataatctctgagctcgcagccagacgaacactgagaaaattttattgttttcctttgaatgatgactaagatatattaccaaggccataactactctttatgttgagtcagaatttcacttcatacttcagcctttgggccttaataattacatgcttcagagttaaatcttgctctcctgggcatccatagctctagcctccttcaccagagtagctagcaaaggactcttgtttctcagagtagggggagtggtttgggaagtgggatgacattaactggttattttccttttgcaggaaaaataatgat

SEQ ID NO: 50624 - DNA, 1616 bp, Bovine  19866880850913
  misc_feature (1)..(1): n is a, c, g, or t
naattgatgcataaattgtcatttaataacttgaccaaggtcatagctagttaagtggagaagacagggtctggacccagggagtctagttctggaccggctgttcttaccactgtgctgtgctgtgtactggacttactgaagagtagttgtgtctggcatgttataagctcgtaaggttgtgatggtgaatcatcttaaattatgagcgtaaatgcttccagtgacaattgatgtttgtaaagatgttatgtttgaagagttatgatcccaagttttgcctaaaacatctgtgcatggaaattattagtaacctggtatttaattaacaagaatactttatatgttaaccaagctgaggagacatactagtacattcctatggaaagtgaaatattttacccttattttaaaaatatttcattagaaggacttttaactttaattttagaaggcaataattctagtaatctcttgtcagtttgttttagataacataaggaagtgtgatagagttcttttataaggatatacctggaaaggactttacacagtttgtgtgttccttctccaaggctgctcttctggtttgtctgcatttatactaaccttctaaagcccacgtcggctgctacctctactttccgctgaattcccttaactagaagatttagcctcttctcttacctgatatgatattttctgttgacactctgtggttgtctattaattcttcttatttatatctcgtttcttccactatcttgtagtctctttgagggcagatttaataattattgtatttttctaccctataaacggagtcagccaactatggcctgcagatcaagtctggtctgttacctgtttttataaataaatttttattgaaatatcacctggtgtacgtattctctcattcattaattctctctggctgcttttgtactagagtgagagagttgagtagttgtgatagagaccatatggcctcaaagcctcaaatatttgttatctgatcctttgcagaaattttgttgacctctgttctacagcattttgaacaataccacccatataaaatatccattaaatacttgagtaaatatgtgaataagtatttggcagatatataccatgtaatgagaacatgtgtctcaacttctttctgtgatttttttcctcccttcttggatattataagggtgatgtttaaatctcaggagtaagttctagaatactgtatccctgggtgataccatgatgctaaatatctcttgggggattaagaacttattagtttgaaatgtgtagttttaaggaatggcttagttgtaaccatgagaagttattgaggatttgtctgtattttctgcagcatctgcttctgagcccatgtattggtcaagcttcatgaccagcagtatgcaattggcaaaagaatgtcttagccagaaactaacagatgaacaaggagaaggatctcagccttttgaaggacttgaaaagtttgctgaaaccatcgaaacaggtttggcattattgagtatttaaaaaaattttagattgtatttaataatttagtaccttgatttagtatgtattgtgtaagaaaa

SEQ ID NO: 50625 - DNA, 1194 bp, Bovine  19866880892042
  misc_feature (1)..(1): n is a, c, g, or t
nattgctgagcagaagaaaaatatgaagttatgctgattaggtctgctaaaaattcttgatcctttcctaatgaggccacccacatcactgtcaaaacctttcacttgtccttttttcagcctccatttccacttcatttcctctttcctttctccatggattctctcctctttttcctgcttctttaacttcctcctctcaactgctttcatgctcgggtctctttcacttcagctatcctccaatctcactgctgtttttctcttcccaactgtcaagagttatctttaatgccattcacagatttcccttcatttctcagcctatttaaactggcttttacctcccagaactggtcctgggaagattatcactgaacttctgagaaccagtgggacgtgtttcttctgcacctcgtcatgatgcttgtctccaagatcagattctgctgatccctggattttgttgaatatcctttcccaaggattccacagcattgaagcttcaggtttatctcatcccactttcatcctttctctggattcctcataggctccctctcttcccattccaaacgtgttatttcttaacattctattctcagcctgtgggtctttgaattttacacacagccttgtctaggagctcttgttcagttgtttttagtcgctctgtgcgaccccatggactgaagtatgccaggctcctctgtcttccactatctccaggagattgctcaaactcatgttcattgagtcagtgatgctatctaaccatcttgccctctgcctccctcttctccttttgccttcaatctgtcccagcatcagagtcttttccaacaagttggctctttgcacctggtagccaaagtttgggggcttcagctttagcatcaatcctttcaatgaatatttgggactgatctcctttacaatggacttgttcagtgccattgtttaagtgaccaactaaatacaactccaaagattgtatcatcaaccagagctttttccagtgagccagacttatatctatctgcatatcagatctttctactttgacacatcattggttcctcaaactcaacttgtcccaaagtgctgtcttttgatcttaaatggtggcatgaccatctacctggttaaacctggaagtcatccttgactcttcctccccttactcatcacatt

SEQ ID NO: 50626 - DNA, 721 bp, Bovine  19866880934515
  misc_feature (1)..(1): n is a, c, g, or t
ntataggactgagggtcttggttggttggctgttgctggccagaggccaccttctgttcccgcctgtttgttggctgaggttgctctcaattccttgccacgtgagccttcccaacatgtccactggcttcatccaagccagcaagggaaaatatactaacaagaaaggtgttaccgtcttctgtaatataatctcagacgtgacatctcatcacctttgccatatcctgatactgagaagcaagtcacgggtcctgcccacgttcaaggactacggatagtagttcacacgtgctggcccctctaagcatttaagccttaactactcaatggtttcctgaatccatgcattaaggattgaaataaaaatatctgatgtaccaagtaagaactcagccaggcgaaagtattagttttgatgtgattaacagtttcaatatgtatgagaatcatatagcacatcccgcttatggctatgagtacataattttccttaatgcctgtcagacaaggaatttagattagttgctattttttaacacaatttcagtaattcttgataatcaatttgtttcagaaagaattcagcattcttgcagttcaatgttctaaaaatatgctctaggaaaaaaattatagcctaatgcagagtgcatgtcttttttttttttttttgctgaataatgctactttgtttctgcagagtcatgtgcgttcccca

SEQ ID NO: 50627 - DNA, 3458 bp, Bovine  19866880948551
  misc_feature (1)..(1): n is a, c, g, or t
nttggcagccggtctgaccctgcctggaagctatgggaaagtctgtctcttctgtggacatcattcagctatttaaatgacttaaatggcaccccactccagtactctttcctggaaaatcccatggatggaggagcctggtaggctgcagtccatggggttgcgaagagtcggacatgactgagcgacttcactttcacttctcaccttcctgcattggagaaggaaatggcaaccactccagtgttcttgcctggagaatcccagggatgggggagcctggtggctgccgtctatggggtcacacagagtcagacacgactgaagtgacttagcagcagcattacacacacacatacacacacactcctgaagtcactgctgagataaacccagccaggagtgcttctccgttgtgtgggttataggaagtctgttttttataaaatcagtgcctgggatctttggtgagtgagaacacttgaagctggaggcacagggtcaagtgtgattaacctggaggagatagctgggacaggagagtgggtgagatcattcaggcatgagggagagagacagaagcgctcaggtcagaacatcccaggaacacctgcgtgtttcctgttaccaccatgcccaccaccaccaccatcactcccgtcatcctcaccagtatccccatcactatcatcagcaccatcaccatcaccgatatcaacacacgtaccatcagcactctcaccgtcactgtcgtcaccatcattatcatcctcctcctcgtgaccatcatcggtaccatcatcatcatcacttgacttggtaccctggaaaatgactctttggttcctcacggagctagtagatatattctataataatagtactagccataagagcatatatactttttaattggtgtgtaattatactttgcatccttgccaaaacctggaaaatagaggtaggtgtttgatccccattttgcagagaaggaagctgaggctcagagaagttactgacttgcccaaaggcacatagctattgtgggacagtgtgcactggagcctagatggccaagttcctgagagctgggcctctgccctgcaccatgctgtcccttgacggtggggcctccactttgagtggacagctgttggccctgcctgcccatgaagctgcaactcagccagtcccttgagaacttgggaaatattctttggctgctttcacggatgttgccgcaaagaagctcattaggtatttggacatgtgagggtgttgatgatgaagatggtgatgaggagcaaggagagggaggaaaagaagaaggaagagggagaggaagatgaagaaagtgatgatggagaacacagtgatgggtggcagcgacggtgctgctggtggtcatggtgatgatggtgatcatcatggtgatgatggtggggatggtggtgactgtgacctagatagtggcaataatttttgtgtttttttattgttcttttttcgaacttttgtgttaagagctgacttttccccccttgaatgtgtcttgtgtaacagatgagggggacagcctcctttcaccagcaacccgtttttcctgggaacaggggggctctgcattggggcacatggtgagcccagaggggcactggctatccgaggccaactgggcccctgcagggctgctgtatggtcttgcctgggagggattctgacacagaggtctttagtcataaccccgcagatggtagcttcaccccactggccaaacacacacaccaaagatggtgacgatagtaatgatgcataataatcacggcagcagctttgagtccctactatgtgccaggctcggtttcattgaatcctcactacaactctgtcaggtaggtgccattattcctcctatttatagaggagaaatctgaagtttagtgaggttgaatgacctttttcagattcacacccaggattcttataaaccaggcaaagattaatgtgacaacggacaaagcctgtaactgttttatcctcttcctctcttgccttgagtggtttgagaaaactggagatctttgtttctgggagaacagacattagccccacttcacagatgggaaaactgaggccgggtgcagctggagagtcagcccggagccagtgtggctcctcatgtcgcccgggggccctccccgcccctcgcctcccgttgcggagccccgagcccgctcacgtcttctgctctgattttgcaggccgcgcgctggcgagggctcagctcgctctgccggaaggtatgctgcgtggcgctccccctgcagctgctgctgctgctcttcctgctgctgctcttcctgctcccggtcggggaagagaaccgcagctgcttcctggccaacaacttcgcccgctccctcacgctcatgctccgctacgacgggcccccacccacctagcccccttcgccccaccgggggcactcgggggatgctcttctccaaaattccagttgccccagcctgggggacctggaaacagaggcaggccagagccctctgggctgcatccatgtaaatactatatcgatgttctcagaacaaaattacttttttatacagtgttgtctcagtctatttatactaaatgtgtactgcgtgtgactgaggggataatgcatagccatttcttttatatgctctgtatgtaaatgctcagtatgtatcatttcacatatgacctctatttgtcattgggaaaattcccaacagtgtttttgtccgatgggatcttgtagcattttggccttggtctacagtcagccctggaaagcagggacaagaacgtgtcgcttgtatggccatctcctatccagaaaccaagccccacgtccagatgttcgtgaagaggactctgagccgtcgacacggaagaatggcgttggccctcgctcagagcccactgactcttggtctaggtacagtcaggacagccgtgctcctctaggcttcagagtgactgcagactagacgctgtgggtgagaagcagagaaagggctgattcggggctggcccaggagcagcagtgaaacatggcaagtgagagtgaaattaatggaggaaagaagaactccaaggagcatacccggagctaagcaaagcacagcagaagggggacctcggggagcctgaatagcccagaccagtgagaaaggtcccgtggtctgagtcctcagggaacggttaggtcatgctgcccatgttctctgctctgcttgggaataaaatgaaggagaaggagcttattgtcaagattcccacgtggaaggataagcacaatgtctgtagcacccaagtggctgacagtgccggaaagatgtgttacctccatggcgccgaggctgagtttttcatcatctacagctccggctgaagggacacagggaagcatctga

SEQ ID NO: 50628 - DNA, 1133 bp, Bovine  19866880979112
  misc_feature (1)..(1): n is a, c, g, or t
ntcaacttacagtttacagtccaactttggaagccaactgcttttgtttgatgtgtataattgtaatttcattcagaattcccaagtatgtcagtatcccgtttacaagcattaatttcaagagtgtcagaattcaccaatgtagatggggtttaaaaattaactgataaagacacttaggctcagagagtttaaattacttgccttgactgtatcccatataactgataaaactagggttcatgtctgggtcttctggaggtttgtttcatcatggaactaaaataaataccttagctcttcttttttacttcttggtgatgattatattatttggtttaatcttgaaagttatttttgttagtttactctctgtatgaattgaatacctgccagaataaatttctctaacttaaattttgtttagtaaacaaggaaagggtttttaaaataaataaaatttataagattaacattgtttagttggtatattgtcttaagaaggtatacggctgaaagacattctcttttatttagatcttaatatatccacattatttattttgtggtttttattctccagttgaaaaggttaatttacatctaatttcagctattagtaatttttaatataaataactcccccttctttctttatcttcagagaatttagattcacatcagaagttcctattcgacttgattatcatgggaaacacgtatcaatggatcaggtctggaaattttgcacagatatactctacagaattatctcatttgtttttctagtggactcagtttttaggaaactttttcgatcatagtttatgtgtttgaaatgaagtgtaagattttaaaatttaattctatttttaaagtaaatataatttttacttaaggatccaaattttacttaagtaaattaagtaaaattacttaatttacttaagtaaaatttggatgtcagttgggtcttataaaatacatatatttttttgctatacatattttaggtgttttagcttaattagtgaaatttttttttattttaaagggtacattagctgggattttgattggtctcgcccagttaaactgctctgaactaaagcgaagaggcttttctatcggca

SEQ ID NO: 50629 - DNA, 1716 bp, Bovine  19866881014315
  misc_feature (1)..(1): n is a, c, g, or t
nttcgctaaataagaaaatgtgtattaaggctgggctggagctctcatcactcactggcatcatctgcatttagcaaatgggcctgagctccactcacagccttaatcggagactggggaggaaacaaagcaagcagggtctttgggcagccacctcagagaaatttagcatgaggagtgtttattaaagagcatcttcaggatccactcccatgggagggagggaaaggaagggaaaggggaaggaagcagagggcgaaggagagatgcgatgtgggtccactgagcacccatggccctgaactcagtgctagctgcagctgaagcatccctgggggtttgctaggggcaggctgtccaccaacagcacaccggtatttgggcagcaagtccttccctgaagagggctctgggtgttgcatctcccagcctgagatccctctgcccacagcaataacagtcttccgtttttgtacacagatcacataacatcttggggtgaagcaactgctccagattgttcagggctactctgggtaaaatctgtcactacgtttgcatgatcaaatggactgtccaatatggtagcttctggaacaaagctggagacagattccggttccacgcccagaatgaacataacctgggccatcagaggtgtttctctccaaagctttggtcacccaaggcaagtggggggagggctgtatccgcggaggtcctctcaaaaacgttcttctgtgggctctcttcttggggtggcttccccttgcagatggcaactccaggcttaaacactctacttttcaagagagagggtctctgtccaagtaatccacacacctgttaagtttcattggctctgattggtctggcctgggtcatgtgcccatccctgaaccaatcactatggccagggcagcttgcactgctctgattggccagccaggcaaggcgctaggcccacaggtggagtagaggatgatggagtcagattcagagttacatcgtggttaaaagcgaggagtggtggctcccaaggatatttcccggcacggacacacacgaaaaagaggaaatggttgctgagcagacagatacgaaggggagtgactgagtgattgaacgtttgcccccaaaggcggcctcagaactaggagcgctcccacaccccattacgacccaggtggaacttccagggttagattcaggccctgtcttgccaccgtgactctggtttgtcatcctcacaagcaccagtgttcaccctgggtttctgggagttcatgctttctcctgtgaacccccaaacttgggactacagctcaacatttctgctgtgtcagctagctttgggtgagggcgtaggtcactgcttatgtggactggagccatgctaaagtgctggctttcacccaccagggcaggcatcccatgagcctgtcccatcgggcttgtgattaagggaaccgaacatgcagtcagcagcaaggccatgtcccacactcaagcaagtgtgttcgccttctgagcctcagtttctttgaaagtgaaagtgaagtcgtgtcccactctttgcaaccccatggagaatagcctatcaggcttctctgtccatgggattttccaggcaagagtactggtgtgggttgccatttccttctccagggaatcttcccgacccaggaatcaaacctgggtcaccagcattgcagg

SEQ ID NO: 50630 - DNA, 1829 bp, Bovine  19866881049530
  misc_feature (1)..(1): n is a, c, g, or t
natcagccagcttcctgaataaagtcctattccttgccttaaaaccccctcccttctgtctctcagattcattggcctctcgtgaagcaagcagaacaaggttggcctcagtaacaatcctatccttggcagtagtattgatgaatattttaaaatagttgccagtttggagaatagaaaatggaatagttttaatttgctatcttttaattcctttatttactaatttcccccatctaatgtgacacgccttgacaaatccttgctcttttttctattaactaaatttagcttctctataaagtaggaggttggatcacaaccaatcaacaaaggtaatgtgagagcaaattctagtggaagacgttgtctaccatcactattaattataaagctttaagtattcctaagaacagaaaagcgtcacatcctcatttatgcttaccctccatcccaaccagctgtattttgatcccactctcttcctttttctttaaagccctgaagacaactttgatgaatgccagctgtcaactgctaaaatgataatcaagctcttttgagagaaattgatcttctagcaaaaaggcacttagctccttttgagatgttccaaaatctggatttgattactaaatcttttgcatctcaaaaaaatgtacttgtgtactagcctctttttaaaaagctgtttttttcccttaaggattaccttctgagcaaaaaagtcacattgtcaagatatgagacttttctttataatgaatataattttcaaatgttggttatagtaaaagtgttctgagaaaggctcttgttaaaatagacttggtggagctgaaactttgaaaatcactcctaagtaagagacaatagactattgaagatagaaacaatgaagcatcttgttgtcacagccatttaattcaatttcgcaagtgactgttgagtttctgccatctggaaggcaccagactaagctctgttgttctctatgccgcattccttgattcagcatccaagggccttccatgctcttgcacaggctaccattccagacttttctccagccataccccatatagtacagccacacagaactctgagatgggcctccagggtctccctgtccccattccgctatatttgtgattgaggttttctctgattatcctctttctccctacaatgtacagcttctgagacctcaggccgcagcctaaattccctctctgtataaactgttctctctcctctgtccccagcaaagttactcttccttctctagtttttgtcaattgttctttctcaccatcaacagaggctacaggttcttcaagggaatgagctgtctctccaaatcgtggggaagccgcaggcattgttaacacgagtttgtggatgggcacaggagcagatctgaaaagcagtcagtatttacaaaatgtcttcttcacagagttgaagtgatttaattataacaacagccatgcaggctcgatactgtgttatcccatttttgttgttgtttagaaataaagattgagagaaagagagtaggggaggggaggcagaaacagaaagaaaaagaattaaagaagttcctcccttcaaggggtttacaagctagtgggagaaagagaaactgtgtgcatttattagtaatagggtcttccagggggcgcttggtggtaaagaacccgcccgccaatgcaagagacgtaagagatgcaggttcgatccctgggtcgggaagatcccctggaggtaggcatggcaacccactccagtattcttgcctggggaatcccatggacaggggagcctgg

SEQ ID NO: 50631 - DNA, 1436 bp, Bovine  19866881057702
  misc_feature (1)..(1): n is a, c, g, or t
nggctgacggacgatcccttcccattttaatagcagtctggtggtgatatcatagcaaataaatttaagtgacatgtggagtgcaattgcagaatttaaactctaagcgagcactgtattttttttctgaagatgtgacacatagctgattgacctgcattcctgagtcatatttataggacagaagccttcttggcagcaacgtgaatcagtttgtgatcttcaaggctaataggataagccagcaagaaaagctgggtctgtgcggctctttacatctaaatgggctggagtcattgtaattcttgctcagtaccacggagtccattgccactctgactcagggtgcctactcaaggcatcgttcccattaacgagagttgcctccacaggtgccgggatggccaggacgatgtgagggtcacttgaagggtgttgctgaattgcttcgttcaagcctctccttctgttgatcctgaaatgccattagagtggttcaagtcaatttcattcactgacatccaagctggaagggagcataaagggtatctaaactgacatcttcataggacaaatgggaaacaggcttgcaccaagagtgtctcacccgtgatcacagttaatgacagagcaagaactagaccccagttctagaccctacacccgctgacttttcctggaggtctgactttgccatgtcctgtagtcttctcagttgaataaaaataccatggggtatcaacaggctctgaggtggatgacacagacacatattcattctttccacaaatactttactgcatatctattagatgtgaggcattcttctaagcactgaggacatcatgatggacaagataaaggctttgctttcacgagcttctagggaaagagatgaactgataaactaatgaacaagtaaacagatgacgtcaatgaactagataacaatgaataagaaaaaataaagccatgcaaggacttagagggagagtgatgattctcgggagctattttggagagactgatcgggaaaggtattaaagtttcactgtgaaggtgacctttgagcagagacaaagtaatgaaacaagatgtgtgaagagcacttccggcagagtggagagcaagggcaaaggccttggggtgagaattagctcagtgcattcaaggaacagaaagcagattgatgtaaataaagtcaaaggaataagatgagagtcttagagcaagatagctcaactcaaataacattgagggggaaagggggtaaggaagtggagatagcagaagccgatcctgagtgattttgatatgaatgggaagagggaaaaaagtgggtgtctggcagtggagtctaagagagctcttctgaatttgggagatattccagcatggttgtgtgctgatggaatgtctagcagagaaagaaaaag

SEQ ID NO: 50632 - DNA, 2002 bp, Bovine  19866881140510
  misc_feature (1)..(1): n is a, c, g, or t
ncttatggctctcagaaccttttgttgtgctcccccgccaccctcgacagtttgctttccagccgctgccggagggagccttccaaaggatcggggtcgtctctgctcggagctcgccagtgtccccgagagcactgacaggggctgtcttcagggccctgcaccgcctggccctgtgtccgaccttgcctgccccgcccctcgcttctccccttctagccgcacaccggcttccatgctgttcctgaaaccgtcgcagctgcccgaagccctgtcactctccaggagcccacggggcctggaggctggaggggaagggggctcagcaggtggggagcagccctgatgagctgccatgctccgtgcccccacggctttgaaaccttgtccaggtgacgctgtcatgctcacggggccagtctcagcttccaggccctccgccacatatgcactgttttaggagcagccctttaactcagagcaccggattatagggtgattcatccctgatggggtcatcgaagtgggtctggagttctcttccacaggaatttttctagaaagaccctgattccattccttccactgggtgagatgtttcttcagccacagttaatcctggggtgggggcctgctgtccctccttctctttcttccagaaacatgcccagagcaccagctatgtccaggcaccattgcaggccccccttacacgggagacgcagtggctctggcgtctgcttgctttcatctctgatgctggctcttgctttcatgcagatgcaacagtgaggcctgggctggagtcctctggcctccgtcttccaccgaggaagaggtggaaggtttatcagagtgactttcttgggcctgcgtgaagcaaaccacactcagaaatattgtgtgctgagtaggagggagagatggaccacttcgtaagatttgtctccaagcagagctgagtgcgtgacctggtatagagatggaagatataaagatgatcttagatgggtcaacacaacgttaattcatggtcccttgaagccagtctgcctgtcagtgtatcacttgaaaaaggccatgcaaacctcaggaccttctgggtcctgcccacagtaggtgcttttccttgaatcttgtggaaggaagcctggtcactcttagcatccatcttgcacatccctgcagtggacacatagaccaggccatcactaagagcccatcagggaggatggtgtggggatggagacaggcaggatgctctttgtcctcaggggactcagagacagttggggaaacgtgtgactacctgtagctaattagattggttgatgtgccctgcgaaggcggaggtgggtttagatgggggagggtggggggcgttttgccatgagtcttgagagacaagtagggatttgtcaagcaaagatgaagcccagaggcataccaggcaggagggaagaggagagcaaaggtgcagaggctgggccattgcaggtagatgagcaggtggtgcaaggctgtagcatcgagctgcaggagcacaggtgagtcagttctggccctgcgggagtgtgtctggaagaccgggtctctcaggtgatgggagccatgggaagtgcttgagcgagggtgtggcttttaaccagatagctggtgatcctgtttcacactccctttataaagtctatattaccgtgaaggtgtgtagaacacacaggcgtgtaaaaagaagacattgtctctgcgggatgagcgtgactgtctgtgacctgcaccctgctagtgctctgtgtctgctgagggatagatacagtctggccccactgcccagaccccagctccaccgaccctgccggactccgagggagagcgaggtagccgctggctgcggcgctggctgcccagccatcgtggcctccagccaacaggaaatggagcgggcagtgtcccagcctattcactagccgtggtctccctgcgcctcgcaagcgcattcagg

SEQ ID NO: 50633 - DNA, 1502 bp, Bovine  19866881191048
  misc_feature (1)..(1): n is a, c, g, or t
nctgggattctctagggaagaacactggagtgggttgccatttcctcctccaatactaatgtctatttaactttactaattaaccttgggaaattccccacacagtcctgtggttaggactcagtgatttcatagctaaattcagcctctggtcaggagctaagatcctgcaagtcacacagcacatcctaaataaacaaatagccttcgagcttggtcagaaatctctgacttttctgtttctaaatccattaagagtagttctcccaaagttgcacaggatcatgaagtagtagagcacatggtttaagcaagtaagaatgtcatgtgatacattaaacaagcatgtgagcatctcttttatttcactggattcggtttccctaagatgtgtgtgagtcacatgttctgtgtgtcccctggtggaggctcacttacgttgaaagccgagttgtaactactctcatttcccacacaactgcatcttggctttgagaataatcctggaattaactaatctttatgcttcccttcctaaatccctaaatttgtaccccaaacttgcagtgtttagaagtggaccttaaatagaaataggcaaagcaaaagtagaaataaataaccctaggtaaattcattttctctgacactgtttcatttctggtaaggtaggaaaggttttattgacagttagaaatctttgtgaattagtgaccttgggtgagtcagtcagcctgagtccctgcttctttatctgtaacttggagatttaaaacaaaaactgaaaaaagatttgggggatgttatgtgaataaagtttgcacaaagatctgggtcagttataaaacctggcatgtaggtactcaaatatttatttttttctgtctgattcagttgacatttattgagtaactgtcctgtgtcggaaattagacatcaaaccatgtaaataagacatgatccctgttcccaggaagaccacagataccaggcataagagaggaacaaacaaaatcatagtatgctgtagactggactgagacagagtgtgcacgggttcacagtggtgcagttcatcttccttaggtgtctgcctctgcttttcattagaaacaacagcactgcttctgtttctagcataaacatccatctcctatggcttgagtagatgtcataaaaatttagagtttgtatgaggaattcacaggctttagtgaagtcagcaaatccgatgttgattttgccctacactgtgctggtgaaccagggtataggtcttataatcttgttggaaaaaaagctttagctgtgtttaaaggaaaaaacaaacaggaaaaacacacacacaggatagcattgccttttatctcacagaattgagcagataagtcatgtattagtaacatgaaagtggcatttcagataactaattataaaccagaattaaaactgtaagtaaattttagaattcttattttaaaaaaaagcccaaatcacataaa

SEQ ID NO: 50634 - DNA, 1729 bp, Bovine  19866881292087
  misc_feature (1)..(1): n is a, c, g, or t
ntgttttctaaaaatattaatatatgtcccctaagtcattatatatgacaggacaatttataggctactttgaagttaaaatagtagttacatgctaacaatattacacatagtatacatttcgttatctccttatctattaggactcaacctatggaaagacaggtagctatttgaatagctttagttttttttttttaagcagcagttgaaaatgtagcatccacgctcaggatgggcctcagttatcatttcccacccaacggttagtggcacaggaatcactctcgagtcccttttctctagtccatctactctcaccaccactgccatctccgctacgccactgacagtaagaactatttttatgatcataatggtgtcagtggagaatgatggcaaaatgtggtcaaagaaacctgagaagagcacctcagggagctaaagataacttagacaactccaaacaaatagatcttacatctatatatttcacatgccaaataacctgaatgggagagtctatggtaaacatcttacagtatcgcaagaaatcctcattcattccactcatttacaaatcaaatgtgacttaaaaaaacaaatggagataggtagatagataaatgtaaaattcacatctggttctttttcaaggattattaacaaatttaagagtttacctaaggtgatcatgtgagcaagcttctgcaaatactgctcggaaagacttaaaatcttctgttgaaaattgtgctggatcaatcttttctatacaagtaaagaaagctatcgccattggtgtcaatggattaacattcagtgatgattcaggtggagataaaggatcaatgtgaagcacagagattgaaaacgttcccacagctactctaaaaataagttcaggcctggattcatccactgaaacagacctagaggggagagctgaaatacatgtgttaaaattatatttagaaagttaatacgtaaacaatccattatatcaaagctataaaacatttactcatgtgttagttttaaaactaaacttgagattttagtcttcaaaacatatgatcacacacagtttcagtgatattaaaaaaggaaaataataaactgtaatctttctacatttgatatgcaagatccttgatatgtgaagtacaaaaaaaaccctgctacaatacaaacaaaacttttgaattaataaaactatactgtggaaataagtcagagattaactagaagctgctcatcaaattttcctttaatcctgtgtctatttcaattaaattttgccaaaaggaaacctgaggttctcttttaagggatgtgtaaacagagaaacaaaaattagaccagttgattgagactcctaaattataataataatatgaaacttagggtgtactttttactaaattatttaatacacgaatacaataaataggcaactgttctaaaacatttcatagtgaattgttcaacagtgcttcattttctttctaaactttgttaaaaggtctacaccaaaaaaatatttatgaagaaagagaaaagaatcagtagaatggcatatttttttaataattatttttagattccagtggaaactatcaacaaatgtctttttttcttttttcttacataccagtcttttgtaaagatgctgggtgaaccaggttggagggtaacgctgatcctctgactggctgttccttatgat

SEQ ID NO: 50635 - DNA, 1729 bp, Bovine  19866881341961
  misc_feature (1)..(1): n is a, c, g, or t
ntgattttcagatagtatcttgtaatctctggtgtcatggatacagctatttcttgaaagaaaaaaaaaagagttgtaaattttatttacaattctatttatgttttacttctttctgcaaattgttttaccttcaggcaaatgaagtttgttatggccaaaatttcttgaatagattttaattttttacttaggtcaacattccatattgaaattgattcttattatttaaattgatttgtattagtgcttacacattaagacacacctataaatgcaaagtaaactgggtaaacattatgttgtttatttacatataactgacagaaagattaatggacaaaggtttttatttaaaggaatctactgtaaatcattacgtaagcacataatttgacaaaatgaacaattattcccattttatcttttgcataaacccacatttttaattgactttccttagaataaatcatgttttacaaaacaagactacacaatcaaaaaaggatcccgcaccacttgtgtgccagccactatcaagctgtggttcgatcaacttatacatttaaatgttcttaaagtgtagaccgttggttttttcattactcaactccattttatggcggccaaagtcaaatgtactttgctctatgatgatgatgtatcaatctagagtcaagtttttgagttgcttaccccggctagaaggtgtacgagccgtttctgtctcataaaagctttgctctgaggacacaccggcagagagggagtctttcctcaaataataccggttcaattccatttgaattcgatattcatcttcttgctgcatgggtcggttttttctatctttattagctaatccaattttgcttgaattttctatgtgtatacaaaagaaaagcaaaagagtaattaaatttggagttacttaactaagcattctctcccaacccacttatccaatgccaatggcaactcagtaccagtcagtgcagaaccaccagtatttaatgttattcggagatctaggcaatagctctaaacagctagctaggaatcacaagatcttatctattattaaatatacatgtcattaaaaattttttaagtgtgtgctatttactgagtttaacaattatactttctcagttgtatgaagtactacctccaaccaaggaagtcagtcagtctgaatgctaatctgttgcatcataatgcaatttgaaagaatcaaatttaactactgaggattctaattcacaatacatctttaagttcatacattcctatacaataatataatttcccatttctatgctatatattttaactaaattttttttaaagaactagaagtaacaacaattatacttgcctggcccagcaatagctgctaacatgtccaaaagtaagtgcacctgcctgggtgacaggaacagatgtatagagtctatctgcccatcaatatccagcttcaaaaaaagaaagaaaggaaactactcagaatgaacactctttataaactcatcaccataaatcccagtatttttcagaacaccgagaggaatactaattagttagccttggattccttcacctcagattctctctactaattcacacaatctaaatgaaaagacatataaggtcatcaacttttattttaagagggaaaatcctcctgagaaattccatgtcagaaagaccaatgtcactctttgggtct

SEQ ID NO: 50636 - DNA, 1527 bp, Bovine  19866881761418
  misc_feature (1)..(1): n is a, c, g, or t
nttccctttgacttaatcaatagcttgtaaatgacatgggaagggaattacatccttcatgttataaaggcaggcagtccaccccttggaaaggtgcccaggccccagcccagcagtaggaattagcacttggcatgatgttcccaggggcttgggaaatgcggcaaatgtttccttttcccctcgtgttttttcctcatcctctccccgctctagggcattgccaatgattttcctaagggtgaggagtccctgaagaggctggaggagcaggccgtgggggtcacccagaacacctctcctctgggtgcagagaagatcaccagagacctggaggagatgcgggacgtcctggagaagctgcgtgggctctgggaggaggagcagggaaggttgcgggacctggtcaagtccaagggagccttcgagcagcagagggggcagctggaggccgagctgacagagttcaggaaggaccttcagaggctggcggaggagggcctggggaccatggccaaggccgcgaccgaggatgagctggtggcccgctggagactctacttggtaagcagagtttggcgacaccacggggcgatccaggtgctgtgtgtgcctcaaggcatccccacttggagctcctccatgtagtggaaagatcatgctacgtctcaagcacacttgctctggttttcttgattttggatcatctaagttccgagtatagtaggcaagttgagtgcttgtacccattttccagatgaggaaactgagacctagagatatttttttttccctctcaacacccccaagatgacatagtaaattggtgggtaaataagaggtgtattgactccaagtttgccatttccatccctaatagtgggatatgggggggacactttctgagcacagagcagggactatgacatcaagggaaggctctcagtgtagggaagatgaggtgcggacacagcaggatttctgaagaggccgagcagacgatgcctgtcctggggagggtggagtgggttccaacccaaacacggcatccaatcagagcaccccttcccccctgtgcacaccccaaccctcgtgcacactcgtgagaggtttggcttgaggacagaaatttttcaagtaaggattgccaccactcctttctttccttattacatcagcaggctagctcgtcagttccgttaggagaaatacctaaaagaaaagccctcgggccttacctccactccacactgttctgtttttttctctcccttctaatgttgcttatgcgcagaaatatttgtgtgtagatagaaacaaggtacacacacacaccgtagcgccagtcagccttgcaggagaccagattcacctccagggtcaacttggtgccatggtgggaattgcatcctctgtgggattgtcctcctcggcacagggcaggggtggtgtggtgcagcggtgaagggcgaggacttgtggatcagactgcctgggttcaaatctcagctcctctccttgccaagg

SEQ ID NO: 50637 - DNA, 1921 bp, Bovine  19866880352402
  misc_feature (1)..(1): n is a, c, g, or t
ntacagctctgttagtggaggaaacattcattttaactgcatagtcaattctcaattaacaagggtaatggagtggaaggaagtcagtgataatcaaaaatcatggtgaaaataaaattgcagtcaacagtggattttctgggggctcattaactggtttgtgaattaattgaggttaagccacagtggatcccaggatgtcattgccatggtaattggtcagcagctgctcaccacctgggctccacccaccctgtctgtcccagggaggagaagggtttcctggggactggtcaagcaaagctagctgaccttggccagactagtaccatgaagacacagatttcagtgctgggagttagatgaagactgcttttagggcttgttgccccaccccttgagaagtggttctcaaacttgagcttcatcaggcccacctggagggcttgtgaagccccagattgctgggccccagccctggtttctgattcagtagatgtagagcggagcctaagagtttgcacacctcacaagtgcccgggtgatgtgatacctgccagtccagggacctcacttggagaactgtggctttccagaccattctggttctcccagctgcacattagaaccacttggggagctttataaacctactggtagctgatacaacttatccagttatacgagaggctgtggaggtgggacccaagagcaggtgactttaaagctccgggtgatctgaatgtgcatctagggttgatgaccactactctcgggaatgttctccaacatctcagttatctgcatacaagtctcatggtttttcccctatctttactccctgtacatttaatatttctttaaagttttttatgtaaataaacttattttaaaagaaaattatattcccccttcatgtaggaaaattagtttcacaggccagctgtgcctgttacatgcttgtaatagcaaacacattaaagagtgcttaaatatgtatggcttagaatcatcttgcaccccatcacactttgggagtctctactctagaactatgctttttactcttttttcataaaggtgatggaatacagtatttctgcttttcctcccctcccactggtcaggcaaggttgtgctaactcttggcacacctggtcttttcccctcatagatacaggttggaatgcaagtgagtgtgatttcattacagaacagccttggttgagagataatctttactgttaagaaacgaattcaccagtgggaaaagaatctagataaactgtggtatggccagagaatggagtactacttggtgatgaaaaggaatgaccgatggactcaccccctgggtgactcccagatggtgtgctgcgtgaaagccagactcagagactagacactgcaatttagaacagtagttgcttgtggggaggggtactgggagattgagtaggaaggtgcatgagaggactttgtggggcagtaggatgttctgggtcttgatacggcttggagttacatggttgcatgcatttgtcacagtttgttgaatggtaccctcaagatctgtgcatttcattctatgttcaaaaaatggggaaaagagttaaaccaatagtgaactccagtcagtgatatccttgctgctgttttcagggagaagggtactgctttctgcagcttactttgaaaggcatccaaaagctaagctggattgatgaatggatggatggatagatacatgacaaaacaaacacaataaaatatgaatggtagaatctaggtaggagatatccaggtgttccttttaaaagtctttcaacttggcaggatgtttgaaaatctttcccatgaaagattgaagaaaatttgacatatgcattcaaaatagcaaaccagcacttcccccacatgt

SEQ ID NO: 50638 - DNA, 1088 bp, Bovine  19866880387531
  misc_feature (1)..(1): n is a, c, g, or t
nagacaggagttcaccttccctgcagaaagcttgagtttccccctctttacattggttcctctctgggaaggacatcagcgtcccttgatcgacccaacaagtctctcccttggagaagtgacaccctgctccccaaaatagcatatcctgcctgaaataagcaaacctcccacaatccactgactctcacattcccagggaacccctgtttcattcagtgtgccatcactgtccaatttcacccaatcacattattaatgttgaaggatgttttcattagcatttgaggcttcacgggctcattagatagaaatactcacttgcaggtggcagctgtcagctcctaaggagggtggctgcagttcagcacacttaacacagtgccgtggggtctcgtttctgcagtggcaggtgtgagatgccacgtgctctagtcccacctctggccttcactctgtgggaagaaaggcttcccttggtttagtggacattggagctggagaatttgcaataaaggcagctaaactgattcagttccttgatgcagagtgaaaagcaaagccatccactgagaaggttggtaatgctgtatcaccctacatgcccaggaacacagaggtccttcccatcaggtcaggaggtagggggcttatgtggccctctgagccagtcccttcatcctctagacttcaccacttccatctcaaagatatgggtggcaatccccaccaaacctaaccctatgggaacagagaaaaccatgcgggtgacctgggatcactgatgtcaccaccaacacggatatcttggatctgctactctcggagcagagactccagtaatgtcagcctgcaagtgccagctgcttgctgggcatacattttccacagttcattctcacagagactctgtacagaaggctgcactgtgatccccattacagatgaccactgagacacaaaagggaaataaattttttcagtcaccccacgagggggtggcagagttagggttagaccccaagtctcatttgatgtcaaagccacgcccttaacttcctgctactctgactttgttcgtttgaatc

SEQ ID NO: 50639 - DNA, 1420 bp, Bovine  19866880512889
  misc_feature (1)..(1): n is a, c, g, or t
nattattatgcacagcagtgattttcaaactactgttgtaagttagcaggaccctttcattgaaaatgatcttaatggaaatgtgcctatatataatacagtgaaggtggagctgctttgcttgaagtaaagatgaaatctcctccctcacccccagcccctggtatagcagccctacattacttctggggaagctgaggttctgaagaaaccagtctgaaaaccaccaatgccaacttttcgattcttttgtgtctgtaccctacctcccatttgtggtcttgccctaccccaagcccaggaagtcagcaggcagaaaaccaaagaccagaatatttcccaggtctcctctcatactcctgtttttctcccacactcgtggtggccgtggccatgcctgaccagctgggacataacgggcagctgctaggagagctggacgcaaggctcaccggttttatctgagttgcagaggatggtttccttctcagctctcacgccagggctggggccatgcttcatccacatggtgatggtgaactggtcggtcaggttcttgggcacaactccatcagggatcttggcaccctgcctgccatcgaacttgaagatcatttcactgctatccaccagcagtcctatggtccagttggtggcagcactgggggatggcaagaggtcaatgatgccagaggaagctcctacagggggcggggacagaaagaacaaagggtcattcctcccaggccgggtgtcctcatgttctgttttctgctctcagggccacagtgaactaatatgcgtactcacccagagctaagagctctgtcctgagctgggtgacttggggaaagaagggttaaatgtcattcttgcccaagttgcccatggcggcttggggaggcatcggtaacttacagacaaaagtattgcatgtgggaaaacagtgcaattaaccattatacaagaaaaaaagtgctgaaggaatttagagaaacgagattaccctgggggcttcgaaaagcaggcaaggttcctggagaaggccagggcttgattccaaccgatggattcattcatgcacttatccatgcattaacctgtcagccatttatcgagcacccagcaggtgccaagacccctcctaggtgctggcaaagtaaaagtgaatcagcgcagtccttgatctggaggagcttggtccccacaaattgatggacccctggggtgcagtgagaccagggctgtgatggggaaagttctaggtcctgacctggaagagctcggtccccacaaattgatggatatctggaatgcagtgagaccagggttgtgatagaggacacacagcctgattccaagaggagtgtgaatcactctgcactcatcatacttttttccaatcatttgtttaggccaa

SEQ ID NO: 50640 - DNA, 969 bp, Bovine  19866880575272
  misc_feature (1)..(1): n is a, c, g, or t
nttgtttgggccattatatgcagggtagctgcatggacttggctaccaagaacattataaacttgaaaaaacaatgtaatatctgtctgatgaatttcatggcaattcaactggcatggaaaaagcatctttgagatggttagactcatatgaacacttgcaggcctagggggatagtgacacaagaagaggtggcagggtttggggctctgtcattccctctgatcactcatattctgtgtattgatttggaagaggcttttgaatgtctccactcacttctttggatgaagacccagcctgggaagccatgcattgtttcagaaagctgagatgatgggttattacatctaagagcaccatattgaaccggcaaatgcagataatggagttaccttcaaattgatcattcacagtgaaagactttggatttctttaaatgaagaacagctgtgactttaaagcaccacctgggaaacagagattcccatttccaacctcattctgaagaagttgaagaggcttcaaagcctgtaagtctgtccccttcaccctccttactgcctctggaaagttccaaacagagatgagcggtggtcacatatgttactgcttttaaccacatgcacagccttctgctccacactcccagccccacaacctttaccaacaacaacaaaaatcaacacaggaacatcaatggcaaatcgatgacagatcctgcataaaacagcctgtatctacccaatgcctcttggcctcaaattcaagcctactccttggggaacaaactggcagctaatcagacccgctcctcatctaagtcaggataggaggaacaacattcaaaacaggcaagtgaggatctaatgccctccagaacagaacctaagccacacaatctacactgattttcccagtctccacacgcctccaaagcagatggcatttgttggatagttacatgtg

SEQ ID NO: 50641 - DNA, 1612 bp, Bovine  19866880585640
  misc_feature (1)..(1): n is a, c, g, or t
nactggcccatccgggtaccccatgctggaaagctcctttatgtgtcctcctcttttctcgatcttccctgaggtccccagggtgaaatcatggatctcctgatcagtcttaaagcaggaaatccaggcagccaagggaagcagaagggtggcctctagacagatgatcatttgggcatcatccctgcccccaacacatacacaaacacacacatacatacacacacacatttctgatgactctggttcctcagggagagactaagaatttcacttacagaatagttttccccaagagttatggaaaaccacccaaattccactgtcttccaagtcctaatttacccagagttgaaggtggccttggaggccagggttacaagctgcttaaaataaatgcatctatttccatctctgggcccctctccagggaaccttgtccctcaggaattctcaggactgtttttaactggagaaagctaggagatttgtgagctatgcccagctgaacataggcctctgcttttgttccagcctagggcttcagaattccctccggtgttattaaaaccacttgagttgtaattatagttctttggcccactgaccccttggagtggggggcacagaagcgagaaacagaatgcactctttttagactcttcagctcttttccagtaataactatttaaagccctgtcaagctaaccaattgctgccatcttgtcagaaaggtcttttttcatctttccaattgcaagacaagattggatgtaggtaaaacttagctttaaagtccttaatggctgtttgaaatgacaaagaatataggagcatcaatacaccatgcacagcctgcctctgctctggtttctgtctgggtcagcttttccagcacctttggtattggagaatatatttgttcagatccacagaacctagtagaacaaagtatgaacatcataatagcctggactctaagacaacaaatttgaaaacatctagttgattgtttaaaacaccacccaagtaataactgccatcatttgtccaaagcagctggctttctattatatgcacttggaccacatgatggctgagagtcacgtgggtaccacatttccagggcttccctggaccacgtgtggttcccttcccgactccaccccaagccactgccgtcctctccactagaggaagcttctcacactgctggggagtaagcatgatgctgtcatgaggatagcaagaaatctgctctcatctgctcaaaaagtgattcatgtcacaaatcatgatttttaggggcagactgagttgaatcttgggcaaccaggaagccaccagccaagtgggtccagggtccccttcacacacatcatgcacctggtctgtctttcgctcagttagtaccactcagccttggcacattcaacatgctggtgctagctgggaaaagggcatgcaggtgcaacattccaggtagaaggtgtggctccagggaaggtcaggaactggcaagaggaggcagaggaggacctttgggcggaagagccaatcaaggaaggaaccactgtactgggaggtgggcatgccaagaagagcaggagag

SEQ ID NO: 50642 - DNA, 1697 bp, Bovine  19866880592631
  misc_feature (1)..(1): n is a, c, g, or t
naataagaccacatctcatatggaccacgagtgcaggttcgagagtcaactagaactgagtcttcatctgcaactacctagttgtgaccttgtgcaaatccactttgggcctctatttcttaaccgctctgggcctctatttcttcatccataaaatgggagtaataaaaggacctctcttacaaggctgttgtgagccttagaagttggtacagagaacatgctcagttgcactaagtattactaaggttattattactgtatttacacctctatgaacagagcttaatgtaccaatttgggcagagaggcagaactgcatttctgtggacaaacccagacaagcagggaccacttacccgccatgccctgagcagttacctatgaagcaactcgaatgtgccagtaacagttaccatttccaccaggtggtccaggagcttcccagaagggaagaacatcttcagtcactgcccaggccaaggcacactgccaactgggcctgctgtgcaaccccctcataagcagggggtaggtaggccaggtgacaaaatctctctcagatgccatagggccaaagaatcaagacaaaaatgggtgataatagtcctgagcagaagtgggcaattcttttgaaattacacatattaactaaagaaaatcaaaggtcacattatagatgaataaagaaaaaaaaaacagcagctttgacctcagtttttatgccgagaactttggggctggtgtttcctgtgccaaaaacagaggaggataagctgcctgaccagccaccgccagcagcatcaccagcacagggacctcatgcctgtaccttcagagagcctccagagagcggggccaggcaggggaggactgagttcacagcttttcaggcgagttctgccagacccaagggccataaatcccaggaatggaaaacaggagtaagaaataaaacccttggcttctagtgaacagccagccacttgcttagggccataaataaccacagttaaaccaagcaccccttgcacttctcggcagggaagtgcatgaaaacatctgatgtaaagattttaaatgcttaactgctctctgccaacatctacttgaccatccagagatgcctggtccagatctttgaagtgagcctggcatatctctccctccatggccctgaccactgcctcagggaactctgactggtggagtgctgggtagcatcatgggtgaggaggaggggtcaattagggcctggcagaaggaagtgggtaaccctcagctgtgggtccaggtgccccagtgccaactctggcactcaccattctgcaagccctaaatcagtcggctggtgagtaagtggctgagcccagatccaagcctgtgttgtctctgctccaaagctcaggcacagtttcaacatgcacatcagaggctcccaggagagacatccccagatggtaaccgtgactacgactttggagctgggactacttatcctcttaccaccttctccagcaacttctctggaactcttagatttcaccaccttacagtgagcctggtgcggtaggcgctcagactttggggattatgcattttcatttttatggaatctccgaagtcaaggagtcaaagccatgtttgggatcatctggatggccatctttaaccacaaagtgcccaaagatgcagcc

SEQ ID NO: 50643 - DNA, 506 bp, Bovine  19866880610131
  misc_feature (1)..(1): n is a, c, g, or t
ntctcagtgagacagaagtcatcatggaggtagtgaccaaacattctctactttttatcctctctaccttctaccccagactctgtaccacgctgagcccattgcacagacttgggaaactgacctgggttgtgaccttgatgaaagacgtcagctctgacttgagacttttgctcagacagatgtggtccctgggtccctcagaaggcaagctgcaaggaggatgcttcattttcaggaaacgaccactccctggagtaccccccaggacactggaactttttaattgccctttactaattgaaaaccagtttaataactaaaggacttgagcaagggaacaatggacggtctcacatttggcacatggggaaggaaaaaaagccccagcagtgagggataacagcatctacatgaacaaataaacattttcataatttgcctactaattaaaatagcaaatacaatcaaatccaattaacgtggattggtctatggggctttaa

SEQ ID NO: 50644 - DNA, 1694 bp, Bovine  19866880614426
  misc_feature (1)..(1): n is a, c, g, or t
ncatgtatcccagtattcaaggacagtataacataaaggtatctattaatatatcacattactaagacaatatatttttatgaaacttatcatctcagtacacacttaaaagccattccataaaattccacagcacctactcagggatttttttttttttttacagctcttagtaaattagaactaggacacttatttagcatgatacacaatggaataacagcccttcagaacccttgccacagaagcaagaaaatagaaaagaatgcctactcaccactatcattttctgatggcatcattcaaaaataagaaatatcaccatagaattgagactcagttttcattattgcaggtggtattactatatcactagaaaatccaggagaggcatttggaaaactgttagaactagtaagtttagtagtgcagcagagttttctgtataacagctataatacaatgtaatggaatatatagatagagagagagataaaatatgaggggataaaagatccattcacatgagaaagagctaaggacatctgccctcagggctaaccagaaccaaaaatgtgaagggtactgaaggcagtggctctgtcctctgctgagagacttgacccagtgaaatatgaccaagtgctcatgagaactggcattcattgattggctttttagtgaaaatgccaatgggtatttttctttatttaactcaaaaaagtatgccaaatttctcctggaagactaaccatgtgctcagaaagctctcttaagacattaaaatgtaattttaaaaagagatcagggactaccttgacggttcagtggttaagactctgcacttccaatgcagggggcatgggtgccatccctggttggggatcccgcatgctgtgaggtaccgaaaaaataaaatgaaaataaaaacagattaaatgagtgtgacggggactcaagacagcacaacagaagctaaaatctatgtgaaagaaaatatgctgtaaggaaaaaacaaaaaaatcagtgatgggggtacagattatttagttaaacaggaaatgaggaagtcacctaagtatttgaagaaaaaaatcagtaatttcctaccttatgaaattcagtcagcaaaatgctacagataaaccttagaagtagagaaatccctgtcaatggtgtctcctttgacctgtagctcccccttgaaatacttctaagatggaaagaacgattacaaaaagcctaaatgttgcctgaatcctttaactatgaagaaaataatgaaactaagatctacccagactctgagatggtcgcccagccttcccactgacagatagacctttctgaagtcagctgactggtcagagggaagtcacgaatcataaaaggaattgcatttccaaagaaggccctaccctgcaggttcaggccacctagccttccacttacagagataaaaattttaaatccctggttcttatgagattcaagagcagaatgtgataaagcgtagcctgcttgaggacagggaagggcttttggaatgaaaaatggcatcaccacattcatgctcagtggagacagggagcagggagacaatttctggcaactgaataggaaattaggtcaccagcgcaaggaattcttccagaacacaagaaaacataaggataggaaaattatgagatgag

SEQ ID NO: 50645 - DNA, 855 bp, Bovine  19866880657722
  misc_feature (1)..(1): n is a, c, g, or t
ncagaggtcacctattatgtgttcctatctccaaaggcttatagggaagaaaacagagtgctcatggaagaatgacatggtatttagagaactaaaccagtacttggccaaggctggcctcttggttggcagtgatgtgtgtattaaaagatgttcaacacagttctacagatttggcaaagtccttggaaatactgagaagataaagtaagaacaaacactctgtgggctgttcttcaccggctgcctattttgataaggaaaaatggaaagaaagaggaggctgacgggagatcagggaacctgattatctcttccaatgctaagtttgaaaaatgaactttcatgtgcaacccaaaagattacagaatttgccaaacaaacaaaaaatgtgcttgggaatcagcagcgacaaatgaattcgtctagtgtctgtgtcgtgagaaaatgttggacaaaacaccacagtcctttcctcctagcatcacatgaaaggtgtaacgccaccacgaaggacaattcagcctgcgtgggggaggacagtagcactccgcagggactctatctgcggtcagccatcaaaaaagatcccgactgactacaaacagctctacaagagcacctacaactaggacagccagaatcttttccccgggagcccggctctccggggggctgccccgccttctgcctgcatgcgcctccccttctgctcccaagccccgcccactcccgctgtcatttatttgtggatttccggagtacagttctaaggcgcttcagtcctgtccgattctttgtgaccctgtggactgtaacccgccaggctcctctgtccatggaattctccaggca

SEQ ID NO: 50646 - DNA, 1213 bp, Bovine  19866880661447
  misc_feature (1)..(1): n is a, c, g, or t
ngcctggttggggtgggcagctcttctttggagagcagaggcccgggacactgaaggtcccctgaggacaaggttgccccagctccttaagatctgggctaaggcagattccccctgcccccaccctagggggaatgagttaaattaggctgatgcccgcagcacacatcatccccacgtctggggcaacatctggtgcctctgatcgcagccagattctcgagagtctattttcagcattctcccagagcacctatgagtgaatttgcaaagcagttacctctgtctgcagtgcttccttcactgatgtgaaacagccggtagagctgaaaatctctcctctccacccaccctggcttgcctgtgtgtctggatgactatggtcattctgtcattgcagggaaggcagagaaaaatccggtggctacaaattctgccctttctctgagagacttagtgcactgagccactgtcggctgagcgggttgacaggaattagtccatccgcttagcttcagtcacatgggtcggctcaaaggtatgcgatttggtgtttttttatttttttgacagccaaatgactttatttcagggtgagtgttctcagcatataaatatatgtaaataggccatttcaggtgctgaggacaacacctgatttattttaaaagttgtcttaactctgggtgattgactgattcatggtgtgtgaatggtgtgtaaatcttgatttggtgtattggtcctgattatgttacttagaacagtgggatcttggaaacttctctgagggtcagatttctcatctttacaatgccaatattaaatcctaccttgagacaccgttggaaaataatgtaagccaagaacataaaaaccttggcatagaaggggctggagtatgattatctattgctacctagcaaactgtgtgctgtgcttagtcgctcagttgtgtccaactctttgcaacactgtggactgtagcccgccaggctcctctgtccatggggattctccaggcaagaatactggagtgggttgccttaccctcctccagggtctctttccaacccagggattgaacccaagtctcccgcattgcaggcagatttttcaccctctgagccaccaggaaagcccacctagcaaactacccctaactaatgcatataaagcagaaaccgtttttttaaattgttttgggagtata

SEQ ID NO: 50647 - DNA, 1126 bp, Bovine  19866880710772
  misc_feature (1)..(1): n is a, c, g, or t
nacaatgttttctttccttgtggagctcaccattaacaaaagaagaaataatctaaatagttttttaaaaaatcaccaaacctgtaagggaaatcaatggccaaaactagttattctaatcaagcaggagagtagagttctggaggacctgtctcatttctttggagcatggaatctccagcatggaatggagcttggagataaagactcaaaaaagaacagttgcttcagtgtcctggctaaagaccatatatttgtaatattgaagttcatataataagcaaaattgtttattggggtttccttcatttgcctccattgtattagaatcattattactactgttcactgtatatagtatactgtatactctcttggctttcctagcaaagattctggttctgcctgtgttttcccgtggctcaaaatttgaagcctcacttaagctaaaaaatatctgacttttccaaggaaaatacaaacaaaactctgacttccagttattgtaatcatttctgctcaggacatgcactgattcatcctcccaaccttgaactcgtagatccttatggtatacaagattaactggtttacagttaggtcagccagttatgtattcttcacaggcaagggtttagcttttaatctgatgccagatccatctcatgaagttttaagatggtccagtgatttcactaccttaaagcttgcacagagagggagacatgactaacacagaggggtcagagagatgcagtgttactgtctttaaggataggggaagggggccatgagctaaggaggaatcacctgcttgcatggaagtaggaatagctgaattgggtggcctggactgcagagaagcgaagcactttgtcaggaaatggttacttggttgtaagctcgtctcacagaaggttccattaaccttcaatatatattttttatcaatggtgctgtatagaaggagaagttttgagactactgtaaaaataagaccaataactggaagcaggaggcttaagtccaaaccctgactccagggaacattaattgacaggagctcatcaaatgcctccatacctacactgaaaccaagcaccacacaagggccaacaagttccag

SEQ ID NO: 50648 - DNA, 1642 bp, Bovine  19866880736220
  misc_feature (1)..(1): n is a, c, g, or t
ncagcagcctcaaacaccaggtaaagcaccagggcaaagggatgtcgatgcagacacacagaagatgctggcttgctaaacgacgagtcctgagagttcagggcacagctcggacagtgtctcctggatattcttccctaaacaccatgagaatgatcagtgcactaaactgaaataaccaaatccatggaacttccctggtggtccagtggttaaagaatctgccttccaatgccaggagcgaagtttcaatccctggttggggaacttaaatcccacatgccacaccgtgtggccaaaaataaaaaccaaatctgtagttctgtgctgaatcagacacctacttatactaaactgaggactacattaaggataaccaaccctcagtttatgaaaaatcatacaacgaaaactttaagtaagaatactactaccatattttcccctgtacgttgggctagacttccaatattttatttgtcacagaacataagtattctgcagccatgcactttgagacccaacactttaaaaaagggcctgagtatatagtaagatttatctttattgtggcaatgttccccctcttttgctgtagctagatttttttcctgttatttctcaagtacactaggatgatgctaaaagaaaaaaatcattgggagaaaatattgaacctcatttgtatcaactcataattaaattatatttccagtgtcatgttttaatattaacactggattcaccatcctgacactaataccagaggatgggagagaatttctgtagttatggccttagacactgtgataaatgttttgtagtcattgcctctatatagaaacactccatctccaattaaagatttagtaagctcttcctcaaaatatctgttattgaggcgcacactacggctgtgctgacatttcaacttaattcactctatagtttaactcgcattccattttatatgcctgtttgtatttttttgtacggaggaggaataatggcagaaatttgggcacatattgaagattctagaaatatttccatgtatttattattattgtctattggcatatttgtcactacaaatgaaggcctttctccaagagatgatttaaaattgttcatgtagcaagctcaataggatttagtagctaaatctcatatgctttgagttatgggcattttggtatttgcataaggattcaagatcctggtgttttagagaaatgaggccatttccctttaaggtatggttttgatacacattccataaacactgagatggtgaatgcttggtgcttgcaccctattcccatgtcctgggtatataacagacctcattccctgatacctgaatctgcatccttgtcctcaaagtgctccctgcggccactccaggtcactggtactggctccctagatgaggcctatgggctccccgtgccatggcccaccttttcattgtgccattgctgtgaatgatcaacaaaggaatctttcacagtctctctaccaaaataggaaaataagaagaattccagaggtggttggttcccttatcttgtactttttcagccacctcagtgttgtgcagaggcagtcatccagtgtgttaatgctgtctccttttttc

SEQ ID NO: 50649 - DNA, 1118 bp, Bovine  19866880740468
  misc_feature (1)..(1): n is a, c, g, or t
ntgctcagagctacgaagcatggtgcttcttcaggcgtcaaccccaatgctgtatttgcatcctgtttcagttctgtggacagaatacatttctcttgaccctttggggccgcaggatagattgccagagcctctactggtgacagattcttgtattgaagagaaatataatctgacttttcactgctatctggaaaattcctgttttcagagcacaaaccatttaaccaaacagtaaagagattatggttcactgtctatgctgaattatgcatggttttcagctaggtaaagttcgctgtgttctattttaagaatattttctgcacagagtagaaaaaaaaagtctgtactgtccagaagcaaccatttttgatgtattttacttctactagggaaaagaaataataagtctgaactccatccatttttcttgcatcacgttttgtaattggtaataagagatttctcttcattttagaagtgcaactttcccttcatgttccaagacattaaaaggaaaaaaaatagaagtaaatttggcccaagttttaaaacatctattgcagcatactcattatgacattttttagaattaggctgactaatcttgcttaatacatgagaagtgtttgctgttaagcactgtgccttctcagaacaccatgtcaaaaccattttaatttgagttaggggtgattaaaaaatgtcagctttaaaaggactatttcaagaatgcctcagagccttggattcagctacaaagaaatttgtgatgcattgaaataatagaatgactaaggcaaggacttaaattccagattttaaattcagcattcatggtgtaaagtacaatggatgtgaacctaaaagggaaatcagattccctagctgaattgaagacattcatttaagggggagtgaaatcaaagtaggaaaaaacatctgtactattctcaaaagtactctgcctctcatcattgatcccagcaatctttgtcacatttagattgcaggaatgccttaataattatagtttttgctgccagtctcttcaaatactgactgtaaggatggggtagggtgggtttggtggcatgaaaagcaaaatgagataa

SEQ ID NO: 50650 - DNA, 1510 bp, Bovine  19866880752150
  misc_feature (1)..(1): n is a, c, g, or t
ntttataagaagtccttttttttttctttctgcaaagctgtttttgtagtgcacctcagctggagaaagtacatttctcagtaatccaaaagggggaaaatttgattaaaaactccaccaatgattccacatatattcatgccaaatgagtccaaagccagaggtgactctgagaggaggaagtctgcccaacatccgtgatattaagagagcggaagctaataatgtgcggcactttatctaagacgataccgctgacccactgccaatggctctgaactgctttttcatcagatgatgagattttgggctcctgagaatccaggggtgcggctcaaaggcagctgctggagttaaggtggtccaggccaatggcacagtgcaggctgcctatgtgggaagctggcaggtctgttgctgttgtttagtcactaagttgtgtctgactctttgtggccccacggacaatagcctgtcaggcccctctgtccatgcgattctggagtggattgccattcccttctctgggggatcttcctgacccaggaattgaacccctgtctcctgaactgcaggtggattttttttattgctgaccgacagggggaccccttggcaggtcctaggacagagcacaccagagtcttggtctcagaatcctggacaagggtacaaaatgacccttctttatttttcccccactcccactcaaccccctaatgacctgtcagagcttctttaagccatgactcagggctcctgttccagccacttctctgttgttccaaagtaagtatttctctaaatgccctctactcctcccaggtgttcaggaatctcccttctactgatgggatatctggggcccactgcttgatgtgtccagctgtcatcttccacccggcctcaggcctgagcagtgaaaggtccaggtccttacctggagcccaggctggaggggatgcttggaggacagaggcctggagaagacttgccctctggggtccaccctgagccagcaggtgcctgggccaggtgtgggctcccagaggagattcaatagcatcttagtccagaggtggtccatggctggtggaagagccccatgaaccataatccgatttagtgcaggtactcatgaaatgcaaaggggcccagaaacaaggctaggcagctctgtgtgaatgagccaaggaaagctggggagttttgcagtggcgccagatcatgtaactactgggggtttcctgggtggctcagcagtaaagaatctgcctgcaatgcaagagcaatctctgggttgggaaaatcccctggaagagggcatgacaacccactccagtattcttgcctggagaattccatggacagaggagcctggcaggctacagtccatgaggttgcaaagagttggacacgactgaagtaacagagcacacatgtgtcattcccatttatggggcaccgttgctaatggcttacgcacgttatttcaattagatgctattat

SEQ ID NO: 50651 - DNA, 1401 bp, Bovine  19866880756708
  misc_feature (1)..(1): n is a, c, g, or t
ngacaggatggatagattgggctgaccttaggcatctcccttcttccatgtggaaggctagagcctgctagaattgagtatatcccttcccccagctcatttaggctctgataagaataccccagcaggttaggctctggataactagtttcccctgaggacagggcttctgaagaactgagtgctctggtgtatttcaaaatggttccattcccctcgccttgctggaaggtctacagagattctttcttctccagcatctactgtgagaacctggtggagctctgcaaaagcgggagccacctctatgcccaagtcctccaaggcatttttaactctcaggcttgtccacactgagcctctgtcaattacagttcaggcgtttcttccccacccttggttcctgcagtgatttccactcctctctgttccggtaagtcaggactcccccatatccacctgtctctataatattcggggcagtggcttgcccagtgtccttgcctctcttccagaaaagttattgattcttcagtctgtttagtttttacttcagggccttgtcgattttcactgagtccattaaattgatcctgtctggttccccttcccctcattcctcatcctgtaatttagctttctcttttattcctccatatccctgcatatgctattttcactttacattacttccattttccacatgaaaaatactgttgtttaaattaagattcttttggatacaagcaggaggaaaaaatccactaaagccgacttaagtgtatgaagagaatggagctgaatttccagggtaagctggcttcaggaacaactggattcatggcccagaacttgtcactgagactttgatttctttcatctctctgcttacccctgctttttaatatgcgttgacctaattttcagtgtcattgccctgccaaagtggctgtggtaattcccacctcatattcttgaggtttgagtccagctaggatgagagaatatctcctcctagacatctaagcagttctgattgacttaagtcacatggccagccctgacccaattgctgtgcccagagaagcagaaagcatttattggcttagatcttggttacctatatgcctatcccactgttcccccaggacacaagaaccaagaatagcagagagacatcccctgatgaaaataccagggactattaccctaagtaaggcaaataactattggatgactgaaacacatttatccactacattatttttttttttaagattaagtttaagcatccccatgagactgagatctctgaggtcagggactatatctattttatttttgtaccttaatgccttaaatgtattgagcactcaaaaagcatgtgctgaatgaagaata

SEQ ID NO: 50652 - DNA, 850 bp, Bovine  19866880809260
  misc_feature (1)..(1): n is a, c, g, or t
nagagaatatctccccccaccctctccagaatatgacactgtattttatttttgaccgtctagatatggctgagtatacttcctggttcagacttcatttgatatctcctaactaagattctgagatcacagctaagatgctttcttcaaaaggaggtgaatgcataagtcacttatccatgcagctgatggaaagataaatgtataatgtctaaatgatgccacaaagagcctgtgatgatggagctagaggcactgtggcaggagggggaggttgagggaaaattgtgaacagaggcttcctgcgtcccctgagagctcactgtggaagatgtggctgcctcccctctactcacagtaagccagctgtgcatcacttactcagttctgcagcaggtgtgtgaagacagcgtgaaggcaatgcagaaattagcaacccctggcttagctaaagggacagccagcatcttgtcaaaaggagatttctccaggcattccatccagctgctgcagaccccaaactgagctataactgatgtctggactctgtgagcacggtcaggcccaggagacgtctgccttcaaaggactgtgaaatcataaagtcagctgctacctttaacggagcatctattctctttcaggcaatgagttacgtgattttcatactttatttcaaatattcacaacaaagatagtaatatccctatctgacaggtgaagaacctgagagtcaaaagaactgagtaaattgtcgatcacacagtatgttttagaccttagatatggaaccccaacttgactccactgctcttttcaatgactggtcgttctgtaacagttacaccta

SEQ ID NO: 50653 - DNA, 1849 bp, Bovine  19866880925706
  misc_feature (1)..(1): n is a, c, g, or t
nagccacagccctgggagagaggagatgctaattcctttatcagagggtaaaactgccccagccatgaagataattactcaccttgatgagccattttactaacatatgccaatttatttccctggctgtctcattaaaagtgagtaatggtccttcgccaggcctctgcctccaacgttggtttacagcctgagatatagaggagagcgggcactcccagggattgtgggcccttgacggcaaggtttacaaaagcagttctccagtaatgaagacaggacctcagggcagacacagaagcagctcccattctaatgagctttccagttggcccttatccatcacttctcccagcgaccttcccagctccttgaagaagttcttcacatgcacattagaaaaagtactgctgagttgaggtccactcattcaggccccaggcctttagggagattggctccagggcccttccacctgccagactctttgcttgtgggggaaagaagggaaacagggcatcagggaggatagatgacatggaagtgatttgacctgtctgaacgcaagaatcaacctcttccaaccaggggtccttggcctcccttcccttgaattcctcccctgagatatcatggcggtagcagtgaggcctcgaggagaggcagtgcctgtggatgaagttaacagcttacccgggcatagagtgttccattcatgacacccatgattatcagatacttgcctgggtgactaggacatgaaggttactcactccccatggattttcaagctgaaattatgagcatgtaactaagtttgtggcattgccacctcttgggatattctggatccatttcagatggcttccagtcccctgtatctttctagcacttggctagtctctctcagattgctaggttgtagatcctcactttcgttgaactgatggaaaaactgattcctaaagagtaaagagttggcagagtggggactggagccaggtcccctgaatgtttatcccaaagctttttcaccagtgatattaccactgtcctcagtgatattaccactgtcctcagtgatatttgacaggaatgtatgacaatggtatttaagttcaaaaatacaaagtttcgtcttaatcctctgcccaccactatgagagagagggaaagaaggagatccttgatgaattacttaaacttgatgtcagattttcattgtaaaatgggaattaaatactgtgcctaagggacttccctggtggtctacttattaagaatcagccttccagtgccagagacatggttcaatccctgctcagggaactaagatcccacatattgtggggcagctaatcctgcatagtgcaactggagaagcccacattagccacaaatagagaaaacccgagcaccacagtgaagacccagtgcagctgaaatagacaaataaataaatacttgtgcctgtgtgagagggcggatctcacaaggcagtcctcagactgtcggcacagagcaagcactcaaccaggagtggggatgaccgcacagggaggtgcggggctcaccgggacacccgcctccattcagcaggctttcgtaccctccaagcagtggttggtttcacacagcctctgctgagccctccgcaggctgccctggagagtcagggcccttggctacctgagagtgaggtgtgagcccaagtctgcttatctccaagtatgtgaacatacttcccttccacctgaatagaaaaggaactgctcgcccctggtgggaaactgggcagcatagaaaagtatgaaagaagtcacttttgtaatcccaccaaagagaacta

SEQ ID NO: 50654 - DNA, 927 bp, Bovine  19866880941273
  misc_feature (1)..(1): n is a, c, g, or t
ntccttattaacatgctacagtctgtattatgagtcaagtgcatgactgtgggaaagatttggaaaaccactggtgtgatggcaagggcagagcacaaacagatgactataatgcaatgactgaacaaaatgtaagatgaatgaagtaggatgagcagaccatcaggaatcatggctctcatatccctcctgagtctgattccctattcaagaagtgatttccctgacacgtatgaatgaagagagccaggctaatatcaagggcttgaggagactagggagagataagaataggagattgtggggttatcgtgagcattaaatgaattaatatttgtaaagcagtttggagagtcccaggcacagagtaagggctatctaagtgttcctgttgttatttttctttttggtcatttatgagtctagaaattttgtgtttcatctcagatcctgggaataccacactgacttgtaaatccaagcaccatttccatttaatagtaatagtaataatactaaataatcatcataaaacatttaaaactgattatgtcttagaattaagaagcaaatacattataagagagtctttgtttaataaataatggattgattgcaggggttcttagtctatgctttatgaactgtctgaaaatttatgcaaacatttgcaaaaacatgcatttgtatgttttgctaggttgaaggtctatagctttcatcagatatttaaaaaatatccatgtccccataatagtttaggaaacattgagctctcccaattaaaatagaatttcatttgcaaaaaaaaaagaaaatcaatttaagtagatttgccacaagtccagctcatgggcaagtgaggagatgtccagtcaggcaattcccaccaactgtgggcctgactgctctgcggttgatactgta

SEQ ID NO: 50655 - DNA, 1026 bp, Bovine  19866880947709
  misc_feature (1)..(1): n is a, c, g, or t
naatctgcctgtaatgtgggagacctgggttcgatccctgggtcaggaagatcccctggaggagagcatggcaacccaccccagtattcttgcctggagaatccccacggacaggggaacctggtgagctacaatccatggggttccaaagagcaagccaagagaaagtcaggaccctgaggacctagattgctgacctccaggtgtttttgttttttgtttttttaaactgaggagagaaataatctcctaaatcactattattttctattttctgttatatgcaactaaacctaaatcagtttaggttgagggaatggctacccactctaatattcttgcctgggaagttccatggacagaggagcctagtgggctacagtccatggggtcacaaacagtcagacacgactgagcaacttaaccacacacacaaggaatgtttattgaatttggatataaacaatgaaaagtgtgtaaacttttaagtttctattgtccctgttaaacctattttatatacagaaactcaaatggatattgtttgaagggaaaatatacctaacaaaaaattctaccatcacttaattttgtatatgaatttttcataggaggaaaaatccctactcaggactctagaaggctgaaatgtgcagtagtgaatctgcttttctgtggatcacaaaagccagactctgtcctatctccttccccccaaaacagattcattatggtgcgctgtcgcactctgcttcgagtgggcatttgccatatggcttggcagtttaatggttttctgatactcgacaaaaatgaagcgcaatcattttgcaaggagtttgcattcctagatgggtcttttccaaataacagctgtgcctcaaaattgagttactcaatttgcaatttgtggacacaatactcaaacatttacaagtgagcaaaacctcaaatcacttgggctatttccagacttcagagtttatgaagtttttagcaatgttagagtgtgcagctgtcaacaag

SEQ ID NO: 50656 - DNA, 1256 bp, Bovine  19866880988083
  misc_feature (1)..(1): n is a, c, g, or t
nctcattccttagctctctgtgtcttcttgtcttcatccataaacacagatgagaccagcatcccccataaagttcttgtgagcgtgaaatgtgatcattgggcaaaatgctcctaacgcatagcaagtgctttgtaaataatagttgctattacttgtggcaggggacagaggggacattctgaattaggtgagaacaccttgctgctgctgctgctaagtcacttcagtcgtgtccgactctgtgcaaccccatggactgcagcctaccaggcttctccgtccatgggattctccaggcaaaaacactggagtgggttgccatttctttctctgccctagcaaagaccaaaagacgagggaatagtgtgtgtaaaacctgcaaggagcccttagttatgtcctagttactagttagagtgtgtggtgggcttccagtgctgaaggaccccagcacttaaaggaggaagtctgaaagcaaaacagagtgctgagaatcagtacttgcttcatagctgagcgtgctggaaagttgacactgtcagatctttcaaatgattattcttataaatgattattctgcttcccttgggagctcaagaggcgcttataagagagaaactcggcttcccaatgatgggactgttttcgaatcagagttggcatttgcatcaatttagctgatggagaacatttcttttttcccactccagcatgatggagtgcgataaaagagtttggttctttgcacgagaggaaaatatgtctgaaactgcagccctggggaaaagatgaagggttgttggcttcaccggtgtgatgggaaagatgactgtgagggggaacacgatgtggggccgatggggtccaacagggcacagtcagctggtgacgttcacaacaaagacaagttcctatgtattttattatttttattgatgtagattttgttctgatttcactgattcaccctgccggtgtgccctcgatctgcccccatcacagatatgggaaatcttcccagggctcttatctgcatttgatggttcatggcttggacacttcgatggttctcctatggcttcagagtcactttagattttcaaacctcttccctgcctgaagccaacttgcccaagagtaactctgctttggtaggatgctattcctcccttgtcttcaaggccctccatgatcttgccctctgacctgaactccccatgggctcaggacactctgcagatctctcctcatta

SEQ ID NO: 50657 - DNA, 1772 bp, Bovine  19866881055230
  misc_feature (1)..(1): n is a, c, g, or t
nccccaggatggctgctaccccgagggccctctgcctggcaaaggttaggcagtccccagcttcccagaggatgacttttcctgttgcctacatttcacctcaatcaccaggtaatgtgtgctggccagtgaccccacacgcactaaattctaacaaatgtaacactcagcccatttgtcacaggccatcgcagagacacagaaaggaaaggcgagccgggaaggttaagtgttgttgctgcagatgtaatgtactaatgctcattgctgggaaggcagtcaatttacctttccctgcagagagtaactctaatgcgacttggcctggggaaagtggttgaaaacatccctgtttattttagacataaagcagatggcttcgggcagaatagaaatggattccacaaacatctttcattacacagacctcttgactggactcctcgtcttaaagaaaacaagagacgcagtatgatttgttgagttgacgagcacagttttcaggacccagggagatcatccccatctgcatgactgcgtcaatttctccagggcaatcaaccttcacgcaaactctggggcactttttctttcaactttaccagatttgctcgctgttgctatgggcacgcagtactgctaagaacaaaagcagacccggcctcctctgtcctgtgaggcgcctccgccaggctccccttggaggaaacaaacatgccaattaagcacttgtcctaattatgaggatcgcaggaaagcaggaagcctggctcttcagttttgagaactttcaaaagatttggaggaggccaaggaatggaacgcggtctcttgcaaccccacactcaggagctgggactgatttcactgttataggagggaggaagtgagtagcagctacagggtttgttgagtgacaggctgggcactgtgcggaaaccttgcacacgttggtgctgattcttccaacgtgcctggaaggaaagggttggtgcctgagttctggtgaagagtctaatcaacttctccgagcctcagtcacatggaaaatggagataattacacatacctcttagggctgtcttgagggtcatcggagttgacccacttagcacagtacctggcccacagtgggttctccaggaatattagctcctttctcttcccttccattatacttaaaacagaattcatcaacctcacatccacttccacatacctgttcaccttgcttgaaaaagagcctaccatttcagccacccatgatcaaaacctggcagactttaggaatacgtcagcattcccaacctgggaggtaactcactaagatcagcttgagttgctgccataggagagggctcccctaaaagaccactctcacatatcactgctgtggtttcttttcatttgtgtttttagttgctaaggttgtgtctgactctttttgtgacccccattgactgcagtctgccaggctcctctgtccatgggattttccaggcaaggagtgggttgccatttccttctccaggggaatcttctcgacccagggatcaaacccgtgtctcctgcattggcaagtggattctttacttctgagccacctaggaacacctaggcaagttctagctgtaacaatcaacttgaagcattacttatcttagaattgagttgagttgatattgagaagcagaggaatgaatagtttaatgtcactcaggtagaaacagcatcttcttaagttgaagaaacctgccccaaatcacagccaa

SEQ ID NO: 50658 - DNA, 1649 bp, Bovine  19866881141029
  misc_feature (1)..(1): n is a, c, g, or t
ngcctgtagacaggctcagagtgctgtgatgggggttgggaggcagcatttctggcccgagtcttcccccttgggtgccctgtgggctgcattcctcccagatgtcaggtccaaggccagcaggctttctgttgtgactgggagccgcatccctcctcccgcaggttggccggcctctgaggcaggactctgacactggggttataaatgtttctgtctgggtgcattatctaaattgttatgtatcaccctgggtaatggcaaaagtaaaaaccgctgttagctcagtgaataaatcctcgatgttgatcaatcatcgcgtggcgtcgactcttttaataggcacaatttacatggagacttggcagcctgctccgtcttctaattgcagatggaaaacggatgccgatctctgctgtgccataaaaatgtaaactataaatgacttaaacacttgcgtgctcccttccccacccagcactcatttccacctcgtatttagatacaaatcggagaaaaaaactactctcatgtgagataataacttttatgatgcggggctcccagcttctcccatctgatgccctcagtccttcttggagccatggtttcaccaggtctctctccatggggaaagcatcctttgtagctacacagacagtcccctgcctcttaagtactttgatggtgttgcatactgttaagtactctgagttattgcccctgtgctcattaatgttcctgagggctgaagggattggaatcttccagaagaactgaactccagcacagagccctgagaagaagtggattctaatggtggctgcggtgatgatgggctgaaagcgagtcaggagagccaggtccacgcaggtgactcagtgacgcagtgcacctgcagcctcgccaggagccaggcttctttctttctacgcttagccctgggacacctgcaagccctattctgttagaaaattcctcatcagaggtatttacctgatgttttagtacaggctgtgtgggctgtgtgtacatgagtgtgtctctgtgttttggggctagtttctgtattccaagagcactatgggagtccctgggacttttctgggatgatttgagggagccccatgaagtgccctgtccttatgggtccaaatactttctctcacccacatgccactgtacctgctattctacccataaggggtgcatttcttagggatttaaggcaagaagaccccctttcacgtccagaatggagttctcccttgttcatacattcaagttcagggacttcccaagtggtccagtggttaggaatccgcctgccaatgcaggggacacaggttcaatccctggttcggggacgatccctcatgcctcagagtagtgaagcccatacaccacaactactgaagcccagacacctagggcctgtgctgtgcaatgagagaagccactgcaatgagaagtccacagactgcaacgaagagtagcccctgctcgctgagactagggaaagcctgtgcacagcaacaaagacctagtgcagccaaaaacaataaataaaatttaaaaaatagattagttcagattacagtgtgcagccattgatcgttaaaaccatttttaaaaggccatccaacaca

SEQ ID NO: 50659 - DNA, 773 bp, Bovine  19866881169400
  misc_feature (1)..(1): n is a, c, g, or t
nattctctggaggaagaaatactcactccagtattcttgcctggagaatcccatggacagaggagcctggagggctaagtctgtggaataacaaagagtcagacacgatggagcgactgagcatgcacacacagagaataactctgtactgcttattttccaaaatgctttccttttacggtagaaatgtccataactaattaaattaggaggtgattttaaataattacttctgaagtatcaggtgaggacagttttatgttttttttatgtaaaagaccacgagttgattttctctggttatttcttggatcctactgttgagaggaaatcagatactcctttttgtaagtgaagttacaatatcttccctgaagggttttagaaataagctccatctctcctggaatgatgtctgagacttctgcttccaggaaaggaaatatagtagagaattcctccaggccctttccaatctcgtatttctctgaatttattacctgtgcaaaaggagtcttctgcattccctgcttttgttccaggctgctggtctcattaggcctagtgatgaggattatatatcatgatgcaatccttggataaaacctaaaaatctccataacctaagagcttggcttataaggcagcatcacagtatgttagaagtctcagtccaagctctgattctagctctgttactaacttactgtgtgaccatggatcagcagctttgcctctctggtcctcagtttcctcaactataaaacaaaggg

SEQ ID NO: 50660 - DNA, 722 bp, Bovine  19866881333431
  misc_feature (1)..(1): n is a, c, g, or t
naatgttcaatccacaagtgattacctgagggtctcctgagcagcaaagcagtcccccagggacaccttccctttattcacagctcctgaggcaatagcaacttacaaaacctcattagcaggcaggtctccaacaaacaactcggcctgctttcccttccataataccctctctttgaggccacagctactttcaattgcatcctaatttcaagaagtgataaacatatgctcatgtttccacttacaagtttttgattatcagcctggcatcgtagctgcaaattgcccatcttctattataattatttttacttctctagatgaagaaagaaaaaaaccacttttaaattactaaagtgcccgagccacagaaggagggaagaattaagcactgccatatctattgccaatggcaatataaaagtaagggtttgaaaaatgaagtgctggcttgtgggctgtgtcagaccaggctccctggattaagtgcatttgtgcactgtgatcagttcggttcagctcagttgctcagtcgtgtctgactctttgtgaccccatggactgtagcacgaccaggcctccctgttcatcaccaacacccagagtttgctcaaactcatgtccattgagtcagtgatgccatccaaccatctcatcctctgtcatccccttctcctcccaccttcaatctttcccagcatcagggtcttttcaaataa

SEQ ID NO: 50661 - DNA, 1179 bp, Bovine  19866881353430
  misc_feature (1)..(1): n is a, c, g, or t
nggctttttatccctcttaagccctgtcacccgtccctatgttatgtcttgcccagagtgacaattctgtgatttttcatcagtttagtgagctgccctggctgtccaaaacaggaccttcaccttgcacaacctcagggaattctattcactcaaagtcgggagaagaaaagagtggctaacagccacatcagtatggtagccctgccccttgaggggtaacatctcacttcctgattattatgagcaataatgaagtcttttactccataagtggggatctctcattggttgactgaaatgtcttagtatctatccatcagcaaagtctaaactaaattagacaaacacaatcttcaactggaccctagggcagggacagcacctgttcagaggtcatgaagcctggccctgcagcgctctgttctttttttcctggctgtggctggctgcaaccctgctgatgggagccactgccctcccagagacaggcagtcttgtgtgagactcatctagtgtcatgttacatgaccgtgtagccacacaggcgggtactcacttcctccaccagaggttctaagatgagaaaactcacaggctggtgactctttggggagacagtataaatggtgtccaagactgagattgttctcttaatagctgctttttggaaaaaaccatgagctcttgcttagaatacaaggcctgggagtggattccttccctctagagtctttcatattgaagaagattaacctgacccaccaggactggccttaaaccctcctacatctgccttcaggagggaccctgggtccttcctcagtgaaagagacttgagaagggacccctatccctcacttgcccctagaaaagccaactgggatatttcatttattacatgttctgttagtttcctgggactgctgaaataaactaccaggtggcttacagctacaaaaatgtatttcccttacagttctgaaatcaagtccatgcttcctctgagggctctagggaagagtccttccctgccctcctagcttctggtggctctagattccttgccttgtgccacatcactctaatgtatgcctccatggtcacactgcctcctcctctgcactttttcctctatgtatctctcataagaatgcatatgatagaaattagggtcca

SEQ ID NO: 50662 - DNA, 1194 bp, Bovine  19866881407104
  misc_feature (1)..(1): n is a, c, g, or t
ntggagtagatcgattgatataaagaagatgaaaaggaagactgccaagaactgagtaagcttcttcactgctctctcaatgtcttgggtgttttgaccttgcttcatgaatatgtcccattcgtcccctgggcacagcagagggctggcctgggaaagagtcttcctggagatgccagggttggggcctagactcaaaggactgcacttaggggaaccaccttaagtgtttaatcaggacactcagagaccacataaagtgaaagtcactcagtcatgtccatctctttgctacccaatggactatatagtccatggaattctccaggctagaatactggagtgggtagccattcccttctccaggggatattccgaacccagggatcgaacccaggtctcctgcattgcagggggattctttaccaactgagctatcaggcaagccctgggacctcgtagtccaaggtcaaatctgaaccttggccaagaaggaagccagaggtaaaccccaaaagacaggactgtgctttatttctgaagggtgcacaaggtcatatgtaggaaaacaagtcccaggtaaaactcccaagaggtctgagcaagtggaacagaaagtcaaggggtgagaggggaccactgagttcagactgagtggtacatgagtagactctaagctgacaggcctcaggaagtttggacacagactaaaaggctgagaaaataggagaatgggcaagcatccatgaattcccgactgtgggtcttgcctcagataacctactgcaaggtgtgagggcctcttcagcagcgcagggggagccccagggatgaggcatgacatcgccacatccattgtggcggaccacatcacccttgtaatgaagttctccctggcacctcagagacattgggtggaagatttggtgtcgggggagcgataagaaggggccaagtgacagctgccctggagagctggcttcttttgtttttctgcagttataattctgggaaggtcagttcaaattaccttgaatgtcagtgtagacttggtgcacataattgggaaatgggatggggctgtgggctcagctgtagtctagattaaaaaatataagactttgagaaaagtgtctcccccaacaagttatgccatgtccaggtgtcacataaaagtgaaccttgatgtatgtg

SEQ ID NO: 50663 - DNA, 711 bp, Bovine  19866881416874
  misc_feature (1)..(1): n is a, c, g, or t
ncttcttccatggacatttgcacaggaaccaaggaaggtcttcccagctagaggatccacatactgaagaaagcctgatagatttttaagaaaccaggttttggatttttcataagattattttagatttgtgggacaaagattattataaaatctgtggccaagagtttttttcttgcaatttaaatttttcagaaagaagaaaacaaaatatctcacaagaaaaatgtctgatttgatttaaagccatcggtcagccttctttatctgctcatgaataccacatcctcattaagacccagggatccatggaaaccctactgagaaaccgtgaaagctccacagggattgcactgggagccacttttctgagaatgtgtctgttatactgaatatcaactctggctcctgaaccatcattttgctaatgttagtagcagtagcttgaatgaacttagatattgttaactccaggctaaatcaaatatacaatattgctccaacgaagctgtcaacaacagaggctgtgagtgatcaccatgctggtatgtgtcagttggcacacctacaactctgtttatcatgtcatttcttttactatagctgtttgccagccaccttgccagttggagatgacattggtcaaagaccaacactcagggaagacacacctgtcagatcaagatctacttctcccatttcaaactatat

SEQ ID NO: 50664 - DNA, 909 bp, Bovine  19866881422015
  misc_feature (1)..(1): n is a, c, g, or t
ngtggcccatcagtgggtctcctctgctgagtattctgtgaagcctgggtccttggtctctcacagcgtcaaggagacatggccaaccccataccacctccccttggaaaaacttcccagaagtttcctggctttaggaagcagtgagagctcctggaaggggctctgggctgaaagtccacagcctggctggactctggccccagtttgtggctgaatagttggtgaccttgagagagcctctggattgtccttttgaggaggatttttcatctattaaaaattgtcacctataaaatggtgaaaatagcctatcttgctgtaatattagtatttaaagatgattcccttaatgaatatgaaagcacttagaaaagcataagccaatatcaaaagtaaggcattaagaatgccttttggccatggaaatgattcgagactgtgaccctttcttggatcatgtgttgcatatttgaacctctgcacagagctggaaggtactcagaatattattttagattaatgttattctagttcccaaccctggcagctcttgggagctttttaaaaagtaccattcttctaccaccacctcccatcccatcactccaaccctccaactctcacatttggtcctattagtctggaggtgggataacagcatgagtggtttttaaatgccacagatgttgtgcacctggagagggaaagcctggcttggttcagcccctggtttttggaggtactgatgcagtgaatctgggagcggtgggaccccctacacaggtacacaggaggcagtcaccaggaggccaaaaaatagaaaatacaagccctcccaggcaggccagaaaccaaaccctctgacatccgggcatctacacctagcagcagaaatcctgccaatca

SEQ ID NO: 50665 - DNA, 1795 bp, Bovine  19866880439450
  misc_feature (1)..(1): n is a, c, g, or t
ntctcggaaagatcccgtggagaaggtaatggctatcccctccagtattcttgcccggagaatcccatggacagaggagcctggagggctgtagtccatagggttgcaaagagtcataaacgactgagtgactaagcacatggcccttaagggttacgtcctttagtatacttagaacagtttgctgtgtcctccgtttcatcatctgctttgcctgtggttcctctatgtcctgaggctcctcgctgctttctgctgtatgaccactgtcattttattgctagtctgaacactgcattcgtgggctacagtccccttctctctttggggtgtgtgtttgtattggttgctagtataatggcggggaagtggtgaggctattaacaggacatttctctcttgatttttaaacctactccttgttgtatcataaggttgataacctttaccccatttttgtgtcatggaccctttgacaaaagtgatggtctctttatcagaatagtggtttaaatacataaaatcaaacagattggattacaaaggaaacaaattatattgaaatacaatgatcagaattgcaatgcacttctttattaacttccctggtagctcagacggtaaagtgtctgcctacaatgtgggagacctgggttccatccctgggtcgggaagatcccccagagaaggcaatgcaccccactccagttctcttgcctggaaaatcccaggacggaggagcctggtaggccacagtccatggggtcgcaaagagtcagacacaactgagcatctaacactttcactttgtttctcaacttaactgtggctcgctcttgaattctttcctgctcaaagccaaggaccctcaattggtggccagtcccagagattgactcgaaacctgggacagaagcgctcatgttctagctacagagagtgtaaatctgtatcatctttgccctcgcctcctcttcccttcaaaatcagtttgctaaaactcactgattgcatgcatgctccccctcctctatgcccatggcattattcacatcctgtttcttatgattgcccagccagaactttgaaaacaactttacttctttcttcatgaacactgttctcaaactgatgtccttactctgaaatcttctgcactcctccccaattaatctgaccgtgtgactctccatttcataaaccgggaatgattcttcattcccaaccaaataaaatctaggctttgtagcttcccttttctatgatctgaccctgaacctccctctttttttttttctctttcctctacaatgccttctccaccatttctccccacaatatggccccaaaggtcatctctccacttcagaactcttccagaactttatctttacccaacacacttctgtgcaaacagtaaccatccaataaccaactgaatgaatgaatgaccttcagtcttgaattctaattctgaagggtctgggggctaactctcgtgaatgtccctacaactggtgttctcaaccatagcattttggttcttgtgagttatgttataattaatttgtttctagtaacaaaacacaacatttccaaatgatttatttttctcataactagagtagattcaagatgatccctataagaaggaaggaggtccttgcttatttgtactctggtatgatttctaaaacataaagaatagcatgcaactctaattaatgcactgagaatacatggatcctgcattttatgtatgcccagtctttatgagctattattactgacttct

SEQ ID NO: 50666 - DNA, 1092 bp, Bovine  19866881142497
  misc_feature (1)..(1): n is a, c, g, or t
ncccagaaagttcaccaatgctctttcccagccaatcaccctctccagaagcaacaagtattttaatttcagccactctatgtttgtttcacccattgtagaacttcataagaatggaattatacattatgtactcttttgcgtctagcttctttcattcagcataatgtttgtgagattcatccatgttgtgtgtacagttcatttcttttaattactgagcagtgttccattgccatccatgacatcccacactacagttgatgttcccattttcctggtggacatcacttatatattttaagattaaaaatgagatatagcctccagaaaggaacaatggcccataatcacacagttctgaaaagatggtggagagatggtcacacatctgaaggagagttaagtgctagtacagaaaatctcatatacttctctcagctcctcattttgctttccctgggaattccctattagagaggctggtgagattgaaagattttgacttttcaattaagatggtgctgagacctcatgattttgtttgctactttaattcttttttttcaaaaagcctttcttctctctcttttactgcaggctttgcacttctgggaggacacccttgttttcttactacggacgatattcatttgggtgtgaatgaaagtctcacagatacagcccggtttgtaaatcttctcttggaagcttatttcacaatttatggatacatcttaaaaagaaaatatgcttcgctttaactagcggttttccctctcagcatcctttggactgttctgtttttgttctttacctttttacctgatgtcctgaatgaatttctctcatcttctggccactttccttgggttaatttttttttttttcttagcaatttgaagaggcttctgattatagaatttcaaactccaggagatttagtcatcaagcatgactcttatgtttttcagctgaagaaatggaaggccaggaaaattgacatgttcaatgacccataacctgctagcatcagagcaggaagtaatattgagggctaacatttattggacatttattatgtgtaaggca

SEQ ID NO: 50667 - DNA, 1711 bp, Bovine  19866880158521
  misc_feature (1)..(1): n is a, c, g, or t
nagagataagcccttctaattgccctttcttggagaagactcttcagagccccttggactgcaaggagatccaaccggtccattctgaaggagatcagccctgggatttctttggaaggaatgatgctaaagctgaaactccagtactttggccacctcatgcgaagagttgactcattggaaaagactctgatgctgggagggactgggggcaagaggagaaggggacgacagaggatgagatggctagatggcatcactgactcgatgaatgtgagtctgagtgaactccgggagttggtgatggacagggaggcctggcgtgcttcgactcatggggtcgcaaagagtcggacacaactgagcgactcaactgaattgaactgaactgatctgtggtatcagttcttcattagtttggaaactcagtttggggtttgggtctcagttttcttttgcctcttttcccccttcactccaattctgttttatatttgtgaagatttcctcaaaggttctgatggtctgcaaggacctttgcttatatgttacatttatttacagtttttattcttacatatacctttataaccaacaggtaaagtcaatagattgtttacagcatgtttatttaaaaccaataagataaatacaactaacaactttgattaaaccacttggtatgatatgaggcctcagcctgctgctccatacaccatttccccctctcttggatgacacagatgggaaagctgagaccccaggtggatcaagcaaggctgcagggctgtcatggccagtatctggtagaggaggctttggagatgtatgaatactgttccaaagttatgcccaaaggctcagtgccatatagagttggctgctgctgtactagaaaaatctgcattgcttagtattcaagataaccagggaggcactgcaatcttgttagcctgaataactacttatcttacccaaatccagctatttccaaaaaaaatggaagaagtaaggtttatctttcatcactcaggttttgttagcatcctttcccagtaaacagctttagattgacaagtcacagatcagagcttgctctatcccttgcacactgtatttaggaggtgatttgcatacagaatttacataaatctacataattgcattcctttgatggttcataaatggatttctgtaatcaggaaacagctctcaggatctctttgttaatggtaccatgtacacttgtaccctctgtgaaatcactttttaaaagaaaaacattattttggtaattttaattaatgagctagaatgtaatcatcttcatgctgaggtcagagtgtcctaggaagaccaggatcatgtgctactaggaaaattctgcctgtttgccctcccccttctctttccattggaaatatccattatccacaagaggacgtaggtctgctatggagttccaccttaactctggggtaatttgtcttctacctgagtgaagactgtctcagcattgtcaagctaatctttctgtccacccagcaagaggggtcctgccctgagagcagtgccttatgtgtttctgcttattataaacattcccaaaataagttcaccaaagcacacacttgtgtcctttactgggtccagctcaggagacccaggtctctatgtgctctctctttcagcagtgtcatagcttcaggga

SEQ ID NO: 50668 - DNA, 1613 bp, Bovine  19866880402211
  misc_feature (1)..(1): n is a, c, g, or t
ntgtataataggattccccaaaagcaaaaggataggggcagaaataatatttgaagaaataacagctaaaaactccccaaatttgatggaaaacattaactgaaacattgaagaagcccgataaacttcatgtagaataaattagagagacccataccaagagaaaaaatgaagatgaaatcaagacattgccagataataaaacctgagcaaattcattgttaaaggacttgcccaatatgaaactaaaacaaatcctttgggataaaataaaataatgctagatagtaattcaaatatacattaaaaaaatatgcaccggtaaaggtagtcacatagtcaaatataaaaggcagtgtaaatgaatttctgtttataaatcttttcttcccatatctgatgtaaaaataactgcatgaaacaaaaattttaaagacatgttaatgagcttattatgtataaagatgtaatttatgtgacaataatagcacaaaggagtgggggaggagcaagccattttggagcaaatttttctgtgttttgttgaaattacactggtattaatctgagttcaactgttttaagttaaaatgtcagttgtaatctccagtgaattatagtggatcgtgagtagaccactagaaaataactcaaaaaatgaggtaaaagtaacaagggaattgaaatggtgccctagaaaatgtctactcaccaaaaaagaaggcagtaatggaggaaagaaatttttaaaaactttattaataaacagaaaaatggtataagtaaatcccatctcatcagtaatgacactacaataaacattaacacaggatagcaagaatgtcctcatttttctatccttgaccattatccacgccatatgtttttctattgtttttatgcccaggctggaagaacacaaatataatccccaaacattgctaatatcatgcatagctggaatcaggttatattgttgatctttcattataaacagacttttcataaacaagagcagcagaaggataggggacattttataaaaataagacattgcttttctttatcattggttaaagctgtggcaagtggtgcagtgataaagaatctgcctaccaatggagaagacgcaggagacgcaggtttgatccctgggttgggaagatcccctggagtaggaaatggcagcccacgccagtatttttgcctggtaaattccatgggacagaggagcctggcaggctacagtccatgggtttgcaaagagtcggagaagagtgagcacccacgcatgcacatgcactcggttgtatggtgcaagataaagcaaacttctgtctctgcaacaggctgactgcctttctctatcaaactttcactcattatatcctgatacccatgtatccctgagtttaatataaggatatatatttcaaatcatgtcagtatctacatttatcaaaaaaacttaagctatagaaaataaaaatatttgtagatttttaatactagagattcctaataatagtcacatggctccttactgggttaatcatagtcttaatgttaaatcagaaataacatgttaaaaggaagtagcagcgcttggtaaa

SEQ ID NO: 50669 - DNA, 2192 bp, Bovine  19866880651946
  misc_feature (1)..(1): n is a, c, g, or t
ncatagtgaatgaaactgaaacgaagactagaatataagttgtgcagcattcatttggtgcttagtgctgccacatattttctactgttcatttttccaacaaaatgtgacatgtatttaatgtagtttgcttttctgagtttcttttctgaattcaactgccagccttataaaagtaaaaaacatcacactctttttaacaaataacaattttctggctagttttatctctattattctaactatatattaataaggtgaaaactttctaaattatatctatgtatgtatattattttacataatatacaatagtaaatatacaataaattatgacataatctaatgcaatataacacaatatgaaataaaaacctaagagtgggattgtgctctaatagtgatttactcttaggtacttattggataaatactctggttcacatttcttatttataaaataaaggcaatgatcttaacattcagttacgtttaatgctcagatttttgaaatatttaattttgatattgtttagaattaacacattataatgtggttactttaaattgaaaaaaaaaaaaaacttagtcttcagtaattcatatctaatactctactactcagaatgtttttttttttttccaggatattgcttatagctgaagaaggaaaccagagcctttgctcagtcttatactcatggatcataaatgtacaatcctccaccaggcaggtgagctgtataaaatgggaagggatacagagtgaattgaggaggaaaataccaacagtgttcaaataccagtaaaccagagtataagtaaaaacaggtttcatatgtattgcttgaataattttatattttcacttctatttgaaatttatattttagtttacatttaacatttgggacaaatgtacaaaatttatgtgaatagcataaggaaatgtttgctatctagccttcagtgagtcaaaatctggatattccaataagcctggaaggctcccttttaatctctgcttggcagtggcatgtggaatgctccacttcttttgaatatgattatttttcaagctcttgcatatggtgatgagggtctgcagattcgagataaagccagtttcttaaaatatacaactgaacatcctctaggcacagaggggaaaatgagagattccagacagaacatggcacccacataccagtactcttcagtgggaaaatgccaagaagcattagctatatctaaatccaatttttcctttacattcataaatatttaaaagttcaaaagacccttaggatcactttatttgatagggggaagtgggcacattaagggatgcagtagtttgggggggggggacataatttgatcctttacaggaaacccatggctcttggaggtgtttagctttctgaaaacagaacaggacaatgggctgcaaggagttgaatgaagcaccttgagcactaagtgccatgccagccactgctcatttgctaccttaaaatctgttcttttatttatttaattgaagtaaatctgatttgcaatgttgtgtgctattttcaagtatacagcaaactgattcaggtatatgcatatacacataaaaatatttatatatatttatattcttttcagattcttttcccgtaggtcattacaagatattaattgtagtttcctttgctatacagtaggtccttattaattatctattttatatatagtagtgcacatatgtcaatccctgtctcccagtttatctcctctcttattaccaggggaaaatccctggtaaccatggatttgttttccacatctgtgactctgttactgttttatttttaaaataagttcatttgtatcttctttttttagatggcataatattctatgatgtttgtctttctcagtctgacctcactcgtatgacattctctggatccatctgtgctgctgcaaatgatattagtttgatgtctcttggttaatgatcagattctgagtccagaattctgagttctgagatcagaacaaattctgagttcacgtaaaagtttcttgagtcaaaaaagaatataaaatgctacaagactaacagaaaataaatatttattttttgatcaggtaaacatggttatataactgggcacttagggtacatatttttaacaata

SEQ ID NO: 50670 - DNA, 951 bp, Bovine  19866880708983
  misc_feature (1)..(1): n is a, c, g, or t
ncctttctttgcttgtgttttataaaagtggagacagtgaatgaaaacacgaagctaagaataatgagagcctgggtggcagtgtctgtatcctgaattgtggcaccaggaacccacaaatcacagcctgaagcactcaggaccttggacgtttgcttttgtttatgaactgtgtagggtgcttattttctgcttttcatgatggctacaaccaatcttttcacactgtatttatggtgcttttctttctttcttttttattaaggttgttttatacttggcagtatctaaatgttgtatctggaatttaaataggagaaaccgtactttagttttatctaactgaaagaggccgagatcactgctggacagaaggtgattttcctttgaagagtgagcagggaggtcaccgagtggatgctgttatgacttggtgcctttcgcagctcatctcagcacatcctcacatcccagtgggctggggtctataaagcccagtttgcagctgagaacacagtaaggaatggagcaggcttaagttttggttggttggccgactgaattgaaaagcatgtatagaagacaaaagcccatggttggttggccgactgcgttgaaaagcatgcacagaagacaatagcgcctagttgttctgagatcaaatatacagacaatgttgcacaaaggtctcaggtcaagaactttaaagccattggtgtcatgtatgctaacatcctctgtttggagctctgtctaaaggtgtatgtcacacttgcattacttaagcaccttttgaggtaatgatcagatttttaaactgcaattgaaaataatgtgtgcatgcatgcatgctccgtcacttcagtcctgtctgactctttgtgaccccatggactgtagcccaccaggctcctctgtccatggcattctccagggaagaattctgaagtg

SEQ ID NO: 50671 - DNA, 1530 bp, Bovine  19866880724458
  misc_feature (1)..(1): n is a, c, g, or t
ncagattgtgacttcgtctgaaattaaaagacacttgctccttggaagaaaagccatggcaaagttagacagcatattaaaaagcaaagacattactttgctatcaaagctttggtttttccagtagtcatgtatggatgtgagagttggactataaagaaagctgagcattgaagaattgatgcttttgaactgtggtgctagagaagattcctgagcatcccttgggctgcaaggtcatcatacaagtcaatcttaaaggaaattaatcctgaataatcaatgaaggaactgatgctgaagctgaagctctaaatctttgcccaccttatttgagaattgacttattggaaaagaccctgatgctgggaaagattaaaggcaggaggagaaggggatgacagaggatgagatggttagaagtcatcaccaactctgtggacatagtttgagcaagttccaggagctgatgatcaacagggaagcctagcttgctgcaggccatgggttcgcaaagaatcggtacgacggagtgagtgaacttaattgaattggaaagatttgggtgcaaaaaacaaacaaacaaaaaaaaatgaacaagtttcatttcatgaaaagttcatatcacttttccttatgtaagtgtagctctcaaacaaatcattactagaagatccatataaaaactctgaagtttaactagtgtctcataaaaataaaggattgcctgttttctaatcttatagtactgatgtctgttatggacctcttatcatataaagacacagaaaaagcttctataaatttctgtactacacatgtagcaaaaaggttgttagacttttatttgaaaagtaaaaaaaaaaaaaaaagataaatgctgggaatttttaatttataagaatataatacatatataattctatgtataattatatactacaattacaatatatgagaatataacacatatatattatatataagtatataatacatacataatatataagaatataatacatataaatgtgctaataaataattgagatctgatatcaacattatattgtatagctatcataaaataactttgcactacttcaatgtcattttttccacagaaaataaatcagaaataagaaatgcagtattcagttctgtgtaatagtttatgctttggagtttggtgatatttcaagctataaagaataattccctacccctgaagtaaaagaaagtaagctgctttagataaacacataaaagtgtattctaacttccttgttcttgaagtacatggctaatcttaaaaataactagcaatagctagtaaaattcaaattactggttgaaatggaaaatgaggttttgaggaaggaatgtctaacataagcatagaaatcagggttccacagagaccaaaaatgctgaatttgaaaagggacaattgctcaaaagtgcttgcagaatatgatttgtctttatgtaagttttgctttctaactagcgcagttttatttgttggct

SEQ ID NO: 50672 - DNA, 1390 bp, Bovine  19866880884883
  misc_feature (1)..(1): n is a, c, g, or t
ngcctggcgtgctgcgattatggggtcgcaaagagtcggacacgactgagcgactgaactgaactgaagtagtagagggagccttgaggtactggacccccagccgctacccctcccaagtctgcattggccaccgtgtaaccctatggactgtagccctctaggcttcaccttccatgggattctccaggcacgaatactggagtggtttgccatttccttctccaggggatcttcctgacccagggatccgacccagatctcccacactgctggcagactctttactgtctgagccaccagagaagcccttagtggatcttaaaatattggaggtaggttcgctaaggaactatctatttccatagctttctttcctgagttttgtggtatgtccgactgtggacccctggtatcagatacatctgtatttacctcagtaaattccaaggcagtaagttgtcattgtcctttttattgaggttaaaattgtgattctttttcctacaaagttggcattattgatgcttagctcacacttcaacatacatttcctgatgggacaagaaggagcacattggtcagtgagtatctttaatacagacacacaaaattggacaattcaagctctctggctcatatagtcatttaacctaatgcctgtttccatttgccacaatgcccaactagtttaataaggctgggtccccaatgagtggctgaggattgagtgttcattaacttcacatgcttgttctataagtccacatcactttaataccagaacccggcaaaaagaacgcctcaaacctcatgtttttggctcttcaatttgagagggctgtttcctttcacacttttccttcatgatcatttactaacaaatatgctcatggcttagtatgttaacagaagagatggctaatgaaatctaagtagccataaaaggaaaattcccatgaactgaataaacacaagaattaaaaatgtgatggataggaataagatgctagagaaattgatattgccaaccgtatcatttcagccacatttcaatactcataacaattacgtagaatcagcaacaccacacagctcatcaaaggcatctgttcatctccacagctgttatcccagaaaaaaaaaaaaaaggccactctcctccccattcggctccaagcacactgtgattgtaatgaacacctctactgatgaggaaaacagcctaatggtttggagaaaattcaaatagaggtccatttgaaagtcagaaatatgtagttaccaaggaaactcactgatgaggcaatgcgagggtttaacttcaagctatagaagtttatcttacatccaaatcaacttgctattcattttccacttactcttctga

SEQ ID NO: 50673 - DNA, 837 bp, Bovine  19866880916700
  misc_feature (1)..(1): n is a, c, g, or t
nagtgaatgcagtcatgtttgcttgcatagactggtaaattatctcatagtagatcataggaaataaatttggggttaacatacaatgtcatagtgaatctattttcgacaaggtggctcatatatactcagcttcatcacagctaactatccaatatcataccctaatcttatttggagttaacttatctaagtggcatcacaaagaatacttatttccactatgctttttttcataaactgcaagctttctctcacgttgactttgggtataagcataaatccatttacacaaagacatcatcgggccttaaattttgtttcttccaatcagtctttttcatattgacagttgttttagctatagttaattccagtagctcacttttgaactctaatataatgtttttagcaatctgagaggaaaattttattaattaacaaccagttcagcttgccaaaattcatcaagttcactgcctctaagatggaaaatttcaatatataatgaaattcctgtggagaaatacatcagaaacagcttttacatcatgcgcatttcaacagtgactacaaaatgtactttactttgcgtatttttcacagatgaatgatatacagactgcaatttatttgtaaagatttattgagtttattggatgcttaactctgttggcgttcatctcactcagagcatcattagaggcaaggagtgttgatatgcatatttacattatcattcttaaaaaatgtaattatcacctggaagaaaacttgcagtgaaaaattgcagcttctcctttactgtttaagcttcctcacaacacgttaggtcac

SEQ ID NO: 50674 - DNA, 3779 bp, Bovine  19866880918635
  misc_feature (1)..(1): n is a, c, g, or t
ncttagtgcctgcataacaacaattaatactacattaacgtatattgacaaaagccatagacttcataacaaacatagaattgaaaagtatcctctgattttaaaaacatagttttctctttaactctgtgtgcatgaacacatacacctgcatatataaatttaaagagctgaaaaaaaaaaaaaaaaaaaaacactcccactctaggcctgctctgctaaccttttacaagtactgtgttggtgtttttcattattcatttcaacatgggttatcttccctgtcagcacgggctttaaaactgcactgaaacttgacatgctggcactgacatacacacctcaaaatgtccaataacagagacatgcgcacaaaagcttcaaggagaccacataaagaatggtgaatgtttcttattttgctggtttcagaagagaagaatgtaatgaacacagatgatgcaaatattaaagagtcaaggaatttctagaacaagttgctagaggagcaacaaagcaccttacttgaggacataaagcccagcactggataaggtaggtgggagaaatttgggtggggccctccaaaaaatttagaggcttcccctgccctacaaatagccagcttaactttttttactttccttgggaatagacatggatttctattacagtttgacagctgagaacagtagaaaaatattcattttcataagtcaccttggatttttctcagcatcagtgtttcctgcaatcctgtgaaatcctaatgctgattcctacagcaattatgcaggtatctaggatgaatttcctccaagagaggaagctattggatgataatagacacaccttacttttccttaatttctcatatagatgcatatactagtcctttagtgaatgcatttgcagtgttaacaataaaagtaatgcaaaaatgaggttaataggatgggatttttaacgtgtgttgttttataaaaaagaagtatattcaaaacagggaactgctattttacacttgctttgattcaaaatggtcactcactaacttacactcacgaacttatctcttcctaggtttcttctgatatcaaactgaagtcacaaggacaccatttcactggccaatgagaactctgtcctattagctgtatatgcttacatgtggttaattactgacttcttatctccagtagtctcaatttgggaaattttaagataaactttactgagaaaataaagattgactttgatattcaagcttccttgtctaagagtatatcctaagtaatcatacaaatgcacaaatatgtgtttggaacaactaagtaaaaaatggtcggttgataaagttgaaatattaaataggcatttttatgttgctgtatttttacatctgtattttacatctgtattgatgcaacaatgcttataggaaataagttaccaacatactgaaaggttagaaaggtagtctgtaaattattatgcattgagtctttataattgttaaaattatatatgtatatacatatatagtgatagagttgaacaaatattcaccaaaatgttaagatttggtagtagaattatagaaaaattttaaaagttttccataatatatgtaatgtactgttataagaatagattaatctcataataaaaatcattaaaactattttaatttttcaaagccaaaaaataaataaaataaaagttaaaataagtacaaaaagataaccattgagttaaaaaaattataaaattattatgtttgtagtcaaaaacatcaaaatttcttctcaggttgaactaatactcacagatattgatggcaattccacagtgtttctgaaaccatttaagcacttgtatatagatgaattgaaattgtgtattgtaatgtgttttttaacattcaaaacttgagaaacagagcactgttctctttttttacctgccatgggggatcctgttctgtacttctaagcatcactgtggtgatgaccagtctgctcatctcctccccaagtccagcacaaatccaggtctcctagcctttcctgattatacctgttcttattatcttggagagaaagtttcataaatacccctaaagagtccaagcttgaacttggtgccacatttgactatggtttctgatgtatctaagaactcagaaagtcttgagcctgaacaaatgaaagaagaactcagaaggaggtttccacaaggactggaactttctagagcagcacgggtaggccttggatataaaagtccaaagcgaggatcagttatgcatacatttaatgatgattgtgagccgtttctcagagtcaggagaactcgctaagcaaaatttgaagggaaaatttttctgatatttggactcattgggtaattatgggtaaaaatactaaacatttttttaaactcgaactttctactttgacttggatcccaggtagaatcagctggtactcatcaagcaatatgagaagaaagaaagggtgatatgactatcttaattaactgctttgattgggagagtcccccggctgagctcggagaccccagggaatgctgaagcagggctgcagagcacaccaggtgcttgccagtcaaacattctgcagccatttcgaggagctgggcctcttggccatccatgcaggggagaagtaggcctcctctttattctggctcaaatggaggactgcaagtggaaaacgctcccagtgttatttatttagaggaaatttcagtgtcatggatggttgtcaaactcattcctttgttttaaatgatcaaaatttaaactttggtaattcatcctacattgagttaaaaataaagaaaatatacaatgtctaaactatacaaagaagcttaatttttaatccaatgcttaataatattttgtggttatattttggctttctctgccattttaatttgcttatctcagtagcctaataaaatgtctttggaagttccttacctgtgttacctatttacacttcagtattatcttcacatttcacatgtgcaaattagaacaggtgcaagaattgtggattaaaatgtcaaatgggctattgataatatcctatatgctgcattgtctctgctaatatcttaattacttatgcaaaataaagctctaaagtatgcaacgtaccccaagtacttctttagcttaagtgtatctgagaacaaaaagggaatatatgttctgggcagcattctgagatggtcaactggcaaatctagaaaaagaccctacaatctgcaattttatcagcattttcaggtaattctaagatgggaattccaaacccaaaatctgagaaatgttgctgtatagattgaaactcgattcctttcctgaaggcatccacaaagaaacttttattgaaatgacatgtaaagaggcattatttcttcattgattgtttcttctttttgtttaggtacatgttatgagcaaagcattgtgtgggaccctggaagtaatagaagaatgtcttaagtatctaaataattctggtagtttttaaattagtgcacaatctcaggttttgtacactgggttataaaatcaataccataggaatttagacattggttaatttcacttaattaggaaataatagtttcatggaagagcatatcttcatccaggaagattgaattaaatattgtggatgggataaagtagatgaagaagaatgcagagactgaaatttcacagcgggtaggacattgga

SEQ ID NO: 50675 - DNA, 771 bp, Bovine  19866880982091
  misc_feature (1)..(1): n is a, c, g, or t
nttatagtattgaataacaacagctacatcttattgaaagtttactataggagtcattgtattctatggtcatgatacatcaactcattttttcttctataaagtgctgttatttttcataatcgactatgcataaatcttggaagttaagccactttcacaaaattttacaggggatgcagtttcagttgatcttgaaagtcgggtctgaatgatgtctaacaacttttccctgagcacagcagtttatagcccttactcccttaccttctttcatgggagcccctctccccttttctggtcccagatttccccgtgtatagactccatcccctagactctctgtggcccctatacactcaactcatttccaggagaactgagctgtcattatctttaagccaatttcacattggatgttccctgacttttatctttttgttttctagaatgtcatgcacaggcttctgtatctcacttatgaacaaacccaggagctgtctccttaaaatcctttgtgattaaagaattcatcaactctctaaacattcttcagaactaggaagactctaaatacaagttatgaaagctctgtcatccagccacctccaatccctgtaacctctgtgtgatggatcctccctgccatctgtgtaatcatttttgacacttggtgatggatcttttcgagatctccatagctcttccatttcaatgatagaatcagaccctatcattgtaactgacattggactttgtttcttatctgag

SEQ ID NO: 50676 - DNA, 660 bp, Bovine  19866881047201
  misc_feature (1)..(1): n is a, c, g, or t
nataagaagtatgttaagcatattttaattaaattaacagttattaaaatgattgctgcttctctgatagctcagttggcaaagaatcttcctgcaatgcaggaaaccctggttcgttttctgggttaggaagatccagtggagaagggataggctactcactccagtattcttgggcttcccttatgtctcagctggtaaagaatacacctgcaatgccggagacctgggtttgacccttgggttgggaagatccctagagaaggggagggctacccactccagtattctggcctggagaattccatgagattgcaaagagtccaacacaactgagcaactttcactttcaaaaagattaataagcaaaatatacaattgcaaaggaaccttcctaatgcaacaaagattttcagatttcaatatttttttagataattcaggattgtttttcttctgaacttgcatgtatatcaaggcttctaaaatgtcattttcgttcccatagcatttaaagagtgttttacttgctttatttaaaacataacattttatgaactatcagaacttcttaaatgttgtattagttttctggtgttaccataacaaagtaccataacagagacagggtgacttaaacatcagaaatttattatctcc

SEQ ID NO: 50677 - DNA, 942 bp, Bovine  19866881142518
  misc_feature (1)..(1): n is a, c, g, or t
natatataaataaggtaattattataacagtaaacatgaatgccgtgttaagttggtgatattttccattattctctatttaattttctttgctatgtatcattgatctttttaaaatttaaatgtaagttttatttattattaaacaactctctttaaagtgctaattgccagtctgcttgaaatataatcatgtatagatgtttagaactctgtgttccaaaggttatttatttatttattttttttttttggtaaatatacatatcacagatgttataacaagagtgtgtcaatgctaatcacacttatcacagatggcaatttttaaagtcattttttgctgcccatgtctttcttgctacatgaaacctactttctgaaaactgctgattgccattatctactaagatattctaacatccacatgtgttcatttcctgctttcctgccgaactccatgatttttggttttgattactcatcaatgtagattcttctttaatattttcttcatgactttttctaaatattgaaatgaaaattgatccccaaagcaaatattcttgacattcatatattacttaaaaaaaaagaaaagaaaagaaactaggaaaatgtaagcttagatcctggtgtttagatgtgtctaaactccttatttgaatcactaatgttatagtatgagggcaaagcatttgagctgaaaattggttgacgatggcatcacattgtgtatattttgcttatagtttgccaaaagcagtgcagggtcttggaaatctgcaaagagtgcaatgagtaaataacaaagcttcagtggcactgcttgctctcaagatggtacaaggcaaggatgcgaccagagcttctagttcatacactttgtcatttgtgttcaagttctcagaacgacacaaacattgaaatctaaaggacaaa

SEQ ID NO: 50678 - DNA, 915 bp, Bovine  19866881216536
  misc_feature (1)..(1): n is a, c, g, or t
natttgggttgtttgtcttattgaattttatttattaaaataagacacacatatatatatatatatatatatatatattttaaatgtggcttcccttatggctcagtggtaaagaatctgcctgccaatgcaggagactcaggttcaatccctgggttgggaagatctcctgaacaaggaaatggcaacccactccagtagtcttgcctgggaaatcccgtgaacagaggagcctggtgggctacagtcccatggggtcgcaaaagaatccaacaggactgagcgactaaacaacagtttattttgaatagcagttgtttgtcagatacatatcttacatcttttttctcccagtctgtagctcgtcttttcatcttttaaatggtgtcattttgaaaagaaatttttaattttgatgaagtccaaattatcagtgtttctcttattgtttatgttttccatttcctaagaaaatatttgcctactccaaagccattgtgaagtctactgataaactcatcaaaggcattcttcatttctgttataagtgatttttatctctagcatttcttcttggttctttcttagtatttctacatctctgtttatgtcgtccagctgttcatgcatgctgtctgctttatccattacagccatctcagccaccgggaagcccgtattactcatagttgttttaaattcctggtctgctaattccaacatccgtgccatttctgattgtggtgtttgctttgtgacttcaggttgtgttttttgccttttgtagaccttataatttttacttgttaatcagacagatgtatcaggtgaaaggacctgctgtaaatgtgggcataaagtgtaggaggaggggagcgttgtatatcctggactaggtgtcagtctttcagggag

SEQ ID NO: 50679 - DNA, 1183 bp, Bovine  19866881558165
  misc_feature (1)..(1): n is a, c, g, or t
ngcaaaatgcagaggaatccacgcattggtgtgtgggatatgtgtgtgtgtgtgtgtttggagagtggagagagaaagataggagtgggaaaaatgaaagaatgggtgaatctcagagaacatgcagccctatataatggttaagcaaacagatttgggcttggtaaattatgtctcctgtccctcatccataaagcaagcctgctgctgctgctgctgctaagtcgcttcagtcatgtccgactctgtgtgaccccatagatggcagcccacgaggctcccccatccctgggattctcaagaacactggagtgggttgccatttccttgtccaatgcatgaaagtgaaaagtgaaagtgaagttgctcagtcttgtccaactgttagcgaccccatggactgtggcccaccaggctcctccatccatgggattttccaggcaagagtgctggagtggggtgccattgcctcctctgaaagccagcctaatatcattcaattgacactgttctaatgatgaactgcaaaggtgaataagagcttgcagcaagtcatcattcaatgtccatatagtaagaaatatatgtagttacggagttttctctattttatatacttatcaataaacatatatagctctcattcctatgtccctggggtagaagaaatagggcagctccagtgtaaatacctctatctgagggctatattatgtcatcaagtgtggaaggattttaagtgacagacatattgtttatttaggcacagagggaagcttgtgaggcagaatgagaaaaaaaaaaaaaaagaatcaacttttatgcggtcccttttatgcggaaagttacctttctatcattgcttaggttacatctttgggcctggactgcgggaatcttgaagagactggtttcccagcaacatctactcatacgaataagcctgtaagaacatgtttaataaagagaattgtctgaattcctcaaacaaaatcaactctagtcagaggtggtatatggatttttctttcaagagataagccaagaagaagtagaggattaaaggcaaaatatatctacatgtcactaatattgtagagacgtagagagtaccaaaaaaaaaaaaaaaaaaaaaacctagatagcagaccttttatcctaaagaaaaaaaaaaaaaagtcca

SEQ ID NO: 50680 - DNA, 1805 bp, Bovine  19866880166458
  misc_feature (1)..(1): n is a, c, g, or t
ntggtgactgcagcctgaaattaaaagacgcttactccttggaaggaaagttatgaccaacctggatagcatattcaaaagcagagacattactttgccaacaaaggtccgtctagtcaaggctatggtttttcctgtgatcatgtatggatgtgagagttggactgtgaagaaggctaagtgctgaagaattgatgcttttgaactgtggtgttggagaagactcttgagagtcctttggactgcaaggagatccaaccagtccattctgaaggagatgagccctgggatttctttggaaggaatgatgctaaaactgaaactctagtactttggccacctcatgcgaagagttgactcattggaaaggactctgatgctaggaaggattgggggcaggaggagaaggggacaacagaggatgagatggcaggatggcatcactgactcgatggatgtgagtctggttgaactccaggagttggtgatggacagggaggcctggcgtgctgcagtccatggggttgcaaagagtcggacacgactgagtgactgaactgaactgaatattgaatgaaatcttcttgaagaattataataatacttttacatagcaatggaaaatgcaaaaaaaaaaaatgcaggatattgccattttactcaaaaagagagaaagagggagaaaactaaatggataataaatacatatggttttgtggacttggccggataggaaaacccccaaatttctaggctctggatgcctctcaagaaagagaggaatggaattggaaagaaattccatgggaacattgtatttataatagtttattttcttagaagtaacattaagtgattttgacaacagtccctttattatacatgagtggtgggcacaactgacatcacatcttatttttgtagttttctccatgtttggatagtaatttttgaaaaagaaaaaaagaaaagcaatgtttgtctctttctatatgtaaatagatttatataaatacatatccatacacagatgaaaagagtgagaaaaagtggtagaggtttgattattcaaggcaaaagtgtgcaaagaaagtaaattattgagaaatttcagggctgcaggtacaagataaggtttgaaataatagtaggtaatagatcatggaaaggattgttaggcaacagaatttcattgaaggtttttaaattgaggtgggagagaagatgattataataaattctgttctaaaggatcttggagaatgcagaaaatggaaaatatactgagacatatacctgcacattgcaaaatcagctacttagaaatctatttcagtggtttcaagaagaaacaatggcagcttgttctagttgaagatatatattaatagaacttgatgataaattgggtgaaagtatcaaaatgtttcagagtatctggcctacactctgccatcccattaggtgaaggatataggaaaaaatgaagatcataatttcagtttgaatatgtttagttagatatgaacttgaagcctctaagtggagatatcaggttatcccagaacttagtaatagagttttggttggagtttgagaattttgcatattttggtaatcaatgtcatggactagcattgtataagcctgggagagcattgaatcagagggaatgtggccttgaccttcaaccctgaagaactccattttcaaatgtcaaataagatgaataagaggtgcatggaaataagactgagaacctgtcagggagttaggggaaaagcaggttatagatgtgtcattag

SEQ ID NO: 50681 - DNA, 967 bp, Bovine  19866880436615
  misc_feature (1)..(1): n is a, c, g, or t
nccccagctctcacttaacagcaaagggcaaagaaaaacttacccaaagcgagaaggtgtgagaaggtgttggaaaagaacccaaattccttcaacagtggtaacatgaaaccaagcccttgctggctggatttctgagtgctcagtattcagagaaaaagcacttcagagaattggattcactctcacttatagcctcaattaaacagcatacaggaaacctaatctatggaaaaccacaaaatattccactttacgtatttttttaaagtagtgatgaaaagttcttagaccagtatacaaatctccagtggggcttgtctatctggggcacatttctcatcctgccctggtgacactgagctatatcagtgtgttagcatgaatgccacacatgctcagttctctggaaagtaagaacagaaaagtacaattattttgataacctccttctcaaaagaaatgacatttttgctctaaaatttccccttcaagtaaagccaagttactcagtggaatttatccttagaataaatgaaaatttgtgccagcagatatttttaaaagtccttttatctggttgccaatgctatgatagccatttcttccccatcagtttgactcctgccaaatgcatcctttgcaagccttactgccatgtccatgtcagcaaagctgcagaggtattttggcatttgaccaaataattgcaaattgtcccagttattcaactggagaattcatttattttggagctaatgacagattttaaaaaacgggttttttcaggtaaagcactaacacagatgaaaagcctgctgctgtgcaagtcctgagggtttaccaagtcttcctgcccctccctccatcctcagtaatcacagtctcccagaacagtgctttcagctttccttggctgttgcctgagagagatttttacaactgcagtggaagagccttgtctata

SEQ ID NO: 50682 - DNA, 1646 bp, Bovine  19866880479311
  misc_feature (1)..(1): n is a, c, g, or t
ntggactttctttggaacagagtataattatctgtaaatatgagttagttaggcagggtacttccatgctctcttaggtactaatatgtcattggggggaaaaataactcaatggaattctatttgttatatgaacaattgatgatgaataattccctaagcaacattaaaagcccctagatgatgtttttaacttgcaaagcatatttgttgtaataggttgacaagggagttagcaaaagatagattttattagctgagaacctttagaattaggctatattcaggtggatttaactgccatagtttgttacaatagctaaagtaacctatttgtcatctgtgatctatttcaggggaaaaaatcaaacaaaaaatctgttggtgaaatcatcccctcatcatctttgtttttctttttgatatattcttgatagtaggattaactgcttaaaagggttggcattattttggatatcttgcttattcaataaatagatttttatataaactagaattttaaatgaaagtaaccttttaaaatcagaggtattatcataaacatccatgaacttttgatgtcctgaaaataaatgaaaccatatgccacactgctaaagtcaccaaatcccaaatttttatctaaaaagatacatattttcagtcctcagtctccacaaactcattttgtttcctagctgcatttattgtgtagtaactcattttacccccaatggttaaccactcttcacaataagttttttataattccagcctatgacaaagttcatgctgttttcatcatatctttggccagggaagcacagcatggaattctttaaatgtattgaaatgatgtgtagattctttttctgcaattgcgggcgcctgattgccaagatacattgagaaataaaggaagatgaatggaaataaaaaggcaaacaggaaggagtgaagtagggaaaaagaaaagggaaagaaggagtataaaaaaggagacataagaggagacagggaggaaaagaaattaagggagacatgacagtgaaactaaaggatcagaagttttgtcaatttatttatatttatgacagatggcatgtttccatttacctttgaatcctttccctttaaagctgaagatattttcaactgaggaagtttaaaaattcttttttatttgaaatacatagtaactctaggaataggtgtttttgagttaaaagaacattgtattcaaaggatttgtagtgttcaattgcagtctaaaataaaggtagctttatttttaccttaaattgcttatgtttattgtcctcatcatggtctccttttggatttgtcaaatagcggacacagttttttcattgcacattcactgaatcataaacaaccccttccctccctcatcctcctgtatgcacacagtcagttttctccattataggcagagagatttaaaaacaaaacaaaacaataacaatgaaaaaccaaaaaatcacaacatgttacttctttctcaagccctctagtgacttcttatcctgcttgggataaagtctaaactctgtacccactgcaagcccttcttttcatggggtcttctcatgacattctggaactctcgtctatgaaaagccatg

SEQ ID NO: 50683 - DNA, 1281 bp, Bovine  19866880519721
  misc_feature (1)..(1): n is a, c, g, or t
ntgctaattaaaggaaaaccaggtattttaaggaacttagagcttttctatgtatgggtagatgcaggagtctgggctcactgaaatctttcctttggtatacatctcgtatctggggccggtatcctgttttcacaccctgggtttccttaggactcacggtagggactggctgcagcctgatggctattagagggcgggcttctttccctgtcttctcaggggtcaccattggtggtggctgcaatcactgatgactgtgacatccactgtttactgatatggcaggaaatattccacttgtcgtgggggaaggacagtcctctaccccaggtcacagcgagcaggagatagaaagtgagcacctgtatggttcctgacctgtggctggggcagaggtcactcacttttcccaggctctaagtggttaaataactcttaagtggttatttttatttatttatgtttatatgtatgtatttatttttggttatttctattttattttttgttatttttatttatttttgattatttttatttacttttaagtaaataaaaatttacttttaagtattttcagataaaatactataggtttatttaaaacaattctcaccttgagtatgcaaaatacaaacaccacaaaatgttcatttttttactttatagtttaccaatatacaaaatagaagtttgcttaaatttaaagtacatacttttttaaggcaaagaactatatagaaaaaaaaattgttctgcttaaggcatacttgggaataaaccattgtacaaattattgcacatctgaaaccacggtgcataagactgcagagaaaggttaaagtaagccaggtgcgtttacctgacttaggtttaagtgtttcttcctttttctttttaatttatttttggctgtgctggggtgttggttgttgctcaggcttttctctggttgcagcatgcgggcttctcattggggtggcttctcttgtcgtgcagtctaacctctaggacacatgggctttagcggttgtggtacatggtcttagttgctccgaggcaagtgggatcttcctggatcagggatccaacccgtgtcgcctgcattggcaggtggattctttaccactgagccaccagggaagctgtaagtggttatttttaaaagtgctctgggaaaagcaaagcaggaacttggtgggggtcggtggggtaggggatggggaatcctaaacccagagcctagaagtccagactactgggtgtcagcagggttgt

SEQ ID NO: 50684 - DNA, 825 bp, Bovine  19866880591937
  misc_feature (1)..(1): n is a, c, g, or t
natatataatgctttaattgtaaacattttttctacttactgaatctaggttgatatttcaactgtatggtatctaagatagaatgactcagaatttgtgctaaacagaataaggtgacatttttcccatgaccagacgaaggatgaagattcagataagaaccatagcttcactttttcttccttatttcaggccaaaagattgcagggacttccttggccaccctagtacacacaggctcagaaaataaattcattttagtcaattccagtgttttatggagctgcgtctagaacagttccttgtatgtcatttagcttgtttcaatttcatggccacagcttacacacaagagcgtagccttgtagctacaacagcactgagaagcaggacactgattagacaagcctggccgcactgtgcagcctcatggcaggcagagggtcaagatctgttaagctttactggacactaatttctaggatttcactatagcttactgtggacccaatggatctattttgggaagtacttacacagtatctttccaaatgatgaaaatagctagtgaaagttgtgcagcttcttcctaggggtgggaaggaaagctcttaatttttaagaaataaatgttattttaataaccttaaaagacagacagaactacgaaagatggtgaaaacagagtgtgtttgcccagtcaggcagctcaagctcagggatcatatttctttctttcttataacattgcatccttgggcaagttactttactttcttaattttgtcatctaaaattgagaacaattatatggaaacaagttt

SEQ ID NO: 50685 - DNA, 1146 bp, Bovine  19866880685325
  misc_feature (1)..(1): n is a, c, g, or t
nttgaggtatgattttagaaacagagagacacataccagtcagcttttctcttctgtgataaaattaaactctacatttattagttgtatagaaaatagtgctcttcgtgcattaattttttgagattcaagcaaaataaatcatcagctctttttgacatttaattcatctcaatttcattatatatttgaattatgttattaattatccttaattacattcattttaaatggtggaatttccatttctaagtgcttatttcataattcctggaagatttataaattctgctcaatttaacaaatatttattaaggtgattttatgcaaagtatgattttagatgttttatgtaaccactgatttcatatcccttggaaaaattaaacacacatccatctcctataactgtttattactaccattagagctttaggcttggtttttacattctggaagacaatagcaggtgtgggggtaggaaaaggatttttcctatatttggaagaaggaatttcaccacttctgagaatgagcaaacatactggagtttaaagaatcccataaatatctttatttagggagcactgggtgatggataagggattttattcccaacataactgttttattagatgtcataatggattttacatgcttttgtttatcatgatcatgcattatgaataaaaagaaaatattagaaatgacccagtggaaggatttactcaagttcttctaagaagtatggcatctagtggcctgtctcctgccaagcagtgagggtagagtcctagggatgagtggaggcatgaagggatttgagtttctgtaaacagcttctctctgtgccttctcttcccatctctctctctgaacctaccttttgagagattctagcaatacccagttggacccatgggatatggcatggatgttaagaccattactggcaactgatccgtatactgcttgtgttttacttttcaaataaaacaaatgtatttcttacttattgttttttattatattttcctattattgatgtggggatggaatatgtgctgtactccttgcttttatgaatatttctaggcctgattgatgaatgatgatgacccacagcccttgaaaccaaatgagcaa

SEQ ID NO: 50686 - DNA, 881 bp, Bovine  19866880702810
  misc_feature (1)..(1): n is a, c, g, or t
nggatccatctgccaatcaagatagatttctctttcagggacaaaagaaaaagaccctcaaagaataaaaagctttcacactaattaatatccattaaagctcccaccagtttaaagtcttgagcaaagtcaagaattacccagctaattcaattccagaatgtgtttttgcatcattcatctggattgacaagagaaagtgcttccctaaaaaggactaggataattaattccaatttgcagttcatatttgcaaccacaacctcagtatgtcagcctttacaaatttccttggagtatgacattgtaatcaattattcagattcagatctaattccatatacatctagtgtatacccacataataccatgtgctgtgttaggttctagaaacagggaaatgcttaattcattctcttccctttgaacagtgtagaatccactggaattatcttcctgaacagctttcaaacatccaattttatacataccaaagtcagccaggttagaccaaagctactttatatcttgtgcctgaattccctccacatcatgcctcccaagtggttatctagctcatactgcacatttctcaagaaagtctgttggatctttggacagctctaatcattttgatagttgccaatataatggctgataacagttaactacctccaatttatttgggaagcccattggggcctgcaggagagtagagaagaaattttacagtggtcaaaagatgtatctacttcagtagctatgaatcaaatgcacagagcagtagattagacgaaagcttagcaatctaaagtcaatttggaagttttctcctcctttagacccgattttctctgtcaccgcaaatatatagtatgcaa

SEQ ID NO: 50687 - DNA, 1786 bp, Bovine  19866880718358
  misc_feature (1)..(1): n is a, c, g, or t
natgaactgggcttgggcacagctcctggatattgcaagtttactggctctgagctcatgtgaggggattctcaatagaggagcagcactaacattgaaaaggaaggaatagatgcaaccatggtgattaagaagtaactgatagaaattactaactacttaagtatgttggggatatgagaaaaaagtcagcaatgactttgatacatcgagcttgagtgacagggacgctgccataccttagagcagaggtcacatgattaggcaaggtgaaagatacagtgagttcatttttagctctattttgagaatgaatctatagccatgatggccatgatacagtaccttgcttctcaggaaagaagtgagggtgatatatttagatttaaaagaatacaattgtgatggtggtaatttgataattaaactcttttacgggaactttcatctttgtatcccacagctttcaacacaactcttaaacatgttagcaatgtaaaatgattgcctagtgaaaataacagatgcctgaaatctcaaaggaagattgtatattcttttataagcagaaaattgaaaattgattcttggtagaggtgtatatttgaggagtagggaccagtccagaagcttagaagaagtacatcaaaagatgataggagcataaagtaaagagattgtagagctaaggaagctaagttaagggagtagaaaactctaaggaaaaaaaaaaaagtggaaaataaagtagaactccacggagatcaaagagaaagagaatagaaaatagatcagagcttttagcctaaaggactcttttgtggccatgtaaaaagctggtgatcttaatgagggaaaaagagggaaagctggattgtaaaggagtttgagaatgagtaaattcttaggatgtaaagacagtaggaaagcttcttgattcagaaggcaagggtgaaagaaaaaagagaaagtaaccatgattgttccaagcagtatgggggttgagggaaaaatatttatgaagttagagaagatttcagcataacaatggaggaaaagcagatagctcttaagacatttttttcatcctcagtttacttaaccctaatagttttctgtcttattatgctgcatatctcattgcacttctatcattagctattagagaaaacagtgagtgcactttccttctgttaatccttctaccaatgctgtaatctgcttgaagtgttaaactgattcactctaattccctgggatggattatactggaagagaataaactgattagctaaataaagaaaaagacctggaaaactgaacaaaaaacacatttgttttactcagtaacatttggttagtggtaatcagtgcttttcatactgttcatggggttctcaaggcaagaatactgcagtggtttgccattcccttctccagtggaccacattctgtcagatctctccaccatgacccgcccgtcttgggttgccccacgagcatggcttagtttcactgagttagacaaggctgtggtcctagtgtgattagattgactggtttcctgtggtgtgctgcgattcatggggtcgcaaagagtcggacacagctgagcgactgaactgaactgaactgaactggtccttgctgtgcaaaagatcttgaaatcctgccttatgaactttaatgggattaatggaattggtaagcattgtttaagggttttggtttatttactgttactgaagaaatgagatgtacattggacaaatcctaagtactggtg

SEQ ID NO: 50688 - DNA, 3035 bp, Bovine  19866880730835
  misc_feature (1)..(1): n is a, c, g, or t
ncctttccctcctccccctgccacgtgtgcataagtctgttctctatgtctgtgtctccattgctgccctgaaactaatttcaccagtaccatctttctagattccatatatatgcattagtatatgatatttgtttttctcttttttacttacttcactctgtaagataaactctagaccacctcattaaatgtgacttaaatgctttcctttttgtggctgagtaatattccatggtatatatgtgccagagcttctttatccattaatctgttgatggacatctaggttgcttccatgttctagctactttaaatagtgctacaatgaacgttgggattacatgtgtctttttctttttctttttttttaagactgtgaaaatattttttattgattgcttgtaaactgttacaatgatgtgtaagactactgcatgctcaataggcccattatcttctttgagaaatgaaggtggtaataacatgaatttggctaaaacatttttgaatgaaacctaatcatctcagatggaagttttttaaattaaacttttataataaagcattttaattatatacgtgaagttgcaagaaaatgcaatagcaattaaaggattccatttagaatgacagaagaaaaactttttgaaatctattatttacaaattctagtcatgctgtgatacaaaatggaagggaagtcacaattcttctcaaatacgacttgtcccctcctgcaacagttgttttatttaaaaaaatttttttaaaataaaactcgacaaaaacatgtagcttgttaaaatatttgttttaatttacaatattagatctaacaagtgacatgtgaaactgcagatgtgggcagcaatttctgagaaagcaatttaaatggttatgagtaaatgtcattgctggcagtagcagttcagatataattctacccttctgctgctccaagaatgccactactcttgaggaattaaatacatatgctaggattatttttggttaaactggaaaatgtaaattgtaacatcataagccagttgctttatttaagcctgtaaacatttgtgtttttatggatttccaaatgatcatcaaacacacttgcaatgttgatttcttgaagagcaatgatataacccaccattgaaagttttagggtcattaacattacatatcagtaaaaatagtttgtgatgcaaatctgctggcttatatacaacttgaccattttatttagtattaagatggcattattgagaattaaaaattggtaattttttcattacctttaagatataactgacagcagcctaagtttatggtgctatctgccgaacaaacatttagtataatttttactgtcagtatttttcagaaaaaataatgcatgtttcaacagacatgtaagtatttttcctatacatgtacgctttgcattcattggacactgggtgggttaaaattcaaaatgaaggattgttagtgtctcagaaatcaacacatttgtgtcttagagattgatctctttacgtaaagcttcaactttatatacatatctaataagacaggacattgttaatatatgtccagtataattctgttgccttaatactccattcttttacttaaaaacaattctgctgcctatcaactaaactctcatcacgcccactaaaaatgttagagtaggaagctccaaatcgtcatctctccactaaagcaatgattaagttggcgaaactgtcagaatcaccttcattagagctgtagaatctatatcttaatctaatattgatggaggaaaaaaatagaacagtttgaacacaggtaaaggaattaatcagaaataagtacctactgatggaataagtgattttattttaaacaataattttcagattaccttctgctgttaaatggtttaaaattaaaatatcagaagaacagctaaaggaattagaaaatcaaatgacaattatatataaatacctgctagagatattagccaacactttggggataaaagcagagaaaacatcatcttcacatatttatgtcataatatgcacattcctcagatgtaaaatttagaaaaataagatatctttttagtattcttaaaagcatccttctaaaaccttaatggtgaaaatggggttactgtggtttagggttaaagactaaagttaggtgcaagactacttttttagctacataaataaacatgagattgatttgaaagaagaattttgctatgcaaagaatgaaaagtataggaaggggctatataaatatattaggagtgaaatgcataaagacaagtaggcatgaaattaaaattacttttaaatgctaacctaattcatttaaaggtattgaattcatttaaatacctggctttaataagaaaaaaaggcaagagcatttggcataatcaggtagtaacaggaaatttgtaagataactattaataaaatgtaatgaagtgaatattttttaaaatgagcattaaaaaccattaggtttagataaagttattttaatgtgatgaggaaattatctcactaatttgacaaaaagaatttattttgaaatggcaaagtaaggtagaataaggaatgcaattaggaaaagtacaggcagttcagttcattcatcaaaagtgctaggctagcctgaaaattatttctattcatattactagaataaagattttaaaataaactgaaatattaaagtggtaaatgatattgatcactatacagtgattagaatttataagttagagttggaagaaatcagttgtcctgttgcactaatcagtgctctcactcctgttctgtccttttcctagtgtactgtacagaatttccattttcagtagatagtgcccacacatgctagggatatgccccgaggatcttctgtctataaataagaacatgccatatccctgcaccagccagagaaattgttttatttttttttaattcctctgttcaaaactcctgaagattttt

SEQ ID NO: 50689 - DNA, 994 bp, Bovine  19866880809482
  misc_feature (1)..(1): n is a, c, g, or t
naggagcctggcggggctacagtccatggggttgcaaagagttggacacgactgagcaactaacacacacaaggtagacaggcaattaacaaagttgtgatagtgtcaggcgaacagtgaagggcctcagccgtacacatgcatgtatctattctcccttcccattcaggctgccgcatagcactgagcagagttccgtgttaggtgcatcattctttcattaatagctgacttacggtgtttgtgaacacactcatgtttatagttttcggtcctatgcactgagttttagacctaattgtccatttcttaaaaatctcagaaaccaaactctggaagagatctagtcagatcaccattgttttgggttgtcgaaaaagttcgttcggccaacccaatatatctaaatatgctctgccataatattagttaaggaaatgaggcttaaccactggcagcaacacaaaattgaatgtagagacatctggagtctgactgttccattatctgtttggtttgctctaaagaaacatccagcatatattggagctgatatcacctcggtgtaacttctaccaacaatcctaaaagtatcccataagaatatattcccaatttctcttctatctgacagtcctttcaatatttgagaatgactcacacatataatcagactgaataagtatcatttcaaatgctctcacgtgacatgggtgtaagtgtccccatcatcctggttgtccttcatcaaagtgatatttatttataactttcattgtttgcctagactccagtagtctggctagaatagtgtagaagagaatccattaaatccactataatctcagtaattcagtttaaactttaatagtattttgagagggagaatgacatggttttgtaagagctccaacttgaagtcaaaccacctgggttcataggcagcttcatcctgtgcctgatttcttcatcaacaagtctattcaaagaaatt

SEQ ID NO: 50690 - DNA, 1382 bp, Bovine  19866880821550
  misc_feature (1)..(1): n is a, c, g, or t
naaatgagaactttccatttattcttagagaaaatggctggtccatgatgaaaacaacaaagctgtttacatttactgtaaaggactttgaaaacttatattccatattcttactgctttacaaatatattctaggtattgttttatcgtctgggctatacatcctattgaactcaaaatcagaacattcctgctccctatcaacaggacatgcttttggttattggctgctttattttttatcactgataactctaaataaagtctgttttaccttttaatttgcatggactgacagaagagtctgtgtaagagaaaaaagtttcaaggttgcttggtctaaatgtctaaatatttctcatggtctattggtttcttccaaaaaatcctatttaaaggttgaattatttaaactcacaatcatttccaaattaaacactttaatatggaatatgtgacaaattatgctttaatttctgctcttctctccaacattttctaccatcactcatcttgaacctgacacttggtcaggaaccaagaattcaaaacatgttttttttccacttttattacctggtggatcaatcattttgtctgcaaagcccattaagccttctcactttcttgtccccctaccctaccttattttaatattttatgactacatatttgagtgatttttgcatgttttactcttccttattctttaggttaatcaaaattaagtttttcttaaatttctattgaggtattattgatttacagtgttgtgctatgccttttcttgtgatacatttcattaggtcaggtaacatatttatgttactgctcatcactttatagtcaccatacttgatactcgctcaggacagtgcctatatgcctatgtttaaatgcttagcatgtgtttgtcaaaagagtgaatgtatgaattaatacattcttattgattaagtaaaataattctgtaatatagtatttgattgttttccccttatagcttcacaattcccatcaaaactatttacatccttttcttttctatgctcatgttatttatatgtcttgttagtatattttgtgtgtgttaaaatattatcttgaagaagtgtctaatttgggcttcttttgctgacaacaatgtctgggtatagttactcatgcagcaaatattttttgagcagctgatatgaaccaagtcatatttataatcagaaaatagtttacctgcccatataaaccagtatgtagctctgcttctgacttacaaatagtaccaatgatggtgtgccaaagaaggaacggatgagtcaccgtacccatcactctgtgtaacacatttccacacatatggctgagtctctatagcatttgcagta

SEQ ID NO: 50691 - DNA, 716 bp, Bovine  19866880825080
  misc_feature (1)..(1): n is a, c, g, or t
ntgtctttgtcctcgaccgtaaagtatgaaaggaaataatcgatctgtgtatttaaaaatcatgcttgaggctataaaaatataataacatacagtgctattttcagtaaatcacaatgtgatcttataaatatttaaaataagtttactgaccaaacaagaagtatattttagtgacagtgtgtccatagaagagtttaattgaattagggttttgaacattataagtagatacacaaattgcttcagacagtttatgatcctgggatggtattttctgtgtgcaaagagaaacccattcttcttgttactgtcttcaggaccacagagcatgttatcagatagcagtttagatggctatgttaccagggtacagctgtattgggtaggggtcaggctgcattagagttatttagaaacttgacttcagctaaccttggcagagtaactggacctcagagaacagagtgtgtggagaatccaaaaacatggaaaacaggcagagcaggacagtgaaatgatagctgctgattgtcaagacttgtgaggtggaacctggtttctgtgccaggaactttcctcacctgaagccttcctttgcaacagtcctgaatggtagctgtgattttacctgcctctatcttgggtttttgctggacaactcattgaatggccctgaattgatcctcctgcagtcgcttattacctgagagaaa

SEQ ID NO: 50692 - DNA, 975 bp, Bovine  19866880833854
  misc_feature (1)..(1): n is a, c, g, or t
nctgacatagtattaatagctgtgggccttgagctcaatgctaatgaatcaacaacatttattaaataagatgcctttaaatagaaacacacataaacaaggttatgtattgactagttgatgaaaatcttgtgaccggaggctcacagaatcctaactcaatctggcatttccctgaagagcaatggttcagtggttattaattcagtgttcacagcaactttatagaacaaaactacccaaataatgagaaccaactgtataacaaacgtaattatatgattttgtatttccacactttgatcttgtagaaaataattttccagtcggcacttaatgttgtccttaaatagctatctaatccatgtatataaaatacatcatacatgcacttataaatcagagaaggcaatggtaccccactccagtactcttgcctagaaaattccatggacggaggagcatggtaggctgaagtccatggggtcgctagagtcggacacgactgagcgacttcactttcacttttcactttcatgcattggagaaggaaatagcaacccactccagtgttcttgcctggagaatcccagggacgggggagcctggtgggctgccatctatggggtcgcacagagtcggacacgactgaagcaacttagcagcagcagcacttataaatgtatatgtaatgcttacaaaacaagttattctaaatcataaaaaatcaacaatttactgaataacaaagttatatgactctggacttgcttcagaataatctggggagttgagcagtggataagggtagatgaaacaagactggttatagttgaaaaccactgaaattggggagttgagcagtggatgatggtagatgaaacaagactggttatagttgaaaaccattgaaattgggtgatgatatatggagcttcattatactctactcctgtaaatgtttaaatttttcca

SEQ ID NO: 50693 - DNA, 974 bp, Bovine  19866880872468
  misc_feature (1)..(1): n is a, c, g, or t
ngctgtgagtgatacaattggctactctattagataatcctagagccttacctctatggataattgttgctctgtggttccaaaaatccaattaaaaaaaaaaaatctgcattgtgtatgtgaacacaggttctagaatcagactgaagacttgcctggttttaaatcttttttccaccattgttcagctatgagaaccagagaaagttacttaaatgttctcatatttaaaaggaagaccctaaaaatagtactattttatggtcattgtcatgattaagtcaattaattcacatgaagttctttgcgtggtatctgaaatacattaaacttaaaaaatgttaaaaatcaaattgaccagaaaagaaagataaacattaaaatatctgtcaattccaagtcatgccatcttagataccatatgcaatgcatcaacatcacagaacaggaaaatctctctaaatccaactcatttctttttaatgattagtcctccagtaggatataaaatcattgctgctcattcttcctgcaaacttcagggttctcagtccttgatttcttgtgagtcactttctgaaccagaacacacatatatccgcatagataagaaataaatgcaggtcaggcacagattaaatgaggcttacaaaagtaacatttctccaaataaaagttagtgacaagagatttaagagtagctacaacatgttataactacttctcaaatattctcactaaagaggatagatttttgtcttgttttcacaaaaataagtgacctgtttgggtagttttatgagaacaattaaattgcccacataataagtgtattctatttgaaatacactaaagaatatgaagtggcaatttatgttttctacaattattattccactttcaagttcttagcattatatgtagccaaggttcgattctaactctcgattcctcagtgacaaacaaaagttttc

SEQ ID NO: 50694 - DNA, 1727 bp, Bovine  19866880933347
  misc_feature (1)..(1): n is a, c, g, or t
ncgcgcaaaggtgcagcatattgcccaagtccagagactaaaattcagcacacgagcagtctgtctataccactttcctcagagaagtcacctcatttttacccgtgttctctaaaaaccaaaggcagtgcctctgaagcgtaggcttagagagaatgtagtttaataggctctgtccatggtcctgaatagacttgggcttgttaacagtgggtttgactttctttatcttgctgccctgtagtttggacagcgtgtgtttgtgctttcccttcagactcacccagtaagcttccccaaattcaccgcagcttcagggccccagggaatgaggactgaattggggtcatatgcatcaaccgtactctgtcaccaaagtgatgctagaggaatgaacagatgtgtatcaatgcctgtggtattcaaaacaacatattaaaccatagatttattttaattccctgtgttctaaagctggaaggcagagatacaaaattcataccctgtggtttctttgtgcttattttcttcttcacagtgtatttattccttgtgagcatctttgggcatgcattgtgttttctctaatgaaagtagaaaaattgtatcctcatcacttatttttagcactgttgctatgctaaactgtagcccaggcatcttattaaaacaaattcaagatttgaattttcattctctttaatacagtggcattgctattctttccgaaaagatgtcaccatatatgagttatctatttaaatatttcctatcagttgttggaaaggtatttctcatctaacaaataaaagattggtacatagaaattgggagcaaaatttatcaagggttcttttggattgtttttgtggataggtgaagggtcaattatttctttcataccatccttaagtgtgatttgtggtatctttagggtgatgttcacagtgtaaaacttactgtgctaaataaagtgattggcaagtgtgctgttaattgccatatgtcatggttagaagacttcctgacatatagattgagtgagctgaagttttctacatgacattgaggttttacagtatatatcgttgagacaacaatctgccttccaaggctgcttatgcagttgcacttatgtgaagagcgatgatgtgtatttgctgtttctacagtggagttcctagttgttcgtctattattttgattctcagcagtagaatcatggagctggattcctccaaatagactttggaggaatctggatctactcacaggggctttcagaaaagagaggaggtaattaccatgagacaatttctggcaaaaccgcacttaacttaaaaggttgacttatgttttaggtcatcatattagagttatacctcactttaattttgataaacatgctagcataaaaaataactggtgataaagggaagaacattaaacttgaagggtatgtgttctgggccaagtgttaggctatttgctttcctaattgctatctcatttaatcttcctaacagccccgaaaggcatggtttgttatccccatttcacagatgaggaagccaaattcagagagattaagcaagttttagctgtaaggggttggcctggcattcagagttaagcctttatgactcatgacttaaagcctaagatttattatatatgatgctaaagtcaacatgcactttctttcctatagaaggccacctaccatt

SEQ ID NO: 50695 - DNA, 2015 bp, Bovine  19866880951838
  misc_feature (1)..(1): n is a, c, g, or t
nagagccagtttctcccccagacctccaaatatttatctttaggatgtaaaaagaagtgagagactggatgaccttgtttttgctgaatttgatctctcttgcctttttttctttctcttttgtctttttgaggggggatcatgtgtacttttttatgctgaaaatagaagattttttcccttgcagtaggcatggaaggtttaaaaaaaaaaaaaaaaaagcgccatagcacatgcaaatggtgttagagaatacgaacaggctgctccatgatcatggaattccatggactgactctccagattctcaattatgccatggttgctccttcaaatagcctagcatctctgtggaccacatttacagacacagcttagccattaagcaaacttaatctctcttgcttaaaggcaaactgaattggtattgtgactcattttcttccttccttctttccttcctttcttcttctcttccttcttccctccctccttcttcctttcttttcatctctcatctgtccatctacctacctacctgaatttttttttggatgggtcttatacagagttatacataggctataaaagggttggatggttttatctaccttgcttatttaatctacacaacaatcatgttcgatagacatcattaccctcaagctccaaataaagaaactgcagtgtaaagaagtaaattatttacctagtttcacggcccgcaagtggtgaagacttggagctgggtctttctggttctgaggagttcatgttcttgactgctcattacctagagtcactacatacattttgtcctaaatttgtgcaatttttgccaaatgacacatggctgccaaaaacaaccatctgaaaattgacaaattcattcatgcagttacatggggaggtttctctatctgtttatcgtcgttcccaactttttgttatattgatagagtagtgccgtgctgagagtagagaagggtcattatccccagtatttctcaaatttggggtgacatttctgaaaacatgagcacctctcttccagtttggggtagaaatggtgtggttgcagactgagggtgaaggagaaagaaccctgtgctctttggtaagaatcccacctctgccgttcccaccttgcagtccaaggatagagttgctaggaaagatgacataattaactcctaaaataaatgaatgcttttaatgtaaatgaaagtattattttaaattaagatggattatgatggtcctgttggaaaataacatttcacctaaaatgaatcagcctgctcaagaagcagtgatatatacggaacagcttctccacagaaagtccgagccgtttcttctccagcaagtgacccagtaaaagtgctatatatacacccagggcctttccaactgtataggcgatgatggaaaagaatgactcagcctagtaacgacaggagacccatggaaatggtttctttttctggatttggtctaaatctctgagtttctttaaaagttttaggccatttaaaatcaatagtaatatttaatatacattttataaaaaggaagtacatcttttaaaaaataaattcagggctatcccgtgagtcacaaatgagcttattaattggggtccataagagaacgtagaaattgtatgcattatacaatacatgatgccttttggcctctgttttcctcttcactcaaattatgtaagtcaaatcaggtattaaatttgctttgctacatgtttaaatgagcattaagggatattgcaaatgcattaactagaaacaccacctttagcagccaatattgaatttatcatttttgaggactaaattggacaaggattaaaacaggacaggaagtctagttactcgtataattgtataattgagtttgattgacattttagtgccttaatattgagagtcatgaaatcagttgccaagagctgtggattcagggccatccatgagcctaccaccaccactgccctg

SEQ ID NO: 50696 - DNA, 1499 bp, Bovine  19866881136313
  misc_feature (1)..(1): n is a, c, g, or t
ntgtgtccaactctctgcgcaccccatggactctgccaggctcctctgtccataggattctccaggcaagacactggagtgggttgctattcctttctccaggggatcttcctgacccagggatgaaggcaagtctcctgaactgcaggcagattcttttgctgtctgagccaccagggaagccctcagtggaagagcaaggatttatttgcactgagggcctgtgtttttacttctgcttcaagtgttaaaaattcacttcatccaaatgatgcccctgctgatacatgaactggtcagagtgcatcaaaccagggaaagcgtgttctgcaggaaagtaactgccgtctttctcttgatggtgtgtgtttatggatatcgtcagttgctcagcatttctgttttatctgaaaagtattttgtttattcactgacatgttccttgtgaataaaatgacaagaggccattattgaatctgctgctttgctgtcttcatagaaaggatgattcagatcaaaaatcagtattcatcgcttgctaacatgtctctggttcatatgtgcttttattcaaacatatattattagtgaatttaactgtaaactaataactgttgtgtttgaatttttaaatatcacattcttgcccttgaggaaaaaaattgaattaaaaagtgcttagtttgtgtttatgtgtttgcttctactaattaggatgtgcctctaaataattagatatctcagattgatcattggaaggttttcgaaggtcagagtatcagctgatctatgactgattcagtcagccagtatgtggctattgagcttttcctgtaaatcaccatttttcatctttataagtagaagacttgtgccaccattcaaattagcattgattaggaagggccaggggaatttccttctttttcagaatggttttctcaggcagaacagagaagcttcaatggttcagcagctgttgtctgtcctcttttctcactgtaaaatagttcctggtttgcagtcatcttccttccgccagacctgaaccataaaaatagaaacaaattagatgtgtgtcagaaatgaaatacctcctgcttattgagagtttaaaaataatcttcataattagcatttcatatcctggaaactcctactgttgtgcttgtacacacacagggacttttcacccccagtgcatcctgcacctggagaaatcaactgctcctgtgataggtattgatacattggaattatttgattatttactttttataaaaaaaaattggagtatagttgtttacaatgttgtgtgggtttctgttgttatagcaagtgaattattttattcagtggttaactgctcattgaggagccccaacctgttgagggtatgttcttgttgctgttcagtccctaagtcatgtctgactctttgcagccccatggactagagcatcccaggcttccctgtccttcagtgtttcctgggagtt

SEQ ID NO: 50697 - DNA, 2523 bp, Bovine  19866881142899
  misc_feature (1)..(1): n is a, c, g, or t
nctccttcttcttttagaattttattatactaaattgaaaaaaaaatagctagcctgaaatctctcaacaacattggttggacgaagttcactgtgtccaaaccctttggcctaaaagggctccacttagaatcctcttacctaatcatcttttcctatacatggcttcttggctgatttgtaccatcagatagaaattggcctctgaagcaccccagttgacagggtaaggagaaaagagaagggaatgttttgtggtgtttatttcgcatttcttccttggagggaccacctctctccaaatccatagtcctggtaaagctatgaagactatcctgaacatggacagcccagcgaaaaggtagagagtagctgtcctctggacagccagagcacttcactagacatttctgagactgccagtggggacaactgtttcctgctttggagacataaggctgacaggatgtgaatttggagctgcctgagccagcttccctcatgacatgatggaagcccatatgggttgggaaagaattaggtcaaccttcagaaagaaatagatccaagaaattgagaaacttaataacttcatgtgaaaccctggatggaactgtttgaaaccatttcctacgcctcctccaggagcttcccacttaactgaagccaatacactctttttttcacctgttttttggagttacatttttgtcaattttctacaggaaatgtcctgattagctagggagaaatattaagacagctttgattttaattattccttagtgtccagggaaaggaaaggaaaagttaaaagggaggccatgttctagaaccaagatattttcttctttcagttaatcatacatttatgaaatgtttattcagtgcttagtatgtcccaggcatttttttctagttgcttgggtgagatctgttacagaacagacagatattcttgctcttgtaacacttacattctaacagggagagaaacaaaatagggtagatgcaatatacttgaccatgcactatatctaggaaaggatggttaaggaaagttgtaaaccattatactagagttaatgtgttggaaaaagaaaaaaggtacttgctgagagtgcttagagtgaaacacagattatggaggggtaactggtaattgtaatgataagatctaacaggtatgaccaaggggatgagtgactgaggtacattggagaagagaatgttaaggaagtagcaggtaaagacattgaaagcattatttccatttaggttggaattccaaacaattaaggcagaagtgatgttagcaaaaactggcagtaagcaagatactaaggtcattgagacatgaggggaaaatgggtattaacaaaagaggagaataataattccaaaggacctcagactcctgcagaaccattctgagaggaatgttctatcatagaaaaatgacttttttggccagggaagaatggatacatgtatatgtatgattgagtccctttgttattcacctgaaactatcacaacattgtttgttaatcagctataccccaatataaaataaaaacttaaaattattcacaacctaaaaaaaaacccaatgatttatgagttatattaaagaacaattacttaatgactttatatctgagtctcagggcctgtgtggattcttgatttaagatgaatttaagaaatttggggaaatttggtaatttgtgcataattgaccttaatgcatcttgtacccaaacactctgctcagatttcaggaatccctttgtggtttgtaggggagctgatgatcttctttgtcaagtctaagacctgaattattttacatactgatggctaatgagaaaagaagacagtcaacatttgtccattagtatttcttttcttttcattcttttgttttttctgtttgagagaatgctacagagtatctctgaagtcttatgtaattcatcggtagctgatgaagagggtagttggggatatggactatttggtccaattagctaatttggatgatataatttataacaaaaataaataatagctacaaaacagatgtgtactcaactgaaactatttttctaacagaatttaattttcttcatgagctctcatttccacttggcagtgaacactttaatttcaacaccttcaggaatactcagtctgattcagcagtttttttttttttttcagtcaaattaagcactgtttctgatttactgcccagttctatgttaccacatcagtactgcctcttcccttcctttgcggttttctaacgctcatgcagaaatacataccgctataggaaggtattgcaagagaacaaggcatacgtatggtcttaggcatacaatacatatggtttgggggatgatttaaggggataagcggctgagataagttgaaagacaagatcatttgaggaaggcatttcaagatgttagaaaactaggatacgataagaatcttttacatgtatgttaaata

SEQ ID NO: 50698 - DNA, 844 bp, Bovine  19866881167886
  misc_feature (1)..(1): n is a, c, g, or t
nctactatcaaatctatttacacgtcagtgaaaacgcttaatctcatgtcagacctggtgagaggaagcagagtattgctgctgctattgtctatgagctgtttctctaataacgagcatctcctccttgtgctttttaaatggatttctcattatcactatcaattaccttcagacttttaaagtgaatatgtttccaacgaaagtagaaatgcctttgaagaaagtcagtgagtctaaaaggtctagaaaatccaatattctagaaggaaaaaccataatgatcaagcacattaagataggtgattgttatgaggtgaaattttaatttgtgtgcaatattgctcagtttctgcatacaataatgtcaataagttcactgttcagtaatggaacagtgtgttcaatcggtgtgttcaattctttatgtttgcatgaatactcggcagattgttatatgtgcgtttaagagttattttagtcaaactaagaaacctggttggagtttttgattaagatgggaaacacataattatttctccatttacagcagagagatacatgacctttcaatccccaaattcactattctacaaacattcaggaaaggataatatccagctaatgggggatgtctaaaatccaggtggagactatggaccagtcttcaggttaacacattccaggacttcatgcgtttgtggggcacactcttagctcatatctgccttgcagattttggaatgcccataactctctgtgtatcacagagagcttgatacacagagagttatgggcattgatgtattgcttcgttaaacctcaactttatacttatccacca

SEQ ID NO: 50699 - DNA, 1061 bp, Bovine  19866881275472
  misc_feature (1)..(1): n is a, c, g, or t
ngatgcatttcttttgtggtagcttaatggacttctgtagttcacctattcaactctgggaagacttgttagctttacagaagaataaacctttcctgagttgtggtttatctgtcattcttaatcacttactttcggctgaccattgcttctggttagaattaagttgtcacttcatcatttgatatttgtattatccatatttttgagtttattttcctggactcaaaattagacacataagaattaaacttctctgcttgaggaaactctgaccttggtataaggaactgttttctttccagcatttggagaccacgcatttagagccattggtcaggtctttgtcagtgccctttacagatcaaatcaaatgtaattttaaatcacattagataattaattaggcagatgagattgcaatttttccttagtgttctgttgagagcacacgagtggatggctgccaatttgtctcacagcctgtctattaaccgtatattaccccagttttcaaatcaactttcaattcagttattcaattttgggactgataatgattctcaaagatagccagtgcctcattttaggatgaagatgctgagatctgatattactcaaaagacaagctgtaaagctggcaacagaaatcacatctcctgaaccctcagttcaggtttagggtctgggaagttactaataagttagaaaaccatcaggtcattctaatgcagagcacagtaagtgtatatagtacagaaagatttatagtgataattaaaagcaaagtgtggcattgtttcatttgcttaaactacaaaaggaaaactgcatatgtttataagtttatatatgtacatgtgtttatgcaatatgccctgatattatctaaagaatgagatgacttaaaagagtagtttgaggatttccacttttaaaatttaatgaggaacattttcacgtatagatgcttagaaatttttcttgaggttttaattcagaaacatagggtagatcccagtaatattcatttccccgaactcctgtcgaattctggggca

SEQ ID NO: 50700 - DNA, 862 bp, Bovine  19866881355157
  misc_feature (1)..(1): n is a, c, g, or t
nctgaaaagagaaatctatcttgattggcagatggatccctttgtttcatgttttattgtttttgaagaaaggggctttgatttcctgccagggagctttcataaaaggaccttagcatgctgagtcctgattaaacatcagggaaaggggatgattcttttgtatagctctttcctgaaaggtgaggaagccaaaattacagtgactctaggacagttatctgctgaaggaccacattcagctacaggaaaaataaaaaatcaaccattgcatagacagcagtaatagtgggatgcaaatatcatttgcccctattttatgaatcctttaaaaaggtctgtacaataaagggtcatactgatactttagtggagagaatatcaggttagttttatttattgctgtagagtcttgacctatatagagagctttttataaagttaaatagattttcatttaaggattctgctaattttagcaagtaaaagagatttactttagtgacaagtgtttgtctaaattaaaccactcacgttgttttggatttacaaaggttgtttttaaatcttctgttgtggcaatcctgttaactaagtctgtctccccactcccctccaaatcaatgatcaaattcaatttataaataaacagagctggattgtcagcaaggttgagtgtcagagagagtggagttcttgagattatagtagtctcagctttaatcttcaggtatagcctggctatgccacttgctagtcatgtggccttgggcaaggttttaactgctttgaatcttagtaagtgtatacattgagataaacatatttaccggcagagggattgggaaacttaatcagataa

SEQ ID NO: 50701 - DNA, 1931 bp, Bovine  19866881445694
  misc_feature (1)..(1): n is a, c, g, or t
ncctggaagaatcccgaacgtgacttctgaatacacatcaagaggtgtcttgttctattcttttgtgggtatccctctccatgggccactgagacacataaacaggaaccatgtttaacaagttaggtaacctttaaggcctataaaccatatacaacctgaacatggctagccagtgccttgtcactgaagtgggcaaggtgttaaaatcatatttgcttagaatagacacttgaatttattttacaactgggttaagctcctcaaggcttgacacaaggcagatatcaaactacgatagaacctagggaaatacttcttcagtattaaccatcaatgcaaatatttaaagtatactgtttctaccaagagaatgcagagacaaaaagactaacataaccttcctatttccagatcctactaaaatccagctccaaagttggaattgtttatgtgtgtgtgtgtgtgtgctcagtcactcagttgtgtccaaatctttataaccccatggcctgtagtctcccaggttcctctgtccatggaattttccaggcaagaatactggagtgagttgccatttcctactccaggggatattctagacccagggactgaacccgtgtctcttgcatctcctacactgacagccacccgggaggcccggaattgtttataaagaactctattttcagtatatattctactcagataccattcagtgtgtctggaattttatcctggaaatccactgcaagcagtctccatgttacttgtcttgactcctgaattctgatttatcatctctagtaagcgagctggtgagcatcatacaggaggttcacagggcttagctattcaagaagtgtggattgaagttcaggcttcatgtacaatcttggtgacaagctgtaaaggcatgttatctgcctaaaacactatagaacaatcctttgccataagactctcctccatagcttgtgccttatattttatggggagatgtcaggtatatgttgggtatatgctctatttatctcagttcttaaaagtcctcagtggataacagggaagtccagtgacgatactgaccataacataccttactaatgcacacagatacacagtagtaacttctttagttttggtacttgggatacaggaggaggtggaagacagggaatggggagagagtaactcataacgtatttggattaagctggttatgacctgactgactgtcagcccacgctgctcgcaaagacagttgtttctgatccccattacagggcctgggatgtggtttacacagctggccgaaagagtggaggtttctctgataaagagtgaagcctggtgacagaagctgacaaaagtgaggagactttctggccccaggtatctatagaaggaaaaagcagaatgacagttactgcttatgggagttctgctacccagactttgatccacatgagtgccagaccactgtcctaagttcctgatacacttccaggctctctcagcattctttaggagtcaggcaggaccagtttgtaggttgaaggtcctcaatgtttgtgtcagaccaaactggcctaagtagacaccaagaatcacttataaatattctgaatactgaccattctctccaacagtcatatggaataggtattactaatatccttattttatagatgcaaaatctgtgatttgtctgagtagctgttaagtggtgcagcttgcatttgatctcatatttgatttcctctgggatccttaaatgcctgaatcaggcttgatgtaccttgcctctgcatgtggtaagtaagggcatctgaaagtacaaaaggtacctactttcctagatccattagattaagagggaaatcagagaaacatggccaggccatttacctgtaacgttatctgtggta

SEQ ID NO: 50702 - DNA, 1119 bp, Bovine  19866881463107
  misc_feature (1)..(1): n is a, c, g, or t
nattcctgttgtgggttgttatttagtgtatgtaaagcaagaaaatagaatttagttgcctattaaaatgtattgaagcttctgggtatgtttcttaaacaaataattagaatgcaaggtaaatctgacaccatgctattttattttgtgaaatgctttaaatttatcagcagtttaaggcaaaacactctactgcagttaagattgagtttcaagcaaagagacttacatgtctctgaaccattaaaaaaaaaaaagtttctatttcaggcagtttagaaacaggtaaggcaaagagtataacccaagattcatttagcagactttcagcccataaaataaatacagaccaaaggaagaccacagtagttaagaggggaaccatggtgccgaatttgagcagaggagatattttgctattggcaagatgctagaaagagatgaaagcatgcatttaaaaattcaggttgggatctggagagaatgtccttactgtttctttgaagataggcccaataggaaaaagtcatttcctaaaagagacacagtaagggggaccctgatattcttcacagttaatagattctgatgtaagattaggtaagctcacatccagcatttgaaacaacactggttagtaaattaaggatcagagctcatacaaacatgaagattaatgtggtgtattcctgaaacaagctctttcctagaattaaaagaaaattaccattcttattttatgagatatttatgaaaggagatgattcattgtagcagtaaaatatttatgttactcaggtaaatgtacagctatgattatacaatttccaacagctagtgaagttaaattccttccctgttatggaacttaaaatcctaaggccataactgaatccctttagtgtatagtagaaattaacacaacattgtaaatcaactatatttcaataaaataaaattttttaaatgtcttctagataaaatattactgagtcagcctcaaagttgtcatttgtacgtgctcaaaataagcactgggcttccttgatggctcactggtaaagagtctaactgcaatgcagaaacccagcttcaatccctgggctggggggagatccc

SEQ ID NO: 50703 - DNA, 1518 bp, Bovine  19866881931935
  misc_feature (1)..(1): n is a, c, g, or t
ncattctctgaattttaaaaatattacttcttatattgcaccaactgaatttctatttcctagggctccacaggaatagtagacttaatcatctcctggaagcattgagattttcaaagacattttcatatttccttagatttttcaaactttcttcttagaatacgtttctgcatcttttcatcagcatgatccattcatgattctagtttaattgtatgtcaaatttctacactatttctcctcaaggaagcagatatgtcatcgtacagattaattatacaacatacaattagtaaaaatttcatgtacttgccaaaatcaagctataaatgtggtataacaagtccattgtttatagttcatgcttgttattttgcattgactggtagaaaggttgacatatagagaaatgatcttcttaaaatctatgccaaaatctttaaggacactgtttaaatttaaggatggggaaaatgcattatgatttatctcagatgaattattaacaaaattgaaaaattaccttgatgaaaaataaaacaatcacaaaaaagaaaaaaaaaaaagaaaaatgaaacccaggaggatataacatgtattaaaatcataatttttgtattaattacaacaaattagtgaaccccagattgaaaacagctggagtcaatcagttaattagaataaagtttctagaaaattcttacaccactcctatagactgcctagaaaatttgtttttcaaccgtcaaatctggaaaatgcattttagaagcagagagtcctagaagagaaatacttctaccaagaaaacagcaaaatcccatgaaggtacaattgccaccactccaggttcctttggccaagtgaccagctggacaggaaagaagcaaccatccaggctgatgtaattgttcttgatcatcaggagaaaataggtcttttaagacacactgaggaagggaagaatatatttggtaatcaggtggtcctctggtaatctggtgttctcttgaaacttccaaacctaattttgatggtaaatagacaaatacagtgagtggtctgataaaattatataacccaagagatcagatctctcaggaatcaaagtctgggttactggatcaggaaggccttctagggatttattggaaggtaagagaaatctaactctcaaggccagaatactggagtgggtagccattcccttctccaggggatcttaccaacccagggatcgaatccaggtctcctgcattgcaggcagattctttaccatctaagccaccggggatgctcagatgagcagcagaggaaataaaaatgaatactggttgtgttctcaaggtcaactatggtgatgggtactatagtcattccactaaacttctttcaactttccccagaggacctgttcccaaatacagaagacattatataaaagtggaaccaagaggcacaaagaatggactgttattgatgtgccctgcaggaccattcctccagcttgccagt

SEQ ID NO: 50704 - DNA, 481 bp, Bovine  19866882041666
  misc_feature (1)..(1): n is a, c, g, or t
nttgagggacaggctaagctcaatagaggtgtcagtatttgagagattttatttagcctcaatccattttaaattagccacattttccatattcttttctagttgccataaaaatcaacattgcacataaaggctgattacactggttttaagacaaacaggagaagtgagctattatagtttcccctttaaagtctcttcctcttgtgggcatctcaaatgtatagctacacagtaccacttacttgggggatgcaatttcttctgtgactcaggactttcctgaacccagggatactcttagcaattaccactcttcccacaaaaaccttttgttaaaagatcaaacacagaaagtccaaaaacaatttctcaacattaaaagaaaagattatgtaacttaggtagcttacaaataaatccagacctctctcataaatggctgctgctgctgctgctaagtcacttcagtcgcgtccga

SEQ ID NO: 50705 - DNA, 2274 bp, Bovine  19866880183486
  misc_feature (1)..(1): n is a, c, g, or t
nttattttttggggctccaaaatgactgcagatggtgactgcgccatgaaattaaaagacgcttactccttggaagaaaagttatgaccaacctagacagcatattgaaaagcagagacattactttgccaacaaaggtctgtctagtcaaggctatggtttttccagtcgtcatgtatggatgtgagagttggactgtgaagaaagctgagagccgaagaattgatgcttttgaactgtggtgttggagaagactcttgagagtcccttggactgcaaggagatccaaccagtccattctgaaggagatcagtcctgggtgttcattggaaggaatgatgctaaagctgaaactcctagtactttggccacctcatgtgaagagttgactcattggaaaagactctgatgctgggagggattgggggcaggaggagaaggggacgacagaggatgagatggctggatggcatcactgactcgatggacgtgagtctgggtgaactctgggagttggtgatggacagggaggactggtgtcctgcgattcatggggtagcaaagagtcggacacgactgagtgactgaaatgaactgaacagatacacattatttttcatattattttccattatggtttatcacaggatattaaatataattccctgtgctatatggtaggaccttgtcatttatccactctgcatatacagtttgtgtctgtgaatcctgagctcccattcccaccctctcccaccctctccctttggcaaccaccagtctattctgtttgcctctgattttgtttctgtttcatagaaggttcatttgtttcatagtttagattccacatataagtgatattgtatgccacttgtccttatctttctgactttctctactttgtatgataatctctaattgcatccatgttgctgcaaatagcattgtttcattctttttcatggctgagtagtattccattgtatatacatgtagcatatcttctttatcctttcatctgttaatgcacatttaggttatttccatgtcttagctattgtaaatagtgatgctatgaacataggggtgcatatatcttcttgaattacagttttatctgactataagggtattagtttttaaaataaataaagatggtagtggaatttgaaggcaaatcccaatctagatctcacaatatacactactttaatctattatgaagttgacatttcaattcagtgggagaaggaagatacaggctcatctgaccatccatctggacgaggatggaagtgtacacatctctcagcatttgtagaagtaagttctacagataattgaagactttaaagcaaataattaaatgtgaaaataaatcaatgaatatataatgaataaattacttatagaaagaaatctaggagcgtatacatacaatgtagggattgtggagattgttcttaagtaagacaaaaaaccgacagctatagaaaatgtaaataaggtcagtgggaaattataaagttaaaaatgtatttgcatcacagatgattaaaataaagttaacatctttaaaatactgagttcctactaaggagcaacagataatagaatatagatatgaaagaataatttatccaaaagtaggtataatggccataaacatatggatactcaaaattatcagtaatcaggaaatgcaaattaaagtaacaatgcattttccctttataaccatgtatttaataaaagcataatagaaggataataccatcactctcttaagaggtaaggatgcacaggaaaaggaactgtcatactttgcaaattaaatgttagttgcagtatggcacagagaagacaatggcaccccactccagtactcttgcctggaaaatcccatggatggaggagcctggtgggctgccgtctatggggtcgcacagagttggacacgactgaagcgacttagcagcagcagcagcagtatggcaatatcttctgaaaataaaaattcacatacagttggatctaccagtctcattcctaagaagctattccaaagaaatgaaaacataatataatttcataaaagtatatggaccatgatgtttattagagcattgttcatacaattaaaattctgaaacaaagagagtctccatagaagagtggttgaattgatcttcgaaagaaactttagaaaaatttcataaaatagtatgcagccattacaaaggataaattttagcagagtctgtatagttg

SEQ ID NO: 50706 - DNA, 1311 bp, Bovine  19866880466261
  misc_feature (1)..(1): n is a, c, g, or t
nctctgtccctagagacatcacattgcagtgcctggaaatacagcagtggccttctctccagctccagcatgttgttgcccataccccaaagctacattctttgtgtctctaaactcaaaagtccataaaagcaagccatcttgttgctattccaactcctctctccctaaaggctgtgactctatctggagggcctggtgggaaagagataccacacttttttccctgctgccttgatcctcatctctgtcttcacttgggccatcagagacacaacaaaatccagcacacccctctctctaaacataccctctggagaactgtgccctcaagcacatcaaacacacatttatgcctagagaggtcagcagcccagtcaatttccaaagtctaactcagaaggacacagtatgggttcaacggtgacaccctgtgacatacagcttcccaggtggctcactgaaaaagaatctgcctgtcagtgcaggagacacaagtttgatccctgggttaggaaaatcctctggagaaggaaatggcaaccgaactctagtactcttacctgggaaatccgatggacagaggagcctggtgggttacagtccatcgggttgcaagagtctggcatgactgagcaactaaacagcaacaatatacatatatatacacaagtgcgtgtgtgtgtgtgtgtgtgtgtgtgtgtgtgtgtgtgtatttcaacaaaaagactaaaaggaaatataccaggatattaatactcattccctctgtggagtaagattccaagtaattttaattcttggatgtttgtataatctccagattttctagattattaatcatcagaaaaaagtgttgattaaaaacatctatatcaagcctgcaagatagccagagagctgctcttgtgagtactcctgcagaagtcagcgaggcgaatgaggaaaccatgaagtgaacgcagaggtgttaccattgcatggttgatctgcataaaatccagccagatagctcatgtcccaggaaatgtcagaatctgccggggtccgtccattatcttagttcattaagagtaaaaagcacacaccaaaactgattcctggctggcttgttgcttgatgagtctcaagattcacaaaggcaaggaagttcattgtaggggaaaaaatatgtaagccattcatgtgtaccaatagctttggaattagcggaaacctcacagggaaagccataggagttgtcagaggcagcctaatgaagacatctgccgaatagagaaatttggccagaaacataacaagacattcaga

SEQ ID NO: 50707 - DNA, 1080 bp, Bovine  19866880480535
  misc_feature (1)..(1): n is a, c, g, or t
ntgcagagtgcagcaggcaagagtgaagctgattatctggaaatgagacaggtgtttgatggggctgctagaatctccgagagccagcctcaagcagttgatatgtcctttgggtgaccagttttggtgtggacattccaagagtgcacaggaccacctgcctggagaactttggagagggatgggagagtctccagtatgtgaaccaggtcactttttgaccttgtgaatcctggatcatttcccaaccacaactcttagataaatacgaaggcaagggaaaaagaagttcatctgtcagaagtctaggttctccaaacaaaattaaacagctgattataacaggtctctacccaggcccctttctctgctgttgggagagagcccggtcaggtcattgcattttcatttactctgacgttcatttctccctgtagccaaagttggagagtacagggtgttcttaggtcgctgcactgaaacaatccatgctagcatcagctgtgggccagaggctacagtctacattgaaagctcaatgtctatgcagcacgatgttcaatgtgacagagctatctgatccatgttaggaaaacagaacaaaggccagatcatccacaggctccaagggaagaggaaaaacttataggcccactgatttggttggacatgggttgagatatcggagaaggcaatggcaccccactccagtactcttgcctggaaaatcccatggacggaggagtctggtaggctgcagtccatgaggtcgctaagagtcggacacaactgagcgacttcattttaacttttcactttcacgcattggagaaggaaatggcaacccattccagtattcttgcctggagaatcccagggacgggggagcctggtgggctgccgtctgtggggtcacacagagtcggacatgactgaagtgacttagcagcttagcagcagggttgagatatatcattaaatttagggagacacagtgtgctgtggcccccatcccagagtccctgcttcttttggcatcctctaagcccttgccatttgagagactgacaatttctaaat

SEQ ID NO: 50708 - DNA, 1296 bp, Bovine  19866880561256
  misc_feature (1)..(1): n is a, c, g, or t
nacttttcttatgtaatcttttcagataaagaaagttaagaaaaaaacagtcagtaatccaagtgctccagccagttaccttgatttacttcaaactgagaatatattatagtaggctgcctctacctgaaaacataacaggcttcgcagaactttccatgttaaacaatatgtactagaaacaaagagaaaatttgtaattttgtaatgaaaagtaacttttcactagaaaaagaaaagggattaatgtagtagaaattatatgatagttttgtgtttttttaaacctgtttgtgtgttagtcgctcagtagtgtccaacacctggggaccccatgggctgtagccctccaggctcctctgtccgtgggattctctgggcaagaatactggagtgggttgccatttctttctccaaacagagctttagggatgttaaatgctagaaaagggatttggggagagtttgtttttagagcacaacataaacttgagcttgtttggttttcaacattacctggaatgtttgctactgaaattgtgttggaggcacacacagtatcctgagaacgtgaaaaccacaagttgcaacctgaaaatgggttccatgaccccagagactgtgggtagtcacagagccctctttgtgcacacctgctcctgcctgtgcctgactgcaggacccctgcagactagcacacgccgctgcttgctcgtgctccgaaggcacatgcatccacgcaactcagtatccgaatctgaaagctcaacgttttcagtgccataagtaaaagaaactcaaccgtagaaggtggtatttattttctgcttaaaatggggtataaaaaaagcagacagactcccgatacctgtgggcatgctagagggatagtctgtcacctacagcaagtacaggaaccaaattccactcaattttttttaattattgtatttttttaaactggaggataattactttacaatattgtgctggtttctgccatatatcaacatgaatcagccataggcatatgtatgtcccctccctctcgaacctctgtcccactccgtcccatacctctaggttctcacagagccctggtttgagttccccgagtcatagaacaaacttcctctggctatccattttacatatggtaattgatatgtttccatgctgctctctcaagtcatcccaccctcccctactgaggccacaagtctgttctctctgtccgcatctccactgctgccctgaagataggctcatcagtatcatctttctagattccatata

SEQ ID NO: 50709 - DNA, 2273 bp, Bovine  19866880725762
  misc_feature (1)..(1): n is a, c, g, or t
ntaaaaatctatacagtgcttcgaagaaagtaggaaaagataagaattacaaacaaactttttaatggacaacttcaatagaaaagaaatgccagactggtagagaaacaggacagtaatacagtaattatgctaagttgttttgggaattatataagaaatgaaatatgaagaaatggtaggaaaaaagaaaaagagaacaaataaggtaaagaaccttaaactcctaaaaaatgaaataaatttaatacactaattataactgagattccattattaacaggaaacaacttcagaaaatatgaaaatgggatggaaaaagtctttactctttaacgtctttaagttgttcaatatcttgtactttgacataatccggatcatgcgccaaaaggtgaattgtatatggaacaacatattcaggtagaagagacaataatttttctgaaaaagaaataaaacaaaaacatctaggttagaaaaccaaatcttactcgttctctttctctctctgatactctatttcttgtatcccaataatataccacaatatcactggaagaaaaatacactgaaaggtccagtgctgaggtacatcatagtttatccagttatccatcatggccaatactgatatgcctactaagtgcaccctgtgccgagcctacaaagatacatatttcaattttcaacagatatgaggaaaaagtgacccaaactatactcaagactaaggaacataaaatctatttttcttattagtaactctatgttcaatactcccttgtaagttgctgtgcaaaaggtaaacaactagtaaatctttcagtcagtatggcacaaaaataggaagtaaaggttgatactatttaatacaatttgcaacataaaaactgacagaaaggaacagacattgtttctagggcattttacataacaattaagtatcttttcagtttaaattcaaatgttttgattttttgactgaggatcagtaggggccattacacatagaaatggaaatcctaactagttttaataaaggttactcgaaagaccaagattcatactctgagcaattctttttatatttcctactcttgcaattttaaatcagatgttcagtctagagtaaaataatgtatgtgtcaacaaggcaccaaattttctttattcctatcactgaactcaaagagaataagcttgtgtgtaatattcatttcaaggtaggtccagaagaaaaaaataacaaggttcaaaattcagtgaaatctgaattaaagtctatctaacatgtactgagtgcttactcttttccagacctactattttagtagggcttactattttaaatataaagatgcgtaagactagacacacacacataaaaaaagactagacaaagacctcacactgagcacagacaggaccaggacagaagccccacttcaccatggacagtaccctaaaataagaacagctaatgacttctgagtacttttttgaaccatgcattatgccaggtgctttatatatacaactttttaatcataaccaccataagatacaagtaaaactataccaatcttacaaaaaggaaactagggcctcagactgcataaacaacccacccaaatacaaccggtaaatggcagaggtggcagaggtgagatttaactccagaactctcaaggcgaagtaggaagagaaagaaagagggtctcaaaactgtattttaaaggattcaaaaggggcaaacttctctccttggttttgtttatttgtttggccagaagggggaggcaaaatttccagagttgacaacagagaaaaaagctggctagacaaatttcaaataatccagagtacaaggagcaaagaatttacattctggagtagctagagagaaagtttaaaactcaggctgagagttcactacaaagtgtcatgctaatgagcttctacttgatcctctgagcagaaaggagccaatcaaggtttcaagcaagaaaatgacgtgagcagatctgttttaggaagataattttgacagtggtgtggctcggctggaggcaggggaacatttacaacacggagttagtcaggagtagatatgataattcaagtgaaatacagcaggataggggagttggggagaaacagtgaagacacccaaaagaagaattaagaggatttagtgaccaatgaaaggaaaaaaggaggcatgaagaatgcctctgacttctgacttgcgtaactggatggcttttaat

SEQ ID NO: 50710 - DNA, 2197 bp, Bovine  19866880785372
  misc_feature (1)..(1): n is a, c, g, or t
naaaattagctggctagaagaaacctggtttaccatggaaagttgagggcccctgtattgatgttgttcttacaaatctcctggaatgttgatggacaaactgacctcagtttaaaaatgtcttaaacattcttaacattcattcttaaatactcattaaaagtactcaagacaagtgggggtaaaaagaattcatggctctccatgtgattttaaaaagtgggcttgagaacagtggttttttttttttttttttttccatttaaattggctgacagggtgggcaacctgcttctgaaagattatggatgactcaaccaccacaagatgtcttcagtcgacacaattatcactattaaagcatatccaaggtattaacatttcaacaggctcatggctgttggcttaggattgtttacatggctgagttagcttcattagtaacaaacctcttcagacaaatgactcctttgtcttcagatggaatttctccagtgaagtccctatttattgaagctgtatttatgtggccataggctaggccagggcttccctgatagctcagttggtaaagaatccgcctgcaaaactggagaccctggttcaatttctgggtcggaaagatccgctggagaagggataggctacccactccagtattcttgagcttcccttgtggttcatctggtaaagaatcctcctgcaatgaaggagacctgggttcgacccctgggttgggaagatcccctggagaagagaaaggctacccactccagtattctggcctggagaattccatggactgtagagtctatggggtcgcaaagagtcggacatgactgagtggctttcaccttcatctatcaccaccatgaccctctgatgcccgcagctggaggtgccagaatcagggctgcaaagacccaggaaacgggtgcatcatcagggcccctgggcctggggccagtgccctggcgctgagactgggcagggagtacaggaacaaaggccttcctggataagcttcagggcccagcagttcccacaatggggtccagtgggggtccatttgccagaacaaagcacaggagcttcatggagaagaagagggctcagagaagcctgagagtgtgaagcttcaatccctcctgtctgcgagggagcagggatggcccagctcaggggagaagctacagtccagagcaggaaaaggatgctctgttctcccctttccctcctgggatacctccagagtagccgatggacacaggggatttacctgtgtcttgaaatacgagggaaatcagatttttatagtcactcttgaattggtatagtaattaaacactcaaaaggggagatacctgctaagaaccacttctaggttgtcagcccaacccacttggtctctgggaactgcacttcgccatcggcccctgggctgctaggggctcctggcggacatgtgggcagcaaccctgattctccctccactccaccagccacaagtcagtgttaggggggtgttggggtgaatgtcaccctgccagagccaattggaatcattccacatgaatttggggcacgtagtggggaggagagagcaggtatgggaaggaggttaggggaggagggaggctcaagaaagagaggatataagtatactgagagatgattcaccctgttgtatggcagaaaccaacacaacattgtgatgcaattatcctccaattaaaaattatatttttttaaaaagatacactagtagccccaaggatgaaaatgtacaatgcccttcctatatgtaattcaaaattaaaaggtaaaattatctatggtcagttaataaagaaaaataaaactaatgttattaatactttttaaaaaatttttccagttggagcagaggggcattcagctccttctgaagtgttggctttgctccatgtgacctctagagtggcaggggccgacttctctgctgtgtggaccagagacacaaaagaagctggtctgcagaggagggaaaaaagaccgagacgggggttcacagcaaggaacagagacagagagagatgctggtggagctccagccgacagttctggtcctatcctgaggaccagctgcatccctccaggagacactcagcatccttagagcagagttcccattatgacagagctacgttaacaggtt

SEQ ID NO: 50711 - DNA, 1672 bp, Bovine  19866880795559
  misc_feature (1)..(1): n is a, c, g, or t
nttcaaccagttgatttcagcccccaaacaactgttgatgtgagatcccaaaagctccttggtccccttggacttcggggaatggggcccttttagggagcagatcattcccatgtgggcagtggtgatcagttagtcagttcagttgctcagttgtgtccgactctttgcaaccccgtggactgcagcacgccaggctcccctgtccatcaccaactcccggagcttgctcaaactcatgtccatcgagttagtgatgccacccaaccatctcatcctctgtcgtccccttctcctcctgtcttcagtctttcccagcatcaggggttcttttaaggagcagatcattccatgtgggtggtggcgatagagccaaggaatgtggttggaggggaccaggagtggcggccccacctgaaccagcagaagaggctctgttattggagaaagggggaaggacattgggcaggcaaaaatagatactctagagtaaaacggaaattatttttacatgtaataattgcagtagttctattgaaatcctatcatgatcccgagccaaacaattttctgtagtaacagtgcggtaaccatgcctgagatcaataggctagtctgtcaagggcattctctggttcctccccacacttaagtttgctgcaggagacggttggtgttttgcctgatagccctggacctgctgcaggaccaagtgtgggttgcaaatggagaacaaacaaaaccgtcacaatataattttgtgctggctatcaacagctcagcagaaaagagattttcacattctcctcaaatgtcatttatatctcttcaggtagatatttgtgaagtgatgacaactgtcaataatgattccttcctaattctccagtcattttggccattgcagagtgacattccctgggaaacattagcatttggctgataggtgttagaaggcactgtggagaatcagtagaaattatgtcttttttcctccaactcaacttaatgggcaaaatcatctttgatagtggttaattatgctccatttttgtttgtttgtttgtttgctttggtggtaaacaagagtgtgttatgcccttaaactgaaatatcaagagttgggatttcctggtggtccaatggttaagacttcacactgacaatgcaggggtctcgggttccatctctggtcagggaactaatatcccacatgccttgcacacaactgaagtattaaacacacacacacacacacacacacacacacacacacaaaacaaaataaacaagcaaacaaaacccagaaaatatcaaaagtagggggaatgtgttcgggagatattccagatatagaacagcaagttgggtatgggaagtgatggttgaggagtaggtatccatcatgactgggacatggcttcttctcattatttactaattgcagttttctattgtttgcctggaagacttaaaacaaaatgtctatccattgaaaacaatcagtttatttaactgggttctgattaagatttgactattcatgtttacatatgggtagagtttcggttcattatctgtgttgctgttatgaaaaaaacaaaacaaagttatgtagagagccttgtaaataaaatctcccaggctagcccaagccctgtttcactgccca

SEQ ID NO: 50712 - DNA, 1486 bp, Bovine  19866880877929
  misc_feature (1)..(1): n is a, c, g, or t
natcttcctgaccctggatcaacctgcatctcctgcatcagcatacaatggctcgttacttctcaatcacctgggaagccggaaaggaggtggtggtgtatgtgcaaatatctagtgtccagagtgtgacccactgcaggttgacaggctgcccaggtttccctggctctgctatcagggctgccagtgtgatcaaacaacaaggttacgtgatttggagccctctcgggcccctggagtctttgggccttgtcctctttgttttgcctctctttccaaatgaatcacttcatcaaaatgaaacatctacgaacacagtatgcaaggttcggatgattcatccagcccagctgcggtcattgtgagaaaaccctgtgccttcaagacagttacaaagactgaatagtttctgcggggtttttggtttcagtgtcatttatttttgtattttcaaagaggaagtgtgcaagacatcattatgtcagcagtgggcaaaaggctggtagactcttaataagtggacatacatgtttacacttcccaaagtttctctttctgtcaaaaggtctaaccggctgttggtatctctaggttgggttatttcttcccttgatggtaagcttaataaaatacatttttaagttgtaggtggaattttgaaagcctgtttctgcaaacctcagatttggcaccttattttgcttgtcaagatttctacttaaaataaataagtaacatctaatcctggacacggattaacaagttaattcctttccttttcaaaatggaccaattagcaaaaccctatctctgcagatttctgataaagcctaaaaatcaaacaaaagttgtattcatcttgaaagggcatagccataagaataatcacatattaaataaagtattcagatcattgctatatttaatatttcccatatgatacatggccctcccgtacctaaaaaagaaaacatcatcatctcctaattcaatttagtctgcttaaatatatgatttaaccagacttcgagcagctttgatgtctcagaagctgccctttatttggaattccctgcctttaatcccttcttggttaccacacccccacgtactgcctatttttgacaagggggcgatgagaacatgggtgaggctggctggcgtggcctgagggcctcaagaggctcctccagcagcagcgataaaggaacgctagacattccattaggaacactgaaatagctgcctagcagtcccctgtcatttgttctaaccacactgagtgactaaggttttcactctacgggctgtatttagttttctcttcctcacacttttacatatactaaacagctggtttcagctttgaatagttctcacttcataaatcctaatgtttaaggtctatatagaaggtttctaacacactattggagctgccagaagaaaaccaattttgtcactgtaaagagtacgatctagcagg

SEQ ID NO: 50713 - DNA, 834 bp, Bovine  19866880979707
  misc_feature (1)..(1): n is a, c, g, or t
ntctttctggctgaaagtacaagactgtttctgatgcctcttagaaaagaggttgggatttttgaggatatcggggacctctccaagagggtcctgaggaggccagctctgggtagctgtggccaaccacccagacaggaaagtgaccatcataaactctcattttgaagaggctggattgtgtgaagacagctgggcaaaagcccactcttcaatgtgagttttaaagccttcaggagtccctctcccactccagactctgctaatagagggggagacttgggaaagctgactcatcctggttagctcggctttgctctgcctcccactcactcataaattgctgcacagactgtgctggataaattgacattaaaagttattaaaggaacaaatcgacagtttagaagatgtgcattcatggcaggcatctgcagaactctgggagagctggggcagggcagagtgatgtggtgagtcatagagctggggcctcacagctctgaaagctggaagaaatcccagtgctcacagaggcccagcatgtccccttaaggagaccacctgaaggaaacccagaggtgactcagtatagccttgtctgtggtcctgggtctcactgtgggtttatgtgattatttggggttttacacagatgtttgcttatttatatcttttaaaaaataatattgctcttattttgggcagcccagtggtaattaatcttggtgggggtgggatccgtcctgtctatatgtgggcatatagatgtctagcttcctgtctgctctggttccaagggtcccacacgttccaggaggggcgcttgcttca

SEQ ID NO: 50714 - DNA, 2005 bp, Bovine  19866881096852
  misc_feature (1)..(1): n is a, c, g, or t
ntgtctgccagagacattcatgatagagaaggttctcaataatcgggtaaaaaagataacccattctttgcacgtcagtcagccaccctagggcttgatccaaagaggttacacaacatagttttgtcttcaataaatctaacctggctgccaccactcctcagtacctgagctgtcagaaacagaggtcaaagctgagaggccaaaatggcatcattacctgaaggcagcagtcagcaccatggaagggataatatcagtcctcatgtgaatagactccaattcagggtatggatcggagaaggtactggcgacccactccagtactcttgcctggaaaaccccatgggcagaggagcctggtaggctgcagtctatggggtcactaagagtcggacttcactttcacttttcactttcatgcattggagaaggcaatggcaacccactccagtgttcttgcctggagaatcccagggacaggggagcctggtgggctgctgtctatggggtcgcacagtcagacacaactgacgtgacttagcagcagcagcagggtatggctttgccttccctctcagcacttctgctagcctctctttctcagacatgcagaatgcttaattcatcctctaatattctttaccttgaagcatataaatattttagctcaagtattttgaaaagaatcatcttttgcctctatttttaacaaatatttctacaagaaaaacctccttaaatacatggtctctatttatgattatgttcaaggtttcaccaaatgaagacgctgcaaaatcaaagaccttctaaaatcattccattctaaaaccgaacataaatgtttaattaaagtaaaggttccatcaagagattcttcccacagttcaatatattccaagatgcaattacagtaattcaaaattaaattttaaatatagtttgcgatctcattgtttcatctgttctgtttttctcttgccttttatagagataatttttaatgccttcctattcacaagcttttttctacctcagtaattaaattttaccaaaagctttcaaaagctgaagtttttggtatttcataacctttgaatacagtaatttaaaactttcaactttatttcgaacaaaatacaaacaaaatttatcagaatcttttgcagaaagttcagtaccattgtacaacacacaggttggttttcaaaggttcgagcaaacatgaactatggcttatagctggcagccgagagagaaagcatgtttgatcatctaaaatattgtttcatattcatcaaatgcatcattttttgatgaacacacacacaaaaatactttaccacaaaaattttgtcactcaattacaacaactctgataatgtataaatatttgtaaattttgacaactaaatcttctgttttgattagtaagatattatagcttatttggatgaaattataaaatgtatgtgcatcgcaatcaatcacaaatatgtttatgctccataagcatcttaatttactaaaagcattgttcttacattacttggccccaccacaatttgtatttgtcattaacaccataaaaataaagcatttttctctaatgttaaacatacatctgaatttataatagcattaacaatcatgttcccttcaacagaatgaacttctaaaagcttcattttaataccatggagcagatgaaaaaacacacacactattggaagtgacttgtttgaggactctcatgccattaatatgaatccatctttacttaactgtttatgaatttcctccaatactggccgaagatatcaacagctattatttcactatccataaataaagaagaaaatttgaaattgaaaatgagcaaaattcatttagaataatagttatttgatctaaatgataagtcatgatcggcagagtgatgtgtagaagcaccacctacagctgcagatgttagctcatcatcttcaaggtcttctttttt

SEQ ID NO: 50715 - DNA, 981 bp, Bovine  19866881101744
  misc_feature (1)..(1): n is a, c, g, or t
nctgcctttatatgcagatcattcgttatgcaataatttaattcatgcttttcataaagaatgtcacagaagggctgcttcatgtgtgttactttgttgttgccctggtgacatttgaggagccctcaggcgaccatggatagctgaggattccagagagcagctccatgtgaacaaaaagggtgagtgttccaatgcagctgttcagtggagagtctcaagttgtgcaccatgaagtagtacttttcttctggcttttttttcccccctcttgcctctagtcagcatgttagataaatccagctttacatgagcttatgcataatcaaagaactcaactattttttatgaaattttataaaacctttttaaccattgacctaaaaccattctacgtatatactaaaggcagagagtcatcagatttcttataagaatcactaatagttggaagctccttagaagaaaatattttatcatattcatttttgtgtcccctgttccaggcactgtaattttgcataacgtgggacatcaataaatgtttatgaatgaataaatacagcctgtgagatctatttcagatctattttcaagagggtccttttaaagtaactactgcccaaaagccctatgaaaaatagatcaagaactcacattactttcattgcagaaattatagactatcaagtgtctgtaatacatataccatgtatatttcagacactcattttaacgttaaatctgagtaaccgcaccgagatttggagtgaaaaagccccagtaagtgaggctgaaaacttgggagttcacaggagctcttataggttctgccaatttaacagaagccgtctttaagagccacagaagacccttaggttctctgcaacacccaggcaagcaaagaggctctaaccattaatcaagttgtaaagcaaggcaacttagaaaagacgcatataaaatcagtaaaggggagga

SEQ ID NO: 50716 - DNA, 1686 bp, Bovine  19866881150945
  misc_feature (1)..(1): n is a, c, g, or t
ntgagttcttttccctttatacacaagagcagagagaagagagatggttgagttgatccaaatttggggactagcaggatagactggagaggtcaaagtggcagatgaaatgaggggctggtgaaaatatggcttaaaattacttcccatgggttccaagaatgatggaaagggaagcagcagggtttggtaagcttcatggaaggtcctctcaggtctggagaacaaaagggaacactttatcatgtaccatctcttggtagagtcctttcttgggatgtagttggttgtttctgcactttcagcttcactggcaaccaatgagaatcatcaaactggaaagatttaggttcattagtgatagcaatgatcacatttttctttccttttagacgactaaatacattgaacaagtgtgcctcaatgaaacttgatgtgaacttccaaaggaaaaaggtaggtgcaatttactataccttactaagaccatggctgtaccagcaggacgagctgcgttcacaaattaaaaacaacacaaacctaagcgaaattctgaaatgactgaccgtaatatgtgtttattctccaaaaatctcgtcttatcataagcatcatgattcagcccgacaggaacctaggctaacatctgtttcactttgctttagttttgatcagagggtttgcatacaaacgtaaaatgccttgtttatgataatctttcagaagtttgtttagctgtaaatatccactctatattagactcaagttctccggtgatttgtagattaagagaatgcaaaacagaatctatggggtgggctatgcccggtgtcttctgcttcattctttcctatggcattttatttcaagtgcagttcaggatgtgatcattgtcaggctggttcatgtcatcgtggttgagcaggtggagggagagggtaacaacaggattcagaactcaccccatctctccattctcaccccttgcccttttctctagtcacagggagcgtccttcagtttcccgaatcactacacttcctctctcttataggactttgcaggcatttttccctctgtaggagtaaggctggcgatttcagttctgaaacaaagctatactttattgaggacttaactgttttccacaagctatgttatggcatttcatgcattgtggcagagggtctctgttttctagagaagggaaataaaacctgaactggctaagtcccttgcctgtgatctattagctggtggaggagcagggtttcaacttcaggtgtgtctgactccaaaactgaggctcataaccactgtgctgaaagacctctctttctcactgaattgatccttttaggaaactcagaattaacatcgttagctacttttttcatttcacatcttcagtatgtaacaagtcaagccgcactatattttgaagaagcagagaaaacatccctgagttgtaagaaagtgttctttattctggtctacacagagaagtcattacagcccatggattttaagtcactcccgagtaaccaaatctttaaaaataactttagcctgaatttctgctctaaaatagcacccaaaaaaagcgcaaatgaattttggttgacctcaccttcaaaacaatttggggtttgagctaggaaccaaagattcaagctaaggaggtaa

SEQ ID NO: 50717 - DNA, 1036 bp, Bovine  19866881163566
  misc_feature (1)..(1): n is a, c, g, or t
ntcaagagggagggtttttttttttttcacttcttgggataatccttgaaatggacccctaactcgtgatgcccttccctgaagctcttggtaaagaagctggagcaaagaactgctgacgggcaggacatttcccccagcgggcctggccgccttgtcttaaaaagggcagaaaagcgtatgccttctttaaagacatttctaaatggtcctgttgggcatactgcccaccaagtaaagcaatccctgcttcagagcactccctgtgtaaacagtgaaggaatgccaacttcaaaaatgaatacaaacccagttgataaacaggcgaataaatccccacatgggccacaaccagcccaggagtaaatgtcagagcatcaggtcatgggtggagggagcagggaagagtggagaggaaatcctggaggaaatctgaatcttcataatcaggaaagctccttgaagtggcttccttcttagttaagctgtgagagtgaggagaagcgccttcccagggtagttgggtgtggtggcctacaccctggcgtggcagtttacaccttggtggcagctttcgaacgccaagtgaaggtggtcagttttgtagcctgagtcgagccaggctggttgcctgagctagaggcgtgtaagagagccagctgctgaaatccccagcgcaggaagctctgacagaataccaaggaagggcgtgagtgcagacagcaagccagaggggagggagttagttcaaggcagtagtgcccttccccttcagcctctgcacaggaacctctgggaggcccgttactctacagtctgcaaaaggcagctggatgctgtctgaattattgcttgtgggtctagaatttaagctcactctactgcctcagagaagattagtgctctaaaagcttcttggaattactgggttctgtactcgctgcaagagaacaatgatttagaacacatctcctgagaaccactgttctttccacatgtgcttattatccggcacattggaccgtttgtactgggc

SEQ ID NO: 50718 - DNA, 1882 bp, Bovine  19866881176243
  misc_feature (1)..(1): n is a, c, g, or t
nttcctcgattacaattcagacagtatgattttacttgtaccatccagaactcatttatagcatttttattcctctcaataaaagaattgcacaatgctgataaaagaaaacattacaatataaaaagaaaacactcagttttttttcccctccaacaccaattgctaaattatgataccaatctctccctgaaatcaaacacaataaattatcttcctctttagagttgctgaattacaattaaaaaaaacccaacttaaaatccatcagcgattggttaaggatagtcaatttgcttagtccatacaataataaataaggttcggtcaaatgcatagctagcttgactgactaatgaagaaacatggacttaacaaacctgtgtatattttctaaagctaactgaagaacacagttttggtcttaatgttagtttaaaaccctgtctttcagattgcagaactttaatgagtaatatcttaagagcatcatacgtagcaatattagaactccctgaagctgtaatggtccaggactcttgagtgaccagcatctccctttatctggtgtccagagttaaattcagtgcaagacgttggtaagaaaatgtcaattaactgtgaccattaaataggccactggtcaaatagaatgacatttaagaacattatgcaatgtatctatgaaacctcaacaaaacacagaggctccctttggctgtgaatatgccaaggctattatattcagctctaatcagcagggaaatacaggttctgtttcagtcactggagctgactccagtggtccacgggcatctggcatttcagtgaaactgtatctgccggccccatggcaactggtaatatagtcttaaacctggtaacgactactcacccacttcttggctttaaagaggactattattttccgcgctttatccaacgccccactctcaggttttgaatgatacacgctgacaacacgtgagaaccatttaatgtgttttcctttggttggctaatctttggtaaaatatcagggcggacaacttgttttcacactttggtgttagcagcagattctgctcagcttacagggcagcggggacacagggcccagagaggcttggaaagaaccgtgtgccgaaagggctcacctgatcagatgcactccttttcaaaatacgcaattatatataaaattgacattttacatatatacagtaaagataaagatatacacacatatgtacatacgctctacatacatttatttacagttaatgatagtgcttcttagaagcctttaaatagcaaaattaggcaacgcacaaggaataatcgatttaattttaagtaacatagataaatgttcttgatttttaaaaatattatattagtagggatgtagccatctccaggaaggctaggaaaagttctcagaaattcttgcatcttcgacattccgacttctcagtgcttctgcttttgagcagtaaccttgtcaatcggtctctctctctcccttgcttccttgcactcacactctctcccacagtttgcttccgcttcctcttccctgagtttgatgtcacacttgggaaaactcagattttagtctctggaccctcagcaatgaggggctgaaaagagtttctaatcctggcaacttccgccgcacacagatgtccaaagcctttattgtaccattctggggagtgacctctgtggggacaaaaacgggcagggaagtgggaaagcctcttccacatcacaacagtctgtcacggtcaacatggcgcgcccgtgcccggcctgtcagctcgcctgccttccccgaggggctgctgctccgaggacctgcgaacctcatcctgtcaat

SEQ ID NO: 50719 - DNA, 1241 bp, Bovine  19866881211547
  misc_feature (1)..(1): n is a, c, g, or t
naacaatataaaaattgaccccaatactggtactgtttctttggtgattatgaaggacagtatgttacttgtagaccatcattatgaatgtcattttgggggaaagtcagcagaagggccactaattagtgctttctcagcaacttatgggggtcttcccaggtggcttagatggtaaagaatctgcctgcaatgccagagacctggattcaatccctgggtcagggagatgccctggagaaggaaatggcaacccactccattattcttgcctggagaatcccatggacagaggagcctcgagggctacagtccgttgggtcccagagagttgaacatgactgagtgactaacatacacaatggcagcccacttagggtgtgcagttccattgaggactctggcagacctgttaacaaggaaccctttgtgttttgttcatcactcagtaaactcatttccattggagggagaactttatttctattcctttcagtctagttggaatccaaacatcatctttagattattactattttgaaagtttcattccagagtttgatgatatgcttacaaatcagagacacacttgacataaatcagtagaatttacctgaaatgttggtggatcataagtggggccccaggaagcacacaaggcctcctgtccacagagctggctgagaagaccactctgacctcatggctggacgcacactctcatccttcaggagagcatcttccttgcccaccagcactttggttacatccaaacatcatgctcaacatcatggtcacaaataagtcctgtggcccacgttgtgggcagagcactcgtttagcactccacctcagctctgtatgttcactgggataattctgttctttccagatgaaacattctaacccagttgggacatgatcaaccatgtttatgctgtctgtcagcttaaagtatttttttaaatgatttttgtgttagaatctatctttagtttggaaagttgaagagtgagataagaatagtagcataaaaaagaaatatagtagctatatttccactagggtctcagacatctattaggaagtgtaagttgtccacagacatcttcttaagaccccagaagccatgctgtctacaggactgtggagatgggttgggcagggcacaaatacggtgttctggaatataaaggtaggattcttttttggttcttagagataccataagccactgtgat

SEQ ID NO: 50720 - DNA, 1152 bp, Bovine  19866881252007
  misc_feature (1)..(1): n is a, c, g, or t
nggtctggaactcaactcacaaatctattagaagcaatatttcagcagatgagagcagagtctcaagccttgtcaggccctgaaatctttctggacattcgagtgtctcagcatagttgaatcttcagggctgggccaaggtttccatgcatggggatgacttataaacatgtaagggcttccctggtggctcagaggataaagaatttgcctgcaatccaggagacctggattagatctctaggtctggaagatccctgggaggagaccaaggcaactcactccagtattcttgcctggagaattccatagacagaggagcccggcaggctacagtccatggggtcgcaaagaattgcacacgactgagcatagtctgaacgtgtgaagttatacagatgaattctgaagttacacacactctggatggacagccacaccactgaagacttgccttttccaggcggagaaaaacaaaatcaagagaaaagccagtgagattcaatttgcataatttggcagaaagttcagctggacaaacagcagctcttcttgggactctgttctaaggaaatgaacgatatttatggcctaataaaccgtatgctccataatgaaaggggccataagagagcatggcagaactgtgaattgggtgaaagaagcaggatgtcgggcatgaatactgcagtcagttttcactgagggaagtgaactgagggccggagccagtgtttccggtggaggctgaacttaggtgggagaatgcagtgacatgcttccatctgcagctctcaccctgcttttggagcagagggtcaggcttacctgagaaccacgaagtccctggaggggtggggcgccatgctgttcagcacgtactgatagacttcagtctgtttgtccaacgtttccacaaccttccactgcacgaagtcctcgtcccacaggtggcgctccctcaacacgcggttcagaaccaccgaggggggcgcctccacctcagcggaagccttccacagcctcagcgggggcccgtctcccacctggggaaagacacccgcagcggcttgagaggtccctggctcttcagaacctaccaggcttcagtggggtgttcaagaagcctcatcgattatggaacttgacagt

SEQ ID NO: 50721 - DNA, 1842 bp, Bovine  19866881272033
  misc_feature (1)..(1): n is a, c, g, or t
ntagattatgtgcagctccccaaagtctcaggtttctcagtatcaccctatactctcatggcccaaaggatgtcatagaataaacataaaaacttgaattacttcaatagccatatctttataacaggaactattaacacctataatataataataatagggtaagtagattaaaatcagcagatctgtgcatgtcactcactttgaccattgtttcaggtgaaacctcttcatctggaacccaaagcttagttgtcttttttcctggaagctaaacaaaaattaaggactttaagatacaaattctcatatgtaattaatatatagagaatgaatgaaatctttaccttctacagcaacagtcattatatatgactatgttttctgttacttacgcaaaaagtttgaaagacctgtcttcactagcaccaaaatgaaccttatgcttccagctccagttggttctttgcaagtatgagacaggactgactttaacaacttatgtacacttccttgcttaaccccctttaagactaatgtttcatttatttaaggcagccggcaaggaataggataaaaatcaatggagccaaaaaggatacagatgagccttgaataagacaagtttgaactgtgcaggtccaccaacatgtagattttaagtgaatacatactacagtaatacactatatacaatctatgtttgactgaatcacaaacgtccaaggaaccacatacagagagctgactataaactgtaaaaagatttttccacaacacaaagggttggcagctttaactttgattttgctcaatggtcagctatagttcataaacaaggggaaaggtagctgcaaaaagtcttgagcagggaacaaatataaaggcttgcatctgaagtaacagaaaacatacatcagtatcttcctacttaaaggcaacacacactcacacccacacaccccaccccacacccatccctcttaccccggtagctgggctgggaagcaaaaaagtcagtgttagtcagtcatgtccaactctttgtgaccccaaagattgtagccggccaggatcctctgtccaaggaattctccaggcaagtatcctggagtgggtagccattcccttctccaggggatcctcctgacccagggatcaaacccaggcctcctgcattgtgtactgtttgccgtctgagccaccagggaagcccagaaaacaaaaccaaaaccatagaaaaatttcaaaaaacagaaaatacacagcaaaaagaaaacaaacaaaaaaacagagctagaggattgacatctccagaaaaacacagaaaacaccctccaaaaagtcatctttttagaacaatcatagagtaatatggagatgataaactgaaagtattaagagatgtgaatttacactagcagccagggaataagtaaggtgatcaaagagctgaacccaatcttggaacacaggagatctcattttcacctcaacctgacatgcgcaatttctagttggaaacagaaatttgtcaaagagcacctcagatgaccttctagcaacaggataggtagttccaatacagaaggcaagttccccagacacacagagctatttacaaatagtttaaggaccaagtcttcaggagagaagcaccttcaaagcatgaagtggaaataatgaaaaaaagaatctcattagaaacatactgacgaaatttctgaaccaagaacatcccccaaaatcccaaagctcccatagaggaacctaccaaaaaaaacaagaaccagatcaacttcagatttcttggtggcaagaccacatgccaaaaaacaatgt

SEQ ID NO: 50722 - DNA, 812 bp, Bovine  19866881299413
  misc_feature (1)..(1): n is a, c, g, or t
nagctataaggaaggaagacggttggagcctttcactcacctcaaaaagtctgtcacattccatgatcatgtgggccagcccctgagccgcggccagattctcactgaggtccttttgatctggcttcccagcggcatattttttctggatgactctgtaattgaaggggacaacgctcagcggatcccaaaccccagagcatttcacaggacccagttcacccctctgctatctcttcatgcctggatgccacccagatcccagactttctcatttccaaataaaaacagtgaccacacatcttagatatcccgaggcaggttacgagtctgacaaatggaaaaccttggaaaaacacaagggcaggaataactgttgggggagaaattaattcatttttccccaagtttgaaactacttcactgcaggctgccatgcttgggcctgaaatccagtcttttcaaattgaagattttgtaaaacacatacaaaacagaattccaggttttctgaatcacagagaacactcttcaatgctaccttggtaattctctgactctgagccgcaactccaaacattttctgattataaacgaagtgctaacagatccccaggttgaagtgcaacgcatgtatttttcttttttttttagtagccctggggaatacctgatttgggattagcattcccgtcgagaaaaacccacctgggggagctttctttcttcagtaaattcaggtggaagagggagggggccagacacacggccaggttcatggggcgtcatctgattctcttccaccgcatgaa

SEQ ID NO: 50723 - DNA, 708 bp, Bovine  19866881855817
  misc_feature (1)..(1): n is a, c, g, or t
nacacacacatgaatcttctggcgagtcttgttaaactgcaggatatgattcttcaggtgtggggtggggcctgagagcctacatttttacaaagtttcaggtcacgctgatattgctggtccacagactacactttgagacttgaagcactaggtaagcagcaggcagggccagccagtgcagcagttcccctccaggaggcaaatttgagtggaccagggcccctgtgtattaggagaaaagagaaaactaacccttggtcaccagactgttcagagtgaatttctactcctccctcaagaaatgttagaaagggtaaagaaatctcagtgctgatttttgtgatctatttggagtcaaatagatacactggcagcccagaggaattatcaatgaattgataaatgggatgtgggcaacttgccaattcttattagcctccctccaggcctcagagagggagcacatcattgaagtggtcaactcagaggcagcctttgctgaggacagacctactgctgtctgctcggctttgcgtggggcagagtgcaaactactctcgctctcctgcctctgctgtgggagtgatgcttgcctcaattctgccctgggtcatcaggagccctttcttggaagaaacttgaccctctatgcctattttccttctatctgtggttttgcctttttatgtttatttccaggatctg

SEQ ID NO: 50724 - DNA, 1274 bp, Bovine  19866880488985
  misc_feature (1)..(1): n is a, c, g, or t
ntcccacctttttaaacctaatttggtgtttgtgagaattaatagcctactttccagagtttctgaaatgagattgcaaaaaaatgaaactgagcatgaaagtagtaggaaaaattaaggctctaacatagtattatggaatgcccattcattaatgaaagagctgagtgtttaaagtatgtgtgcaaatctgggcctccatttgccctgcttatatttatttgtgaactctcaatcttttatttaagcacttcatgtaattaactgttggtaactacatttttgaaacaacaccttctctttagcctcctgatatctgatccactgttcttgtgaatgtgatgacctaagtagtaatcagatcacccaagagtagcttttcaaattgtttttcagaggtatttcttttctggaatcataactggtacatatttcccacttcaccatttaattacctagtttttagtatttgtattctcgataccttcattttcattataatttcttttccggagaagccagagccaaatgacagacacctggacaaagacagtctttttctttacctaccaattctttcctctcattcccctccatccctgactgtccctcccacctctccctctccttgtcccacccctctatttctcttccctattttgtctcagtatatagaaaaataaaaactagaatgattacaagaagaggtagatgattccttgcaaagataatattcattgacagaaacgtattagtttcttagataaccaattcaaattactttgtggttcactagacctgtgttagactcctgctttataaaaatagcacatatccattgtagggagaaaaagtgatacagtatcagtgaatataaagcagaaagtaaaagtgctgttcttttctgtactttccagagatactattaatggttttaatatatctttttgaaatatctgctctctctatatatttatatacatgtttaatgtagttaattagctccatccatttgccttttataagtaggtcttcagaatgtcataaagcagttagttcaattttagtgtgcttgatactactaaattataatatctcaatttcttttctccttttttccttaaaattatttttttaaccactttcaggacactggtccctcgaatattttctttattttttaattgtttttttaaaccaatcctaacatttgcatcatatggcttagatgcagttgaaataattgattaaaagtgcttccaggagtgttatgt

SEQ ID NO: 50725 - DNA, 1651 bp, Bovine  19866880659939
  misc_feature (1)..(1): n is a, c, g, or t
naagagatcgatattatgctcattttcctttggataattaactctcacttgtaagttagtgttttcctatagagattgttgcaacaccttttttgtgaaacctcggaaaagggaacaggactcttgacctcagctggtgtctctattttccatgaaacatacctctctttcccaaatgaagctgttttcccctgatactgctctgtaataagcagtattccttctgttttagctgtgttacaggtttgccccatgcagacagaatttcagctggtgccaatacccaagcacatacatatcaatagtgatgtcactttaaaataacagtaatagaaagaatgaatgaagagttaatacttacagagcaattcttaatgccaaggactgttttagtctttttatgtatgataactcatttaattctcagaaccatcctgtgagttcaactatattattatcctaattttacttttgaaatacagaaagtcagagaggtcagatagttgtttaaaggtcaggacagataacaatattacatagtatgaccagggagatcttatcatttattgactgatccaggatactcttgaccatgaaaggatgcaaaaacaggaatgaaagttcactctatttatgattgaaggccagacacctggcaatacccatatcatgctacacaattagtaaatgaatgagtttttattacatttctgcttgagcactatattgtcctaagattctcagatgatcatcagtatgctgtaagtaagttgttcttaattaaagccatccatgcttatggtaaataaaaatggtttgagcttccaacatgatgagtttcacttcagagacacaggctcggccaatattttcatatgctacctataacctttcacaacagaaatatgatcaaggtactggtccattaactctgattgtccttccttaccatggtcattagttgatgttctgcctttcgctgtatctcagacacaagattgagagtttaaggaacagatatccctggggcataatgaatggtgaagtgtgtctttgcctctttatgcagatgaaatcaattcctgatttccacagggagtgcaacaagtccttgacaggcagtttccccgctgggctcctgtcttgaaggggaaaaggaaaagaaacaggtttctatatggtcagcatcttgagggcatgcataaagacatcatgcactactgatatctgaccccaaaaatagttaacctctaggaactcagacattgacattgaacacaagtcaacctgttagaaaatctatatccccacaaacctggctctccccatgcatataaataaatgatgacaaaatgaattgtcattgttttaaagagacatataccatattccattaattgtaatacacatttttcatattttaacatttcaaaaattagagaacatgctatgtcaaatggagttaccgtttcaatgctagagggtttttttttttttctatttttctgtggttcataaaagacaggtgtatcttactggaattttaaattttatgaactacattatataccagatgttaacaagattttagcaccacttgcactgaatcagaaagaataagtaatagttgaaagctgcatcagcctttaac

SEQ ID NO: 50726 - DNA, 1520 bp, Bovine  19866880739652
  misc_feature (1)..(1): n is a, c, g, or t
ntgtcatgaaacaggctggatgacatggccatattccccagatgcctttttatcatatagaaaatattgtagataatcctcaggactccagagagtcctctggggtaagaaaggaagctgggaaaataggcaggggtaaagtgagcaggaacctgagtaccacctcacacctgcatctctgttccatcaaagcagctttgctttttcttaattttttttaaatgttactggggtatagttgatttataatgttatgttaatttcaggtatacagcaaattgattcagttatacatatacatataataattatttttcagattctttacccatgtaagttattgctgagtattgagtagaattgactgtgctatatagtaggtccttgttgattatctattttatatatagtagtgtatgtggtgtgttaatcctaaaactcctgatttatccctccctgccatttccccttttgtaaccacagtttgttttcacagtctgtgacggctgtttctcacaaataaataagtaaatatgtttatttgtatcatttttaattagattccacatgtgagtgataccatatttttttctgggtctgacttcactccgtatgataatggtttaggtccatccatgtcactgcaaaatagtgttattttgttctttcttacggctgcgtaatatttcattgtatatacgtaccacactttctttatccattcctctgtcattggacattcaggttgcttccaagtcttggcagttgtgaatagtgctgtggtaaaacactgaggtgcatgtgtctttttgaattatggttttgtccaaatatacgtcgaggagtgggattgttggatcatatgatagttctgtttttagttttctagggaactccccacaccattctccatagtggctgtactaatgtacacccccccaccaatagtgtagtagggctctcttttctccacaccatttccagaatgtattatttgttgattttttgttggtggtgcccattcagaatagtatgaggcgatacctcctttagtttttatttacatttctcttataattagtgatattgagcacttttcatgtgcaaagcagctttgcttttttgtatgcctttctgaagtaaaatttcatttgtaaaagacttcccattgcttattgaaaagagggggaaccatattattggtagtacggttagcctttgccttgttttctgtaactagtcagtgtggtatttttggtgattctttgatgtcttcttctctagttacttgtattgcaaaattgtctgagtcctacttgggacagaggtcgacagtatcatggatattattgaggtataggagcttttttgaagagagggagtgcaagaaggatgtacagcaagtataacccagccctgaatgcagagctttgtgattcagattgtggcttagactctttttgtggggaaaagaagtctttctgaatgtcagctaggagttgagatagtgaccttgaaca

SEQ ID NO: 50727 - DNA, 974 bp, Bovine  19866880832966
  misc_feature (1)..(1): n is a, c, g, or t
nctttgaagtttgtttcgttgttaagaaaatcttaactccctgtgtactgatgatattgaatccaacccctgctgtcctgtccttcagaagtctgcagtgtattctgtaaataatcatctcattaaaaaaacatagattggagtaaataaagacccagatgcctcagacagctggatctactgttcctctttctctttcatatatttacatattaattttaaaccataggtgtaaagtcaagtctgctctctcccagtctctctttgatgttgcaaagatcaaaggcttcctaagggaaggtttcttgcagggaatattgattccaagtatgattggtcccctgaatctgactgctaagtcagtgtgaggactgaagtgctctgtcggcctcaggaatttggccacactgcccaccactctccaccaaagcctggggtggggatggcgcttctactgagagtcgggtcaccaaaagctgaaactggaacatacatcatagtcacatcctgtttaagtgaaagacaagttctatttccagaaactgctttttgtctgaggagagggagaaggaagtagcgttgggtactggattgcttcagttagcaacgtgcaaccagccccttggaatgagaatcccagctgaatgggtaggcaggggactggcctgggcatcctctctctctgagctttctctaacatttctcctcgtcactttttctcctctcccaatactcactggagagcatgctagacatggggaagttaagaggagaaggggagaagagttgtggtagggaataatagagacaagagatagtaatggtaaggattaagtccttttcaggcctttgcgtccgttttttcctccattatgggcccctcctccatctctgtaagcgatgttatgagagcagtagagaaaagctttgtttttcatcgtacgcagtattaaccacaagtggaatagctcccg

SEQ ID NO: 50728 - DNA, 797 bp, Bovine  19866880856995
  misc_feature (1)..(1): n is a, c, g, or t
naaatgaaagcatggaaaaatcacacatggatagaggctgggaattgaagtatttccctttcatgcttgtatgattcagaaaagaacttcacacttgtatttagttccatgttaaccactctggtggttgaaaagcaaagcaaatccattgggatttccattttgctgccagcctgtggttaaggaaactggcacctcaaaacacaacagatacttctccatgatttgtgatgcctgagccatgctggattatctgaatgcaggctgggattggttccacactgctgaggcctgtccctggagtcctacagtactcctgggaggtgcactattaggctgctgtagccaaaataaaactggctggccactgaccatgtgccctgatatctgggagttccaatctctggctgtgcacatgtggaacagaataagggagcagcttataagaacatcttcagtggatgggatggagaaggggaggtgtctgataagatggagaaaaagccattatgctcctgctatagggtcttcttcctagtgtttgttatcagaagcacagtgtaaggacagatgcactggaaggcatccaatggctatgatattctggccatcctgagtagccactaggtagaaagagttgtactaagaccgtggaggacagagagatgattatgatacaatgtgacacccccaggtgtttacaatctaacatactaaatttaactatacactgaactgaactaagtgttgtggttaaacatctttcaggagaatctctacctcatgatatatacaaa

SEQ ID NO: 50729 - DNA, 1508 bp, Bovine  19866880867866
  misc_feature (1)..(1): n is a, c, g, or t
naaaagaaaaagatgggtttatttttccataatttatgtgatttgcaattaaaggaaaatttccaactagtaatatgttgtctcccttccaatgtcagtatgcccaaagcctcatgacatattgcagcttttcccaaatatctgtgtatcttaagaacactgtgtcaagaggcctgatccaaagacttgatttatgttgctgcctgacagatgatgtctgcaaggcatgccatctaaatggactgcactccagcagttaccttaatcatcaattctcagagaattaatgactaccattcatcccaataatagaaatcaaggtcagggcctcttccatgctttgtaatctcattaactatgcacagaaagtgcttaggtcacaagctctgtagagctcataactgagtgagtggagctgcatcttgtttccagagggagtctcctctgagcataccccttgttgtacaggagcagttgatgtccttatgtatggagtggaaatgccggtaaagggaagtgaggctatctgcacctgccaagagtttcagatactggttttatgacagtaaatgccaatagcacactatttgaataaagccattccaggcacttcagtgatggggcatccatttctgcattgtatactcattcagatattatgtaagccactccatcattccaggacattgtcgtagaatttagttttcattcttttatcttggtttttagtttttatgctacctgccctaataaaatgaaaatgagcttaaaagaattatcaccatacacatatttataatgaaactttcatcttaaaatctcaagcatggtttcctaagctaagtttcaccaggcagtccttcacttctcataattcaaattgctttcagccccttgtggctcagctaataaagaatccacccacaaggcaggagacctggattcgatccctgggttgggaagattccctggagaagggaaaggctacctactccagtattctggcctggagaattccatggactgtatagtccatggggttgcaaaagtcggacatgactgagcaactttcactttcactttgtcacatatttcaaaaagggagtaaccccaagtttccaagtcataggctttgacattttttattgttgttttctcaacagttaaataagcatgattattaaaattttacagctgtttcacattgaagctgtaaagagttaaaataagtgcctaatacagtgcctggaaattaataaatagtagcatagtgtgcctgtgtgtgtgtatgtgaaatcttgttttgaaacatttggagttttatgcccagtaaattctaaatgatgcacagtaatggtggggagcagaggcatgaataattcaaaacagcgaatcacctaaatatcatttgtatgtgttttgaaatgtattttttaatttcatttcaaatgtgactgtttctaatacccagagaagtgcctcaaaggaagacactgcaatgtaagtcc

SEQ ID NO: 50730 - DNA, 564 bp, Bovine  19866880996097
  misc_feature (1)..(1): n is a, c, g, or t
ntatactgctactgagtatggaaaaaaatttattgtgatgcttatttaataagacacaaatagtttgggattaaaaatgtttaagaaagcaaagtagttattttccaaaataattttatgataatttgaatgtgtggattgctaaagaaaaatacaaattgagaggatttttaaaaattacagaatctcttccaaatgtacccctacatatatggacacacgagtctttttttatgaagccttagggttcattcttcctttctcagcagtattcttttttttcccttaaccactgttttctgagactgttctcattctgggttaaaattctgtgtaccatgtctaagagcttgttacagatgctcatttaatacaaccatccagtgaagcatgggtactattagtatgcctagcctatagacaatgggacctgaaggacctgcaggtccaaagttacatactcaccaagtgtggcggtccaggttcaagtctaagcagtctgacttcagcaccacatgcttcgcagctgtggaatgttgcatcccagcacagcagtgttccagt

SEQ ID NO: 50731 - DNA, 1275 bp, Bovine  19866880998837
  misc_feature (1)..(1): n is a, c, g, or t
nacaaccacaaaaaaacacatgtacatcataggctatctccctccagaccaacaaatatgttactattctatacttccctccattcaaattgcaatagccctcttgccaaaaaaatatggatatagatgtagataaagagagaaagattactaaaaaaagtactcacaccatcattaatacaaaattacaaacacatggcaaattttatttaaaacactttagagtgcttttaaatacagtttcaaaagaagggaatacgtgtatgtattctattctactggggcttcccaggcagcgctaatggtaagaacccgcctgtcaatgcagaagacctaagagacacagattcgatccctagatagggaagatcccctggaggagggcatggcaacccactccaatattcttgcctggagaatcccatggacagaggagcctggcgggctacatccatggggtcacagagtcagacacgactgaagtgatttggcacgcactcgcacattctattctattaagctctaatgcttcagagaaccacaaaatgctcatttcatcacctgagctcctactgatcatagaggtggcataagaagccatgactaggagaataaaacaatgaatctctgtgaccagctacagcaaacccagatcacaggcactgactggtagcctgtgctcaaaacagagccagtaatcagaagagccatcatgagttatggagcacacacaaccagagttcaaagcaagtcttgaatcacataaaaaacagaggccaaagtaaggcacggaatcaagaatcaagacaagaattcagaatcatacatatggagcaccacactgtccactggtcatttgagtggatctagttgcagcaagaatagtatgtgttaacagcaggtagatgagttccagccttcccttccataccagcagcctcccagagactggtaacaaaacatgccactcatttttcccactatgcattagttgggcttcaggaggaaagccagactaattatagactaaataaagaacttccattttctctttgcgtctgaactgtagtgtgagttaaacttctaccctgttacattagctattggctggacttcaagcggaattaaagggcaaagcaaatgtgaaattacgctgggaatgtccagctagtcagagaagtaataggagacaaaattaaaagaaaagaaccacattggttcctttttacaactttattaacatataattcacatactgtacaattcacctattta

SEQ ID NO: 50732 - DNA, 1828 bp, Bovine  19866881092189
  misc_feature (1)..(1): n is a, c, g, or t
ntagggggtgaggaagcgggaacataggttggggggacccaccctaaagggtcctgtagacatgttatagattctgatctttatcttaagtgtagcgaataagtttttgcagggttttaagcttatgactgacatccttggattagctttgcaagactatctctcatttggccccttagagagcagactggaggctgatcaagatgaacatggttagatgtggctaccaagtccaccaagtcactgatggcccagataataacggtggcatggaggaggaaatgctgaagaatttgtgagcacgaatataagttagtcttttcactgcattctaccttatgtccacctacccacagtctgatgagatccttccgtctcacatcatgaacaaatgtgatcaggtgctgtgaacttccagaataaaaggatgccatagaaaatcaatgccgtcttcctattgagacttgtgtgtaacagggagcctgaattaggtggagccattaaagacagagatgaggacatgctcccatgttgttttcaccctttcaaaggagaaaaatagaacaacccataggaatatctctgaaaacaaaaccctcactggtcctttccatgattctaatgttttctgaacatctgctacccatctcctgcctcccctgttagtgaagatgaagtgagacccagtttttgagtcccagaactctctaggtttatcactcagaatgttgcaaagcaaatattttccttgtgccacaagtgttctttccatgaagcccagtcctattctgatttctcccatttcctttcttagagaagtaaatgtctgttgtcctctgctgtttatggttttaatatagtccagagaagaacaaagactaagccccaaaaagtaaataatacagaggcaagaatccgagagtccataagaggattgtgtcctgggtgccttggtaataagtccccgatgtgcttggtttcaccgtgcatgctttggacagatcacactgactttccccaggattcattttagacttgggaggagggatccaagtgctcctgcagtttctgagccagcttcagacgccgctgcttcttggctctgcctctgtcaattagcttcccagacacaattccatcttccctttgtggattggacttgctggaatcaggctcttgcttctggcctgggggtgggtaatctcatcgctggagtgtaatagttcagtggggagaatggcactggggagaggccactaccctgttcccatcagctactagtttcaacagggactcagcccctgtgacagaaacagcgcgcctttggatgttttgtctgtttgttttttgtctgacttcaggataaaatatttcctaactctggaattaacagattgatccaatttgttttatagattactaacagatatacccaggattcttagctgtttttgcttcagtaatagtaaatgtctcgaatgtgcccattccaattctagggcccttttcctgagactcacgtttcctggcttaattttttgattgctagtaggcagatctttttccaaatgaatgaaataattctaaaatcttacagaaccgtttttctagaaccatttttctagcttcatttcaagatgttcatggtgtcagagagaaactctgcctttttctagatcaggctacagatgtctgcaaggcaacttgtatgccaagcacagtatgaatttcctattagttcgtttgtacaagtgcccacctacatgtcaaattgagccagtttccatgttaaagtagataaaataaaaggacaatcgctgcaaatttt

SEQ ID NO: 50733 - DNA, 1235 bp, Bovine  19866881096726
  misc_feature (1)..(1): n is a, c, g, or t
ncccatccactgctcccaggacaacttcttgctgcttctcacaagtctattcacagccagtaaatttcttaagcgaaacaactgtcatattttcagttgccagttctaaacacagtgcctagggtgtagtgagtagatgggaggaatcatgacagaccctgcatttttgcatttcttcagagcctaccagcagaactactcaaatgttgttaaaaagcttttcaaatgtagattacaactaaaaacacttattacaggaactgtaggtattagcatgcatcccaaagcctctgagattaacatgatccacattccacattctctaggaaaagcttttagggaacaactacttatatctcccataagccagttcactgacactctaatcttatacaaatggaaacgatatctgtgttatttcacagggaaggaggtaactgtcaaggtttgaatgcatgaatccaaaaaaattaaatactacaggaaatatgaaatgctgggagaggggttcaattcttgtttggaagactagtgatttagaacaagtgcgtttatcaccgaacttgccttaacaagtcttcaactcaaatctaatgaaaggctttttctccacagtattaaaattcaaatttgcaaaggagagcaagtgctttaagataaactggactaatagatttatctcagaaagtgagagttaattacgattctcgcttctgagttctgggtgaatgtggttaagttattctaaatttttagtgtcctgatcttcaaagtactggactataaaatagaaggaaagttttctaagaaagcggaaaaatatgttcagcagtacaaacacagataagcatttttcaaggatgagaaacagctcattccagaggaaagaaaggacacacactgcagagtacacgagtttaacactggaaaggtatgagagactctgttaaaggctctggaaggccaggttaaggagcataaactttatcctattggcctgtgattctaaaccaggacaaaaactacataaaggggtagggagaaggaggaagggaaatttgtaagagggacatataattacaatttgaagaaaagcagagcttgggtttaatgctttgagttgccttgctgctgctgctgagtcgcttcagtagtgtccaactctgtgcaaccccatagacggcagcccaccaggctcccccatccctaggattctccaggcaagccttaggcat

SEQ ID NO: 50734 - DNA, 1994 bp, Bovine  19866881125711
  misc_feature (1)..(1): n is a, c, g, or t
ntgaagtaaattttactataagcattctgtgtttttatgtctcttaaatacatgacaaaataattataatgataatgatatgtaattaaaatgagttttcatttcattctatcaaatattgaaataaaatttatttatttgacaaatgcatactgaatacttaaaataatcaatgtatagagtgaggatataatgggaaagccaacagaattaataatttaattcatggaggtacacccaagagagcctgtactgtggtcatttgaggaggtggaattgaggtccctttttcttgacttcatgtgatggcttctggatttaatgggggagaagtgtggaaaaggccaaggatccaaactggcgaatttcctgatcttcgagcccctctccgctctccagacagcagaattgttggggtatattttccttttttcgaccctgcaacagcttctttaaattgtttaaatgagaatgtccttggctcagagagtactactcacctggcttttcacattactcttcttgatcatgttggtgttgaaactggatgagaaggcaccttggaactggttcctcatatttattccagtctggatatttgatactatccttcttgtcatgctgattgtgaaaatggctgggcgatgtaagtctggctttgaccctcgacatggatcacacaatattaaaaaaaaagcctggtacctcattgcaatgttacttaaattagccttctgtcttgcactctgtgctaaactggaacagtttactaccatgaatctgtcctatgtcttcattcctttatgggccttactggctggggctttgatagagcttggatataacgtcttttttgtgagagactgacttctaaggacatcagctcattttattgctgttcagcaagctattattaaagtgtactgaatctttgcaagcttgaagaatgccagagaactgagaaaaataccaaatgtaattttatactgctcccattaaaatagtcttggtgacttctacttgaccccaaacttaatcattcaatatttgagttattaatacccttattgttctatatgaataaagtttgttttggatcttatgtttctacttgactcttgaataatctgttttaagtatgtggtcaatattaaaagtacataaactaagtaaaagcctttagtaagtaaagtaaaagtaagcaaaagcctttaaagtaagtaaaaagcctttagtctacacatttgaatagacatttaatatatcatggccccattatgaccatgtaaatagtcatttgtgcttctcaattatgaagaaaacctagttactgaaataactggggtgccacttaaggtttatattcagaaagaatctaaaagttttgagttttttcattttttttatctaggctaccttcattgttatcttcgccttccatctggaacaaataaattagagatagaatattaaaaactgagcagaagcttgcctcttcctcatgttaggggaaccatccatcccatttatgtcaggacagtccaggttatgcctattggtctggggtctcagggacatagttcccctttaattcttacaagtgtcttggtttgaaaaattacagatgcccctacatagtacttaaacaattccagtgaaacataggtggcagtagggcttccccagtggctcagaatctgcctgcagtgcaagagctgcaagagatgcagggttggatccctgggtcagggaatatcccctggagaaggaaatggcaattcactccagtattcttgcctggagaatcccatggaagcaacttagcaggcacataggtggcagtacttaaaagaattccggagtccacaaccctaaagcagggtcagggtgattatttttgccttatacagccctcttagctttgggagtctctaaagtagtattatgttcattttaaaaatatctaacaagaaaatgatttctggctgctagta

SEQ ID NO: 50735 - DNA, 1640 bp, Bovine  19866881132173
  misc_feature (1)..(1): n is a, c, g, or t
nctggaaggggttgtagaatatgaaaagttagaggattcatggtgggatactcagtattatatgttgcttaggagatgcctagggcctagctctttcccttagagctctcctcctctccctcaatccttcctttgctttgccccagctaactgacagacatatctctgttttataaattgggggaggcaaaattatgtaggataattgtaagagaagagaataaaacccaaaactgcagttattattgtaaatttttcaactgggcacaaaactaggtaatatgaaataatacttttcctatagatgtctcacaggtctgtatctaggctccatccaacctattgtagaagttctttttcatcactcggacttaaagccattattgaaaagtggctttcaagctctcttttcaagtgaaatcttttgtagaaatagtatatcagaaatgtaactgtattgattgagttcaaatatataccatttattcattctaaagttgttgccaaagtttcatgagaacagtgaggttattttgatgaagataaaaattttaaactaggatgtatggatgatggttgtatatgagcaaacagatttctttccatatatagatatatagtttaaaatcctgattcagtaagaaaagtggattcaaattgaacgcttaaaaaaatgttttggaattacaggacactatagataaacagatatggtgccataaccctaactgtgaaatctaccctaaaatgatttgaccttggcagtgggtcagtcataaatagtcattgaacacttaatatgtactagatactgagactgcattagagaaaacagacacatggaatttatagcctaacaaggaggatagtcactaaacaaataattctaagtgattataagtacttaaactgcaaggtgaaaggaattctaagtatgctggggaggtatgacaggagacctaaccttgtacaaaagtgatcagagatgttcttcttaagggacatgatgtttaagttgagacatgaaaagtgaataggcaaagggaagagcaaaaaagtattccaagtagataagctactatgtgtgatggcctaaaggtgggagaatcatggtttatatgagaaactaaaacttgtcatggcttttctccaacaaagctggagagactagtgagctgttcattagaggctggagagtataagactttctagccaatgcagtggagtaatttataaactattaattgatgtgtttttagtgcctgtactgtattaaccatcaaccctccaccactttggctataggcaaaaaagtatttcttcaagatgtaaaaagaataccacaaagaaaacaaaaaacagaagcttcaaattttgacttttaaatctaaacaacaaaaaaataatagtaagaggccagaaactagaagacattgggcactgtagttgctgagtaaggttatagtacaggaccgtcatagggtgcctaaaaggactggcagagacttacagataaagatgacctcccgcaggctgtggggaacagtcagatactatcctacgtggccagaaagtgacacataagcgtaggctgaccttgagggtactggggatgcaatgcaaacactgactaagcaggt

SEQ ID NO: 50736 - DNA, 1396 bp, Bovine  19866881151416
  misc_feature (1)..(1): n is a, c, g, or t
ntgtatattgtactataagagagtgccataaagtccgtggtttcatggaaggagaattgagttaaagttcagaccagcatttgaattcctgttttgctttgtgacctggaacatgatatcaaatttcattcatgtttagtttccttatctgttaagtggagagaataatacttcaaaggggagtattaatattaagcaaaatatgtaaagtactggcttattggtatgtggatgaataaagtcctgaatgaagaataagaaacaaataaattgaagagttgagatgggttggaggtttaccagggtgactggtaactttatctctggagccttacagggtgactgataacttttattagtggggaggaagggcatcaacacagatagaacacacagaaccagagtcagggtctcagaacgggaatatggattgttatgggaatggcaagtaattgtggctctgtatacaaagtatttgcaaaggccaaatgtaaatgataattgtgtagaaatgtggctgggcaattttagtagttagaaattatatagtttataagaatatctcaagagtgtgaattgttacttttttatttaatatttactttttaatacttactaaaactgatttccaaatgtgttcaggcaagcaactatttcattatttcattatgatatttcatcctaaccagtaaaagaagactaaggcagctgtgcctaattcaagggaagtattttgggattattttaaaaagaaaaataatcttgagaattccctggatgtccagtggtacacttccagtgcaggaggtgcgtgttgtatccctagttgggaactaagattctgtaggatgtggagtgccaccaaagaaattaaagtaaaatagtcttaattaagtgattgcctttccttaacctgacctaccccgttgccatgtagagtcaatattgcacattacccttggcatatatgttaccatcttttctgacccaaaacttgagatgtgacagtctaacagaatgttttaaattgagactgtccttgaaaacctgagaaaaattcccatgcttatgtcttctcctcaggacagcacagaaccataaatactcacattgaatttataaatgtggatcacttgataaccaaaatcatatgactaagttgaaaatacttagtcaaatgatgtttgggaaagctgcctttttagtccaacttgttaagtgtcatgtggatgcgtaaatgacacaaaataatagaggtgagctttcagatgaaaaaaatggcttccttaaacaggtaattttagaagactaggaaagaaaatatgttggacttcattttgaacagaaactggggcaggaaatggctgggctgaaccactaccgataataatcataa

SEQ ID NO: 50737 - DNA, 1407 bp, Bovine  19866881168638
  misc_feature (1)..(1): n is a, c, g, or t
nctccctgttcttctcaagttgcttcagcatcactgaggaggggagagtgactcacttgtgggtttttatttagttcacagtcaaaggttccttctataggaacaagacactatgtaagatgtttgtgatttattactgacctttgggctattgtttaaaagtatacacacaatcatgtgtcataaatagtttggaaatccaggttcactcaagcatgagtaggatgagaaagaaggtctgattgatggtgtaatgagaacaacctataattgtaaatagatctagttagtactttacattctaaacttccctgatcacttcaggtactttctccatgaataaaagttagtttttaacatcaaagttttagatcagcagaataatggatgtccttggacctgattttaatatgcaaaaggagtctgtacacaaggcagaaaaactcatgtctctggggttgactgtctttgtttggtcatattgaaaacaccaactttctttaatagcttaattttaagacagctctcccgagggtctttactcatccatcgctgccatattcaattatactggcactgaatgtgtggattacaataatttctctattgatatgctaacactgaataaatagaaaggatagcagtgtattactattattttgatgcacaaaataaacattatccaattttctttactacttaaagtcacatattaattacttaaaatttacaactaggaatgaagccgagtgtctaaaaatcttgttcctcttcaagttaattcagattgtccatccatgcatgagaacagctgagctatgaaattgggcagcatgttttctggcaataataaggagataacattccttaggagtatttaagtgacatcagtattgataggttaattggaaataaaaatgtaaagctttcgtaaattgctagaataaagagcctctggtttattgtagcttcgcaatgcactttttgaactcttccccctttgcagtttaagttaataactgtctgattaatgtaactgtggcagtactcagaattccatggacatcctatggtaaatcagctgtttttaaaaacagactctcccacctatatcctgagaaacaatcattttgctccctctactcctttaccaaattcttaaaaaaatgaccccacatgggatgaaatgcagagaatattgggtggagaaaagaaatgcaatttgacataaggtcataagagctgtgtttgagaatctaagagaaactctccatcttcagagctcagggtaccacttggtgctaaatatagcataattaataacaattaagtctcataattaattttgaaaaaggcaagtaaagtgatattatgctatcatgcatcttaactagactcaaaattatt

SEQ ID NO: 50738 - DNA, 848 bp, Bovine  19866881380652
  misc_feature (1)..(1): n is a, c, g, or t
ntaataaaactgtcattgacaaagtaactggtcaccaaatcagtgtgtttctctaatagggtaaaacatgtaagatatgatagaagtctatgagcatctggtcttactaaatataatgtggccctcagtggattggagcaaagaaagcataacctttgcagttttcattacttcatatacattatgtatattcttattttccacatgcaaatgttaggataaggaaatggctacattcttttttttccaaaatcataagtcacccagtaatttcttcttagcaatctgatgttcagtgttttattgaatctaagatgtcatctgttataaaatatatcattattctgtgtattactagaaaaagcactgtcatagattgagagatgttaaatgtgaaaatgtgagtcttgaaatcagtcgaagatggtacagccttctatgtttttacatcctttgtgtctgtttgctcacagtaatacttaaagacattagttgaccagtttgagagaatcaatcacaattaaaatatatgttccactttatacaacacaaatacagcatttcactgctggatgccctaatcataacattttaagtactaatgaaatgaagctagtttatattttttgaattgattaaataatacaagggctcagtcatcaggcagattgagacaggcatcactgggaggactggctgggtcttacagtgttcaaagggtttgtaaacggaaatgccattttgttgttccttctgtcttgcgcactgttcctaacaaatccttgggataataccagattccccccatccctgccttttaaagaaccagttatagaagagcttcagat

SEQ ID NO: 50739 - DNA, 2248 bp, Bovine  19866881411894
  misc_feature (1)..(1): n is a, c, g, or t
ntatctctataatgtatccaagtgtcaatttgtttttattgtggcttcttcttcttcttgtccttccctaaacctgaaaattaatgtcttctactaattcagaaaaactcttatgtcatcatctctccaaatattgttctctctcttctttcaatatgaaattcctattagatatatgttggatctccttttcatatttccatctcttcatctctgttctatattctgggtaatttcttccatctcccagctcaccaattatctttgtctccaatttgctgtttcttctgtttgttgtgttttttatgtcagtgacttttttttttaaacttctgtgaagcaatgcttgggtatttttcaaatctatcttctcttttttaaatagtgttatctacatcttcagtcattttaaacaagcttatagtttctatctgatcagatctgaagttgctggagatgtattcctgctgtgtgttaatttgttgactcgctcatgttagaaacttttttcaagtgttctgagacctgaaggggctttaactgtgcaaattctgtgaggattagggtggatgttatatccccaagaacagtcttggtttagcttctttcaggtatccaggagtctaggatcttgttatattaacttcttgacacagcggctacaagacaagatctgtaatgtacacttgaaccctgaatctgtattaaaagctgacctacatttatatattcttaggagagactttctctgcctccttggccagaatcctggcaaaactgaccaagcttccttattgtcttcctgtgctgtagggcagactttttcttattgcaccttttcaccgagactgtaggcctttgaggattttggccttgtagcgtatatataaggaggtacagcagatcaaggcctcatctctcacatactaacacaaacaaagcacttcaacctaacattaacacatatacgtaactgctctgtttttcacttttatcctcatttttggccccttactgtgttataaactgaaatatacaagcaatatgtatatttataaaacacctcacttacacatattacgatgctgggtattttcccccaagtattgtatgttttaaaccagaagaattttcaggtaatctagcatgtcttattacttgaaacagaagtttaaatttcatagcacagactatattctgagatacttttgtgcttcctgactaatcttggtcaatgagaattcttttttcagagatgagacagttaagtcacagtgataattcaggtataaaatgaaagttaatactaaatgtgaataaagcagagatcatggaaaatagtctgaaaaatttcataactctagacactcatcagtttgttttggaaataaagatgaattgtagacaaaaactaattattttatgttcaattaatagacacctgaaaataagttagttattgttcatcatgtaaataagtaagatgcatttacttactctactgaaaaaaataaactgtaaaaattcaatttcaaattacttattactttgtttattattagaaagccttggaggttgaatatttatagatctgattatctaagttctacacaaaataaggtaactcacctgggcacaacagataaatacaactgagatagtcaacaagaaagcagatgaaactatgacatcaactgatcgctgaggacctcgacgctggtgggaaaaaagtgaaaacacttttaaatatatttactaattagcagctaattccatgctttcaactaaggtactgatccatcactgcacattgaccatagcttatgacattgaaaatatacctgattagtgagatgaattttaattataaactgttattattgcctgaggatttgcaacaccatgaaaaatggtgaatatatagcctagaatttgtagaaggataaatcccaaatattccattttgtcaaacactaaccatttactgaacaggttttttgaacacctgctcagaatgagggacagtggtaggtgctggaaatatagtagagaacaaaacagacaaggagtcaaacatcaagctcatagacagatatacgtgcaagttgtgatgagagctatgaaagaaaggtacagaatgctttcagaacattggtgacaagtttggtacaaatagcatttccttaccagaagatcttcccaggcccatacttctaactctcagaaagattgtgtaggcctggggaag

SEQ ID NO: 50740 - DNA, 1540 bp, Bovine  19866881507949
  misc_feature (1)..(1): n is a, c, g, or t
naatatagtttaagtagctttgtaacattcctcagtgcctgtccataactgtgaagtagcaaagcacttagggccagatgcactgaaaacactgcaggtttaaacaaaagcagtctttgaaaaatcatttgagtggagttgtaggttttagaatagagctgacattaccatatatatatatatattttgtaatatgagccagaattcttttttgacaattaagccttttccatagagtttatttataccagtttttttttttttttcactttaaatgtgtcagcactgtagtgtaaatagcttttaaaaaatctttttagtgtgatttatactgaaatgtgagccacttaataaaggttcataacaataaatatgttttctgttgagtctgccaaaaaaaaaaacccattcatttaaatcatttatttcacctgttacgtttttgctggtatatcaagtgctaatggaatgcaagtgtatgtattcaaatctagttaatatttaagtttcccacactgtgcaagcatttttaaaaccaagattcagttatgaaagtatatttatgtgtgtgtgtgtatgtatgggaatatatatatatattaccatattttgcataacttcttaaattgctgaatgagtatgtgaaacttcctatactctctggaatatattttaaaatatttcaatgttaagaaagcagtttaggtaatagaaaaatgttataagttgggagaaaaaaggtattttagtggtatctaacccttctaactaatgaagttatgtggccagattatatagccctattaacgtgaattttctttgtagtgtgtggaataagaagttgagaaaattttcttattaatcagcatctatactgtatctaatagtagctgggaaaaaatgttgagttacagaaagtttaattgtgtgcagttaaaatattttattacatatttcttgaggaacaggagaaaaagatggcaaatagagcatattaaaacaagagcagtgacttaactaccatatacagaagtataattaacaaaataaaatttgttacctgatctttctaagcatccctctccctaccttactaaagtaaacaacttagattttttttctttgaaaagaagctctggaaagtaaaactggcataggaaacaagattgccagtgcctcgccaaagatgattaaaacaaatctcttcaatgatggactttagcactgtttcaaattgctttcattattgtaataaaagtcaagcaaatgtctctattgtttgctttgatgttaagaactctgcatttgcaatttattttcttctatttgaatttggtatttttctgggcacatgctttggttgattactttcagctggagttctttgtgctgctgccttttgagcttgtgtagctattcccattcagtggcttctactctggcccataaagctgcttatctctctgattagggagaagccacttaaaggcatttcgctagaaatcataaactgtagcaatggtgtcatttctgacctcca

SEQ ID NO: 50741 - DNA, 740 bp, Bovine  19866881620759
  misc_feature (1)..(1): n is a, c, g, or t
naaatgtttattctggaaaaaagcatcctgtgtaaatcttggcaaatcacctgaaccattttaattaagtttccctaaagatttgaaagaaaaagtcaatgaacagaatccctgtaatggcagttgtcgattataccagagacaaggctatcacagatatataggaaatgctagttccttcccaaacaccatttaacctattattaaatttccattgtcttttaaggaggaaagcaacagctgtttcctgaaaattgttcaaattgcagtaacaatgctaaaattgcatcaacagtgtggtcaactgaggaaaagtgcaaacaaatccatgctaactcagaaacccagaatggaacgattgctctttttcttctatcccacagcactcatccctcacctctcattatgcagatccacaacaaatgttggttaactgcctgctatgtggtggaatggcagttctcaagtgtggttcctcagaccagcaaccacagcatcatctgagacatctcattagaaatgcaaaccagaaactggctgtggagcccagggatccttattttaacagttgctgcaggagatgcccattcatattagaggcgcctcttagagctggaatttcacagggtaacagtgaggtagactgggctgtgcatcatatgggcagtgtgtccgatgggcggtgcaggtagtggctgatcaccagggcagagcccatccctcgcactccttacagggta

SEQ ID NO: 50742 - DNA, 1470 bp, Bovine  19866881814519
  misc_feature (1)..(1): n is a, c, g, or t
nccgggtttcttttgagttattttggaacaatgccaggatctaaactgataaagctgcagtttaagcacccttcagtattaatatctatggtattacacaacaggtcaacaagtgctctttgatgataaaactcttaatagagcaataattgtaaatggttaccatactgtaagatattttgataaaaattagtaataattgtatttatttgaaacactgggctgtttgcacagctccaactgtgcatgctcaaaatgtgcactttttaaaattgttacttttaatgtgtgtctttatatggggtatgttatagtgtactagggcatgatatggtatccttttgagtgaggtatatactcatctcacaagtgaagtgcctattgatattactcaagtatgttatgtttactcaagtaaaataattttctccccatggtacactatagtgtatgctattcataccacactcaaatgaacaacttaagaataacattgagaaccaatcagatattcctgattgctagctgtaaaactatatatgagttttcaggaaaaatagcgatagcttgcaaattctgctatctagtatatctccctcctcaactcgcagttacataagggctattttagatgcttttaacctagaaagtaaccccctccctcccctccaaataatttgccaagtgtccaaatgagaacttatctgttggcatgttaggtaaatagggcaaatatgatggtctcttacattgggccttgattttaagttgttatatttgtacaatcaaattttaggagtcacactgaaatactaaatgttttagcaaacttttttttttttaaactgggtgtctagtttttaaaagactttatttgaaacaatctagaattttcttggtgcaagttgtatcatgttgaatatcctcacctttttttaccatgttttagagaatttaaaataattaattgtaaatgatttatttgactggtgcagttttaatccccaaatcataatcttaagatcaggaatgtgtggagaacagagccatatcataatatcactttgctctcaccattccttttgatcagcctcaaatcagcctcattgtatagtatattttctttctatagaaaacaaaaacattttgttttatttgcctatgttctaatatgtttaataatgaccaaagtgcattctgagttttttcaaggaatgtattactggagctttaagaacatacttattttctcctgtgaaaaattaggctttgtctgatatgtttattcttcctctattgtctaatgttgaggttgtttttaggaattatattttataaagtttttcaagataaggtacatacctatacagaacttaacattttgcacagaatatattgaatatattttgagaaaaaaaagtacagccatgagttctgttaggaataaaaatgaaactattgtatctcaca

SEQ ID NO: 50743 - DNA, 788 bp, Bovine  19866880418876
  misc_feature (1)..(1): n is a, c, g, or t
nccgagcctgagtttattcctcatgcctgcctcaaaggatttttgtgaagactgaatgagattttgccctcagtacagtgcctagtagagtaagtttcaaaatgttagttctcgttatcatcatcctcatcttcatcctccccgtggtggttatggtatgtgtatggaaggggagccctgcccatcctcctgcttcagttgtatctagtgatgatacaactcaaaagccctccacgcagtgaggcccaagaggctactgggaccggctacctgcaatttgattcatattccaaagaatgtatttcacttctcattttatttcttcaacacacatccacataatttttcacattcctcttcacacttgattttaagcatttcatttttctccctatcctttgagtggagaaaaacggcaataaggtgctgtttttgcaatatacagtagcctgggatacttgtcaccatgcttctttctgcatccagcaatcacattcacctaacccaaccatgttaatggattcagaagaaatccagtcaaattaaaagaatgatatacaggcattcttaccaataaaaagaagaaaaccctttaccttgattaaggtaaaaagagggggaaaacatcaaggttttaaaaaaattttataccagtgtcttgaaacaaattctcaagggcttttctgattagccattgatgctgcactttgtcccatttgattgacacttttgaacaatactggaaatgctaattattctgtgtttttcttaggagatttgcatactgt

SEQ ID NO: 50744 - DNA, 1442 bp, Bovine  19866880450186
  misc_feature (1)..(1): n is a, c, g, or t
natgtagaaaacaaacttatgggacttccctggtagtccagtggttaggacttcaccttccaatgcagggggtttgggttcaattcctggtcagggagctaagatcccaaatgcttcatggccaaaaaaccagaacataaaacaaccgaagcaatattgtaacaaattaatgaagacttttaaaaatgatccacatcaaaaaaaaaaaaaaaaatgcttcaaaagcaagaaaacaaactcctggtcaccaaaaggttggtacaaggacaaattaggtgtatgagactaattgatacaaactactgagtataaaatggataatcaacaaggaaatcctatatagcacaggggattatagctattatcttgtaataacctgtaatgaattatagtctgaaaaaatactaaatcactatgctacatacctggaactaatataatattataaaccaactaaaacttcaattaaaaaaaaaaaaacagaaaataacaacagcaacaacaaaaaatgtgcagtaaatgtaaaatacacactggatctcaaagatgtaaacagaagcaaatggtgcaaaatatctcagtaataaatgttatactgaccaaaagaaaaaaaaaggaaagaaagcaagaaagggtagttgtgattaattgcacaacacggtgaatgtacttaatgccactgaattagttggattcttgactaaaagtcttatatctcttttaccacaataaaaatagtttttggaaaaaaagccctttggacattatgtactcacattccaaggtaggagaaaaggcttaaagaaaagtcttatagatagatacatatatatgcatttaccttgaagggatgcaaagtacacatttacatcaattctttggaattctttgacaatctaaaaatttaaaaaggagaatttgtaacaatgagtaactttacctgcctttaactcagtagcattcaactacttgctcaggagaaactttgaacactttcatggtgaatcaggagtctgaagaaagttcattattggaaattggaaaaccaccgaagtttcaacatacagtgatgatgcttaggatgaaaagaccatgtctcaagaggtggcaacatccagtgctcaatagcccagcactggatagcacacaagagcttcataaatacttgaggaaggaaggaaagaagggataatgcaacctctgctggttggagagaagagtatgagtttacgtctctgagtggaagagatatggctgtggatatgcggccaccagacaccaagtgtaaacactggcctagaaaccagggtctctgtatttgactgtagcagtgtcagtatagtgattgtgctcttacactatagttttgcaagatgttaccactgaaagaaactgggtaagtggtactgaggatctctctgtattatttcttatagttttat

SEQ ID NO: 50745 - DNA, 1155 bp, Bovine  19866880450900
  misc_feature (1)..(1): n is a, c, g, or t
naaattacttgaaaaaacctgacttataatctgtgatcttattcagtataatcactaaaaatattaagtcatttatttgctttgagctatttatgacttttatccatggacttaattttatcaaaacccattagaaatggctcacttaaaagtttatcatgtagcatctcaaaatagaatggtcaacgttaacctcatattgaattcaaatatatcataatataaagtgttccatttctggtcaagatcactgcagaataaagacaggcaaattcccaaagctgaatgactgtcaacatgtagtacttcagtcaggtgtctctcattcgaagttcataaagaacataaaatatatttaagcagaaaagttgtgcagttgtaaaacatgtaaataccgtaattccaggaaaaggagtgacttctgaacctgtggctataagaatgttctttgtatcaataacttgagtgctgccatcggctttcgtggcggtgacctgatttttcccagttatctttccatatccatttacatgaacaacctttataaaataatatttaaaaattcacaaagtttaaaaataattttttgggtaaacaaacgtgatttgtaagaaaaaactattaagtaagttatccaatacaaaacacctccttacttggtaacactacaaatggcgcagcaaaaattttgttacatacatcagggaaatctattttaggctaacatactgttttaaattaaatatcctcctgcagccaatttctaacagcatcactgtcagcataaagcaatgtttatcatgtatataaaataatgcaaaaatctgaacataagacacactaaccttattctgtttgaataagtgggcaattccacctgttaaagcttttactgcattactcttctgctccatcatcttctccaaattcaaacgaacttcagacactgtaatttgttaaataaatctttagtccatagctaaattcctgaagcaatgtgatatttttcactaatcaaggtctgaaaaattgcagcccaatgtatacagaactgcataaaaggctgtattaaaattttttaatctaataactgatacaataatcatagcgacgaaaggccaacagcatcctaggacaataacagaacacatcaca

SEQ ID NO: 50746 - DNA, 1030 bp, Bovine  19866880459107
  misc_feature (1)..(1): n is a, c, g, or t
naaaaggtggtttctgagaaggcatacacaacaaattattctagagctttgactcttggcttgattgaatctcacattgcagagaacaatgtttctaacactcatatttctgtgtgctttgcttctatggactcctgaggagcccataatttaacttcctagagactgaattctattctaaatgctcagaaggaagatgctctttgaagtaaatctgacaaattctcttggaagcctatgatcatttgctgatcatttttataaatgcagattttcacataggctgtttaaaagaaaattaaatgcatcaggaattaaatatgaattactcccctgttttgtgggtaaattctttgtagtagaaaatgtatattagcaagtgactgaaatgtgttctttgtatgaaatagcctctagctggaatgaaggatttccagcttatgataatacaccttccccagcaccgataacaagcggaaaacacaattcttcatgtcatgtcagactccatttctcattttcacggtctcattgtgattacacagagcttggataccttggcaaaatgcatttggaaatgttactgtgaagattatagtcatctgtgacaaggcaggagggacagccttggatgtgattactctgggtcttccgactgctcacccccatgcccaggcccatgtttggggaaacccaatagacaggaaagaatgattcagaaatgcagctggacggaaggcagaggaggtggctgcagccaacaagcacccacacagcccttgctcaacaccaaaatcctgccccctggctgatcactgagagcaaacaatagaacagtgtagcatgtcacttctgaaactctttccagaaagggaccttcagaatttactgtgaactgagcatgctgtctgtggcaatgatagcagtgccctatagatatttgtaggcactagacatttcccagaatcccttgtggttagtgtcattgacttcttctggtccatgggttaggagcaaaaactgtcagcat

SEQ ID NO: 50747 - DNA, 905 bp, Bovine  19866880564960
  misc_feature (1)..(1): n is a, c, g, or t
nagttctttggcccttttttgattgggtctttatttttctggagttgagctgcagaagttgcttgtatatttttgagattagttgtttgtcagttgcttcatttgctattattttctcccattctgaaggctgtcttttcaccttgctaatagtttcctttgatgtgcagaagcttttaagtttaattaggtcccatttgtttatttttgcttttatggtcctacctctcaacagactcatgtggtgttttttaatctgcagtactggtgaatttattttctctgagattatcatggcaaccgtgcctgcaaagcgttattagaatagttatcaggttgcctattcaataatggggaagaatcaattatgtgctatgagaagttatttcccaagaatgcatcaaggatctgttgtccaggaacaaggatgggcctgggtttcctggaatgacaaatgactgatgattgacctcttaaattgacaccaaaaaaatagaggtctgttatgtatccaagtgcaatcaagccaaactggccttactctagcagacctagccccaaaattttctttttctctgccgtagctactaaacgtatttggttttagcaaataattcttatttctttcaacaggactgagcagaaggagggaggtgggggagcattgtgtgcccatgaacaggctcttgcacacatgcgtgcagcaagcacacattcagagtgagaagcacagacccagactatgggagatgtgtgtgtctttcaggttgccggcatcatctcggctggggttgtgatgatcgccatcgttgccctggggaagctgctggaacccctgcacaaggtataaccttgcttctcgccacaccaattgcttactttccctttcctgctctgctacccaa

SEQ ID NO: 50748 - DNA, 1105 bp, Bovine  19866880652451
  misc_feature (1)..(1): n is a, c, g, or t
natacatgaaagagtattattttaagagataataagataattatcccagaactattaagttattgagtagactgtattttgaaaaaactactcttcttaaaagaagtaccagcatgctttgtttgggagtattctgttaactatttttcactgtagtatagcttttccctcttttcaacatgagcattttccacaaaatagctctaaacacagtttgtcttcctgctcagccttttccgtcatatagcaaacctgtagtttatcgatttgccatatatattctacaaccaagcctttggaagtttctggcaggtgagagaggaggagtctggcaggggctttgggggttatttggaaaaattgtacccacctttattttctctcttcctctcccatgtggaatgttccccacttctgctaaaaatctaaccaacccactctccttccccagctacaatcctcagtaatctccatctgctttctttcttacttgatctgacctatttttggcctttttccctagagttaacgtgtcttcctaactagacataaagttactaaaaggcctgattatgggtcttttatatcaccctttttaccagaacagttaacaggctactaggtccgttctcgataccattttttctttcggtaaattcaaccagttaggagacctttcaaaggatgcattctttggctttcatatcagcagacttcaactggatggagcagagcccctacgtgtggtattagggcagaaggtactgaaagcactgatgcagggttaaatcactattgccttggaaggaagcaagctggcttacccctaagctctttgctcctctctatcctgaacacttttccaagcacccttgccgaggaccacctacacactctcttgggccacccaggccctgcacagctgttggctaccttggactcactctgcaccccgtgcttgttccttggctttgttgcagacgtgtggaacgcctccaggggcctcctgttccgagacggaatgtggcggcccaaactgcagaaccgacgaaggagaaaaaaagtgtggtgggcctggctgtggtgggctggtcactgttgcaca

SEQ ID NO: 50749 - DNA, 1251 bp, Bovine  19866880674714
  misc_feature (1)..(1): n is a, c, g, or t
ngcaggaatggaaagtgagtgtttaacagggtgacgaaaaagctctagaaatggatggcagtgatggttatacaacaatgtgaatgtacttaatactactgaactgtatccctgaaaaaaaaaaaatggcacattttatggacattttaccacaatttaaaaaaagataaattaatttaaaaataaatgaagggacttccctggtggtccggtggctaagactccccactcccagtgcaggagcctggccagggtttaacccccggttagggaagtggatcccacaggtcacaactagaaattcttatgctgcaacaaagacccggtgcagccagacaaatacatatttttaaaaattaatggaaaaattaacaaaactcactttaaagcttctcagctatttatgaagagctcacctgacttaattgaaattcactagaatgtattgaacaaaaaaatgttatcacggtaaaattccacatgttaagtctcataggcttaaaatatttggctaggtttaagaaatatgtgttatgcagggaggcagttcagatgaatgtgttgtagcagacagttttttttttaaatggtgttagacttgaattcatctagttattgtttgaatgagggtgggtgggtagaaggataacaaaattactgttagtgtttctttccttaaggaaaaagatgtgaatcccagccttatttcagggaatcctttgaagctatgatggacgtaagtctaaattaaatgtatgtatgtttcattatattgctcttaaaagactactgaggtggcagtttaattcttaaaaacaataaaatgaaagcataaatactaaaaaaaaataaaaataaaaattaatggaaagctgaaagaaagaagaaagcaaagaagacagacggggaaggagcgaggaaggaaggaaaaccatcaaaagctacatgcctcctgctcctttcggacaaagcctgggggtgacagagggcacggagggcggctcacaggcccggccctgagagggcctccgcctctcgtgtgaccctgagatctgggggatgctgacccaggtggaatgcaagaaagggaagcctgctgtatgaagcagctccacggacacccccagggcagtctttctgctccaggctcaggcattccagtctgcttagatgggcacccgcagtctttcattagcacaaatttcccacttccttaattttttggtctttctcatttttctgcagttcacg

SEQ ID NO: 50750 - DNA, 1219 bp, Bovine  19866880709013
  misc_feature (1)..(1): n is a, c, g, or t
ncaagcattctggtaagatggtttgatcccagtgaaacaagcagatagtgctgacagttaaagccctcaactgtcacccccaccagcaagaactcggagggtaacgtcctagaaccctcgtgtgcaacaaaggagcgggagacaggaccaccacatgtgttaaatgtgacgaaaacccagattctcccttaggcttgtgactaactaggactttgagggaaagcttgatgttttcttaagaacaagatattgctacaggcatgtgaatcagaaggattgcttaatttttatgctgttgcagtatttttcctgccaggttatttttcagatcttaaagcattcttggagaagattttagtagactgttcctatactgttttcctcttctttctttcctacttgggttttcttccttatgttttaagtttataactatggataaatatcttctgtactttcttatttgctctttgatatattttcttcattatacgtatgaaattctgggtccctgttggacactacattttttaaaaaaatctcttttttagactgaactgtagtgagaaataatataggttagcagttcattcagaatcttctgctgaaagtcacaaatctagaagctgcatgttgtttcagagtcagctcatatgttccttaactaagtccaaagattcaagcagtagacatgaccagaaccaatggcctgtgatttgtttctttcattcgctgtgtagccagaagggtctgcgccagtatcttggatgagacgaatgtttgctccacagaggagatgacgagggctgtgtagatatacagatgtattcatatatatcattcttcagtccccgacgttggttcttaatggaacctgattttctcacttcctttagaaggtccatgatattcagtggaccacttgctctaggaggtcccttgcaagtaaaatcctgcttaaaatctggtttcttcaggacttcaccactattttgttaaatttctcaatcgtatactgccccaggggccttgattttctccagataatggctctatcatgcttatagcctgattctgtcagcatgtgtcattggcaaaatagctttgactgccaaagctttctgaccttttgctccatctaagctttgttagcatgaaaagcctgtttcccagagtcagagtcaatcagaggattgttcacttaacactcagaacttta

SEQ ID NO: 50751 - DNA, 2168 bp, Bovine  19866880747541
  misc_feature (1)..(1): n is a, c, g, or t
nctgtcaggtaccctgagaatgcagcatccctcagggaggcctgtgttccccgtcctgcattccaagtctaggatcatctcggccttgctggctcacacattctcagcaatgtcctcccactgcctcggcacagcgtgttaggacagagcgggcgtctctggagtctcccctatcaattattctcagtgttttgggcccagaagttgggctccctgtgcattctgactgcacatggatccaccgggcagtggagggctgggagtccctcccaggtccttgaacatatcgagctcttaaaacctacatcactgtgtatttaatggggatagagttccagtttttcatggtgagaaagttctggagatctatttcacaatagtgtgaaagtactgtactaagtactaagtgaagttgctccgtcgtgtgcgactctttgcgaccccgtggactgtagcctaccaggctcctccatccgtgggattttccaagcaagagtactggagtggggtgccatttccttctctgggggctcttcccagcccagggatcgaacccaggtctcctgcattgcaggcagatgctttaccctctgagccatcagggaactgtactcttaaaaatgatgaagacagcaaattttctgttatgtgtgtgtgtgtttttaactgaagtatagttgatttacaatgttgtgccaacctcgatatacagcaagtgactcagttttacacgtatgtacattctttttaaaataatttttctatactgctttatccaggagattggatagagttccctgtgctgacagtaggacctgttatgtgttttttcaaccacagtaaaaagttacctcgccacgaacatggaagaccagctcaactcacaaagccagtaggaccatcttcccctggtgggggttcatcaagcagaacgtacaccatttagaacagcttttatgtagcccacggcttgtttttttccctgctctcaaccctttacaattttttttttttctttaacttgagaggcctctgagtgtatctgccttatttctgctaaatggagcagcctcccaatatttatttttggtgatgtatttaggaatcaaataacccctctaggtaagagtaataagagtaaagaagcacatatttctccatgggggtttggtctaccagccaaatgctggtttggttttccttgagtacttactaaagaaacaccagcaaacccgggaccatcacagtgacatacgcgagctcagcaggtactggacaaaaaatgaaaccactggtgcagagagatttgaagcctttgaattctgtgccctggctactgagtgggagtaactctccagtatctaaacccaaattgcccaaagaaataataattaattccaggaataccaacttcggttgctatacatgcacactggatgaagacacttaagagcacagacatgaccactgtacaaagccccagaggtgaggttcagaactgggctgacagtcttccaatcatactttcttttattctacccttcctgacatggctggccaaaaccatgaatgtttccaacatttagaaaataagaaaaacaataagtgccactatacaaataaaaattactatcaaattttaaaatatttttgtttctaatgcatagttttattttaaaaagagcttcatgaaacagactaaggagagagaagtatatgtatctctaagatgagaaactagagacttagtggtttgtttaatgtacacttactgctcagatttcctgagttagtctcctctataaacatctcccgaaatctgaacagctgtgcataatgtagaacaaatctctgaatgaagagatgaattttcttcatgtaggtattacatcccctgtgaagggatggccactgagccctttggaaaaaagatgacttggtggaatcttggggagtcctagaccacatctcctttcctctgactgcttattatgtatcactgtctttcaatccctccctccaatatcagcaaaaatacgtaactgtggcaggaggaggccttctgtctactcttattctcttcattccatccccttctcatcttttagagaaaaggggacttttaacataataatagtatgatcttacagatgctccacttggaagaa

SEQ ID NO: 50752 - DNA, 1661 bp, Bovine  19866880783071
  misc_feature (1)..(1): n is a, c, g, or t
ntttaatactccaagtattattctgtttaattcaaattcttttctttgaagaaaaatactgatcatacctcatcttggacatcaagttgttcttcgatcatttctgcttccattaattcaagaggatctttacagtcttggatgagggtgatcttgacaaaagagaacacagagactatttattagcagcctaatagcatcaacctacctggttcttcactgaaaatgatttgcagcttggctggtgcctctcatctaaaatctacatacttcaaaatccttttcagctttcttgatctttcatatttcccacttagaattctccctccaccatttttttcacattcaagtgtgaactggtatagttcattgtctaacctcctttgcaactctcttccccaacctctgaagtgtacacttagcaagtcatctggtcggcctaaatgattctgcagtcaatggtcattttctttcaataaccaagctaagagcacttagtaaagcattgagcatccagggaactcgaagtgaagggctcctgactgacaacaataaacaatctcaagttgaattgaatgggaattaattttattggagatagaaaccaatatctatggaccaagtaggttattcaggaaaattctgctttttagccataatgtgtaatttaatctacacacaaaggaaaccagtaacaatctggactttgtcttacccataaagcatattcccaaagcaactctaaatgtacattaagataagagtaacatttcattttagctacttttaacctcacaaataaaaaactcaattctctttacactatcctgctttgttgttgttacctacggggaaaacaataagtcaatttttcagttatattaaaattttttttcatttatttattttgggtactgctgctgctgctgctaagtcgcttcagtcatgtctgactctgtgcgaccccatagacagcagcccatcaggctccaccatccctgggattacattgggtcttaattgtggctcgccagcttctctctagttgcggcacaagggctcagatgcctcgtggcatgcaggagcttagttcctcgaccagggatcaaacccatatcccctgcattagaaggtggattcccaacctctagacacctgggaagtccttagacatattaaaaaatatttgcaggttttcaaagctgagcatcttgagtgtagcaccttttttttatttatttaagatccacatcttggtatttagaagtagtattttctccaacaccattaagtagaacaatctttctactaacaataggtgaattgaataatgtactattgttttctaaattagtttcacttcaaacagtaactttcaatctacactaagaatctacttatcctacttttagaaaaaaaggaagcaatttaaaatatagtggactgtgttatcagaatgattattattgttgtcatttttatagacattttagtttcccaaattcattgtgagacagtccatgagagatgacattcttgtattaagcagtaggcccagcccaatgacgcacatcagaatcctcaactctcctgggtattttacaggaaaaagataaaataaggaggccaggggaagtcagagtctatccgtttttcggaga

SEQ ID NO: 50753 - DNA, 1996 bp, Bovine  19866880807272
  misc_feature (1)..(1): n is a, c, g, or t
ntaagtaaatagtgctatgtatttaaatgcaaggtcatcaaaacaccttgaagagcactgactagcagatgtctgtcaataagatgaaaatatgatatataccttggtgcttctgattgtccattaccatgatgtttcatttttataaaccttaggacagtaccaagctataaattaagtataaatgttgactttcagtaaaattgtgactgcttacagcacaaaggttagcaacaatggataccagagggcagtaataaaatgttacatacaatttctcttatcatttttgaggaagaaattaatttgtcatattgccactgtactagtaaagtaaggatatagttaaggggaaagtgaatatagagcacagatgctatagaaatgcataaaagcacgaggtcaaatcaaataatttaaatgtttacctaacattttagcaataagaaatctaaacatgtgagtttccttttagtaaattttcataacttgaagcaccataaaatgctgacataacttctgacttacatattaaattacataaaacacagtttgaagactttttaaaaaaaattctaattctttaaatagcatcagcagacactaatattattattctgaacctggatctgcatcaatctgaagtatgactgagtttatggccataccaccctgaatgcaactgaccttgtctgaaggatggttgataggctaaatatgaggatcaaaaaaaattaaaaaaacaaaacactttctaggtgacaactactttcttttacacacaaaattggtggaaaatgcttgattttcattatcagtattgtatttagagaaacagggaggtatggaagaaaggttgtttcctccaacttgcaaaacacaaaaaatgcccagcaattgaaagcatcttgaaaaccacttagggatacagaaacttacattttaacaaaagcaggagtaactctgaatcacaattgtccttagttgtgaatgcacctaaaaacttgtttataaagctgcacaaacggtaagtcttttaaaagatcccaccaaaacattcaccaaataacacagaacacttacagtattactcatcattattcttccaagctctcactggttaactatacagatagagcacatcgctacacataacttgactccgaattcagcaccatgaaaccgcttctctaagaggtcgacacaataatctttaattgatctaggaactctggcactgaaagcgtgcataacacaaggtaatgatgtcgtcaccaagggacgacaagaatagaacccaaatcccttgactccccagcttgtgttttccactaattgtgctcctttctactcattcgagatcatcaagtgtgaagggctggagaagggagtggacacatgcgccagggtcgcgaggtggagacggcccagaaggtcctcaggaatcactctttggcacttgtcttttgtttcggctgagaacgatgaaagctgcagcaaccaccaacccttgggaccaagaactggaactaggtactgcccgtggcggtaacttgtctcttcattttaggcctttcccctttttcacggctccctcgcggccagccctaacgttctctccccatcctcagctctactccgcactggagtccccgctgacctttattaagagtcggctgcgccgcatccgtcctccacctggccccgcgtacagtccttaggacaggagttctagggggaggggggaggtttccctagaaaatgaatgctaatcaagcgttagaaatgggtttcaactgttagcaacttgagagatgggaaccggggtagatacccaagtcagctctgagtgggtctgtgcagctcatcacggcaaagcaaaatgtagacatatatgcacagagcttttctctctagctggtagccttacacagctcaaccgtcccctaggcaacctcccgctggaggacgctttccggacgcgcgtgtttacact

SEQ ID NO: 50754 - DNA, 846 bp, Bovine  19866880822837
  misc_feature (1)..(1): n is a, c, g, or t
nactgttttctagcaagatagggctttccctattcagtgatgcaaaggtttctcccttagctttcaaaatactatgctattaggtggctttacacctaactttttttataatgaagaggagaaaattgaaagatggttaaaaaattatagactaccttcaaatcttgccatgtttgacttttcaaaaatgttaacacatttgactctatttagaaagtgttctaaaatgaaaaatgataagggaaaagaatcttgaagaggtctttgaacctgttttgctagattaaattagctttactaaattatgttcatcaaatacatattcattgtcttattaaagaacgtagttattttaagtcactaatatttgaagactgggaaaattatgccaaaacaatttagaaactaagcttggctttccttcttggtatagccccaaatagatttatttcctgatgttcctgaaatttgaattttcttctgctagaatgttctagtaaatgaatgttttaatgctattttgcaacgttgacatttatacttgagataagttttcgcctacatccatctgctggctagacatgtctacctgggcaatcctcttgaaacaaatagagccatctactgctctatctccaacccttatccttatccttagttgtataatatttctgccagtgtctggaatatttccttgtctataaagggagatcaggaggagattaatgattaaaagaacttccttacctgggagagttgattagtaccaaatgcatgacaaggtaaggaacatggaagttgattttttttctctctggtattctatacatttagacacttcagatt

SEQ ID NO: 50755 - DNA, 1650 bp, Bovine  19866880864651
  misc_feature (1)..(1): n is a, c, g, or t
nccccacgaatgcccatgcaaagtgatcccttggcagaaggtttggggataatagcattctggtaagctaatacccccctgccacacactggcatgtattatatttaggaatgaaggatgccaggatttcatactgaagaatgaaacaagcacagaaatcacttggtatttaattactgaaatgtatactaaattctggggttaaaagtctaagtgtctggactaaaatccaggaactaatgaccaactaaactggcaagtcttcccttgttctttgacttttcctgcatttttcgtgttggggcctcagtttcagtatctatgcaatggggggtaatcattgtatccacctcacagggacactgtatagattaaataagcaactgtttataaaattctggcacatacatgttgactgttgattgttccagtcattaagttctcaaggtaagaataatgccttagtacctatgacacatacattgtacctgacacataagaaacatatttgctgaatgaatggatggaatcatgagtgtcagtggatatcaactaatttcagcacatctatagatactcaacattgcaacctgtgctttctctcatccccatctgactcctaatgattcatgaaaaaataattctgatgacaaactattctctagccctggttatcttctcacttaacagaaaattaattgtctagcaactgaatctgctcatagatacaaaatatacagcatttcttgtcaaataagtaattttcccgtataaattaagtacaggtagtgggtccccttgtagatttaaaaaatagtaaccaaaattagtcttggtccccatcagttcagttcagtcgctcagttgtgtctgactctttgcgaccccatgaatcgcagcacaccaagcctccctgtccatcaccaactcccggagttcactcaaactcacgtccatcgagtcagtgatgccatccagccatctcatcctctgtcgtccccttctcctcctgcccccaatccctcccagcatcagagtcttttccaatgagtcaactcttcgcatgaggtggacaaagtattggagtttcaaatttagcatcagtcctttcaatgaacacccaggactgatctcttttagagtggactggttggatctccttgcagtccaatcccagacagcatattaaaaagcagagacattactttgccgacaaaggtccatctagtcaaaaactatgggttttgcggtagtcatgtatggatgtgagagctggaccataaagaaagctgagcactgaagaattgaagcttttggagtgtgatgttggagaagactcttgagagtcccttggaccacaaatagttcaaaccagtcaatcctaaaggaaatcagccctgaatattcgttggaaagagtgatgctgatgctgaagggaaactctaatactttgaccatttgatctgaagaactgattctttagaaaagacactgatgctgggaaagattgaaggcaggaacagaaggtgacgacagaggatgagatggttggatggcatcactgacttgatggacatgagtttgagcaagctccaggagttggtgattaacagggaagcctggtgtactgcagtccatggggttgtaaag

SEQ ID NO: 50756 - DNA, 741 bp, Bovine  19866880921723
  misc_feature (1)..(1): n is a, c, g, or t
nagtacagtgttcagtttgagttatctcagcagccgaaagtctagttttcaggccagtaattttgcattggagatttgtggctgaataaaacagaaaccttgttagtattagcctgatagatgggagggagtacatttgctccatcctttccccagagcagtcgtgacaccccttggccagttcccaaggttttgctatttggcacaatcctgtgatagaaccacagagaatctgaatgtgaaccgaccacccaacccacctgagctggtctagatctaaaccaagcctccagccggcagtggaacccacttcacagcacacgtggaactcaccaaatgcaatggctgcttagcttatataactgtacttttgacactgagtttttgctttatttcttttaatacagaatcatgctgcttcccacacccatctgtttagaaccagatgtacaatattcccttgatgtctatttttcccagcctttagaaggaaggctcaaggctcattcacacatcctggttgattctgtaagtactacaaagccttgtgggtgcttccttctgaactgagttccattctaattgtacatgtcgggttgtactttgcagtgtttcgtgagaaatagaaatctatttgtttcattatgaaaatcatctcctgtttatgaaggtcatcgcataacgatgggaaatcttccataacagcacttgtcagccccagtttgaagtgttttcgatatt

SEQ ID NO: 50757 - DNA, 1393 bp, Bovine  19866880947571
  misc_feature (1)..(1): n is a, c, g, or t
ncgaaaggaaatgaaaaagctgaggctgctgggaacgcacacaccatccggagaacccctcgttgagctctgcttgtatctttttcaaatgaaactaagtcccttgtcaccaaagccagtggaatggacacgtatggttctccagcactctcagtgtgtgtcttttcataaacatagacgagcacaaacagaaacagtaatatggaagctgaatttctagcaaatgggaaacagagaatggcaaacgctgaaaaacaaaatacaggtaaatgcatgtactgttaaaagaagctgcaaatattctttctgaaacatgctaaactacagatttgggggcacttgaagaatattcatatttttaagggaattataaaattgatgctatgcagctagccctcagcatgcataccttatgtgcatgctcagtactcgtcaggcatatggggagggtgtgtttattctcagaggacaccggggtatagacacctgttgggatgaaggtgtcccagaagcatgtctgcctcttctaatggtgcacttgaaatccagagagttaatgttccccttgggtcttttcctgaccttactcttggcagtacctctggctcttggacaaaccagaagccatataaaaatgtaagcacttctttgatattagtaaagaagcagtaaatgtctataaaggacagctattctatagtataattcatggtatctgtaaaatccagctgagtttctgccacaaaattaatttttgtatttaacactgaaaaaagatgagggttcttcagtcaaaaagatttctggaaaaaaattctgatttatttttccaactcagaaaaatcaacatgatatggaagtgtcctcttttttgtctatctttagtgatctatctcctgtgaacacagtgaattggtggttttctccgacacaaaggtcaaatgttgttctagacatccattgttttcctacgtaaatttcttgaaaagggaaccccccaaacaacatttagctttccaaaacaacttttaatagattgaaaatctaatttttggaatgatatatgaaattgcttttcctgtctgtaaaaggtggacaatagcttttgaaaagcactatgctactttacaaagaaatgatatcaaagagggactttcattaaattcaacgactttgtaataacacatgaaatacttggaattgagtggcaatatatgcagtgagaagttccagggttacaatggaaaaatgattcacagcagtaaatggacaacacagctgaacatctgacagagcccctttccttaaagaaacacaaggacgtgatggagataagaaagtaaaggaatttttctgcacgtggaaatgttcaaaagaaaacagagaaaaagga

SEQ ID NO: 50758 - DNA, 817 bp, Bovine  19866881053133
  misc_feature (1)..(1): n is a, c, g, or t
ntgacgatattgctaaatgtgaaagatatacatactttcattcctctagatgcaaaatcttttcctgggccaaatggtaaaagtgagagttattcaataaagcctaaaggaaaaaaaaagactaaattatcaaatttcacaaactatatacatgcaaaaaccacttacaaaatgacagtctctacatgaaatagcatataggactacaccaattcagtttctgttcttacatatttaatgtaagaaaaacagtaacaacttaaacgttcagcaaacaagaatgaaaaaactaccttactttctttaaaagcaaaggattaggtatacaacttcagaatgtcaggttaaaaaggaagttatttttcatacataaagggcttaaaagaagaatttactgcctattaattgtttcgctggagaggaaagccaaaaaaatggaatctgatcctgtcatcagagcctagctcaaaggctaggcattctgagacaaggaagttatttcaggaatgtatggcagactgacaacagtaacctaaattttaacaaagaaaaaaatgtgtttttatcatctctgggttattttttaataactgtattagtttaacattctaatctcaatatatccttccagttggtggctaatgaaaaaaatttctaccctgtacaaaacatatgctcaccttagaaggaatacaaccaacattcaagcatgttccaccgagtgtttcatttttctcaacacagactgtctataagcaaagaaaacattatttattgcacataacctgcaatgtttcagttcactaaaattccaaat

SEQ ID NO: 50759 - DNA, 1434 bp, Bovine  19866881106121
  misc_feature (1)..(1): n is a, c, g, or t
nttttaaaatgtatcactgaagtgacacaaaaatgagtaatctacagatatcaaaactgggggtaaaggagtcctgaggccagctggtactctgaggctttctgctggacactggaggctttgagcttgcactttgacagttgcttcaggtgagagatcggaagacaaatcttagggtccacccagtgatgtgggaaaaaatgcatgtatatatatgtacgtaaattttactgacataaattggtgtatggctccaatttacaaataataataaaacacacaacacaccttattataaattctatatagaaaattgaaacacttgctgatttttgccaaaatgtttcatccatagccaacctatgatgtaattcactgtagctctaatatgaatgttggctaacacttatttatgttaaggaggaagataaaatgaaacaagacatatgttggcactttctttattagtcaataatgtaatcaatctctttattcaatcagataataattttaaatactggaagagtacttcttcaatttttctgagctaatctcaacgtaatgggtacagacacaacatacttttaagtttaatttaaattattaatatttcatcactgtcttaaggctagacaattaataaaacattacaccaagtcttcttttgtagcatttgttgattttcaggtgtaaatactttcaccatggctgatttcaagctaccgatgtgatttcactgaacatgaagttgggaagaggtacacaatactattattaatatataggattttcaatagcgaatggtttaaaccaggggttagcaaactttttcttcaaagtgcaagataataaatattttaggctttgtgggctacataggtctctgtcaaacaacattatttggttctgtccacaacacactaaaatattttaaattacattttaaaaaacattcttaaattctaaattcttaaattctaaaaaattttaaaaaacattcttaacttgaggactatataaaaacaggctatgcaccagatttggcatacaggctatagtttgccaacctcaatttcaaataaaagattagatatagcataagagagaattagtgaactagagaactagtgaattagcaacaattgaaacccaaagtgggtggaatgatatctttaatttgctaacagaaaataactgttgacctataataattctataccttgtgaaactagctttcaagaagaaagatgaaataaaaccatttcaaacaaaagcagaatgtgctgccaaaattttttcactaaagaaaacctaaagaatgtacttctgataccctggatagaagaaccaagtgaaaaaaagaagaagaaatggtgagaaaagatgtcagtcaacatgtgtataaaactaagcacatattgtcggataaaaata

SEQ ID NO: 50760 - DNA, 703 bp, Bovine  19866881151614
  misc_feature (1)..(1): n is a, c, g, or t
ntattttgtttgacgttactggagccaagttccaatagttcaaaggagacactgaaggaatacctgccacacactgcttgagcaatccagatgggcacactctgtcctttctcaagatcaagttcaaaacaagtccagagcaactcttaccgctccaaaaggctgggaggtgcagtttgtacaaggagtttgaaaatgtagtccattgcctttattcaattgttgagagagatccagttttgtgctctttcctctctctgccttctgaccatcgcatcagtttcttccagcttgcttaccaaggaaacattttattcctggtaatgaaacaaaatgaaaacaaaaatgaaaaccttccctccttccagtacctaggaatatttaagaattattctaggaataagaatttatatgcatttcattgttgacttaaaaataactaacttctaatagaaagtgaaaagtgaaagtgaagtcgctcagttgtgtctgactctttgggactccatggactgtagcctaccaggttcctccatccatgggatttgccaggcaagaatactggaatgggttgccatttccttctccagcagatcttccggacccagggattgaacttgggtctcccgcgttgtaggcagatgctttactgtctgagccaccagggaacttctattagaagcaaatatatatttttaagcaa

SEQ ID NO: 50761 - DNA, 816 bp, Bovine  19866881198530
  misc_feature (1)..(1): n is a, c, g, or t
nagagttaaaaatccgctctttcctttgtcctccaaacttggcagcccaccgtgacattttagaaagaaaaaacaaaaacttaacctaataaaagaacagtgaccttgatgtgtctgaagaaatgtagctgataaataagaaacatatgtctgttacaacatagtttgtgctaatattgtaagtcgctttactgaaaacacatggggatgaggcagaggaggagggaaaagacagcaaggagaaaatatgaaaagggaactctaccacaggacaggtaatctagaagtttcttgttggaaggtgagctgggccaagttccatgaccatgaacgggcaacacaaaatagtgtagagctagtgaacaggtcaacagagacaccgcatcagatcgttccagacaaaccttagactcgggctgactttttttcttagctagttaactgccattgttcttgcaaaaagaaactaactgagcgggggccactattggggaatcttgtccatcatggctgagccaaggcctctgcttggtaccccgtgcagatctattgatggtgcaccgggggtcagcattacagcatatgctgcctcgtgggggttctcacaaccccagccctgagtaaagcagctcagttcacattgcttttgccgaaactgaagtttggtttgtggaaaaaagatttcaaaagcccttagctgtgttacataacaaattgtgccaacttttaatgtttaaaataaatctgagtaaaactgggcataaaattgtaccaagataacaacaaaaaatatgggtacttaacaaacccatttca

SEQ ID NO: 50762 - DNA, 2640 bp, Bovine  19866881204035
  misc_feature (1)..(1): n is a, c, g, or t
nccctttactgcctgccgctcgcgcgtcgcgggccccagcccgggtttggggagatttcaggacgcggacagcgccctggctgctcatccgaggggaactgggtctggctccggcagccccccagcgcaggactcactctcttaaaagtccgggagccccgggcagcagatgtaggctcgggacgggaggtcctcagggcctccaacgggctggaggtgcgcgcccagccgaggcgggcctgggcggagagtgtggcagagagcggatccctctctcggggatcaactgcagcaggtggggccgggaggcagctaactagcggtcttcacctcctcttctcttccctcgccccatctcctccctgctcgtcgccctccgcctcgcaggtcatggcagcgcccggcgacaggttggagccgccgccgctccccgagtacagttgcagctatgtggtgtcgcggccggtctacaacgagctcgccttccagcagcagtacgagcagcgcccgaaagagcgcaagacgctgagagagaacctggcccagggctgcaggtagcgcccgcggcggacggggcgaggggcgcagtgaatcccggaatgtgggcgcgcagacccgccggcatgcccagcggcggagagtgggatgccgctcccgccctgcagggacggcttcggtcaggtcacggactctggcctccctggtgggaaggtggctccatcactctcggcccgaatcgatcctagtctcggaaactcaactttggagagggaaggttcggggagcgccgtctctttgcgctgctctcgagggcacctggagtgcgccttgtggtacagcgggtccctacggtcttcttgtgatggctaggctgaggagagtgggagaacaaggggctttactacaaagaggtagtgggtaactcgtcacttgagcaagagtccttgaaagccctaagcgcatccaggaagaatgacactcagaggcataaaatgaaggctagaacacaggagagcacgctgtgctcctagttgtccactgtgcaggaagtagggctctccaagaagaacctccatcagtctctaaacccactcgggccacccgtaagtagatatcgcaaacagaaggaattgtcagctgctgctagatttcttttttcttttcttaaaacatttcaaaccgtttaaaaaaacatttcaaatatattcaaaagcaggcacagtagtgcaatgaaccctctcccatgtttttacccatcacatggcttcaaggatgattaactcaaagttaatcttgtcttaccacatacttgccccactccacttttttttttttttggagcaaattccatatagtggtccccccccctcctgcccccccgcccccgctttggactgtatttcagtatctattgttaggaactcttaaaaaatgcaacccacaatttcattatcacacacaaaaatgaagcaattccttaatattaaaaaattaagtcaacaaaatttcaaattgtctcataaatacaattttttaaaataatttatttgaatcaagagtcaaatagtgtttgaaaaactaaaaatgttaattgctctgtcatgtccagctctttgcaactccatggactgtagccctccaggctccctcctctatccatggaattctccaggcaaaaatactggagtagccattcccttctccaagggatcttccctactcagggactgaacctgggtcttctgtgttgcaggcagattctctagcatatgagcaacaagggaagcccaaaatacgtttttttcttttacctctaggttgttgaattttaaaaagtaggtagtaaggtacaacaagatatgtattcattatgttaagagttttgtaaaaactggctccaagctcctattgccagaatatacagagtttgtttcttgaaagaaaaagaaaacacctaggttgaaagtccaaatgtaatctccatttaaagactccacattgatcaatctgtggctggaccagaaaatgggttcttgtttggggatattttctcagaggattaaggggggtggggtggttaacacttaatcctgtgttttctagtacagtgcatttaaaagggtaaaaagagttattggcaaagacatggtaagcgcttcactgttagtatttttttcatgcaattcgtatgcttttttctaaatagttagagacattagcagactttggttcaaaactttgtgatttgcagtgggttgtgaccaagattggattggaaatcttttcttgccttttgacagttgttcaagaaagagaacccttcgcatggtgaagactctcctgcccatcttggactggcttcccaaataccggatcaaggaatggctacttagtgatatcatttcaggagttagtactggtctagtgggaacacttcaaggtaagatgatggtggtctagctccgaagtgatggagaatcacagcctccagcagccattcctaactcccccctccctcccatgggtctgtaccaaaggcttgctcacccatcatagcctgcatttttcctccagagcctgccccttagtggtaagattcccttcttcctcatcttccttacacttctcttctcaggaaac

SEQ ID NO: 50763 - DNA, 1707 bp, Bovine  19866881270283
  misc_feature (1)..(1): n is a, c, g, or t
nccatctgtattgtgctgacagatgcatcgaccatgaacctgcatgcgtgaggaacgtgaacagtgagaacacggggctcatctttgaactttgaggacgttggggttctttaaatggaaaatgaaataccagcccgagggggtctctctgggtcttagttttctacgtgttagttacaatacgaaccctgactgtctactattacttgcttaattagcttttaaactttttaattttaaaaactttttaaattttaagatgtgtaagtgaacatctacaaggaattctttgtttttctgaattttggtatcagggaacacatggcctgaacacaggcccttggcaaacttagggccaggatggagaatgtgtatgtgtgtgcacaagtgcgtgtctgtgggggatgatttaggaacttcagggaattagaaaactaaaactggaaaaaggtgtgggattctcttgatttttcacaaaatgccctcagtgcccacattcccagggaaaagttccatttctggtgaaacatatgaggtgtctaattggaaagatctatagtctcccacattgtccgttatgaccaatatttcaaaactatttttagttagacacactcccaagactctgcacaaaatcaaattcttctactgtattattcctttaagattagtcccaggagtggagaagatctgcactgcttaggacagagtcattcatagcgtgtcactcgaggtgacagctttcaacagcatcagatgtcactcaaacactttggcactgagcccaggctctcacatgaatagaccttcaatacatttttatgagacaatgtatgtgacatggttcctccccatcaaatctccattccctaaaacaccaataaatgagagagataagatggaccatctggaaatcataaattacaaattctgcccattagctcaatgatggccacatgtggcagaattcacaagaacttctgtccagagaaccaaaggcccccacatggcctgatgggccagactgaatgatatctgcctggcccaaagagggctcttggattgttgatccccacatacagagtctgacatacattcagcactaagacagtgaagggaagataggatagccgatcttgctctcaggtgagtttgtaactcaccatgcctggagggctgaaaacatcaccgcgcatcttctgtgttgaaccacattcactagcatggccattgcaaaaacagcttccttgaaccatcatctcatacacagcatagtagtatttatcaagggaatcattttgccttcttccaagcaaagtatccccgagagtatggagcctggtaaagtttatcctcaggtttgttaatgtcacaaggtctagagaaaggaaaataatgaaattaataaatcaaagtgcattaggttggatgggttcacagcaccctccttgaccgatactctcttaccatcctatagacatgcaatgacaaggaagccccctcacatgaagttttacaaaagaagtcggtgtgaaaaatataaagcaattcataccctggatgtaagggctgtaagggttttctatttcaaacctgggatccaacacctttaaaacaacctgtaaaacaaaggtaggtaaatttagagtgttttatccccaaaacgtaagtgttcaatatattcttaaggaagatatcctgacctta

SEQ ID NO: 50764 - DNA, 699 bp, Bovine  19866881328121
  misc_feature (1)..(1): n is a, c, g, or t
naccagaggtttgacccaatagcctgatctactccctgggtgcaaacctatctcatagttttgggttgttaattattgcatagggtgatctaagaaactagatttaattagctagttaaatgttccactaatattcatggcttgtactaggaacggttccgagttctcaattcagtattttcaccctgggaaaatggggtctttgctctgagcacatttcagaagtgatggaaatgctagtaaaagccatctctactttccaagagatgcagtcttgcctcatctctccaaccccagtgcccttggctttctagaagcattaacacgactgttgttcctctaaaggaataagcctgctcttctggaaagcgagcatttatctcatcatggctgttgtgctgttgcacaacaaagcagctaatcagatttatgaaggccagcccacccagagcagtggctgcgtttttatcacatcagagacaagttagcactaggtttcactctaggattaggtgctgtctcacaaattgggcttttcgccagacaaagaagttgcagcatgcatttgcccttttcaagatcgctaataaaatgctgctattaacctctaggactgcatggatttctcagtgatcctatttggaaaattgtggaatatggagctgacaatggagttaccaactcataggactttttaat

SEQ ID NO: 50765 - DNA, 1063 bp, Bovine  19866881333467
  misc_feature (1)..(1): n is a, c, g, or t
nctgagctagatcctggctgggggcttcccatgcctgtaggggtcaggaagtgtatttagcttctcagctccatcatgaattcgtctgtagctggaaatagtatttccttccctgcctcatggattatgacgagaccagaataagatcttggttgtaaatactttgaaaacataaaacattctctttctgtatgctcattattgcactaagaggtctagtatcactgttttccatctctttttatattgatctgagtttattttcccctaatgtccctattagattgggattgcttcagttttctaggctcaaacaggtgctggactttctatagcgtgctggaagaggcctcagcatttttgaaagttctttgtcatactgtctatatatatgtacataaacctgctgaagattcttacctgacattcccgattacgtaatcctccgtttgtattgatggtgaaatcatcaagttttgcttctacttcctgagaaaaccaagatggaattaagaattaggaatatgctttttaatattgaaaaataaagagaaatttaagaagtacaggtggttgtttatacaaatgtgaaagttgcccaaaagttgatacctgactgggattaaactttgaagtactgtaatctttcttcatcaaaatatgcaaaacagcatcatggattgttaagaaaaatattgagtccttgacttcatcatcaaaaaattcacaccgtttaagcttttcaatgaagtcatctgaagagaggaaagaaagaataacagaaagaagttaagtgtttgaccatgggtttctctttgaggttggggacttgaatgtctgttttcaaatgtgcatttcactgatgttcggtaaagtgtttgggagttgccctagtacaatattagcataccattagtacaatgtcttctggaactgacgggcatctttctaataaaattacatgtagaatacctttatgtaaacaaaaaggatcaaatgagaaacacttttaggcaggagccttgtgggttatttctcttattaataacaggagcttcaaagg

SEQ ID NO: 50766 - DNA, 1153 bp, Bovine  19866881370107
  misc_feature (1)..(1): n is a, c, g, or t
ncactgtaagatgttttaagctccttttgtatatttcctgcctctgccctagaatcagccatttctttaaggagcactggttccttctattggagaatgatgttagaaaccaagatctgggcactagaggaccatgactattttatatgctcctctcccactcatcacacctgcagccaccaaccacagaacatgttgaacaaattagcagattgccatacactgcttggttccttaattcatgaggaagtcctcatgctcatgacatcactgtctggtatgcttcttagacttttggggaagcatatttgtaggagcacttggcaatgaccacagttcagccatggaggctaagggaagcctccagagctgaaaatcagatggtgttggtttaaccaaagacctgcttatgacaagggtatttggggtaatctggtccacaggggattccttggggaagttcgctctttacaatcagaaacactttcattggagtatagaagagccacacgatcattgagatttccagctgtttaaacaactgctgataaatgtctctgtgtcggcccgtaggtggtccctagtgcattcttagagaagcaaatatgctctgcaatattttcatcagcaattttgatggagaaacatatgtatcaaatttgcggatactacaaaattataagttaatatgatcaagacagaacaagagacaagatattttacaactgtcttattgactggaaacaggatgacatgtcagtggaataaaaataaagttttgcaattgggttttttaaatccattgcacaaatacagagagggagtaataacttggcaccagtttgtgtgaaaaacatctgggagattttctttgtgtgctgcaagtgaaccagtggtgcggcttggggatgcccattcaggcaggagtgggagtgccacgcccagctccagggcagcctctctcgtcccacttgtcctctgtactggtcagatgactcccaggaacattgtcgtcatttctgagtaccacattttaaggactgaattgacaaactagtgtttgtggatagtggagaagcaccatgctattttgggatgaagtcttaaggggtgattgatttaaaataacgaagcatatacaagttgagaacgg

SEQ ID NO: 50767 - DNA, 688 bp, Bovine  19866881413466
  misc_feature (1)..(1): n is a, c, g, or t
ncagttccctatatttaagcaaaagccgtggttactccagagatgggtagaagttttagtagtccagtcgctttaagaattcagctacttctggagtcctctttgggtgagcagatttggtcaagtataatgtaggaccacaacaatagtgactggctttgtgtttttccccattaattttctaatctcctcagtgttcagaaaatctggtcaagaatccagttgggaggatacagagaagttcagccctctctccaaaatacagttaaataattgtcactaaatgattaagcttcatttacaaaaaaaaaaaaaaaaaaaattgtggaggaaaaacactagcccaattgggaaagactccaatttacatttcataatggaaacatttgccaaacttattgatggatgttaaaaccaggtctttggtctctctctctcaggggagaactctcagaaccgtagaggagaagaatgtggcccatttcctattatgtattttgttttcatttacatctgtggccgtttaccagtttggggccacctgtccctgaacagctggaagcaggcggtatattcaagagccctcagccaaaacgcattaactcttgatccttgggtgttgtcgggggggtggttgctgccatgggaatcctcctcctgcctctgcacagctgtaagtcctaaatca

SEQ ID NO: 50768 - DNA, 1818 bp, Bovine  19866881465485
  misc_feature (1)..(1): n is a, c, g, or t
ncctctttcctatgtttgatggctgccctgggcgacagtgcctcacctcattacaggacggcccgaaggaatgagcagcatcacagctgcaggggtcgcaccccgtcccactggccagttgccaggtgttgggcgcacagcggtcacagttctggccaatcacgttagggaggcagaggcactgcccggtggttttgtcgcactggcagtcagagccgttacagtgctcttgcaccgtgcccaggtaattgcagacacactctgaaaaagaacaacctggtcagatgcacttacagaggcccactcagaaaatacagacagtgcggaagtcagctacatcaaacaacgaccactttctctctctagatttcaacctggaaatgcgaaaagaagagaatggaatggaagggattttaaaaaataataataataatctaaaactgtggttcttatcttatagtgttccacacagctctgacatttcccaggcagacatgtaaaatggctggcatgtaccttcaaaaatacttgatttaataagtggctggtgaatcattgtaagattgaggatttaactggaaataaaaaccaggctgtgggagcagagatacctaatgatttcaaactctgggcagggaacagcagtcacggctgtgtgagccatggcaggtagagccctttaaaccaggaaggcttcaaagaatccagtcctgctggtcctcaacattccgcacgcgtttgtatcaacaaagacaggggcctgggggccgtgcagccgcagcaggaaatgctggctgatctcgcgataagagagaaataatgagttctgaaagagatacttcagagatgttactcctttcttttccttaagctggaaggctctatccatcactgacaaaagggtagaccaaagtgtgtatttgggatgcagaagtctcagcccatcaacaagtccacgggcagaacataaaatcaatccactctagacttgtggagatgatttgtctgtggcttcctccctcgggcctggtgtggagggcagtgcaggtctggggcagtgaggagctctgcgcctgctggggagccagtccagaggctgaggcatgtggcgccggctactggtgagcacaaaggcatatccagcctcagatagctgagctgcttagttacctaagaaaatcgacctgcatatgccagatgtttatgcaatgcaaggatgcactgtgcttattttaacaaaactgttttcaattaaaaaaaaaaaaaatcaatccactctatcgatggcattaatcatggggacagtggcacagcttttggttccttctcaggtgctgagccacagctcaacacttcagtgccaggaacgaggctgtaaaaaaaaaaaatcatccttatctttctcttgtggttagtgaaattttctctttctgaagaagtgttttacctgatgagataatgggcttccctggtagctcagtcagtaaagaatctgcctgcaatgcaggagacatgggttcgatccctaggtcaggaagatcccctggagaagggaatggcaaacccactccagtattcttgcctggaaaattccatggacagaggaccctggtgggctacagtccaaggggtcacaaagagtcagacatgaattgaatgactaacatagatgaaataaatcccctaagaataaaatccctcaagaaggaggcaggggaggaggagcaggagagttggaagtcattcaaggatggggcagagggagcgtgcatcttactacgacagtccgtggcggagcgcgtcgccatagtatccaaa

SEQ ID NO: 50769 - DNA, 1230 bp, Bovine  19866881568756
  misc_feature (1)..(1): n is a, c, g, or t
nctctgaccccctgtcttctccttgggtacaccaataaccagaaagaggaatgatgcagcttttcaacttttgttgggaggcgggtacctgaaattatgccccaccaagaagactacatgtaatgggagggatgtgattcccccagaaaaaaccgaagtgctgttaggattctaggcagcccaaaccagcagatgtctaatatattgtgtgacttcacttaacctctctgaacttctgtcttctcatatttaaaaaccagctcttaaagttataagaattaaacatgttagtctattgaatatttagatttcctagaacataaattctgtttcataaatgttgtttcccttttcctctaacttttgggctatctgaagcgtatacctctatcatttgtttactcagttaaaggcttaatctttttcctaattccccgagctagaaccacagagtgagtttcagtctattttttctgttattttcgcctgctaaatgcaaggtatccatctccccttgacatcagctttgtaactggtccacccatctcccttttgctctgtctctgtccctgaggcactgtagcgtaatggaagtgtgtgggctctggagccaaacagcctgagtttaaatcttgattttgttccttaatagccatacaatctcaatcaagttacataatctctgtgtgcctgtttcctcatgtgtaaatggggataacagttctttcctcaaagagttgttatgaagattaaatgtattactccatgtaagcacttagaatagtatgggggtcatggtgagggctacacgatatatggttattcaataaatctacctcctttggattccagaattatctttctaaaatttaaacatccactttcaacttgggggaacctcagtcattcccttcggacctgcttctctgactgcccagccaaggctgaaactggggcccctctgtgcaccttgcactaaactcttttattgcacttggctgatggttttgtaactatttgtttatactctttctctacactatcctgtgaattcttggaaatatagacacttacctgatttatctataaatggccagtacctatctgtccaaaggaggtgcttaataagtgtttgctgattgaacaaaatgagcaaaaaaatgttactgtttcatccactgaacaaaatataggctactgtcttcaaatatacttttacttaaaatcaag

SEQ ID NO: 50770 - DNA, 815 bp, Bovine  19866881694141
  misc_feature (1)..(1): n is a, c, g, or t
ntacagacaattgaggaattagcaaggtaaacagttgtctctcaaaatcactgattttcttctttctggattttcctttaggtcttgatcatgtcagcatcagactggacctagaggccttatttcagctcagtcaccttattctgacctttaagctacagatgagtagactgctgcccccttatctacttaccaaatgcttggcataccttagatttcacttccttgctcccctgcagagaacaaaaagctgttaaaaatccagactggagctttgttatctgggctttttgctcttgaaagaaaaacaaaaaaacaccagtgctcattaaataataacttacatgattaacaaaaaagaaaagacagagtgagtcttagaagaaagatacaggagaaagaaaacctccacactctggggtgctagagatgacaaaaactagaaagataatttggaggataaaaggccaggcactggaaattatttaaggaaattaaaaaaaaaaaatgtgatcaaaagaggaagaaaatttaaaggctctttactgacttagatgccagagaaaatctgtgctatcgtcattctttaatcattcatcagaattctaattttgtcaggcctggtgctaggttttagctataaaagatgaacataaaattaaaagttttaaaaatttaagaaagtagtctttgatttcaaagaactcacagtctagtcataggtataaacagatatataattttgaaatcacaatgcagagtgacaagtgcagaaatagatgtacgattatctgacaggctaaggcaactcgggg

SEQ ID NO: 50771 - DNA, 942 bp, Bovine  19866881723198
  misc_feature (1)..(1): n is a, c, g, or t
ntctgagggatgtcatttccctttttatagtatctttgaagtacccatttttacattttgatggagtccagtttatgtgttttaaatttggccacttatgctatagatgtcactaagaaacccttgcttaattcaaggacacaaaggtttatacctaagttttcttgcaatagttttatagctttagctcttacatttacatctttgatacatttgagttaataaaacaagttttaaggtgcaatcttaaataactagaagaccctaataaaaacttctatgatccctttgcatgaaataaaaacactgatgcttgtatatttacaggtttagcatttgctctgctagtcaccatccccccaggctacgggctatatgcagcctttttcccagtcatcatctactttttcttgggcacttccagacacatatctgtgggtaagtgaattactgggctaattaatgctcattgctttttctttatgaatgatgttatccatgcattgtatatgcgtgctaagttgattcaattgtgtccgactctttgcaaacctatggactgtagcctgccaggctcctctgtccatgggattctccaggcaagaatactggagtgggttgccatgccctcctccaggggatcttcccaacccagggatcaaacctacagtcgcttatgtctcctgcactggcaggcagtctctttaccactggcgccacctgggaagccccagtcatgaattgtatcaattccatattgtgcaacatccagaagaggagtcataacttcttgtaattacaaattagaactggggcttgggaaggagaccagaactccagatggtaatctttctacatgctacattttggttgaaagacaactgtgctatggggaagcataatgactacaattcactctgtcttattaggtccatttccagt

SEQ ID NO: 50772 - DNA, 666 bp, Bovine  19866881752295
  misc_feature (1)..(1): n is a, c, g, or t
ngttttctttaagaaaaaagaagaagaagaaaatgttattttcaacaagaggggaaaaaagcattgaaagcccatgagttaaaccatattctatcttaagtagcttttctttctttttccctctttttttctttttccttgctctctctctctctctctcttttttttttaaattaaaatctctccccaaaccatcatcacttttaatattgcccagactgggcttcatcttcagacccttcatccccgaatttctcatgtggagggcttgaagatgttttcttttctagaggactttctggttcctcatcttctttgggaagaggagtcttttcctttgagcctgtgaagctatggggcgacccactttccctttgcctttcacaggacttggtgtcactgtggcctttatttatgtatgcaatagcagtttctaattgctgaaaaatcacttttaagttgtattgtttcaagggtacttttcagtgaatacttaatgtagctaactcttaactctctaatattggaggccaaggtagaaagaattatttcagtatacagctaattcaaaattttcatttggcttctcaactttaaatttctttcacagcaaatgttttatcagaaaaatagaaatagaccatctgctgaaaactccccatcaaa

SEQ ID NO: 50773 - DNA, 973 bp, Bovine  19866881801853
  misc_feature (1)..(1): n is a, c, g, or t
nttccacatataagcgatattctgtctgacttcacttagtataatatcaaatatttaatggcacgttcagccttgtgccatttctaagtgtgctctgggagacctgtgctccctgctctcaaaatccagttgcgagaagtgtctgcacacgttccttgaccaacacttcctgggtctctcaatggactcttaagtttgttccttttgggtggtacttgttttacttggggaatgtgctgccattagaattctattgtgtttgctgttcaatggcatcagaaaacctatttctatattaaacaagtatccattgtaacagatcatgctttggatttactttgtgatcaagggaacaatatctctttagctgtccctattgttctgagtcctctgagactcacttcagaagtgattgtgcctcttacaacagcaatcaatttgaggcttagatgtcgttaaatatggcaggagagctcgaagggagcacagttgctcttctgaggacttccacagagatcagctcaagggtttctaaatactccagctgctcttcaagtttgttttttggcctcttgtcaataggcacttgtgctcgttctgtgcaggagaaaatgctggcattcagaaattccattcagcgaagtagtaccacaatttctctgtttagtttttgcttttacaaagagcctaagttgaatgcatggcctcatagactttctctttcaacccacagctatttctatagtcttcattgtatgccgtgcatatgttacaagtatttaaaattgtatctaggctttgaaagtatctgatgtattgggcaaatgccccattgtcctgtgttgtaaattgtaagaatccatcgacagaaatgaaagaaaagctcagaaagcagtttcaggctatggagctaaaagggaagggcaggtagactgtttagtaactcatgtttagcaactttagtggttaatga

SEQ ID NO: 50774 - DNA, 1653 bp, Bovine  19866881813447
  misc_feature (1)..(1): n is a, c, g, or t
nttactctgcttcctcaaagagattcccgatgttcttcagtggctcggcagctgggctctgggccaggatgtctctgatctcgttgactttcttctccaccgagtccacagtctcccggtaaggcccaatcacaccactgatcttcaaggccttggctttctccaggaacttctgggtcctgttggtcaactcagcgatgatcacgtcccaaagagcaaagcactggtggcagggtgtgcagtcgggaaagacgcccgagtagccccgggtgcacttgtcacagcgtgggccctccacgccctccacacacacacactggccagtggactggtcacactgcggtgtctcgatgcctctggggtcgcagtcacaggctagaagggagacagcaatgctggctgagccactagagcccaaacagccactaggcagttataccctcagccactgttacacaggaaggtctgtacatggcctacggcagtttaccaatgaccctcacagagactatagctgctcccccaacaacacgcggtacctcaaccctggctagctgctgcttaacaattatagtgataataaatttttctttaagtgaacaccattgtgcatcattgtacttgcctctgtacaactggtttacatgcatcgtctcacttaatcctcacaataaccctatgggatccaagtattacaatcatcagttttatagatgtgaaaactgaggtctagagagattatgtgactgccaagtcttgcagcagggaagcggccaagccaggagtctaactcagcactttgcagctccagagtctgtgcttttaagctctgtcttgcctctgctcccctttttttgacctgtctgtagatcctgtcaggacaggacagggtctgtcaggtgataccctaaagatgtgaggcctctggcctaagatagagcagtgatgagcaagcaacataccaacatccctctacccgttcacagaacagtgaacggttgatgaaatgcaataaggttgataaagagaaaactaaatgagaaagaagtctcaggaattctaagcgtctggttaaaaggctttcaattaagtatcatctaacttgtgtgtgcctgccattgcactaaccacccccagcgctaagagcagaggctcataaaacatctgaagtgcaaaggccttgggagccattcagtgccaacctctcactggcccagtagggttggcatctgaggcactgcgccactgaaccccagctcagagtcccaaagctcggatgactaacttggttttctatcaacacttgacatttgtattgttcagtgtttgaataacaaaggcctgcaggtggcactaggggtaaagaacctgtctgctggcgcaggaaacgtaagagactcgggtttgacccgtgggtcgtgaagatcccctggagaaggaagtggccacctgctccagtactcttgcctggaaaataccatggacagaggagcctggcggacctcagtctatggatcgcagagttggacacaactgagcatgcacacacacacacaccccttatccctggccttaaaccccttctgggaaaaggtggggataaaaataaaaacaaagatcctatttccctaagtagattgtggactccaaggg

SEQ ID NO: 50775 - DNA, 1786 bp, Bovine  19866881948690
  misc_feature (1)..(1): n is a, c, g, or t
nggaaaggggatataacgggttgaactttctcctccaccaaatttgtattttttaaaggatttttttgacctgttcaaagcaagggtaaatcacccactgttggtcattactgaccagaatcctcctcctaccctctctcctaagaataaaatataccaaatgccagtagtctgacaacagtttaaggatacaggaaaaaattatttcacagaatgcaggaagaccaatggtcacagttacccccaggtaagctttaagacatcaacatacaactttacttatgattacacaagaaatttcaaaaaatgtcaaaacatgatttcaaataatcaatagtcttggtactgggaagccaaagtatcttattataaatccaagaacttcctgttttaaatacctttttttaagtacatatcctttatagaaacttcaaaaatacagaaaagtgtaaaagaagaaaatattcataatccatagcttcctttcagggtacatttttctaatctttaaaatgtgcttttgataagcccattaagatttccattcagcacagaaagagatgtctcatcattctaaacagtgttaagcaactaacacactcagtcttaccagaggacagaattaactttttattttcttggcacaatatgtaggctcttagctcccagcccagaggctggacccaggcatcccgcagtagtagtccacaactttaaaacggaaaccccctagccacaataaccttcttgctattccttaaaccacacaactcaattcctacctcagacccttctcactgctggttccctctgcctgaaattaccttctcacaccctcaccttactcaggcccttgcacagaaaaggcctgatacactatctaaaatagtcaccctacccccaattaccagacttcattttcaaccacttcccaaattatttccctgtttcttgtatactgtttgtatttcaccatcagacttcaagttctgtaagagcaaggctttttcttgttcaccatctggaacacactacctgttcaacagagcatttaagtgaacaaacatttgaacaaatgaattctatagctaattactttgctcttagttactcttaacattcacttgcttttacatttaaatataaaggaaatatgagcaaaacctgttttactaagtacttacttggttgatctgcataagttcttagtggcactacagaaactccttgcagaccatgagatattcgactgaaatggcctctctgaaaaaaagaaagaaaatgatcctattatgtaaaatatgaattgaaaaccactaaagatccatgaagtcaataataagtcaaatgtatcgagcaatgattgctaatgtatcttccactgacacagggaggttacacaacaatttctgcttttgtaaaaacaatcagcttgccacactttttttatacatgttcaacatatcatttcatttttttacctaactaaaacatgttattaaatgctgccttacgttttattttattttcagaaggcatggctaacttttggcgccagagattattttaatggcattaactaaagtgtttaatggagaaggcaatggcatcccactccagtactcttgcctggaaaatccatggacagaggagcctggtagggctgcagtccatggggtcgctaagagtcggacacgactgagcgacttcactttcactcttctctttcatgcactggagaaggaaatggcaacccactccactgttcttgcctggagaatcccag

SEQ ID NO: 50776 - DNA, 2047 bp, Bovine  19866881976635
  misc_feature (1)..(1): n is a, c, g, or t
nccaaggtcaccaatgtggaatcactcagtttatgacacatggggtacttcacgtgctggccagtgatcttgctttccaagtggtcattctatacagtaacatatgtcccacagctgcagaatcagcactttattctccgtggtattctggaatgtgtcctggttggaataatttatccgggacccagatggatcatatacacatcaagaaatacatgaggttttttattttctcttccaacccttcacttctaggcaaagttgtgttcattcctcttctattttagggctcagtgacttctgaccaactgcctgctgtttccatctttctccgagagccagttcctgggatacctgtttcatggacgggagctggagttgcaagggttctccctggggctggtttgagatttgctgtagggaacatccctgttcccatggatttcacagttgccattcgctatgaaactcaggtatccttcaactccccttctgtgctggtggttccaagctgaacgaaatacattctcaagctaagtgtttccattccagtcttgcctaggttcatcataataggatttacagaaagttgaacatctggagagcattgtaaactaaagtgtttcctgaagatactaaagcaacacagggagccatatgtacacacacactattccatggagagaaactaaagccggagctatagatttaagatactaagtctagggaagtggtgatgaaatatttgtataagaataataaataactcaaataatgcaaatcctgccctcctaggacatttcccccccaaaagtgtaataagcaacatatgtgcagagatttagactcatggggatgcagaagaggcatttatttgcacttggattttaccaggagacaaaaagaaagctcaaagcaacctggtcctcttgccttctccctttcgagcccttcccctgccttttgagaaatatctaagaaagaagagaaaccaaattagaaaaacacttgatctagagttttctttgcataatcttttctttggtggtctgaaactccatagaccatctccccaggaaaatattttaggtggctgggggtggtctcagagcccccagagtccctctggggaccacattctgaaagggctcgttgtctgttgtttgaccaccaaagtggatgatctactttgaaactcttaatatgacatacttcttaatttctcacttaacaaattaaaagcaagggacttgaaggcactttgacatggtatgacaagaacgtcatttttaaaaaagatacgtgtatataaacgtgtatgtataaatataaataaatttttgtatagacagaacatatctctgacagctttaaaaagcttttccagattgtgagacttctagagtttagataattaacatatatgcactctctctctctctttctctctctctctctctatatatatttatacacatataaatatatctggtaatataatattaaaattatttaataataattatataaataataaatttatataagaatatttatacaatggtatgaaagaaatatgtatccttttgtaaaagattccttttttcccctttgtgctgtgatccaagaacatgatgaattaattgactctttgggagacagatgttaaagattggaccttcaggggatgtttagggagtttgagatggacatgtgcatacaactgtatttaaaatggaagaccaataggttcctactgttgagcacagggaactctgctcagtgttaggtggcagcctggatgggaggggagtttgggggagaatggatacatgtagaggtatgactgagtcccttcactgttcacctgaaactattgctacattgtttgttaattggctatatcccaatacaaaataaaaagttaaagaaaatagaagattagaccttcaagagtcccaggggttttctaggcccaggaattacatctatggccataaacaatattctttctacctggatcataattcaaataccaaaaagttag

SEQ ID NO: 50777 - DNA, 1028 bp, Bovine  19866880698224
  misc_feature (1)..(1): n is a, c, g, or t
naaactattatgatcctttatcagatgaagctaaagaagtcttcgctgctgaaaaaaaaaaaaggcaatttataccaacataagtagataattagtgtatttaatccaagaaacacttttatattggattcatatattgtcaccaaggtgcctcaaaaggtatgaaattttatgcccctaaaaattggaagggtgactaaaaataagatcaactgaggaaaaaacccattattcttggggtatatattagcagtctatattcaatagccacatctttgcatttaaatactaaacactgagaaaatgcaaaggtacagccagggaagagctgaacacagcaactagagaaagcttggggacgtttaaaacaataaatacggtgtgcctaattcacacatttgtgaaccatgtacctcaatgttatgtattactattctttctaaacctgtatgttctttctcaatgcattaaatcatgataaatcttacttgtttgaagagggacctaattttttgcaaaagcatttctagtcatctgaaaccaagatagataaataagttagacagatggtcagctaggtatctggttttaaaaaatgacatagagcctataaagtaaataatgtggagtggatttgatgccagtagcatccctcaagcaaaaaaccagtctcccgagatacattctgccagcaggcaccactccgaaaagctctgccacaggatttctcagaaccctagtcagccacaggtggcttctgccactcgtaaggaactccccaagccactcagaagtccttggtgggtgccctcatttttgtatgttctttaaagcaaaatcctaaagctcttaggactttaatgcatattaaggataacttttacagctactcttaaataagcagtattttcctatgcaggtaagcattcctattgtaatctttcccatactagcaatacgtttctttgggtaatcttaggtcctcaatttattctctctgtagacttcgttttccaataaaaacaaag

SEQ ID NO: 50778 - DNA, 2177 bp, Bovine  19866880427336
  misc_feature (1)..(1): n is a, c, g, or t
natttggacattttgccagctttgaggctcagggtgccctggccaatatggctgtgatgaaagctaacctggacatcatgataaagcgctccaacaacacccccaaacaccaatggtacctctgctccagtcctcctagacttgggaattgtagctttaaacagatgcttgagctctttgtgttttgttactgagactttcccctcaggacctattattgtcgtatgcaaaccccacattcttatgccaccagcccaagaacttcaggagttttctcctttcttgatgtgctaagatcttgtctttggcaaccacagtctgtcataaagcctttgccctgagtccatgctgggggagccaggaatgaggtccttgaatatgttatgcccagtaccggttccgttttcatgggggagggaataacagctgggtatctgagaccatggcatatattcccaagacagttttagctgctatgtcagcctcgatgggacgaagaggggcagggctaagcagggaaggctaatttctgttgcttgtctcccagttcctccagaagtgactctgctcccaaacaagcctgtggaactgggagagcccaacacactcatctgcttcattgacaagttctccccacccgtgatcagtgtcacatggcttcgaaatggcaaacctgtcactgatggagtgtcaccagaacggtcttcctgcccaggaatgaccaccttttccgcaagttccactacctccccttcctgcccacaacagaggatgtctatgactgcaaggtggagcacttgggtttgaatgagcctcttctcaagcactggggtgagtaccgtccttcagtctcctttacttcattgttcctcctgtgatgcgtgtgtctggtccttagggaccccgaggatctgcttcacgactgctccagttctggtttctggtcttctcccattgctctgctttccgctcttctcgtctataattccctgacattgtcctgtcttcctctcatttaattgatgaaaaaaaaaaaaatcttttgactaagtatcatatgttttgtgctaagtgctgctccctaccacatgcatttcttatgtactctgacttatttttccccagagtatgaagctccagcccccctcccagagaccacagagaatgcagtgtgtgccctgggcctgattgtggctctggtgggcatcattgcagggaccatcttcatcatcaagggcgtgcgcaaagccaacaccgttgaacgccgagggcctctgtgaggcgcctgcaggtgagtctgctgtggtcagaggatgacatctctggaatgattcaagcggaggaaaagagtgaggaaaaggacatgtgatgcctttaaaggaaaaccattccaaaagtcatggctcctgatttatcacaatggacagaatcagacattgtcatcatctgatattccaaagccctgcattcctacaccccattccatacatgtcaccaaagatcatgccttcagtcttggaaactatctccagtacccaaaatagttgtttcacattaaaatagtgagtccaatgatctgggaaagccaacctcaagattacaacacttcctggctttatatttcctgagataagacatcagctttgaagcatttccagagtgtcactttttgggggtttagggtaactgtatgaagtggaaatgtcttggagacccatgcctgcttttgcccctccgttctggaaaaaaaaaaaatggtgtcagaagatctaagagaaaatgaaacatggcctgctgcttcattctttcatggaaggtaggaaatagcagttcatgttgaaaaggttgcatttatgaggggtcacacaaatattaagagacttttccaaagtcaggggttaaggagtaagagtaaggaatctgaagataagagctcaaaatattcattttaaactctatagtaactatgtgtgttctgctacaggtaatggactttgttacagagaagatcaatgaagatatttctgccttaatagctttacaaacctggctattctccaattgttcacctcactgaagaccaccatgcttcagcactttcccagtcctttacttaccctaagagtaagatgccttccacaatctccagattctaatctctagttattccctgtcta

SEQ ID NO: 50779 - DNA, 750 bp, Bovine  19866881579357
  misc_feature (1)..(1): n is a, c, g, or t
naaatggagttttgcatctttgcaggaacattccccctccctccacctttccttggaagaaaaaaataagttagcattcatctctaatattttctcttcctttccctatttgaataaaaaaaaaaaaagaaagaaagttagattttctttttaatggctgaagttgctgttcactgtagcactgttagtccagctcaggtgtccaacttaaggttgccagatttagcaaatacaaatacagaatgtccagtgaaatttgtatttcagatgaactatcattgtttagctggaattcagatttaactgggcatcctgtattttatttgtcaaccctagcccaacttactaataaaatctcagaaggaccatattgaatgcttttctgtattcttcaacacaaacccaggacagtctgcacatagtgtgaaccctgatggaatttttcaaataaatgcaaaatgatcgtatatattggaactagcattccttgcatactcctcacacactagtacatgtgaacctcagaaattttaacagtaattcagacttaactaagccactatttactaatcacagttcaggttcagttcagttgctcagtcgtgtccaactctttgcaaccccatgaaccacagcacacgaggcctccctttccatcaccaactcctggagtttattcaaactcatgtccattgagtcgagaagcccaagctatagaattaggaagtgtaatttgaaacacgagctcat

SEQ ID NO: 50780 - DNA, 1384 bp, Bovine  19866880534218
  misc_feature (1)..(1): n is a, c, g, or t
ntagatatatttaagatatagttataaaataggagaggctgaaatatgtggagctttgcctctgtgatcccaaacaggtttttatctgaaaatattttctgattatgtgtaagtcagtggttacatttaagtgaatacctggtaagtcatgaaataaatataaagacattactattatatttcctaagtacctgcaatcaaatggatgtctgatgctctttactcattcccacatggaatacactattaaaaagaaagaattaatatgtaactaatcttcagggatgatttttacactttgcagaatctctgcttaactttgtatttgaaaagccagtccagcttttcaagaatttagctattctttcaatgatgacctatcactaccacatagcattttaaaaagctgcttcacacaattaaatcctataaggatttgttttatcataatgaaatgataacttggtgtacccaactgtagaagtctgggcatatgaaaaaaatctgaaacatatttttaatattacttttactgtgatgatgaataagggaagaggaaaaaagctatatgaattcatttgtaatgataatagctgtgtttttctgcctagaacaatattttataaaaatgtgataacagagaaaaatataaaaactaaaaatgttttatattactcccagtattcataatcacaattatcatttgcttatgcctttctagttttcttcctgtgtgtatcttttaaagactaaaattagtccatattaatatgatttttcaaattcacaacatattgtaaacttttctccatgtcattgaatattcttctatgtcattaattttatggcttcagacttctcccatcacactgatgcacttagcttatttattttacatgtttccctctttttgaggggggagaattttgaccccctagatatcttacattctgtcttcaccccagccttcaccctacctacctgcccatcacacacaatgctgattacagatagctcttaactcacatcaatgttcattgcataaggttaaatttctggaagaagaatgatgaggccaaaggttatataaaattttgaccttattaccacatcacagtatgccagcctaatgatgcaatatgtaataattaatcagcaatgcttagaagtgcccattttccacagctttatggtggtggaatctcttcattaaaaatttctttctaaatttgattaatgaataactaattaattgaatgtatatgattgataaataatgaggctaaatattttataaatgtcttatctaattatatttcttattttgcaaattagttacatttttgggtacatctctggtagcattcttagttttctatttttt

SEQ ID NO: 50781 - DNA, 2491 bp, Bovine  19866880565481
  misc_feature (1)..(1): n is a, c, g, or t
ngtgactattatcctaattgcattgttgtcgtaggattttgattattggcacatacttttacttgttaactttaacagttggtctttctaaaaaggttgacctgttcatttgcacactgacagtcacacctgtcttggaatagtagacattctgcattcgggtgcttttctgcaacagggctcattaaactcttagcaaggcaagcactcaggacaagggttaagtgctgggcccaaggaaacattattaacaagagcagcagggtctggactctgcatggctttagtgctttccatgacagtaggtacactgccttagaagagactgacattagctctaaggaaggacttccaggagagccactgaggccctaacatggtttaaagagaggggacataatgcttctgaggactctgagtcagagagctggggatcctgggtcttggtgctgggaccctccccactcttgccctctggtcctacaagaagaggttctcaggctctgcctctatgcggcaggtgcgcttcctggagcagcagaacaaactactggagaccaagctgcagttctatcagaaccgccagtgctgcgagagcaacctcgagcccctgttcgagggctacatcgagacactgaggcgggaggccgagtgcgtggaggctgacagcggaaggctgtcctcagagctcaaccacgtgcaggaggtgctggagggctacaagaagaagtgagtgtgggaaggcgccagctcccggaagggcttgaaggtggctcccagcacaggggagcatccagacttgtggctgggtctctgcctgatgatcaggaagagcctgtgctctctgcccctcctcgaagtacatgggttccatgggtgggtcctggccccctggggacggagctcagcctgacttcctaccagcaggtcagggaaatgatgttctctccctttcttctacccatagatcttctcttaggaccccagaaaaactaacattgctgatccttttgagtctagctttcaaagtcctggaccttcttttgaagttcaccccttcactcagctaacactttttgagcacctatcaggcaccaggcagatccggacagggtgatagcaatccaggggcaaatgatagagccagctcgtgtttctgtggggcttacagtcccctggtaggcagagatggcagagtcacagacagagacctccgatgacaaagagtgacacagaatacgaaggcacacactgggtactctaaaggaacctggtttccagagctggccaccatccttcagttatactcttagccatgcactgccaggccactgtgctccctgcctctagctctgagcaggcctgcccacagagcaggaggaagcagcaggctccacatctcttggctgagccaggaggaagatgacagaggggagatcctaccacctgtagcaaagccaggggcaaggggaggagtcagaggaaagggaaatgcatggtgagaaaagaaggcacctgccagccccagccacacacacacgcacacgtgcacacacacacactcgcacacacacagcttctagatcctacccccggccccccttccaccctcaccccactgaggagctcagaggtgatgtgaaggtgggtgtttcaatagtcccatgtatcccaggaggcctggagcacctggtcccaccccatttcttttggaggtggggaaatgagtggaggcggggagctagaaatcaggcttatttgcttgcgtgcttcatggtcaagtttagagttgctcagaaggggccctgttttccccatacccctcaggtatgaagaagaagttgctcttcgggccacagcggagaatgagtttgtggctctaaagaaggtaagtgcctgagccaagcccctccctgagcccctggccaccctgtcctctctgtcctgcgatgctgcagccaagcccgcagagtgaccttgaatctcacagccccttgaaccccacacaggatgtggactgcgcctacatccgcaagtcagacctggaggccaactcggaggccctgatccaggagatcgatttcctgcggcggttgtatgaggaggtgagagggttcttggtcctggtgggcatccctgagcccctgtccagccctcccactggccggttgatgtgggaacacaggctgagattgaagggttaggcagaggaatagagaagcaaaatgggacagaattagtaaggggcacggaattagtaagggtgacaacctctaggacagctgtgccttgagaaaccaaagcccaggcacacaccttgaccgcactttctctagctcagattttctctggcagccagaagcctgtggctggtccatgagaacaagaaatgggtctccacacaggggcctggaccccaaagaagtgtccccagcatgcggctgcagggacaagatttacaggggcctgaaaaatccccaaagcaaacatt

SEQ ID NO: 50782 - DNA, 1700 bp, Bovine  19866880598678
  misc_feature (1)..(1): n is a, c, g, or t
naacttctgactgtagtttctttggtgactgaactttcagcatctaaagtcaacagctagcaactagcaaaggagattaatccaagccctgacacggcaccttgaaaaaacgttcagctgtgctccaagtgtcctgcaagtcagctgtaatgtcaagaaaaatatattttgatggggaaaaccactgcagaatcagtatattgtgataaaaattggaccaagaatcaaccgtgcagtattcttttaaaaaatgtagccttggggcattgtgccccaattttggttcatcgtgtctgaaatgggagcaaggaatccacattttttaatatccacccagatgattactctacagttggtataaggactcacgttgagaatcagtggtttaccataaacccattgactcgcttaagacatgacagatgcctctcagctcatagtctatcctgaaaccattgttaccagggattagttttaagagataagaagcatcagagccttaggatatacaaggaagagctgttttttggaaggagaaagagagataaattcggagtttgggattaacatatacccactactatacgtaaaataggttaacaacaggacctactgtatagcacagggaaccgcactcaatatcttgtaataatctataaagggaaaaaggctgaaagagaatatatatgcatgtatcagaggcttccctggtggcttcccagtggtaaagaatccgcctgctaatgaaggagactcaggttcagtccctgggtcgggaagatcccctggagaaggaaatggcaacccactgcagtattcttgcctggagaatcccatgggcagaggagcctggcaggctacagtctatgggttgccatagactatataggtctataggcatcgtctcttgtggcaactatgggttgccaaagagtcagacatgacttagtgactacgcaacaacaaaaaatatgtgtataaatgaatcactgtgctatacacctgaaactaacataatattgcaaatgaactatccttcaactttaaaaacatgttgatttttattttccaaagaggggctgaagaatttctcccctaagagaaacctgagtgcggttggacaaaccctcaggaaaatgagattttccttcagcatttatccttgggctatgtctgtgtttgttttttgaaaactcaaatcaatatacctataggtagcgttttctgtttttcaggggttttacttcctcagtcatctgccaaggggctgagagagacttcgtgtgccaggagcacatagcctcaaataggaagtaactatcgggtgactcagaaaatgccggactcaaactgataatggttctttctgtttttcgtgagtaggttacactctttgaactgattaaagagttatcattgtgccctcaagtctgctgcttgcttcctcgtcctccatatcagcatgatagcacattcactcaagggtaaccagaagggtctggccaagaatgatgatgcctcctggactcacctgtacccatcatccaggccactttgctcacaaggaaatgattttcgagagaaggtccacgtacatctgatttgtgggtatgctttaaacctgacagaaaaacaaaattcttcatactggtcaatttcataatcttcatttgatttggaaacgtttataaatccctttt

SEQ ID NO: 50783 - DNA, 896 bp, Bovine  19866880752418
  misc_feature (1)..(1): n is a, c, g, or t
ntgctatgagcataaacatgtggaggctaaacaatatgttactaaacaaaaagcaatcaatggatcctgggaaaaattaaagaggaaatcaaaaaattcctagagttgaatgaaaatgaaaataagctgattcaaaccctttgggatgcagtaaaagtagtttttttacatgctttaaaaattgcagtagagttgatttacagtgtttcagatgtatagcaaagtgattcagttttgtaactgcaaaagcagttataagggggcagtttatagcatccccgctggtcttgttgactgtgtctccaacctccataaatttcaattgataagaaagctcctggttccctttcttctgcatctcatctccccatggagggtggaggtgaagtcagacagaaattgttagatcttcttttgtcttgctgacttcttgcctcttgcagtggctttaaaggatgggagagggagagaggagctgaaatgtattctgtttgtgttttgtgcatgagaagccaagtccccatgtggtaaatgaaagagatcagcattgtctagctagagagaagcagagccacattctgtggtctctccatgcaggggtcctttcagaggtgcagcctgtggcttggcagattctccccagcctgaaatggcaacttggcactcggagcagtggttctctgttctctgtactatttccttattggggctgaggccagggagtgggcctctcctctattgagagagtgtttgagagtctcagtttccacggggaacctgtgaatcatagcttttgttgatacaggccaggaggagcgcaggagttttctcgcttggttgccaaagtgtccaggtcccagctggggtggtgcatgtgtctgggaagaaagaaaaaa

SEQ ID NO: 50784 - DNA, 1247 bp, Bovine  19866880806451
  misc_feature (1)..(1): n is a, c, g, or t
nggggagaagatgggtggattaaaatggaaagttttggcctttttgcccttacccctctgttaatctgtttaaagtgaaagaatgtatctgtgaagtgggtccagctaaactgtaagccccagaattgtccccatgctgctgctgctgctgctgctaagtcgcttcagtcatgtctgactctgtgcgaccccatagatggcagcccaccaggctcccccgtccctgggattctccaggcaagaacactggagtgggttgccatttccttctccaatgcatgaaagtgaaaagtgaaagtgaagtcgctcagccatgtccaactcttcgcgaccccatggactgcagcctaccaggctcctccatccttgagattttctaggcaagagtactggagtggggtgccatcaccttctccgattgtccccataggtaagtgcaaaataaacactcttctttgcatgttcggtggtcactggttgctctcatgtcagagctttacaagttgaactttctctaaccttgaagtccatggagtaaattgtgtccaactgagcctagctgcagctttcttcacttcttttggtatttctgtttaacctgattttccttttttatcattatttattcccatttatttgatccaagtttcctaggagttattggtttaaaagacctattggaacaactttgaataacatttaataactctgctctctggagtcaccaaaccactggcttgtttctttagatcagactaattaagttgccataaaatggttgtattctattcctgtattttcttacttctgtccttataattttcattgccaaatagtttaatcagggtttatttgccactcttcacagaagcgcacacaaggaacacatagacatttttcccaataagggattttccacatctcgcattttgttcaggacagtttcattctccgttgtgttcagagctctgaacacaataatgagcttaacgactcattattaccatcaactcccacaaatacaattagtaaattgtattttaagaactccatagaaatgcaaatcacatattcaatctaattttgagttaaaaacaagatgtttttctttattgcaactctttgcctttgatacaagatcattagttaccattgggggatatttcattctactcagcattattccctgacccagaacatctaaaaaatgtagctagtatcagatatctatgtaatatattaaaata

SEQ ID NO: 50785 - DNA, 1444 bp, Bovine  19866880877547
  misc_feature (1)..(1): n is a, c, g, or t
nctgtcaatttccctgtatgtttttggttttagttacaagtatggcataagtgactatgtcagaacttcaggtttaaaacaaacaaattaatagatacttaacccactagacggaaagaaattcttgatttttttcaaactataaatacagtctatccaattttagttcaagtcttggagaaaaccaacacatattttttgtatgttatttaagttcatatcctggtggacatttgggatgttcacttttcccagatttataaataaaggtcagcttccctgaactttgtggactataggtcactttatattttccaataatgttccttaatgtcattcagcttttttaaccctgttttgaatactaggcaaaagtattcaaaagagtgttctctggaactgatttcaaatattggctctgatacttactgattgtgtggtctgaggctagttcctaaaacttgctggttcttagtttccttctttataaagttgacattaaaataaacttacttcattagtttactttatcagatgtataggcaagcttctggctgattggatctagatgtatcccaattgttaaaacaacataaagaaagattgtcaacagaggactgcaacaaggaatttctggaagaaatagaacagatgagaaatatactatgccatccaagtgaaaaaaatgtgaatatccccaaggaaattccagaatactatcaaattctggtgtgtgttaacaaaggcctgggccataggcagttagcattttaattgaatggggggatgattatattcagcttctactttgaggtcaaagttcactagtgaagtgctctaaacagggagttttgatacttgagccatattatacaatttaaatgtctataagtacacaaaatgtgagtatgcaatttaaaaaatgtcaataaggaaagtcagtgttttgaaagagaggcttggacaataaacaaacaaacaaaaaatcacccagaggaaacagagttaatacagggggaaaaaatccctaagataaacagaataagcagcattaggaatttaaagcatattttgtccatcataaagaaaatgctattatgagaaactactttaatggaaattaaaactttttgataaaaaagagaagggaatagatcagctaaaaaatgtagtagagcctgaagtcaggtaggttgattactccagttccattcttctttctcaagattgctttggctattcgaggttttttgtatttccatacaaattgtgaaattatttgttctagctctgtgaagaatactgttggtagcttgatagggattgcattgaatctataaattgctttgggtagtatactcattttcactatattgattcttccaatccatgaacatggtatattgctccatctattagtgtcctctttgatttctttcatcag

SEQ ID NO: 50786 - DNA, 1205 bp, Bovine  19866880919906
  misc_feature (1)..(1): n is a, c, g, or t
ncgtatttatttaattcctattatgttaggggaagaaaattttgttctactcttttggcaaggttatattataggacaatggtatcaactatagtcagcatattttatattagatcctcagacttcatcttacagttgaaagtttgtaccctttaatcagcttctccctatttctcccatcccgtagcctctggcactatttttctgctgtttaagagtttgactttaaaaaatttttcacatatacatgataccatacaatatttgtctttctatgtttggattatttcacttagcataatgccctcaaggcccaactatgttgttccaagtggtaggatttccttctttcttacggttgaattccattatgcaacggaattatatatacacatacacacaccacatcatctctatccattcatccattcatgggcacctaggttgtttccatgtgttggctattgtgaataatgctgcagtgaacatggacgtgcaattgtttcttcaatatcctgttgtcatttcttttggatatatgcctaggtgtgggattattgaatcatatagtagctctattttttcaatattttgaggagcctctatactgttttccatagtggctgcaccaatttacattcctattgtttgtgagcaagagttaccttttctcctcatccttactcaaagctttcagacaggaaccagtcttgaagaagcgtgaatttaaaaaagatctctagctgagttgtaaagaatgagttagagaataaaagggtgaatgcagggagaagagttaaaagccttttgaacagatttacacagacttgggtggtttggattagtgatgatggaaatagaaatgagtagatggattggaaaaggattttggaaataaaatttatggaacttgctagtgactgggtctaggggttaagacaaagagagagataaaggaagatccgtggtgatagctggtggattgtagttatgtttgctgagatgggagcaccttggtggtaggaatggggaggcaggtgagggagagcagggaaagaccctaggttcaattttgaagtgtctgcaagaaagatattcaaatgataatgttgagcaaacataagatatatggtttgagaggttattagtgctaattgaagcagacatgaagtccttaaactttttaaaaatgtggtatttaatga

SEQ ID NO: 50787 - DNA, 1903 bp, Bovine  19866881019313
  misc_feature (1)..(1): n is a, c, g, or t
ncttataaatggtggtgctgggatgcaaacacattcctggtcttaattacacaaattactagattattaatatgatctggaggtggggataaaagaccagaggactggaggtggagaaaggaagaagctaagtgaatgtagggggaaaaatgactgaatgaagaaaacaatattacaatgtcaccacatttatacatctgtaaaattagtatatgtatataaagccattttttaaattttaaaattggaggataaacgctttacactattgtgttggtttctgctgtacaacagtacatatcagtcataattatatacatatcccctccctatggagcctccctcccctctatccctctaggttgtcacagagtgctcagccatttttaataaaaagcatattaaatattgtaagagaacatattagaatttttaattggtttattccacacaaaaactgtcttaattataactgaatcattatagttcctattcttatcaatgtttcagtcattcaacaaatatttaatgagcatctactatatgccaggcaatgtgccagattctggggaaaacactgtgaaagacacagcctcagtttcctcaaggtattgacagcagtggaagatggagatcaggaaacctgccacgtaatgaaatcacgtgactctccttacacctgtaatcccaacaggacagatataatttgtttcaaatcacactgaaaaaaataaagactacattgatatctgcaaatcaactacgtcaaccaatcaatactgctaactctcctcaattcgccctgctaaacttttccaagttgctggctcaaatactataggtgtacctagcattaaccccataggctccagtgaccataaaatctaaaccaagaaaaatgaaaacaagaagcaaatattatttgtaagtctttttgaggtttttgaggctcagaacatgatcagaacttcagccatagcagaaaaaggagtcgcatatatcctttgatccaggatttaagtggtttggatttatacacagaagctaaacccataaatgcacaaatccacactgattccatttgaatggagaccttctgcagtgtcatgcgtccgggttcacacagggattggtcagagactctcttcagaaccactcttcaaattactttatacattgaagccgattatactaacaaagtatttgctgaatgagtgtctcagaataccaaatgctgattttgcaaaaatcctctcaattaaaatccctttgtggaagccaaaaatctgccaagtgaggaggtatttgattattagagactcactggaacaaactgtgcttgtattcatttctatttcatgaactaccttaaaaataggcatgaaataatgtcctagggttttttctatgagagtacattaagggaaaatagggtcattaagcacctcactgcagaacaggcaagagagaaacaagagacggaggcccactgggcagagcattttctctcttcacttttatcattttggggaatcttgcaaaagagccaacaaaagaaggcttggaaccttcctctgagcagccccgagtacactgacaggcaaagagtactcagtctttggaaagtgcatggttctccagctcctttttctaccactcgccctccttatgatctagccacactggtttccctttgcctttcctagccctgtctcagggcctttgcacttgcaggcttcaccaaaaatctgtccctgattttcccacaggtttccacgcccataaagaatccttccgggctactttctccaaagaaaccccacccttcagactcacattcttatctttttccttggtctgcttcccacagcaggcaccactctgggggtctctccttcatgta

SEQ ID NO: 50788 - DNA, 988 bp, Bovine  19866881030467
  misc_feature (1)..(1): n is a, c, g, or t
naatctactaatgcatgaaagagcaggaaaagattttaaaaactgaaagaacatatgatctgatttttatcaattgaaagatgaattgagagaaggaggcaagtggggacaggataaaagaatcctatgtcagaaaattttgacagagaggtgacacatttgccaaaatcatgaatttatcctagggggaaaagagaaataattttggaataaagtattcaggtggtacctaaaagtggttattagatcaatcatttaaaattgaacttactagtcaagtcagtcaaacacatagtccaagacttttacttttttttccatttgaccatgagtagtttgttttgatatgtgacatgaagggaaaattcctaggtgaggggaaaagaagaaaaattatagccggcatctaaatatagtccgccagatgaatggctcttttgtttgggagattcatggacctttttaattatgcaaaggatgccccaaaatctatacagggagcagtgaggcaagaaaaaaaaaggacaaatgtctctgcatgttaaagtgtaatgacaactgtaatttactttaaaatacttcagcacagatagagcgacattacgtgtcagtaaggctaaagtacaacccggcactttcagatgttctaaatgggatttcactctgaatgatggaaggaagcaggggacgccccaccctccagagagaactactgtgagcactctggtgaccctcttctctgatcagcaactgacacgttgttaatgaaatttgtaattatcagcataaatgaagctagaaacagactctcaccagtgaaaatagtgctactcaagatttgtaaactggccaaactgctttagcacagggattggcacactatgacccacaggccaaattcgggctcccttagtttcagcatgaccggttcactaagagtaatctttatagcttttaatgaatgggaaaaaaattttaaagactattt

SEQ ID NO: 50789 - DNA, 1434 bp, Bovine  19866881171186
  misc_feature (1)..(1): n is a, c, g, or t
ngtgaaacagttttgtataaatccaggataagaatcatcctaaaggaaatcaaccctgaatattcattggaaggactgatgctgaagctgaacctccaacacttgggccacctgatgcagagctgactgattggaaaagaccctgatactgggaaggactgaggtcaggagaagggggcgacagaggatgagattgttggatggcatcattgactcaaaggatacgagtttgagcaaattccaggagatagtaaaggatagggaagcctggcgtgctgcagtccatggggtcacaaagagtcagatatgatggagtgactgagcaatgaacaacaataacgataaatacaatactggagtcaagagggaatagatggaaactttttcagattttaaaagtatatctactctcatttttgcttgtggcttttatagaccaatttatgaaaaaaaattttatcatgtgcagtttcccagtacaaacgcacatttcctcttctattgaggtaaatagattctgttcatggcaatatttacaattttttttatactttgaaaagtaacttttatgtctgttattttagttggtctttgcacaaagtctatgaaatactatcatttcctttgttttatagatgaggaaactgagacagagtttgagtgacttacaaagtacacatagccaataaacatgggctgagacttaaacttagagatgaaactcactgatggatccaactaatatgcaattatatttgtgttatctacagacaagtttataatttgcatgtaagctgttactttcttggtggaaaaataggaaactttcaaatgtggaaaaataggaaactttcaaactctgtcccaatagttaaatacctagagggttcttgcagctctagtgactatcttaaaaaggactgtcaatttctttgggaattctgcatactgtattcctcacttaaagatgcataattcacatttatatactgaaggctctgagaaatctcattgggaagaagtcttttaaacttcaactgggacttgactaactcatttactaagtgtatatattaagtgtatatattaaggtaaaatccactttatgaagtcttcgtttactactagccagttcagtttctgctggagatgtaaaatgatggtctaaaacttgaatgcatttttgaaacaataatttaatgagtttcttaaaccacaagatcatatacccacaaagatgcttggggatttgaggtatgtgggaagcagacaacttaatgtcatttttggattttacagacatcagttcttgggaaatgctttttatggatttggcaataccagttactcctcagggaagttgtgtctgctatacatccattctggattactaaatttttttagatttttctgacacaagatgaggtgattttg

SEQ ID NO: 50790 - DNA, 1251 bp, Bovine  19866881184452
  misc_feature (1)..(1): n is a, c, g, or t
nacctttagatggggtcatgaattatttatttctttggtttaaagcaacccaactttcactgcatatttgcaaatttgcacgtttctaaacaaggaaattttagaacttggtcatatcaatgaaattatgatttgttttccaaaatatatgtgaatgtattttggaacaagaagagcaccctatttctactgccaagattatttccttgctttgaacataatacatcatgatttcaactgaaatagattttcaaggaaagcatattttcccatagaatttagctttctatactgaaatctttggatggagaaggaaatggctacccacttcagtactcttgcctggaaaatcccatgaacagaggagcctggtaggctacagtccttggggttgcaaagagttggacatgactgaatgacttcactttcactttcactgaaatctttggaaaggattccattgactattttaaaattacatttgtaaaactgctatataaagtatattttgggttataaagttattttacacacaattttattttataacaaaatctctccttgtaacatgcctcttcatctagtggacagtatttagggaaattctgaggctagtaaagttcaagaaagaatataaaagaatactctatcaaacagcatttctagatatttaaatataaacattttatggaaatcacttagcactactggcgagtagaggacttctgtaaagttcaacaaaataatggaaaaagcagtatcatgtgacatgtctaaaaaagtaaataaatacaagcaaattgtacctgtttttttctgaaggtagcattgaccttttacctcaacactctgaactaatttccactgagagcaggaactttgagagtagggacttcagttcactgcttcccttagcacttagcatatcaaggtgagcaaagccttcaactagtattctttttatatttttttaatttattttttctgttgaaggataattgctttacagaattttgttatctgtcaaacctcaacatgaatcagccatacgtatacattacatcccctcccttttgaacctcctttccttctgccgccccaccccacccctctagattggtacagagcccctgtttgagtttcctgagccatactgcaaattcctgttggctatctattttacatttggtaatgtaagtttccatgttactctttccatacatctcaccctctcctcctctctccccacgt

SEQ ID NO: 50791 - DNA, 798 bp, Bovine  19866881201588
  misc_feature (1)..(1): n is a, c, g, or t
ntataggtgactgacatcttacagaatatctactcaagtgatatctaaatctcttcaaacatatgttggaagaggataagagataattagactgtgaggagagaacattactgtaacatgacgtatgttattttattttaagctaatatgtttgttttcaaggtcattttccactgtcgcacaaaatgtatttgtggactttgttgcttattgacaagtgtttctgaatttgtaaatgtcccttaactccaaagatgtccattcagtcatttttgaccaagattcatttggagatacaagttaattcagatagcaaaaaacttttcaattacctctcagtataactttgtaaatattcatcttctctccagatatcaaattgtacactttcttttccttaaaaaacttaaaccaaaacaatgaagtaaaactaatcaagaatttcaggtatataagtactgttttttaaaaaataaaaatatgactaagaattttgagccaatcagtaaatactaaaatagtctggagagagacaggtacagaaatacatttctgcctctctgaaaccaaaggctcaaatttgcataatcattcactttacctatttctggtcttaactagttctgtaaaatacccattttgtttgacgggggctccaaaatatgtttgggcaacaagaatgataaatgtttaccctaaaagactctcactccctggaaggaaagttatgaccaacctagatagcatatgaaaggcagagacattactttgccaacaaaggtccgtcagtcaaggcta

SEQ ID NO: 50792 - DNA, 1356 bp, Bovine  19866881223425
  misc_feature (1)..(1): n is a, c, g, or t
ngtcctatttccagtaaagacactttacaggtattcaacacattttggggagcactacagttcctccaataacagagtctatattttatttcagctttccttcagaagggcccgaagtaaggtactagatgtttaagaatgatgggtggtttgaaagttagggagagagcagttcgggaggagaaaaggacagagttagccagccagggggtcatctgtcacttggtctatcaagagtattccagccctgccttgggattcagagagcgtggactggagggcacaaagggaaatgtacccacaaccagctgtgagcttccagaaggaagggagacaccaagaccagggggaggtggccacaaaacagcaggggaatcaaagggaaggcaggcgggtaaaagagcttcccagaggacgggcatcccagtaagttctggaaggagaagagaggcaccaagtagcaggggagaggcaggaagccattcggactgggaggacacctggtgctgtggggcagctgaaactagactgagccacgggacagtgagctcacgaagtgggcaggaaactggaaagaggcaaaccaccggtccccaccccatggatttcggggagctgtccatgatgccccaggtgtcttctctcctgcccttggttctgaccacatctcctctcttccggcagctgtggtcacctccaccgtctccagtggctacggaggtggcagcagtattggcagtggaagcccgggcctcagtgggggcagcggctgctccttcatgaccagtggtgggcacagcctgggcggctccagcttcagcaacagcagcagccggggcctcgggggcagtggctccagcttcaagtttgtctccaccacgtcctccagccggaagagctataagcactaaacacagtcaccctgctccctcacccctaccctgaagccagctccgcccgctcacctggcctgtctgcactcatccctgctcacctaggtgcttttccttgtctcccgtcctcgaggttcacctgtgctgccaggaagcctggcatcctgtctatatcccattccccagcctaagccagcctctgccctccctcagtccccagactgctcctagaacccactctgtgccaaacccgctctctttcaaaattcactgtcagattgtctttcagagactccccatcagctctgcctccctcctcccttcctccaaatgcagtctgtatctcccagaccatctcagtgtcagcccacctgtctcacgatgcttacgagctgcctgctggatgagagtgaagcctctctctctttcctcccaggaccgtgtctattaaatgcatgtataa

SEQ ID NO: 50793 - DNA, 1316 bp, Bovine  19866881224341
  misc_feature (1)..(1): n is a, c, g, or t
nctagctctctacaactctccttgacttttatccctttcgagaactgggtttggccagagaagatcaaagaccactctgttgagttcatctcaatggtatgtctggccatgacccatcttcctgcactgctcatcatcacagggaacaccccacccagggcaggaccaggcctgggaattgggacctggggcaggcctggtcccaagcccccccacccccaatcatcccacgttctcagccatatgctgcagatattcccatggcttttcttctcctccccttttcttgagtcttggactctgaaaccatacacttgattacagtcttcccatcatggtcacttatgagggaaaaatttttttattgaggatttcatctgtgccagaccacaggcaggtcagttataagcattgttatttgattctcattgtgaggttggacaacaagaataataattgccaatatttatggagcagcaattataagtagtgctttacacctgtttctcatttgaacttcacacagcaggaaggggtaactcatattattcttgctttgcacatgaagcaattgaggtgtagagtagttccgagacttaggacccagcagtctgactgcaggtcaccagctctgcatcactattctcgtaccgatggcgaggtggcttgttcgagggaaggagcaaattcaggatttcactccgaattcctgtaccctctacccctcaccccagcgtctcatcccgtggtcaccctgaggaccagggacatattctcagtgtcatttctctccttccttccatcctctccctccaaaccttccaaattttagcccctggttttacattcatcttttctcatcctagttcatggccccttccttcccttccatttaacttcttgctctttcaccctggacagctgtgtttgagatccctggttccaagagcccaccaatgtggtcctgagcactgaccccatccctccaagcccactcaggctgcctcaactctgggtgatgccaggggctgaggtctgatgggaggtttccagaggctgtacactcaggaatgtgggagctgcctgcaattatgggcctaaatggcccttctgttgggtgaaagcactgcccccagggctgacttctaactcctctcctggcctgttattttcctgctcacatctgcaagttggaagctgtcaggaaacaatcagccctttgctggcagagggctgggctgcccaccctacgtcagtgtccttggaactcagtctggtttggggagggggaaggcattgccctgcatgacatacag

SEQ ID NO: 50794 - DNA, 1164 bp, Bovine  19866881309496
  misc_feature (1)..(1): n is a, c, g, or t
naccgctggatcgccgggaaatctctgaagcttgacttctttatccacatgcagaactaatactgtccagtctaagtgtttgtattaactgagataatgtcttcgaagtgctcacatgaactagatgttccctaagtgaattcccctaggatcttcctttctcttcatcctgcttttgaggcacctctcccaacttgggtataggactgaggtttataattttgtctcctacattcttaaaactaaaagtcattctttgtacttaccatttagagcatgaggttatccactcgtgttttacacagtaggataatggctaagcttttttttactcacattctaagtaactacttaagtaactgtgtcacctcacagacaaaaccaggctactgtgcttgcttattcttatctattctactgtaccccttttcctgattatttatttagcatgcatgtgactcacagatctttagagatcgttaacttgcttcttaaaatagagcaaataatatgtttagctgttagtcacaaagttagtccagcgtttgttcaacaagcacctcacgtgtgatcatttgtggccagtcattgactaagtgctgtttctgaaggggagataggagctataatatagtgaatcatgggacctcattttaagggcatgaaacttgattgcatcagtactttgcatgcttcaactccaaaccacaatcatactcacaaattgttaactttcaccacacccctagattaacatcaaattgatctagtttttcaacctctcatttgttattttccacccaactcaccaagattctttgagcacgtcatgtgggaagaaccagattcatgtattcacctcaggactgacaagagatcaatgcccctagatactgctcagtaccaccagtcattgaaacaatataactcttctcactgacccttggcagaaaccagatccctcagaggaaggtaaacagacaactgccaaaggcacgagagattatctaatgtcaacttgaggtctgatatttccagttgactttttaaaaaaatcattgaaacttaaaaaaaaatgaataagaatcacctcaaataaaaccaataatagatggctagtctgattaaagcaaaggtgagggatcagcccttccttatctattt

SEQ ID NO: 50795 - DNA, 1271 bp, Bovine  19866880195487
  misc_feature (1)..(1): n is a, c, g, or t
nttatgttgccctctgtgcttccaaggctcgccacagactcggcagtgagagtgtttcctggtgtttggaaacttctctctttttaagactcctttcccgggacagagctccgtccctacctcttttgtctctttttttgtcttttatattttttcctacctccttttgaagacagtgggctgcttttctgggtgcctgatgtgctctgccggcattcagaagttgttttgtgaaatttactcagcgtttaaatgttcttttgatgaatttgtgggggagaaagtggtctccccatcctattcctccgccatcttaaaaagaagatctattagctacttattaaattactttagccacctcatgtgaagagttgactcattggaaaagactctgatgctgggagggattgggggcaggaggaaaaggggacgacagaggatgagatggctggatggcatcaccaactcgatggacgtgagtttgagtgaactctaggagatggtgatggacagggaggcctggcgtgctgcaattcatggggttgcaaagagtcgcacatgactgagtgactgaactgactgaactgaatagagcatagcatggatttcccagtcctgaaattttttattcatagtcttattttccacagaattattaatgaaaaaacaacctttgtttatttgtatatccttacaatatggcactttgaagatgtcttttatttcatactcacattttgtagctaatgttgcaaagcagacattcctcactgtaactataatttattgatgcttaaaggttcaatgaattattcagcccctttacccttcttgctttgctgcacacctattgagttttcagagcagtttcatatcaataaatttgttcttgctttgcagctccaatttcatggttggccttttctaagcaacatacaagaaaaataaataaccagaaggaataaaatgtgtatacaaattgctttaaataactcaatatccaactccaagttcccatgggttttaaaaattaagacatgaaagcatgatatcagaaacagtctacatgcaaatgtaatcagcaaaaaacttgttaacatgcagtctgtatagagtgacatgccttcattctgctgtactcagaattgaaagcactcttaacaagtaagcccctaagtgttcgactcactgccactttgcaccttatgttatcacatactcacagaaacggtagacaacaaaatgatgaatggctaatctgatcagaatga

SEQ ID NO: 50796 - DNA, 1956 bp, Bovine  19866880486847
  misc_feature (1)..(1): n is a, c, g, or t
ntctctatgcagatttattgatctaatgtatatctaatccattatatttattaaaccaaatctttgccaatatgtgaatcctgaacattagcatgacctgtacttttcttttgtaggctaaagggaatgtggtcagacaatattccacatgggaaaattcacagtgcacttgtttgaccatttctgtatggcagtaggggtagacaatcacaaataggacccagaggaatatcctctgcaacagttgatagaaaatataaggcttatctgaatttatgttctcatttttaattattcaaaagtgttcaattgaaaaatgaatatgttaataatatttagccattttaattcatcctcctatttataactgatgctattgtcaaacgaaatcatgaatataatcctgtacttgattatgtacaagttatttaaaatatcaagttcagttctgttcagttgctcagttgtgtccgactctgcgaccccatgaattgcagcatgccaggcctccctgtctatcaccaactcctggagtttacccaaactcatgtccattaagtcagtgatgcaatccaaccatctcatcctctgtcatccccttctcctcctgccctcaatctttcccagcatcagagtcttttcaaatgagtcagctctgtgcatcagatggccaaagtattgaaatttcagcttcaacatcagtcctaccaatgaacacccaggactgatctcttttaggatggactggttggatctccttgcagcccaagggactctcaagagtcttctccgataccacagttcaaaagcatcaattcttcagcactcagctttctttatagtccaactctcacatccaagactcacatctcacatgactactggaaaaaccatagccttgagtagacggatctttgttggcaaagtaatgtctctgctttttaatatgctgcctaggttggtcataactttacttccaaggagtaagcatcttttaatttcatggctacaatcaccatctgcagtgattttggagccccccaaaaataaccccaaaaataaagtctctcactgtttccactgtttccccatctatttcccatgaagtgatgggactagattccatgatcttagttttctgaatgttgagctttaagccaactttttcactctcctctttcactttcatcaagaggctctttagttcttcgtcactttctgccataagggtgatgtcatctgcatatctaaggttattgatatttctcccggaaatcttgattccagcttgtgcttcttccagcccagcatttctcgtgatgtactctgcatataagttaaataagcagggtgacaatatgcagccttgacgtaatccttttcctatttggaaccaatctgttgttccatgtccagttctaactgttgcttcctgacctgaatacaggtttttcaggaagcaggtcaggtggtctggtattcccatctctttcagaattttccacagtttattgtgacccacagagtcaaaggctttggcatagtcaataaagcagaaagagatgtttttctggaactctcttgcttttttgatgatccagcagatgttggcaatttgatctgtggttcctttgccttttctaaaaccaccttgaacatctagaagttcatggttcacatattgctgcaacagaatgatctctgttcgtttccaaggcacacaattcaatatcaaggtattcaaggttacactggcattattcatttggcttcccatgtggctaactcagaaatattaattggaacttgttgtcctttccttctggcccaagtacagcaggctctttccctcctcttaagtgtttagggacttggtaaatgatgttttcatgtggctcacacattttttagatatataccaccacaaactattatttatttttttagattccagat

SEQ ID NO: 50797 - DNA, 989 bp, Bovine  19866880501378
  misc_feature (1)..(1): n is a, c, g, or t
ntgctgtgtgtttctcaacttgataattaagtgcagtttatcagatgctgtcatataagattgatgtgcttttaaaacacattttcctcaagatttcctaagagcaatagaattaaagtgtcacgctataagatgaatttgaaagttaaagccaaaacaaagttttctctaagaatgacattcaaatagtcaaggttacatgatgcatattttagtctgctttccataatacttagaatgacacatttatttctgggaagttgtgggagaccttaaccctaaaagaagttaaacatgaagctttattttcagctcgtcttcttacagaagttaaataacccttcatctgatccaggctttcagattttcatagccaaatgtcgtctctatctcctgaatacctgatttttaaagacataatactttcttatgttatgcaaaatatcagtacttttaggaaaaatatcagataattcaactatatatgaactaggttctatcacttgcttaatttgtcatgaaaaagctaatgatagagaaacagctcaaattttgtttttctgtttctgaaaaaatgtttcactcatttcttatgttagaattctgcagtaagttcattaccaagaaagctctttgtttcttcattacatcatatgatcaaatagtggaagtcatcagtccagaatatttcctgattttgtgctaataaatggccaagaagctctgaatatatttagaaattagtaactaactcacctcagttatctggtgcatgtattttcctgtttcctttagtaaattattgttcagtttttatctaatttcctcctttagacactgtaactcaatgttcaggcttatgtcaatttctaaagaaagtacatgttatgtaaaaaatatatacactgagtttcttggttctcatcttttatagttcatagccattttttttctggacttgatagtcagaagtaatcctactttaatga

SEQ ID NO: 50798 - DNA, 1555 bp, Bovine  19866880622377
  misc_feature (1)..(1): n is a, c, g, or t
ngttcttaggataataactgatgcagagtaagtgccgtgtaaagtgcttattaagtagatagaagtactttattatatattcatatcagcagatattataagttgagagcaaaaccatcttttaaagatacgttagtggtttcctgggtgtttcatacagggttgcatagttcaagctctaaaaggtactttgcaaaagggaattttatggagtcccacttccctggtgcctccaacagtaaagagtctgcctctgatgtaggagacctgggttcagttcctgggtcaggaagctcccctggaagaagaaataacaactcactccagtattcttggctgggaaatcccatggacagagaagcctggcaggctacactccatggggtagcagtgtcggacacaactgaactactaactcacaatcaaccagcaccatgaggcagaaaacaaaaatggcaaagagcatcagtttttgtggtgttgaccacacttgaaaaattctgactttgctactcattgcttccatgtcctttgaaaagttacttatcttctttaaaacctattttctacttctttattttagctcagtactaagaaaagaaaaaaatatatgtaatttgtatcatccttatttactttctattgaaattcaacgactccttctctatcacccgagtgattgacttgccgtctttgatgtatcaaaatataggccccaaatctgttactggtcattttatacttggatgattctaaattttattgtatgttagatagcaaagcatctgtattagttatgtccaataaatatttgattttcttgttgatatattctagactgaattactttcttttaattattgtttgctaagcaaaggggcatgtgattgtacgtatgggtactccaaaagtagaagtagaaattttaggaaattgtaatgaacatcttatctgtctgtcttctcctttgtggttatctatttatggaagaggtaacaactgtagttatagagattaatcttcaagtttcttggagactcaataacttcataggaagctaaagcactgaatgggaaataaaattttgtggataaacactttttatatttccccagggaatgccttctgtttatatgaacaaaagcttcattcgtaattatactccagtgctttgttttgcatgacatctaacttgaagttttctagttgatataagtgttagtgtcattttgaagatgagtattatgatcaactcgtttccaacacttttttggtagaaggtgttttatatagagaatttaagtagattgttcgaattttgaaatcttgataatatagcctcatttcctccacaggcagtctaggtaaggaaaatatgctctaggattcccagtggatgtgccagtcggtgtttaaaagataaatttcctcctttaacagagatgggaaaagtgttactgacgttgcaatctgcagttttgatactcatgtataaaagggggcagatgttcttttctgccaaatcattcccataacacatttacccaatatttgg

SEQ ID NO: 50799 - DNA, 1202 bp, Bovine  19866880647064
  misc_feature (1)..(1): n is a, c, g, or t
nactcttcttagatatatcagaaaagtgaagtcataaggcaatatattgtccccaaattggagagacaaacaggtgaatgctagtgtgcatactggtacacagtgtataaggggaatgaatgatatagctactttcaaaggtagtctgacagtttttttaaaaaattaaacactcttaccacaggatccaataataccactctggtatttacccaaatgagttgaaaacttaggtccaaacaaaactcagcatacagatgtttataacaaaaattgcccaaacttgtaatcaaccaagatgttcttcaacagatgaatgcataaacaaagagtggtacttccatagtatgggatattcagtgatttaaaaaaaaatgagctatcaaattatgatatgacaagcaggaatcttaaacacatattgcaaagtaaaagaaaccaatctgaatagtccacatacattccagctataagatattctggaaaagacaaaattatgaagacagtaaaaagatcagtggttggcactattaaaggggggtagatggagcctgaggatatttagagaggtgaaacaatgaagttttaattgtagatatatgtcactacacatctgtcaaaacacacagaaggtataaaaccaagagtgtagatgaagtatggactttgctaataacatatcagctatagctattatagctcaactgtaacaagtgtaccacactaatgcaagatgttaaaaaccagggaaattggggagatggtaatgggatatatgggaacactgcactttccactcaatttttctgtaaacctaaaattgctcaataaataaataagtctattaatcaacagcatagaagttcaattcattatcatactttctcttaatcaataattattaattaaaaataatttgtactctgagataattatattgccaataaagttcaacaatctctggaaacaatcaggacagtaataactgctaggaacctagtatttataacatttcaacaacttatgttcatttcttcttaatcctcagagaggctatattgttgattaatattttctatttaagttggcacatgctcattgcccataaacatttaggaaggctgtctaagtacatgatactacttcttattgaagtaatcagtatcaaacatttatctttatagttcatatattttggatat

SEQ ID NO: 50800 - DNA, 1464 bp, Bovine  19866880739679
  misc_feature (1)..(1): n is a, c, g, or t
ngcagagagaagggaaaagatgtatgatgtgttttggaagtaacgtcaaccagccattgctatgagttgcagttgaaaaagcaagaaagaaaagagaaaaagcaaggataactgagagttgacctttgagtactgtgcagacattattgctcttttctgagagtgggaagattaggatagggataatctgtgtgagacacaaagggaaattagagttttgctttggccaggttgaggttgagatgcttacttagacatgcacatgttaggcatcaaatagaaatttgaattaatgtgtctgtatgactcagatggtaaaggatccacctgcagtacgggagacctggcttcgattactgggttgggaagatctcccggaggaaggcatggcaacccactccagtattcttgcctggagaatcccatgtacagaagagcctggcgggctacactccatgcagtcgcaaagaatccgccacaactgagtgactaagcacaaacccagaaagatcagggctaaaaataaagattgtgtattcttgataatatagattctattaaaagctatggaagagagaatttgtgcctaaaaccagaatgggatgctccaatattaaatgatcaggaaagaaaaaaaaaaatcagtatccaatgaaaaggaaagaaatgccaagagtgtaatatcaagaagctatgggaaaacattgcttttaagatagccaacttgaggaatgatactgagaagtaaatatgataagaaaagataaacagtagatttgtcaatccagtgattaattccaaaagcatattacccaggctttataaatttcaaatatgcagagcaacttattcagttaatttgtaaagcaaaattctaaaatagaaatattttttgcagcttgttctcagctattaaattattggtttatttcttttcaaatcattggtctatgaattttaaggatatgaaaatgaataatacatgccctgaaagaatttttaaaatatgttttaaagtaaaacatgtcttaattttggaaggaaattatatattttattaggttaaataagtatgatgaccaaacattcatcttacatgagtaccctccatattgagatgttattcttttctttaaaaaactattatttatattacttaaaattgttatttatactgcagaggcaatctagtatagtgatcacagtatactagtctgtgctaggacaggctgctcaaatttgaatatcaaatcacagtaagtgagtatgactttgggcaatgtgttaatctcaccatgaaaatctagtctctctctgcagtggaattactaagtaagtgcatgtttaaaactactagataatatcaaagtttttccaaagtgctttccagattgctctccctttgggtatgttcatgtaatagaatgctttatgttcatgtatcatcatgtctcacaaagcata

SEQ ID NO: 50801 - DNA, 1202 bp, Bovine  19866880801410
  misc_feature (1)..(1): n is a, c, g, or t
ntctatatagctatagtatttgaaagagtaaacatttgtatttctaccagtaaatttatactaaaagtcaatactagttttctcaagttttcatttttatcaagattaaaaggaaatagttaaggaataactggcctgcatctaaagagttactagatgttaaaacacctttacacatctataaacatgcaaacactttatgggttattattattcctaaacaactacattatgttgtcaaactttgtaacaccattttttatatacttgataattaaaaataggcattttcaatgtagttaaatatggctatgtttctgattttcaaacctgaacaaaacacaatttaaggaaaaatgtgtctcagaggaatacaatcacaggctttccacagcgctatttgcttaaatggctctctgctctctccttccctcccctaccagaaattctgaacgtgcttagcatcccccagagatcctgtagggtgccatctgctgtgtatctgctatgttgcagcctgaaaatcttgatgtcagatttagccccgcaagttacacaacggtatgtgagttgtattacaactgaggcattaatgcttgactcaagcagaaaattaaaagttagacatgcatagcaaaatcatattagtggttatttgattaattattgaatatgattataacacacataaccacaacaatatatttgaattatattcaggtataatgagggtggcagttattattaatactgtgggttgtgttagtgttagtcgctcagttgtgtccaactctttgcaaccccattgaccgtagcctgccaggctcctccatccacacgatttttccaggcaagaatactggagtgggttgccagttccttctccttctctgtgggttgtaatttgtttttaataagtaaaaaaataatacatatgactacagattacataggtatacataccaggaaagaattctctggctgactggtataccctttctcaccacgttattttcagctcaacattaaataaataccaaaataaacactgatggcaaagaaatgatcaaaatatttctgcaattttcatgggaagagaaatacagaagaaaatagcattgtaggagatggagttggtagacagggagccactcagagtacaaacaattggaaagacagagattttaaggcaacataaagat

SEQ ID NO: 50802 - DNA, 2828 bp, Bovine  19866880884608
  misc_feature (1)..(1): n is a, c, g, or t
nactaaaatcaattctagatttcctaattccataattattcataaatatggaacttataatatggtggattaaaggggttacaaatcctttgctactattccaaatgaaagatggaatctaatgttctcttcttggatacgggttggtcttatggccttgcttgaccaggtgaatacaatggaagtaattctgtctgattctcaggacaagatcagatttcagttcccaggatggtctcttagaatgtacctctcaagttcctcccctgtagaaggaacacagcagtcatgctaaaaagtccaaactacatttcattttctttgacagcctcttaaggacacacccagcatcagcggcatcaactttcgatcctgagaatgagtcatctacatacttagcctagtgaagtctttagatgaccaaagctctgaccagtatctcatcataactgccagagctaaatcattcccaaattcctgacttgtaaaattgtgaacaaaataaaagtatagttttaagccattaagtttggggatgatttgttatagagatcatcagaacatatggacaaattaaatgattacaattagaattagtgtgaattatgactcataggtatataaaatatatacagctaattaaaaatattttttgatttaaagtatgatttttgtgattaaagttatatttattgtaactttcaaatttatttcatgtgtaatataaatatattctcagtatttaacatacaggagaattaaaaatacagatgtaataatttcttaaaaattcttattttacttttattttctaaatttggaaaattaaagccagacacatgaatatttggttaatttgccccaaattcatttagctgacttcactcccatatattcctatcatttatttttgcctgaattagaatcacctcattgtttgaaacatgtatgaatagaaatcaagttccaagaaattaaaggcaagcagatactgtaaatcatctcaaaaattatcttatgctgaaattagaaatgcagattaaaaaattaatttctaactcatgaatcttcacataattcttcaggtaaaattataaacataattcttggctaatatttacaaaaacatgtcaaaattggtactgagtcatcatgactctctatttatagacttgtggtcctttctctggagggctttattttatgacttacaagctgttccctcattctggtaagtgaaaaggtcaaaagatcaaaaaataaaggaaacagacaattctatcagagtaaacaaggacagattgttatgaacaagtgaaaacagagaaaaaagaaataggaatatggtaggagaagacagaaggacagagatcagaaaacacaaaatatacaataattgacagtgtattttgcagttctaccgaaacacctgacttcatgtaatcgttatgctaacaaagcagcatgttacctgcaacaactgggtagctagtgaaataaaccagtgcaggcatataatcatctacacagagctataacagagcctgcttttcaaatcctgaaagcacagtcaataaaacaccaccctaattgtttatttagtttaaaacaatttttaaaatattttaaaagtcatttcagtatcaacaactgctacaccatgctacaaaattttcttttcataagcattcaatttaaaaagattctaggggcttctgtggtagtccagtggttaagaatccaccttgcaatgcaggggacactggcttgatccctggtctgggacgatcccacatgccacagggggaactaagctcgtgtaccaactacagagcctgtattctggagcccatgagcagcaactactgagcccatgtgatgcaaccactgaagcctgtgtgcctagagcctatgtgtcacaacaagagaagccacagcaatgagaagctctcacaccacaacagagagtagccctgctttctgcagctagagaaagtgtgtgctgctactgctgctaagtcgcttcagttgtgtccgactctatgcgaccccatagacggcctcctaccaggctcccctgtccctgggattctccaggcaagaacactggagtgggttgccatttccttctccagtggatgaaagtgaaaagtgaagtcgctcagccgtgtccaactcttagctacctcatggactgcagcctaccaggctcctccgtccatgggattttccaggcaagagtactggagtggggtgccattgagaaagtgtgtacacagcaacaaagacccagcacagccagaagtaaatacatattaaataaataaatatatatatatacattctagatttgatttataatgtcattgacttcagagatgaactaacattccattgaatatttacaaaaacattgtgttttttaaaaatattgtttacatagcaatacaaaattttaaaaaggcataaaaggtgttcaaagtaagcaccttagacatgtatttctaagaatataaatcaaatcagtaaacagcattatcccttaacatagtggtatattggctatctttcaagataatgataataataccttaagctaaggctttctaatttataaaacatgggctttatttgtggttcagctggtaaagaacctgtctgaaatgagggagacctgggttccatctctgggttgggaagatcccctggagaagggaaagactacccactctagtattctggcctagagaattccatggactgtatagtccatgggaaggcaaagagtcggacacaactgagtgcctttcattttccatgcatagaat

SEQ ID NO: 50803 - DNA, 1138 bp, Bovine  19866880938211
  misc_feature (1)..(1): n is a, c, g, or t
natggttgaatggcatcatcgactcgatggacagggtttgggtggactctgggagttggtgatggacaggaggcctggcgtgctgcggttcctggggtcgcaaagagtcagacccgaatgagcaactgaactgaactgaactgaaccagaattcagcttgtattaattttgcaaagttacattgtaccacattttctaggtgtacaacttcatctctaagaatggcaatagtaataaaaggctaaacattaagttttagcaaaattataactatattacaagagtcataaaatataggatgatactaattgccactggcagcactgatttgtttagcaggatttttaggtataggaggacatcaaggagaaagatgcagagatttaatatgtgttgagaatgatgggagaaattttattttgcttggaggttagctaagtgaaaaatttaatacagccatagcaagctctgggataatgtgaaggacagggaatcctgacattctccagtccatggggtcactaagagttggacacaactaagcaattgaacaataatacgtatcattaactgtgagagtctagactctgcacaagttgttgagaatactgataaaaaatagtaagccccatccctaattccatgaaacacacaaattactggggaagactaatgttaattcaagtacataaaaaggaattcgtaagtacacactaaaataaatgctcttaagaaagtgctcttaagagcataaaacattcaatacaaaccagtgggctccaaatttctattatataactccaaatagaatttttaaaaattacataccttctcacacatgtttaacttggcacttgaatttatttatcttaaatttttcatagttgcaaaagttatttcccacttatgggaaatcttagctaataaaatacagtgtctctctattaagtctctgggagaaggcaatggcatcccactccagcactcttgcctggaaaatcccatggacggaggagcctggtaggcctgcagtccatggggtcgctaagagtcggacacgactgagtgacttcactttcacttttcactttcatgcattggagaaggaaatggcagcccactccagtgttcttgcctg

SEQ ID NO: 50804 - DNA, 662 bp, Bovine  19866881172497
  misc_feature (1)..(1): n is a, c, g, or t
ntatttacttctattgctgctatgtccatgcattgatttaataggatttagtggtacaccatttatcttttgctcttaaataatccccaaataccttctggaactgaaaaagataattacaggcactgactagcataccaatgtcttattaatttctttaaaccaacatcactaatacagtcttctgaattagtgaatttgcagacatgtgcaagagatgtattagaatactaagacaatttatttttaagaaagtactgatttatttattaacagtttaataaagttattatattttcaatcaccaagggccaagtacatcatttttacattctggcacataaaagggagcacaactttgcagagaaatttacaatactattttagctcttgggctttggtgtgggctgcagaaagtaatttaattgaaagttagcatttttttctttatgtgaaatatttgttgaactgtcaaaataagattgtaaaacatgttttaatacaagatgacttccagtagcgctaaatgattttagaaaactttgattcaaatatctacttaaacaaagctatgaaattttcactttgcctaagttcacaactttaaattttctttcgagaaaacataaatgagttatcttctttatgtgaacctaacattt

SEQ ID NO: 50805 - DNA, 1526 bp, Bovine  19866881275676
  misc_feature (1)..(1): n is a, c, g, or t
nccagtatttatatgctttgaaaaggttttccaatttaaatgatcactactcatttttctatcaaattttgcttttcaaactaaagtacgttggcttttctcctttctttttatgtatattagttttgactcatctaaggcttaatatttagtaccattttgacgtatgtcaaatgacatcttcgcttataaagtaaaaatgtagaagcacagttagctagctaagggactctatcagagatgagcactaggataatagctctgaaaatgtggggtcagttattttacagaattcagtgtcctcaaatattttgcagtctgtgtgctcacagtgtaatataactttcaagtgatatctatttaggaaatcaatattttttttattttactataggcagataaagaaaaatgaataaacttgaattttaaaatttggcagtaggctataaaaatgtaagtgcagaatatcatacttaaaatgaacctactttagcctgttacaagtagaaaaatgcaggtactttattttcacatgagtcatatttggagaaaaataagcattctgaaatagtcactgccagagtgctcaaattactgagataaataactgaactttaggcatagctaatttgtgtaccttttgtcacaaaagtatttgagcaagcagcaggtttatctgtcactctctctgaatacacatatacacctagtagcatgtatgtacattgcatatctcaggatattttcagacacgacactccatttgtttcttaaaatatcctcatgagctaggcaataccatccccatttaacagatgatgatgcaaaggtccagagagcataatgacttggagaaagcctaagtgtcactaatactagagcaagtgattttgaaggtaaagggatataggttgtgctaagctgagctaaactgagaaattaaatgtctcagtaatttttttttcatgtaataagagcctcaggcttgaattacagggaaagaaggttaacaatcatgctgttatataatgttgaactaggttagaaacatttttgaaagttttcttttatagtatcatcctattcagacatagtaagaacaccatacatgtgattagaaactcataaaaatgtaaataaaaataaataaaaatagatgtattttataaataaaatagctttctaagttttaaaagtttaaatactaactggaatttaggttatttggagagaatgacatacacctgtattttaggttctactaattagaactatgaatctataattacaatgaggaaagttatacaagttgtgagataacattcactaatttattcactcactcattctttcattcaacatttattcagcgaatagctacaatgtgcaggtcctctctaaattttagtaatgtattcaattatgggtccctcaattgaaaagaaagcatatcaccacactttgaatgcctaccaagtgggccaggttattttcacatctaatgcaaatcattgttattttaataa

SEQ ID NO: 50806 - DNA, 701 bp, Bovine  19866881307717
  misc_feature (1)..(1): n is a, c, g, or t
ntttgtcacttgagaggtgcagacttaggcttcttaaagttctctttatgaccattatgagatgctttctagctgtcaatgcaaattgccccacagagtgattgcccttgtcttttcctttgtttccagagatgtaggaggaatgtccactaaatgtcaaattgagcctcatcctttagctcatctgaactcaattttagctaaaatctaaattatgagttttctaggaaatggtctcatgtatttaagcatatatttaacaaagaaaaacttaacaaacagctttctaataaaacaccaatgaggcatattttagcattggtatataaaataattggtatagagtagacatttcacaaatcattttcctctgaaataaagtaaatttgtaaagtcacataaaatttagaagcaaattatcttctgtctagcaagtcatctttaatttgaaatctttctctaaattaagatcagtgaaagtatatctgataatgtttagcagatctgtatcttaagagaaaagctggaatgatttccttggaatgtcctttttttccgaatgctttctctaatccagaattaagtttttgaaagtataagccctatttttgatgaagaatatgtgtctgagttcagttagtctagaatacagctcaggtagaagaaattagactgagaccaaaaatacaggtcaataaaaa

SEQ ID NO: 50807 - DNA, 859 bp, Bovine  19866881404460
  misc_feature (1)..(1): n is a, c, g, or t
ncagcaagaaaatagtttcatgaaatgttgaaaattcactagcatttagaaaaacagtaaaaatagtttcaaaaaatgacttgaaacataattttcaatttcagttccttttttaattcattaaggccaaatgattcagctaactttgtcatttttcagtgagaagaaaccacagtaggagacctgaacaatggacacgtgggatagaagaaggttaagaagcagatagaaggaaaaaagaataatgacaaaatgtgtgatgatgtatataatcttatagcatatattgtgaagaataaagcaaggctaaggttcgtgaacatcccatttagcaaatgatctctaagaaatgcttactcttgtaccaaatccacctctacctaacctgtaagcaacctaagatgcaggatgtatttgacttttgagggtcaaatgagggtaaaaagtagatcactgaaagtcaaatcccgagcttggtgcattgaaattgccccagaaaaggatcctgttagatttgttatgcaggttgttcgtatctcttctagccctatcctcaatgagtccatgcttggttcagacaaaagctctgaattaaaagtaaacaggcaagctatcaaaatcaaaagcaaacacacacacacacacacacacccacccacccacacagagcaaacttaaaagctgaaggaactgatttaacagacaatcagctgccaggagtacattacagagtctgaggtctattgcaacaacagtattgacagaaagctcaaagaaaacaatgtccctttttagccagagtactgtttctgttagaacaactgtgtctgcaaaacactctacatcttggcaccactgt

SEQ ID NO: 50808 - DNA, 1727 bp, Bovine  19866881418248
  misc_feature (1)..(1): n is a, c, g, or t
ntaaaaacaccagcaataatttgtttatcttaacataatcaaaattctgtgctagaagccattataataaataaataataaagatattcttgcaagagatttggcaatgtcagtagcttatttgttttgtttttctcaaagcaaactaatcaacagctgtgaccacacacagcctaagttagaaaatgaaatattgacaactgagataagatatataatatatactttataaatgtatcaaggcttccatttagttattatttcagagcccaaatgttctgaacacgcttgctaatgttttaaaaacttctttagatagactgttttgagaaagatcctgaagttctgtggatatgaaatctttgagacatttttctattgtggaaagagagattttatacccgattcctgtgtgtgttcatttgcacgtgaggtgcacatgtctacacactctttaacaattgtctctcagtcttctctatgaatattttagcaagagtaaacataaacctcattatggaacagcttggattgcttgaacatatgaccaatatggatatttgtgaatctttgtttaccatttctatgtctttcatctaaatgatgaaacatatctggggtacaatgttttgaaggaaaataaaaaaatatctttttatccccaccccaaatatattttatccatctctgtcccagcatctgaaagggagaaagtaagccatctggaaaagtttgtgagaattatagcagttagatgaaggatacagacatggctcagatggtaaagaatctgcttgaaatacaggagaccaggttcgatccttgattgggaggatcccctggagaatccactcaaatattctttcctgtagaattccgtggacagagaagcctggtgggctgcaatccatggggtcacaaagtcagacatgactgagtgactaacactttcacttttctaatctaaaggtaaaagaaagactgactttaatggaaaagtattttcttacagtaagatgaatgaagttccttttgaaatgaagcaggaagaaggactagtaatttcagatgcgtaagtagagatgcttcattgtcttaaatttatgggaattgttttcattctctgggttggtgcctcaaatgtttgaagtgttaaaaggtcccccaggtaattctaattgctagctatgtcaaaagccactaacctggaaaagtaggtcttagatttgccaggagagaggaatagagttgaaatacagaaattgaggaagaaaagaaagggaaagagagatattgatggaaaggagatgatctggaaatatataaagcattaatatcagaaatcatatggttctagctcttagtttttgattcctcgggactttaagtggcctaggatatccataaaatgtcttgtcccatgtattagccctggatgcgatcttgaaacataaaaaggcattaagagattgtgggataatatgaagttctaatctcaaagagatatctgcattctcatgctcatcatagcatcattcatggtagccaaactatggaaacaacctgtgttcattaatgaatcaagtatttgtggaatatttttcagcattaggggcttccctggtagttcagtgtggcttccctggtggctccgacggtaaagtgtctgcctgcagtgctggagacccgggttgatcccgggtgggaagatccccggagaaggaaat

SEQ ID NO: 50809 - DNA, 1274 bp, Bovine  19866881421801
  misc_feature (1)..(1): n is a, c, g, or t
ntgtaaaatatatgccctgagtggaagatcttaaaacttcaatgtttctgcctaaaagagcagtctcaagacattgtgactgttctgagtcaagtttaggaagtaactgaaaggaaaacttacacctaaagttaatcagtcactttgaaaatgacaatcttctgtagaacaacaaagtgttagtcactcagcggttgtccgactctttgcgaccccgtggactacagcccaccagtctcctctgtccatgagattttccaggcgaggatactggagtgggttgccatttccttctccaggaggtcttcccaatccagggatcgaacccaggtctcctgtactacaggcagatcctttaccaactgagctacaagggaagcccaaggaagttaaaaaattgtccataatggtgtcaaattaattaaaggatctgaatcttctcactgtcagaaaattaaatttcagtgtagcattttggtcattcattctcaactgctttaaccaaaatgttatttgcagtagttcaaactataaaatttttataggcagcaaatgtgctttgttgaagtatctatttatacagctgatgtaatcagaagaatcttgcctacctcttaacataatcttgtaatcgacaacattgctacctgactacatctattcatcttccattctgttgtaataacacaactgacacctaagaaattattctttgatctttcaataaactaaacctgtgcagacagaggagggtgaaagaggttaaattggcattgattatttaagacacattcatcatttatttaacaatctccctcatcataagaactattgtgtttataggcctttgctgagacactctgaaattatttttaaataattcttgccacttgcattagaagtcagagcatgttgtactttaacattagttttaagactcttgataaatctgtggcaggctagaagttgtttattgtacaaacctttgaacttaatcactgtagtgaatttggaaatttggaactttcttttaatagttttcattataattaatatcttttgggaaattaatatcttttgaaattttgaaatttcttttaatagttttcattataattaatatctcctggggattctatttcccatcttaagcaaaatgtgtagtaacagctatcttcacaaggaaattatattaatagatactgtagtctcttatagggcttccctggtggctcagagggtaaagcatctgcctgcatgcaggagacctgggt

SEQ ID NO: 50810 - DNA, 1343 bp, Bovine  19866881442866
  misc_feature (1)..(1): n is a, c, g, or t
ntattagcagctctttctactatagcttcattcattctaaaccttcagcattctttcatggaaaaggagatagtaaagtgcatatttctgctttttatttaagcatctttataatggtataaagtgtcacagttctttttttttctttccttttttgtgtttttgtaaatgattcacagatccttctcagtgaatgtcaccgaattacgtatttcttttgtcaatagtgaagaaaaaactatacaaacaggtctgtacctctgaatcatctttaacaccatattaagatgaatttacttggcatttattgctaggcacaacaattagcatcacgtgatgtatcgctatagcactctataacggaggtaaaacaatcatgattttctgatggatgctggcatgggaaaagagaaaagacataggtggaaatgggcgatgaaaatagctcattctcaaagtctgatggcacttaggagattctacatattaaatttacatatacatctctcattgacaaaatgttcatgttaaagcagacaagttgtcacagaaatctcctgagatgaagagcaaacatctgactctctgcaaggtgcatatatttataatacaggtaagccagtttgtaaaatccatgttttctatctaaaaatttacagatcattttacattttctaaatatgatgacttgagaaagaaagtggttggaaagttaagcttgtttaaattcaatagaaagagtatttttttaatggattttttttccttttcaaggaaagaggtctcattagctatgactaaaacacagctgtgtatgatataagggtcctttgaacaagtctgtaaaggaagttaggatttaagaaagcttactgatttggttaccaaagtgctattattattgctaagtgaaaataaacttaaataagagccacttctagtcttgccccagactttgagccattcttgaagcttcagcacacttggccacattgcactgcagttttcttaaatgggctggataatgacaaacaggtaaggaaaaggcaaagagaaccatttactacaaacacactgtaggtaatacacaacagtggggattgcatattgaccttggggcatttggtctcagtcagcatgccatgctacagcacagaaacagactgtcatgtttacaacacagagctgaatataagagactcacataattgcctggcgtagtaaggtacaggagcacttccataagctgtgccctgtaaataaaacacattttttttggagcaagtgatcattagtaacagtagaatatggtggagaaatgaataaagaaaacgaaaagaaat

SEQ ID NO: 50811 - DNA, 687 bp, Bovine  19866881464577
  misc_feature (1)..(1): n is a, c, g, or t
nttcttaatcccaaaatggcttaatacacaattgattgatttagtaatttaaaacaataattaccaaaggtattttatcccaatttttgctttcttaatcttttctttccagataatttttaaacattattttcagaaaatccctacatgaaatttctctttcagtgatttcttttggctttcaaaattttgaaagggttaaataagtgtaaacatatggttattgtgtgtaaattgaatttcagttggagaaaaaaaagcacattctgaaacaatgattctcatcgaatcttactactgctacatataaaattgaaccatttaataatttggacaaaaggcttcagaattttcagactaatatgaggaaataatgagagtcacagggaatttttttccagctcactcctaacattgatcagcagcttggtaaattctgctctgaatatgctacatagtaatttttgttctttttttttttttttttttcctgttaggaacctttccctgaaattagcaaaagacattgatcaggaagccagatgttcccatatcaggggagtgcctagcagtccatcttcagattggcccctgccaagtgtggaagaaaatggaggcatagattctctgccattcaaactgatgttacaagactgcacggccgtcaagacattattattaaagatg

SEQ ID NO: 50812 - DNA, 561 bp, Bovine  19866881756748
  misc_feature (1)..(1): n is a, c, g, or t
nttttgattttaatctaagtgactgaattacagtggcacgtttagggactgtcaaagttgtacgaacccgagcttgaggcaaggatgatttctatacttcccaaatcacatcaagtataaatggttcatcattcagatttaactcttatgatgggaaaaactggcttaaagagagcagaaaataaaaacaaacaggaattcccaaattttaattactcagaatatttaattgtccttatacagctagatctcaaatctgtgaaattgtgttaacttctaaattttaaaaaggcaattttatggaaaagcaggtaattatttaataataactttaaaggcatgagttagtgtcaaggcactgcatattcaagtaggtttccagctgccattaattgaaaaaaaatcaatacatttttcactattgctttcaatcaaagatgcaaataattatttgaggcacaaaatacaaatttatgtgctaaatttgctcttctgtgaaaagaattgttgttgtaaatgtattgcatgaagtgcagacaattccatcataggcttctgtta

SEQ ID NO: 50813 - DNA, 1222 bp, Bovine  19866881778679
  misc_feature (1)..(1): n is a, c, g, or t
nttgagagagagaaaagtagaagaaaaaggaaggaaggtaaaaagaaataattaggtactatgatcccatatgtcactgcaatttgcatattgttccttccacatacaaaaactactcccaataaggaaaataccagtaattgaaacttttgttgtatttattgttgttttgaaaagttgttcagtcgtgtccgactctttgcgatcccatggactgtagcccatcaggctcctctgtccatgggattctccaggcaagaatactggagtgggttgccgtgcccttctccaggggatcttcctaacccattaacttgggtttcctgcattgcaagcagattctttattgtctgagccaccgtggaagccctttattggatttgcaggagggagcaatttgttccattatctcactttctaaatagcagtatttctagggaggatagacagatggacagactgactctagtgccacaagcatatttgcaataggcatgtgaagaaagagagagtcttctctcatttaattattcttagtatttattggggatttaacgggaatccctcctcttttaatgtaaaaagcatttatgataataaaagatgagaaattttttcaggagataaaattttgaatatttcctagatgatcatcagtgctacaaatgaagctaattctttttatcaaccttaactcagatctgggctccaggatgtgccaagtgcagagcaatagaataaaagcttactaccatagcaaatccttttagattgtggcttcactgagagaccgacaatcattactaaacaaaaaaaatgctttgtattttatttttacttaatgtcttgggatttagcaagaagtgcattgataccatatttgaagacttagttatggacattatcatatgtatgaaatattaatctgccttcagatcttctttgttaaatgaactatttcactttaaaatttctcactggtactagttacttctttgctatcagtaataaatgtagttttgtttttttttttttccccctctttcagggtttgaacttgaaaagattggagtcagtacaaggagggagagaggtaagaaaatcaaagggagagggatggagaagaagagagaaggggtttcagtgttgccctgatgtggtgggtgatgctgactgatgctgatgatgataaggatgaggggggatgtgttgaaagggattt

SEQ ID NO: 50814 - DNA, 1423 bp, Bovine  19866881797907
  misc_feature (1)..(1): n is a, c, g, or t
ncatagagtacttgctttctgtactgtagttgggatatattaacatttatttttgagtgttactgtgataatttgatgaggtaacatatttgaaatcccttctaaactgtgtcactgcatacaaatatataacagggttactatcattattattagaacaagctcgccatctaatggctatcaaacagataacaggtctaagccttttaaggcagaaatgaaaagagcaatagaacctggggattaaacccatgaaaagactttgtcacaattttgtctccgcgtgtgcatgctccatcatgccaactctttgccaccccatggaagtagcctgccaggctcctctgtcagtggaattttccagacaataatactggaatgggttgctatttcctactccagggaatcttccagacccaaggatcaaacccctgtctcctgcattggcaggtggattctttaccactgagccatctgggaaacccctaatttggtcttcaccgttttgctactcaagcactgtattacaaaacaacattttccacttctgttataactgcttcttctcacaactaaatgtcactgagaagtctgtgaaaacattaggcagcatcaagtcactacaatgtaatttaacactatctctaccactcactatcactgtggtcctggactagtagtagtactcctctgggtctccatttattcacccacaaagcaagagtagcgatgacttctagcaaatagctgttagaattaaataggatagtccaaaatgcttataaattatagcaaacaaagcaaaatagaaacatgttaagtgtctagacttccagtaaacaaacataagtaagtctcagctttttgcataaagtcaaaggcaaacatttataagtgatgctttcgattaagttaatagaaagaaaagccaatttaaaacaaaagcttcagtgtattagttatcttaaaattttatacaaactaattttattaggtcaaatgatttataacaattaaacatagagtcttcagaattagcaaaactgctttggttctcctaggatatgcactacctatataatattttaacaaaattttaattttctcaaatgtgaaaaagactatctcatcgaattgacacatatattcaatatatgttatttattttttcttatattattttacttagtgctataatttgtatgttttgaaataaatgttatgaaattaattgtggcattctatattaaaatttgagaaatactatacctggatgctgggagagactgggggcaggaggaaaaggggacgacagaggatgagacggctggatggcatcactgactcgatggacgtgagtttgagtgaactccaggagttggtgatggacagggaggcctggcgtgctgcgattcatggggtt

SEQ ID NO: 50815 - DNA, 1276 bp, Bovine  19866881819870
  misc_feature (1)..(1): n is a, c, g, or t
natgcatatcacttttgcaccattgtaaagctgaaaagttgtattaattagttgagccatcataaatacaggactgtcaatataaacggcatcatgagttcatactgactcattcaattcaaatttgaactagagggttttaacataatctttttgaacttatactctcatcttgtttctcttatgctgaatatactggttcttaatctttaataatctgtgtatcattaagttctccatttggtttatctcattctatataaaactcagtttcagtattcatgatcagtaccacataaacaatatgattatcaaatacactttgttttttgtttatgtttgcatctgttttatagttgaaagtcatgctataacttgtcaattgtcagtaatcataattagaggaatgtcaaaatatagaccatacatattaattataatctttagtttgtaagaatgagattcatagaagtttcctagtaaaaggcagattttttgtgtgtataagacacaggtgtcctggcaatagaactgaaaattaagcaattcttgagattttatttctctgactctttctgtagtcatttttctggaatcttcacttctgttttcatatttgttgtcttctctctttgccagtggacttttccttctagtcgcagtttctcccccccttataatgttgtcttatacagaaaatattatagccactctcacacattactatggcatggattttcatctttccactaccagtggcttcccactctcaatattacctggtcattatctttgggttattagttacctcatgtgttggatgtccttgaaacacatgcactccattaagcccgcatattatcctagagaacatcttttggaactggttcttaagtagttgtgaatattttatacagagctctgtggatggcaaatattctaacgcaagacctggcgagtctaacatgattgcaggaaatgttttgaacagtcaacatgtcttagttagttagtttgaatgatatttattcttagcctctttttattctataaaatatatgggaataaatgcagtatgtacaattttattgtgtgactagttggtaaaaataatgatatattttcctatgagtagttgcattttaaagaaagaatttcttaacttgtatgaagtaattttgtttcatagctgttattcccttctattttcttcctagggtgccagatgagataactagaactcttatgacaagcatgtggtcagatccataactta

SEQ ID NO: 50816 - DNA, 1574 bp, Bovine  19866880411358
  misc_feature (1)..(1): n is a, c, g, or t
nttgatgtctgtaccatgggagtgattaagacatggatgctggtaatttgaagaagtgcactgtcaccataagaacctgtcttgtgctaaactcttgtttccccacactttttttctcttgggtttgattgacttctttttaaggaccaaatttagtagaatgaatatgttaatagcaaaaaaaattattatattttgatccttggtttaaaaatttcataaattataaaatagaatgaagattcatatcctttaatttcttccttgtctttttgtctcttccccctcacccttaatcttaatgtcagaatttctttctgatgaacctattttcaactagagatctgtggaatctgatgccttcattctaacatctgtttttcaatgccttgcaagtagatgatactttatacatttttttggttactatatacttcataatgtttggaacaaataaactcaagcaacagattgatagctaacccataaacacatcagagatgtccaaggagagtgtgggataagtgatgaagattactgtggtttagaggaacgtgcctggtagtccagtggttaagaatccacacttccaaggcagggaacaagggtttgatccctggttaggggacagatcccacatgccacatggtgtggtcaaaaaaaagattggcaagggtatgggcttatgaaacagataagagaggctcctgttgacctaataaaaataaactgatgaaaaaaattaaaaggtagatcaactgaaaataaacatggagaaaagttgtacaatctggtaatcattaaaagcttcagttgcatagagtcaagaggtcagctgcaaatattagaaaagctcgatgtccctttcacgtgctatcttcttgctatttgctgatagtaccccattcacctatcaaaacaggtcagatagggaagagtccaattccaaacaattccaaacaatctggaattgttaaatttttcagcgtgtgagaccagaagtataacttggcaaactgagaacacaaaatgcttcttgctctattcattggtctaaaacatccataagcctttgcccagtcttcagaataaatttccatcccaaatatgggaagacaacagaaacttgcttctcaacttccaataaagaaggattcaaagggagagattttttttcccttagagatatggcctttgtgatattttccagcaactggtatggttggagatatttgtcaaagagttggttgagagaaacactttataaaatgacatatgagaataagggctattttgagaaatctatggacaatttgttaacatgttcagtataaaactggggcttctggttgcatggatttttaaataatagcagtttattcatgctttaaacagagagctgatatagcaaaggcagagaaaaaagacatgtcaaaaagggaaactttttttacatcagcagttggtttctaagtcagtgcaagtagtttgtttaacaagatgcaggctgtagaaagtttgagaatatttacactgaacacacaattattttcttcctataacatatgtgcccc

SEQ ID NO: 50817 - DNA, 1156 bp, Bovine  19866880728151
  misc_feature (1)..(1): n is a, c, g, or t
naaatttacttgttttaaaaaaatcaaatgctggcattgtccagaaaaatttaacaggtttatttataattgttataaagttgaactgctgaaacttgttcactgaaacattttgactttccttaatgctttatgtccccgcatttatattaaaaattcacacacaaatgaaaatggaaaaactgccaatacctgatttctgtcccctattttccacttgcaatcatatacttaggtaccttgtgaccccatgaaaaaaaaaatatctaacgttcagaactaccaataacaggaagaagagaattttttttttttcaaagaatgaaatgtttcccatcatagtggattcttaagcacgttctccacatttgcggcatgctagctgaatgtcttttggcataattgttacacgtttggcacagatagcacacaggttggtgtcttcaaaaaggccaaccaggtaggcctcacttgcctcctgcaaagcaccaatagctgcactctggaagcacagatctgttttgaagtcctgagcaatttcccgcaccagacgctggaagggaagtttgcgaatcagaagttcagtggacttctgataacatctaatttcatggagtgccacagtaccaggcctgtaacgatgaggtttcttcacccctccagtagagggcgcactcttgcgagtggcttttgtagctgcttgcttcctcggtgctttaccaccggtcgattttcgggcagtctgctttgtacgagccatggtatagagacctccttacttaccccccttctccttcggctggagctcggcgagtagaggcggcgctggtgttggagagcgacggccagggtttgtttttaaaatgattgtcaggttagaagacatttgctaattgatggtctgcacagaaatgaagttagatgttacaccaaattagagactccaaattagagacctactaatccatttaagagcttccctggtagctcagatggtaaagaagtccctgccaatgcaagacatgcatgtttgatccctattttgggaagatcccctgggagaagtgaataccaacccactccagtattcttgcctggagaattccagattgcacatcaacagaaagccctctagcggtgaacacttcttggtctg

SEQ ID NO: 50818 - DNA, 889 bp, Bovine  19866880736312
  misc_feature (1)..(1): n is a, c, g, or t
natattgcttagtgatacatgtgataaaactatgatgaaaagtgaggaatttattatagtagaagtcagtatagcaattactactacaagacagaaaatggtacgtgatgtaggagagatgggaagtgggagtgatgtttacagtactggtgtttttctttctcttaatatgagtggtaatagcaaggaattccattaatgattgttatttcatctttcatctatctctcctagacatatttcacaattaagtagagctaaaaaattatatgacaaaaatatctttgtactaacaaactaattaggagaattgctgtagaatgtcagcttacttggcagtgtcttctgggctatttcatataaattagtacacacctaaatgactaaatcactctgaagacaagatttgtttagagagatttaatatagtatttgaaaagataatccttgaaagaagaggtttatgccaaagtactaattaatattttgtcttaaaaaattattgcagtggtctgtcattactcttttctcatataaaataaggaaagttagaaaatatacatttgtaatttagaataattgattattaacaaagtattccttcttatgtctctgttacttttcccagatattaaatcccaaacatgcttcttggtttgtttgttatgctagctatgctgttaggatttaatcaaatgaatgtcaacagtgagcaaactatcaccaaaggccattgtgaagctcccctcaccacaggaaatctcagagacacttgatttgaattctctcaagttcagaaataataaattcagccccacaaacttacagagaatgagtcatttaaaaataaatactaaaaacccactttcagaaaaattcagagggcaga

SEQ ID NO: 50819 - DNA, 1177 bp, Bovine  19866881173378
  misc_feature (1)..(1): n is a, c, g, or t
nttcgagtcttctagggtgtctgaggaagatccaagggcctggtgtggccacgtactttcttttggcacccgtgtgtcacgttcctctctctccccaggttacctgatctgcagcatgattttccttctcatggtgatgttagccttcttcccggtgttcagcttctggtggctgagctattggctgggccagggctcaggggtgagtgccatgtggggggtggggtgcatttctgtggacctgggtggaatgggggaacttctttttccttggggccccatgggtatgggttagagaagcccatggcaagcccagtacctgcccttgccatgctgatgaatggggccctagagggaacccttgggagctgaaactctggagcgccctcccaggtgggcatcctgtgttcacagagcaagaggtcacctgtacagtctcctaggaacaaaaccaagaggcctctgtccccaaacagctcttgacaccaagaatgctttacagtctgctctaatatgagttagagaagggaaaagaagttctatccatcactcctgacagcagggaaagagctgagctccagtatgacttgcacagaagtgatctgggcttttgaaagggagaatgagagaggagggaaagcaggggctctgctgggccagagaatgaaaaagtacaaaaggctggtgagtgtcagtacaattaagctatcagtgtctgcagccagctttctcctcccacagagagtgggggacagaggctctgtcctttctgaggattacattttaaaggaatcattctcagatctttaagaaagatgcttctgagttgcaagagatacacagtcacagctgtgagtgcttcttagtaagtcctctgaggaagaaagatcaggggcctgccaggaaaacagtaaattttcctggcagaggcactttaatgaaggtggggggagctggggtcctccgagggacataccttagcctctaggagccacgctaaggttcggtcaagtcttttagtgcaggagttcggacagggttgtttgtgttgagggttctggagctctcagccattatgtatcagattaattcattaatctttccaacctcattctgaggtaggtatcactgtccccattttatatttgcagaaattattcttagagaggagaaggag

SEQ ID NO: 50820 - DNA, 2414 bp, Bovine  19866881341048
  misc_feature (1)..(1): n is a, c, g, or t
ntaaaatagtatatattttggatattttactttcctttgatattttgactcttggaatacagagtagtcaaaaagaatggttgtaatattagagttcaatgtaaataaaatcatgatataaggttcgatgcacgatactggatgattggggctggtgtactgggacgacccagagggatggtacagggagggaggagggaggagggttcgggatggggaacacgtgtatacctgtggaggattcatgttgatatatggcaaaaccaatacaacattgtaaagttaaaaaataaaattaaattttaaaaaaatttaaaaaaatcatgatataatttaatgccatttaaaagctatgaaagacttgcatttgtcatttaatccacaaatttataacacagaacactaaacattgtgaacgtttatctatttcagtgaaattgaagttattttaaagtgttttacattaacttggctttggctccactgtaacatacacaataatctcctcacattagctaattttatctaagaagcatgtcaacaatgaaatacaaaactgaagtcttttagcaacttactaaagagtccttaaggtggtagcgttttgtgttagaaaaaaaattaaggaaagaagtcctgacaattaatgcctaatcaaacaaggaactctccaactcaccaattctcatgccactgctcctccttccccacaaccaaaaaagaccaccaagcataaagaaaaacgtctgatgttaggagagttatgtattatgactgttctcaggggcctcataaaatcatttatacttcaacttatgttcacccctaccatcatatgactatggtgaagttacgctcatccctatagcaccatgcattttatagatgaggtctgagtgacaggaatttaagcatgacttctaatctatctaccatatataacctaaaagtaactatctagaggtttctgaagtttacatatgattaccatatcagaaatagcaccgataaagaatgtggagaccagggccctgctctagaccctgtcataactgagctgtgtcactttgatcgacccctcgtctctggttctaagttgacacacatgtgtacaattaaggtattatgtgagaagatctataagacagccccttgctcctctttaactctacatactcataatttttcctgtactaatgaaatcacctactggcaaatcttacgagatgaaaaacacatctatacaatataaagttactccaggaacatatagtgagacaagatgttgctattcatatgtaaccaagaaaaaaatcatgaattatattgctgactacctatttggatttttacacataatacagcatcatataatataatataaacataatgtaatataagtgacacataagtatacatacatatatctcagccaggtaattctaaccaaaagaaaataccaaaatgtttcaggtcctagacctctccttaactaggtatctgaaaagctttcaaccttgcttttatcttttttgatatttgtgtcagataataaaagagttttttgtacagtggttggtaatcattttgttttcctttaggggctcacaaatacaaaaataccattacctttcctatgttgatatctggttgcagaaagcgaaggcagtctgaataattagaccatgttttatttaaactgtgcataaaatcccatgttccattggggttacagtgtcggaaagcaactcctataaagatgtgaagaaaaacactgagattgctcagttcttatagagtctattatttttaaaaaaggaagtttctattccaaataaatcatttcataaaaaattaaatacctttatgattgaagtcgtaaatataaggaggacatgggacagccaacgttttccccactgttcctctaggccaacagatgagtccatcccattctgggaaacagtttccttctgataaggaaaaaattaaaaaacaaataaacaaaaatgcagttagaaccagagagttaatgcatttaaaatacaaaatttcaagtcactgcctatagcaaaatgtaaagcaaactggtagttttgtaaactagaatgggatggacatatgatgcaaacatctcaaaattcatccacctagccccatcaaaggcccattgctaggaatatttgatttgcataaattaaaactatttagtgattctaatatatatgaatcatagcaatgaatatgtaagaaacaccaaaatccactgagaacaatttcctttagtaaaattctatcatagttgtagttacatttttttaccctaactttttcaaattactgtttaaaaatatgacacatgaaaaagattggaacgtcacaaataagctccaagatctgggtttgccttttta

SEQ ID NO: 50821 - DNA, 1776 bp, Bovine  19866881706379
  misc_feature (1)..(1): n is a, c, g, or t
nttgctgatttctttgtctatgacagaattttccaaatatctgtgatgctgaggctcagggctggttgtgatcaaatgtgccaattggcatattgatcattttgaactagcatttcttaaggaatagccagtgaaagaagggcaatctggtcctcctttgtccccctgaaagcagaaaataaatctcccatgtggagatttctacaggaaaataaaacttccctgtggcaggaggtagagagacatctttattgctagagatggggacttccaggttgagaagctgtgtaaacaaactccgcttatatctttcaggtgaatgtttcctcctcttgtcagttcttcacaaatttattgtttctctacctaaaagatacaaaggttgcctgatttggttacttttctgagtttcatgctgggattccctggtgcctgaaatgtgagagacctgagttcgagccctggatcaggaagatcccctggagaaggaaatggcaactgactccagtattctcacctggaaaatcacttggatggaggaaactggcaggctatagcccatagggtcacaaagagttggacacaactgagcaacttcacctgagtttcatatctttggggtccccatatgtacaaaattaaattggattttctcctctttctcggtttcaagttctagatcagccagaagaactggaaagtttgacggaaaatttttctactccaacagtggtgaacacacacacacacattattatttttaaaataaatgttattgattggaattggaattgccaatgagatactttaatgtttatctacttgaagttttctttacatacctaagtctccctaagtactaagttctgcctacctccaagatgacatgccaccctacaacaaaataaagtgaaacattttagcattaatattaatgtcaaatacttgtctatttttgaaactttctgaataaaataaaggaaataaaaataataagagaataatactactaataagaaagggtataatatagtagaacatcagcatgataaaactgtcttccatatggaaacaaagctgtaagctcttctttctttttcctgtgcaagactcaagcaccacaagcaaataaaatgtaaaaagattgtagctactaattagaggtaaagtttctgacaatttaaaaaattctgaaatcttcaggttttatcacagatggataaaatctaaaaaagtacctttcaaagtatttgaaagagctaaatttggttcattgtagataaagttaatatttcctctccaaattctctgcaatagaaagttcctgatcacagagaaaggagccaaagcagagggagtaatgagtgttgacgctgggcagcatctcatctaccaagctgtcagttttaattagtagatattttttgccatttcatgaaaacaattcctgtccttagcttattactggagaaatcctagataatacaatataaaactttttaaaaaatgtaaattgtctagtagaacacaatttccacaccaagacaaaggggaagataagtatgaatgttttctgaggccttctcaaatgaataaaccaaatgagttttgtcttgaacctgtgctttgagacctctcttcctttttgaaaacaatcacacacacacacacacacacacacacacacagtcagtcactcgcttactcactcttatattactggataagaatatccagaacttgagaaaagcaaaaaggtatctttgattttcactt

SEQ ID NO: 50822 - DNA, 1400 bp, Bovine  19866880386308
  misc_feature (1)..(1): n is a, c, g, or t
ncagctgttggagtccatccaaacgtcagccataacaccaggccagacagcatggtagaaaccatcctggagaccatttttaacctgcagaaaaaagaccacacacagatcgattggccacaatcgtcaactgtgatgatgcaatcatgtgattccctccagggagtgattcaaggatcgcccagggagagactgcaatgaaaagttttaagggtttgcttaggccttatgtgtccacgctacccaggacatcagctgtgagaaggtattaaagaaacaaactgtccgagatggccagttccctgtgtcctcacatcctggggaagactagactataatggcagttctgtcattttttattgtcgtcatagctctctggaagttctgcaccattcctactccaccactctctcctgctttgaaacaaacagaaacaaacaacaaaactttgcttccatcttgagaaagggacagggagagtgacatcttgacttttctagtcctggggaagaaaaggctcatgggaaggcgttggaagacatacatggtaaagaagcacagaaagcttggggctggtagaagagaccatcttagcttagcaaacatggaatacacttgagatcctgggtggggatgaagatacacacagctcacactgccctgcaacttgggaaggaagatgagggctgcttgctgcaccaaatgagagcaggggatggtaggcaaagcctcagcttccttctctgcaaaaagggacgagaaaagcatctgtcttttagggtcactgtgaggatacgtgtgggagcatgtgcaagagcactgagaacagtgctgggcacagagacccccagattgctgttattatgttggcaatattacctcactgttttggaggttggaattggggggaatcgaaaggtgatgagagaaaacagaacaagtgaaagaggtgaaagtctggggagtcaacctgtcctgaacgttggctcctatgcaaccaaaagcctgcagaacaagagaacaaatattcacacagattccttctgcagctgctggaccttagggcggacatctcaggcaggggccctgcaaaccctcttctgccatccttctctgggagccggcggagacggaggcggcgtgcatttctcccctgaaaaggaaatatttataaccccccaattctatttctgtaaaggaaaggcttttaagaagccactctcagatgtaaaacctttttctacaaagagctgagacagcagagcccgcaatctgaccaaaaggcagggatccgcctctccggccatctccgtctttccctccccggctctgcacgcaggatgtctttgtttcatttacacccccagccaacatcgttcagatctgatgagctacccaac

SEQ ID NO: 50823 - DNA, 1869 bp, Bovine  19866880706634
  misc_feature (1)..(1): n is a, c, g, or t
nttcaatccctgggtcgggaagatcccctggagaaggaaatggcaacccattccgggtactctttcctggaaaatcccatggatggagaagcatggtaggctacagtccatgtggtcgcaaagagtcagacacgactgagcgaattcactttgactttcacaggcttagtcgccttgcagcttgtggaatcttcccagatgaggggttaagcctctgttcacccctactgataggcagattcttatccacttatgcatgttttatgcctctagagaagcctctaaaactgtcttctgactttatcccctgggcaaacaggaaaccagcttggctgcctgggtggcccttcaggtaactctccccatagatgtttgtggccgtgcacccctcctccctttcagaaggtggtccagccttgtgggtcctcagggatgttaggtttcaccactaatctgacctcttctgctaattctcccatgttctggtctactggtggcactttttctagttttccacggcatctgggtgtttttttttcttatttttattggagtgcacttgctttacaatgttgtatcagtttctgctgtacactagaatgaatcagctatatgcatacatatatctcttttttggatttccttcccattcaggtcaccacaaagcagtgagtagagttccctgtgctatgctgtaggttctccttaattatctactttacacatagtatagtgtatatatgtcgatcctaatcccccagttcatcccacccctctccccctttggtgtccatgtttgttctctacccctgtgtctctatttctgttttgtaaataagaccgtctatacaaaggatttgtttttatatttatcctgctatttcagagggtctgaaatagagagttggatgttgaatgagtcatcttaagtccaatgcatgaatgaatgaatgagcaagggctcctggaggagtgggggtgtcgaggagggccggggtctgtgcagacactcctctgaggcagggatgccatgagggtcagagggcatgcagtttggataggaagtcccacctgtgtaagagcacctgtacctcaggtgaggccagggtgttccctgaccctgtctgttgtcatccaggagctcagcgattggtggaaatgctacaggtccctgtgggggtggggggcagggatatcagcccctcctttgggcttaatttaaaagatgtgtttaagccaggggagggcagaaataatcgctagaaggaaagaaaaggtgattcccacaggagatggtgagggacagggaagcctggcatgctacagtccacagggtggcaaagagttggacacgactgagcgactgagcaggaacaccctggtttcggtccagactcttcaggaaaggtccagctgtgtctcttgggcaccaggcccaacatgaagagggaggaaagaaaaagctgggggcaggccagagacccatctgaccacatgcgggggatgctgagtggaggctgggagcagtgcccccccaacatactcacacacatacacactcacacacccgccctgggcctgattgcttattaacacccagtgggtcccggctgcctcctcaggaaaaacaaacctttaaagatgtggtcccggcagctgcagggggccggggtggccacggagcagatcagggaaggaaccttagatcagctcatgttttatttcaaacaaaacactttcctcctgaagccagagagctccgtgccttggcaaactcataaaaccaaagctaacgctgtgaggcttcgtgggggagtctggccacaccctccggatatgggaaaggctttcttctctatttcaaatgac

SEQ ID NO: 50824 - DNA, 1707 bp, Bovine  19866880801089
  misc_feature (1)..(1): n is a, c, g, or t
ntggagagggttgcctttcctcttccgaggaccttccccactcagggattgaactcaggtctctggcactgtgggcatattctttaccatctgagctactgtggctaatccagagagaagacctggaggtaagacagaaccaggagtggcggttggtctctgagctgcttttggcagctgtgcagcaatggagaaaacagtcacaacatcagatccaacacagttatcgggaatgtggatcctgttattaagccaaatacccccagggtgaggcttccaagtcctgggctgagacctggctgccagcctgcccagcacaagtaaggccccactcaccaccagcccctcttcatctttggggatttagtggccctatggaggatgcacaggggcctgagaagggcacaggatcctctacacgcatgtctgagaagccccaaacatgtgactacgcaaagatttatagtgcaaatgatcatgagtgagacagaggctgtctgtctcacaaagaaccaaggtctgtttcagaatttgtttggaactagttagtttattcttagaaactccaaagaagacaagtttggtttactccctaaatcttgtcctcatcgggatgtcagagaaacagtaaggagagcaggaaaccaaagtcaggctgtgtgcttccttaacctggagctgggggtgcaggtgtgggtggggggagggcaggaacagttccacagggcaccgtgctgtctaatgctcaacctcaccaggccggcatccatccttttcaggtctttgcagaggggaaaactgaggctgagagaggccatgaacttgtctgtgtccacaggaagtgccagggtctcctatttctctccaagcatagggtctttcgttcaggacccaattgggccattgcagttagatgggaaaggagagaagttagggcaaaacagcttggggttctttttggggggacctgacctggccaggctggattaggaacaaagagaactctcaggagatctgagcaccacatgctcctcaccccacaccagtggctccaggcagagctgggcagggcctgcaggcacccaagtcgacagagggtggggctggaccgcacatccctcttgcccccgccccctcctcccgaccaggggggcctgaatggggggggaacccacctgcctgctccagggccaccatggtcgcctgttcgatcaagtctcgttccacgaagctccggaagtcctcgctgtacacactcaggtctggaagctggaacgtgtagatgggcatctccagcgggaactgctcgctgctgcactcgctcgccacgtgggaccgcgccaaggacacgatggccgagctggcgtgggagatccccctcgaaagccgcttctctgcgtgggggaaagtgaggggggttgagtgaggggggctctatgggcgtgcacactagcccacatgacacatcccacatgtgtgcacagcagcacacaggatgcatatgcacatgtaaacacacatggcacactcatgcagcacacacggacacacacacatgtacacacttgccacacacacatgtacacacttgccacacacacatgtacacacttgcctcacacgcagaggcacacccatggacacctgcacacccattacctctccctccccagccttgctggcctcccagtgttctcagcaggcctc

SEQ ID NO: 50825 - DNA, 1391 bp, Bovine  19866881173902
  misc_feature (1)..(1): n is a, c, g, or t
naagcaggcagggcccctaagtggccagactgcctatcactcaccatacagcttagattagtatcagtggcaactgtgtaatgaatccacacttactatctctccccctagtgaaaacctgtaaggttcgttactctaagatgctaaccccccagctcccagaccctcccccccatctcagacgaacagctcagctggccaaaggcccaggcaaaacaccactgtccgccaaggacatgcctgggcctcccaaggccctggtcggccccttctggcggctgagtgctgaggtttgtgtgtaccttttatggttcctctctgtttcccaacactttcttgcaaaaacctccactcttgatctgccattaactttagcttcttcctctagcccccagacactttatcttttttatttagtgaaagtgtgttagttgctcagttgtgtccgactctgagatcccatgaactgtagcccaccaggctcatctgtctatggtatttcccaggcaagaatactagagtgggctgccatttccttctccatttttaaagtgagtgttaatatactaaaagagttaaaaacaaatgagctcagaaaaggaatgtacaggggaaggaagttcctgtcctgctcccatcggaggaggatgacctccaacttaacccaagggtataaggagccccgtcctgggccccagaccccctgccaggctgcctagctgtcaccctgctggggccccaggtgggagccaggaagccccccagctcctaagccccctccctctcccacacctgtgcttctttccagctggccgcgtctgcaggacatgggccttgccagaagctccttccgagacaggacccagcacaggccaagcctcataccccccagtgagtgaccgccaatttgggccccaaactatttcttgcaaagcgctttctctggctccaggaggcaggcctgtgctcagggaccataggccacccacctgtgcgggacaggctacggcacagggacacttaatccaagcctcaagtctcagcacttttccaaacaggtcaccttgggacagactggccgatggccacggagggcggccaagttcctggttagcaagtgtttttgcgtgatgaacttgagaaaaggagaacaatcaacagatcactcccacccccactccctctgcatacagtaaaaacctggagtgtggctccccaatccatgctgcaggttcagaatgatgtcatgcagatgccacactgggccaggctgccctcactgtacacacaaggcccatggtgaacagggaggacacccaccccatccaccgcactgggccaggcccgcccccttcactgcacacacaaggcccacagtgaatgggggagga

SEQ ID NO: 50826 - DNA, 1444 bp, Bovine  19866881248608
  misc_feature (1)..(1): n is a, c, g, or t
ngctgcatacagagcattttctggaacaagcactgcaccctgcatgggaacctgccttctcagagctcctggggactggattggtgaggctgagctttctggggtgtggggaagctgatgagccaaaggcaccagggtagtgggccaccatgttgttcagtcactgtcatgtctgaccgtgacgccatggattgcagcacaccaggcttccctgtctttgaccacctcccagagtttgctcaaattaatgtccattgagttggtgatgccatccaaccatctcatcctctgttgcccgcttctcctcttggcttcaatccttcccagcgttagagtctttcccaatgagtcagctcttcgcatcaggtagccaaactacttgtcccctgcaaagccttctccccctcccccatgtaaggcctgccagttctgagctgtctaccccttgggccagttatatccaaattcttaaactgggccattttggttccctccccttccagggccttgcccatcagagaaacagttctggcaaataatgaatcataaattttatttcaaaatgtaaacgtcactaaacatgcatacacgtgaaaacaataaaatttacagtttcgttaatttttttttctttttgcataggacatcattacaatatagaatctatgccttacaaaatacatacaaagttttatccgagcaagccaaggccagattgggaactgtacaactgtaatacttcactgtagtgatctgggaaagacgagacgtggccttcggaagcatggtgtggtgctggttaaaaaaaacaaaacaaaaccaaaagttcctacagaaaagtgtgctcgatggaaatggtcttggacccttggagtctaccatggggtttggcaaacaatcccagagaagctccatcaatggctttgggacgaggaggggtcgtctgttaagtctagggttgctgagacccctagtgcacccagcacacagagattcccgggtggattcctggcctgtgggagccataaaggctctacccccaacaatgcacagctgctcagctaccctctagccctcagggtcctcggtgcttggcacagggactctccaaggtaagcctcctgcccacacgcccagagacaggcaccctgacccaggaatggatcctgggaggtggccccctgctccagggatggcaagctggcctgggacaggtgctcctgggctgagtaggggagacagccttcacccagacctctggttgcctggcaggtatttggcttggtttccaaacaaatatgtgcagcagcctgtcatcatatcaccaggaagacatcctggagccctgggagaaggctgctcatgcacccctccccaaccccccatgtctcctgtgtcccccacagggaatgcaaaggtgttcagggtagggggaagcaacttg

SEQ ID NO: 50827 - DNA, 1966 bp, Bovine  19866881539268
  misc_feature (1)..(1): n is a, c, g, or t
naaacacgggaggcagatcatcttttcattggagccagcttctccttctccagaaaggatgcttttccccgacataaagagcagcaaaaaaaaaaaaaaagattttttttttacttgtttgaattattataataaactaatttgaatatctcctgtgagtaattcatttttgtttttaattatccacagcaggtggagttttcagtcatttattcaagttttacataagtggttctttaaaattatttattaaataggaagttaaattttttggaagttttacttttcatgctaaacaatactttcaatgtgtggtaatcactaacattcatgaccctcatattactggggtttcttttgttgaaagaaaaaaaaagcagtttttaaaaaaatctctcatcaagagggtttgtggcagctttttgaactgattcttcacatcatgctgaccaactgctttgccatccaaagctgtgaggtcacaggaaataaatactgcttcgcgtgtagatgccggctcctgccctgcatctcacagaaggtggaacagccagcttggaaagagcttccctgtgcattcataaaccaaacacataggcacagcaagtcaaggcagaaagtaacttcgtgtttgttttttaattttttaacatgaaaacagccaaacagaaatttccaaaactggctatgcaaatattttatctttctcatgttctccgccaagttaaaaaaaaaaaaaaaaaactaaaacaaaacagaaaaaaaaaaggcagtctattacaaaacagtctatttgtaatacgagaggaagagctaggcagtgtaatttgtacgtattataaaaaaccagtgatctgttctagctcctcgaatttcagtcacctctacccaacccccatctgacatatgtgccataaataagagccctgagatccaaccccaaccctagcccccaggctcctcctctctccttagagtagacaacccctctgtctctccattgtggtcactagccactccatgtgcagagcaccttgtgggttgtcgctccctggtgggggacacgatgcccttggtcagcattgtttacaaacagccatttcctcttgtgagagatctggatctatccttcctctaaacagtgttaaaaacagaggccccactgttgcgctaaatgtgacggtccagcccctccgtgttcacaagagctttacccctcattcctggccagacatctcttagaccaaatgaattcatcaggctgcgcgagaaccattagaaacagctgtgtttttcacatgtgggtcaagagatcccttaatgtccttctgtgacctgggggcccttggtggagcgaggggaaaggaagtggggtggggcactagagaaaaggaaaacagccaatctatgttctagaaaggccatgagccccaccagggcacaggtccccgacgcagacagtcccacctgtgagctgtcttcccctccaacctggtctggccaaacttccctttctgggaatgttggatgtctctacgtgacagcaaaattccagaaggaaccccagatacttctaaaccccagtggaggttatctcagtcatttgcttcgcactttctgcatctgcgtgacctgggtatatgattttttaaaactaatatattgtgaaaggaaggcgtttttaagtgtattctgtttgtagattttatgctatgttgatattttacaagccaagtttaaactgtactatagaaattatttttatattattttcagaatatgccacagagcaatattttgcacccttatattgtcacgggggttgtccccttggagggctaaatttaggttgggtagggctccggtgtggactctgggggatgaaacactttctgctatgtgttcacatctgatctgaaagtggaactctgtgaatgtctcttcctttttccatggaaagctcgat

SEQ ID NO: 50828 - DNA, 1224 bp, Bovine  19866881798109
  misc_feature (1)..(1): n is a, c, g, or t
nctgtagcctcggcgctgctgatgctgctccgcctgagaaggaacgtggcatcacactccgaggaggcccgggaccgcgtctgtatcaggtcagacttgtcgattcccgccaggttttccagcgcattcaccattctgttagatagttcttccagttgggagaggcgaaggtccacagtctgtagggaagttttcataaagttttctctttcgttgatttcctccaacctcattgacatgttttcaactctagtgaatacaaagggaaaggtgtattacaccgagatgaactaaagattaaaaccaaaaattaacgttattgttgttgtatgattttttcaggctttggggaatcatgggactcaggcatatttttaaacgtcacacactcctaatataaccacctaaaattaccctgaggaacatcaggaaacaacagaagtacagttaacacatacggtgctctttaccattcatcacaccaagtaccttatatatgtattaatacatactcaccaaggtcctactctaggcttgtttaatctcacagcagccctatgaggcaggcagtcttttcaacacccccattttattgatggggcttcccaggtggctcagtggtaaagaacctgcctgacagtgtagaaagacacagattggatctttgggttgggaagattccatggagaaggaaatggcaacccacactagtattcttatctgggaaatcccatggacagaggagtctagcagctgcagtccattgggtcactgaagtgttagtgactgaagaacaacattttacccatgaggaaatagagtcaaggagagggtaagtaatctgcctaaggatgcacagcgggcaaacactggggctccagcatgagctccagctctgctgtctaagctggcacatcacactgcctctgatgataaaggaagacactagcacttaggtttgtgagatttgagtatagctgtcagcaaggaatggttacaatgacaaaataaatacattcaaatccttatttgaaattcaggggattcagaaaatacattgttaatagttcagtttaggttcatcacaaattattagaggaatgcaaatcaaaactacaatgagctatctatcaccttacaccagacagaatatccctcatcaaaaagtatacaaataacaaatgctgtagaggggtgtggagaaaaggaaacttcctacactgt

SEQ ID NO: 50829 - DNA, 1022 bp, Bovine  19866880483851
  misc_feature (1)..(1): n is a, c, g, or t
nggtcgcgaagagttggacatgactgagtgacttccctttcatttttcactttcatgcattggagaaggaaatggcaacccactccagtgttcttgcctggagaatcccagggacgggggagcctggtgggctgccgtctatggggttgcacagagtcggacacgactgaagcgacttagcagcagcagcagcagcattacccccaccttccaagcccttgccagacaccagtatgatttctgtctataaatttcccaattctgcatattttatataaatggaattatacaatatgtgatcatttgtgactagcttctttcacttggcgtaactattttttaaatgatatgctcttaatccaacttaatagcttttttagttttaaaggaaaataattccttgattctagccctctgaatattctccctgtcactgagatgtgaagtttagtgtgtggcccgattcttgggcattttgcaacactcaagacagctgaactgccatctgttctggggaactgtgtctcattagtggtcactgctttcagtagtttgctcagtaaaaacatctgataatttaattagaaagagccaaccaattactgggtgagagtgaaatattctagtcttgtgcaacggcttattcttccatagttgtattactggcaacagctctaagtcccttatgaaaataagcttgttaagatggctagaaggcaaaaatacattcacctagaagataggagcttcgattcattaagaatgtgatgatttctttgactttgtcccgtctacaacttactagaggactttcttatagttatttaataaacagtattttagagcttccttacatgtctaccttacaaatgtatctgacaagaatattcagttcttaaagaaacgattctgtatgttaacacacaatactgaacagaccattaccacttgatgaagtgccaaatacctgaccataatacaaactacacttgcgaggcattgccaagttagaaaaaaagaag

SEQ ID NO: 50830 - DNA, 1258 bp, Bovine  19866880535291
  misc_feature (1)..(1): n is a, c, g, or t
ntagaaaataatttgatttaacatgattttccttcccatgtgaacatgccagggtgccgcctcccctatctcataataccctgtagctgtctttcatctccactctcttccagttcctatgagttgaagaaggacctaggggttacagtgtttagaacagaaagggttatagcactcatctgtgccaagcctttatttattttgatgtggaacttttggaactttctggaactttttttccaaatatgccattggttgaatccatgggtataagaagggttgattatataagtaacaaataaaaatagcctatttctgctgctatgtaatagaatatgcattgtgaatattgcgataaagctaatgaagctctatgccatcacgtaccctagcttttcatgtagctggtattttacaactctttattgtttgtgaaattgtgacacatgttaagattctcttacgaacagcagaatatcagagagtgcagaattagtttattgaccctccctcctcacactggagctccgcacacaggcagatttataaagtaataaaggcagtgaaaacccctgagcctgttccaagttggaattagcattccaaagaattccacaccataataggttacatgattgagaagccttggtgacgttagcgtgcccacacactcatgcctgaccttaaacttctggcgccccatgcattttatttggatgaaaagtatgcatggaagcagttttctgtattccttctataaaccacatgctgagatattgacctcctcctggcttttaggtgatgcagatgtttggtgttttttttaaatactgagataattttaaaatctcacttcatgtacaatatttgcagtcatccccacatttgatatacttgccttgggcagctttatgtaagtttgtgaagacaaggctactaaataccaatcagttataaggtttttattaagattgtccaaccaggcatgactatatctaattatgttctcatctaactcaatatagcttgtccaaagaagtgtcacgagagtcttagtcgtatgttctgttaaagtccaaaaccgccaggccagccatgcttatccaatagaagtgagtctggcatgcatttcctgatgaatctgtgccaactttggcttccagagattcctgcttctttttctacctgttctcatgtcagtcttttaataatcaggtctacatgtttgctgtcacttgtgtggaagtgatcttatttt

SEQ ID NO: 50831 - DNA, 1357 bp, Bovine  19866880657843
  misc_feature (1)..(1): n is a, c, g, or t
ntgttaggagaaagtataattaaggttgcctgctagcattggcactacataataataatctgtttattcagaagctccactttgtcttccaaaggttgattcaggagcttcttaatctgacaagatatgttttattatgctttcctttgtaatgaatattggaatagttaatacagctactgattctttattgaaaacaatatattacagagaaaaacttttactccttctgagaaagtaatctcccagttccagtgtgggcatattaaccatctaaatttgatcttctcatgaaactaacttttaattgtctttaacaatacatgctaggttttatactagagaaaaaaataaggtgactattttaagctaaatacttattaagtagcaaaagcaatgaacttcacttagtttatatttaataggccttatatttactgaagcctgaaactctggttattactacttatataacagtgaacttggggcttgatagaggtgacattaaccaaattaaatagagaaaacttctcatgagagattatctattcatcatcaagggatattttagaactccctagagatttttaatattaagattagcttctggggtaattcagaaaaacttccctagaattttgaagatgaaccattcaattttgaaacgtcaatttcccttcctataactgaggttattatggaagaagacatttttagtcccacatatgtagcttctggaccctgtaacaaattttttctttctttaccactcaaaacatccacagttttcctgggaacagtaagtgatttttttgtttttgttttttataaaaaaataatatatatttttaaattccaaagtagtcaaggcattgtttgggcaaagaaatcaaccagttcaacccaaattaaatcaatgatagcatgtaaacaaaaacagaatccttggtgatggtatttaattatttaacccatcatttaataacttcactggtttgagtgccaaaatacgaatctatattttcaacttgaacccagatctaacttattctcaatccaacgttgaacagggccagattaaataccaaagggctatttcaaggctagtccactagtgtccattttaaggagtgaagaatctggactgttttttctcccaaactcacctgaagcatttttaaagtatacacacatcttatccatgaacgtgttcaaaacatccttctgcttgtgcttctcagcagcagacaattccccctggagctactctgaacatgttcaacacgatggacctgccaatacatggaagaaaaatgtcagactgaccctccagtggaatcgatctgttcttttcaac

SEQ ID NO: 50832 - DNA, 1192 bp, Bovine  19866880665092
  misc_feature (1)..(1): n is a, c, g, or t
nttcttgcctgggaaatctcatggacagaggagcctggcgggctacagcccataggggctcaaagagtcagacacatcttagtgactaaacagcaaaaacaaccaggagggcggggaattttgtctgttttattcccagcaataacttcagggtctggaacagactcactggaacctagaacccactcaaatatgttaaatgactaaggatcatatattgtcaactttctatcccaaacacacacaatcacgtctttggatatgaggaatttgctcaaagttttctggcataatgtctagttaaccaagattttgtttcatgtatcaagatttttaaatgactctgaaactcgttaatcaccttaggtgcttctctttagtccgggttggttcatgaagctgtcaggaaaataatctgcttttgattatatatggcttttcttgcctccgagatagtcatttaaaaaagcaattttgtctcgtacaataattatattccagccttagtatttcttaagtcttgctagaatatcattttctccctttccacatatttttatgattaaagttaagacagcaagtatactaaatactttaggctatgtcaaaaatctaagaacatttttcaacagagccctaatgacattatctcacccacaaaattaacagtatttttgaaatatcatcagatagttagattttttctaaacctgagaattggctttctctgcatgtttttccacaccagatcccaggcaagaccagaccttgcatcttacatccttaactcttaggattcagaacagcccttttaatatcatgacaccaagttaacaaagaaactgtaccagttttcttagaaacagcccatcctctgatttgtcttatgtccttgagattctatttagattgtttctgtgttcctggaatatttttctgattatgagtatgtattgagaaaatgaagaaacggtaaaattgtttttcagatgttctaaatgagcgctgccagttacatcagaccttgctttaacgcttctcttatctcattgctgttctcgtgttttagacactcactagattaaacagggcagcctttaaaagttgatacaaggcaaagttgcttttatgctaagctatcattattataattttccttcaattttctttcattcctagcatcctacagtga

SEQ ID NO: 50833 - DNA, 1620 bp, Bovine  19866880714555
  misc_feature (1)..(1): n is a, c, g, or t
nataggaaaattctggggaaattaaggatcataagtaggtaattacgactttcataatgtggaaaaaaactttgatttgtgaaacataactgtaaacaatataatgtgttccacctgattcactggaaacgactgtgatgctggcaaagagagaaggcaaaaagagaagggggcagcagaggatgagacggttacaaagcatcactaactcaatggatatgaatttgagcaaactccaggagacagtggaggacagaggagcctggcatgctgcagtccacggggctgcaaagagtcaaacatgactaagcaactgaacaacaacaaataacatgttcagagattaaaattagtctaaaactctggtcagaaatcccaataagcccatttaaaaaactaaaattcaatctaccaaaaatggtttcccaattttctaacttgtgtatttgcaaagaccagtaaaatactgtgtggatatggttgactgggtcaccccacagcctttgcaaattcctctctgtgtgctaaactgcagagactagacttccgtgcaggaatacagatgtgacttaggttccagaagtactggcatgagcgttctacttggaaatgagttaagaggggacaagcaatccatcgttggctgatgtggatcactgtaaagggagcatagttccaagtcaacagctatagtgatgcctttcagatctggcattttccagatcccagcatagcagcagcttccttggcagttcagttctgcagtgtggctgaggcacttctagaaagtcaactggcacatgttcttccagccctccctgggattctgttatttactatcctataatatatcctttcctgattaaagcaggcagaatgtgttatacaatttgcttcatcctgacagataaaacaatgaaaagcatgaatatttaactataaagtcacattaactaacttagacaatcatctaaaacttttaaaactgagttcccatattagaaaaacacgagttaaatttttaaatgacaacactaaaattaacttaccttggtaagaaattacctgtacactaagctgtacagttccatctgtctttactccttggtcaaataaacttcgttctggatccagctaaacatgggtaaaaggattaagattattttagctcagtcatctggtttaatataaatggatgtgccaaataggacttaattactgaggtatactaattaaattgcaagaacacacttaattattcaagttgtcgtatcatttaattctctgccaaaactgaaaaggatttcaccactgtgggtagcaattagggacaacacaaataggacttgtttaaatagtggttttctctagctctggagtctagtttagaattttaaataatgccaaaaggcaaatattatttctgcagaagtatttctggtagaagataatgcaagttatctgccatgaagggttttttattaggggggacaatttatacaaatttatttatatacttcttgccaaatctcttcataaccaaggatacacatttaagatcagggttaattcaatttctgatcagaagttaataaagttaaaggacttacaaccatacta

SEQ ID NO: 50834 - DNA, 639 bp, Bovine  19866880769313
  misc_feature (1)..(1): n is a, c, g, or t
ntgggattatttccctctgccctggaggaagatggttaccaataggaatggtactttaggtagtattgaaaacaaacatatcattctcactgcatgaagttaaatcccctcaaaacggaaagaccagttgctgcatcttgtattaaggagaagaaaaaatgcttcatgggcccctttagtgttgatggcaatggatatcactctggggtactgctctgatccacttactgggtgaccctgtgggctactgggcttccctgtggtccagggaagcttcttcagtagggcaagcaactctgctgtttgggcattttgaatcagcagaatcaattttatttgaacttcttttagctgattgctttgttctgtggttcctataacagatcccaggagggggataactgagccctctaaggcagcatgtttcacactgtgtgttgtgaccctttagtgagttatgcaagatccgttcaacaggtcttgagcagcgtttgaaaagatatgaaagagggtagaatagaaaggaaaatatcagagtacatagcctatagtaaggcaacatttattgaaactttatttttgttcagggtcttctgagtgcattgttcaagttcagttcagttgctcagtcatgtccga

SEQ ID NO: 50835 - DNA, 3273 bp, Bovine  19866880772371
  misc_feature (1)..(1): n is a, c, g, or t
ngggtgcatatataaaaattttaaaacttctctataacaaaaaataagtcataaacttaaaaggcacatcagaaactgggaagactactctcaacatatatgacaaacagctaactcaactccttaatttataaagaactcatgataatccatgagtaaaatgggtgaagggtatgaacacattatataccaagcacattacagcaacagagacaaccaaaaatataaaaaaagttttttaccacttccctggtgatacagtggataagaatccgcctgccaatgcaggggacacaggtttgatacctggtccaggaagattccacatgccacagagcaattgagcctgtgtgcatagctatggaagctagtgtgcctgcagcctgtgctcctcaataaaagaagccactgcaatgagaagtctgtgcactgcagtgatatccccattcgtttttatgctggcttcgaagatggaggaaggggtcataggccaaatacagtcttttctagaagatgtaagaggcaaggggatggattcttccctgaaggcctggaaggaaccagccctgctgatatcttaatttttagcctcatgagacacatttcagactgccgacctccagaacagatttgtattggtttaagtcactgggcttgtggtatttgttagagcaatgacaggaaactattagagattgtcttgaaaatcattatgaatcaaaatgagactaaaataggctattaaaatgtaaaataaaaagataaagtattatacagtttaaagtcaaagaagagggtaacttcaagtgctttgggaaagtaacttaatgttctcaaaagaagctttctatacctggtccagactacatctagaaaaaagatcaccaactctggagagctggtgggattgtttgctttggaaaaactagctagagaaactagccagctctctcatcaaacactcagggtggagattctaaaaaccaagaaggctgtctggtgcaaaggcattggtggagtggtggcatggctggaggctgagaaagctgggtagggaggagatgatgtgtgtagggggcagtgggtgacaaaagatgacagcaagatcgggagattatctacacagagcaaataagatcattgaggaaatcaagttgttttctgcctgagagagttttacttacacagagagggggaaggctcaaaataaccctgaagtgttaggttttatatatatgtatatatatatatatatatatacacatacacacacattttatacacacagggacagatatagaaatacagatgtgtgtgtgtgtgtgtgtatttttcctaactctgttgaggacctagaagcaatgacacccctgtaacaatgagcacactgagctccattcttcactaaataccattctttacaaaaggaaatcaaccctgaatgttcattggaaggactgatacagaagccaaagctccaatactttggccacctgatgcaaagagctgactcattggaaaagatcctggtgctgggagggattgagggcaggagaaggcggcgacagaggatgagatggttgggtggcatcactgactcaatggacatgaatttgagcaaactcagggagacagtgaaggacagggaatcttggcgtgctgcagtgcatgggattgcagagttgaatgtgacttagactgaacaacaacaatagagatgagacagccacatgtgcaatatatattcctgaaaagttatgaataaaatggggcttccctggtggttcagataataaagaatctgcctgcaatgcagggtactcaggttcgatccctgggtcaggaagatcccctggagaaggaaatggctacccactctcgtagtcttacctgagaaatcccatgggcaaaggagtagggtgggctacagtccatgcggtcgcaaagagttggacaggactgagtgactaacactttttactcaccccaataaagtaaattatgcaaaggaaattaactggaactctgtaacgaatccttttgtagagcaaaatcattgccctctgattttgacattacatatatggtattttcataaacctgatttatatatttttatttaaacctgattaccctgttttgggtcagcttctctaattctcaggtcaggctggggtagcatggcatattcgctacttaatgcacatgactttggggctgtctgttgcttactgcaactgctgggcagcaggatcgagtacttaattagctgcctttgcagttatcagactgcaatcacatttgattaagaaggctgtttatttcactcaaagctgagaaagctctcctgaggagagacgcccatgttttagccgagaggaccaggaagatagcctcacatgtgaagggtccctctgcaactcagccacgggcttactgaatgaccttggagaagtcgttttgtttcccatcttctccctctttccccacacaccaaatgttttcaaaccacagtgttttcattaatgacaggagcataattcaaagctcttctaagtacttttatgtgcaaatatatccttccatctaattctgtgagataggcaagttgttactattattccctctttacaaattaacagaggttcaatgatattagaagaataaaatttacacagcatgaaagaagaggagctccaacccaatttggtgaatccaaactttctcagctgtccttctacaccccttatttttaaaactactattaattaagaacagaatcatggagagttgtttcctgtttaatttcacctgacagagggcaagaaagtcaatttacttaatataggctgggtacagcttgagattgaaactggaaagaagagtcctcaccatgtatttgatagtataaattcaaatatttccctacatgcagctatgttggaagttgaccttgtattattcctggggtttttaaaggaaaagtgttgtatcacatgtatggttgctcctttgcaaccatggtagcacttatttttttgcaaaatgaagcacaaaaagatagtctgtttacctttttgacagtatgaattcctactgagtatgtttgaagtaatttgtcatgtttttctctatttcagtcagatttgtgcaaaggcatagatagaaaagcatttttcttgttacctgtaagactttcttttttctctttccttaagaatgaatatctaaactacaaattctatttatccctgagttactgggggttaaata

SEQ ID NO: 50836 - DNA, 4105 bp, Bovine  19866880782047
  misc_feature (1)..(1): n is a, c, g, or t
ncccacccagacccctcaaaaccccctgctttgctgtccctaaggattgcccctatcctttcttgcttaaccctgcccacttcattgtacatgctctcattacactcccttcagtggtccctttgagagtgtgatattatgcctgggcactgggtgaagcaataggatagcctaacttggctaacactggaatggaaaatatttcttactaggaaaaaaaaaaatgaatctggtaaaaatatgtaagtcattcctagggtatctgattactcaggaactccaatactcattgttaccgattgatgttttgggttatagtcattcaatcattcctgttttcatttattccataaccagatattgatcaccaactaagattgatgctctgtgagctatggtaaccgtgcaaggcacagaaccatagtgtcatgcacaacatcataaatttctccctgtgaatgatgcccaggttacctttgaacagtgactgtaggtgaaagaaaatgctaaagaatggaagcaaacattctgacccctgtttggtattgaaatgagaaagcccagggattaaaggaatgaaagtgatttgtaagacaattgcttttagaataagcagctggagtaccgctctggagaggtttcaacagatgaagaggtgatcaaccctttgtatggaaaagtcggcaccctagaagatgcctggtagctaagtgaataatcttcaagctgagctgaaaattggggtgaaaaaagctgtgagtcccaaatgctttggaaacgatttcccaggctgtcttacctaaggggcatgtcgttcaacagggactaaacagtcaatttggtgaaagtcagtcaaataaactgtttgatattctcaggactaaaaaaccaattgtgtgaggttttcatttttcaaggcagtcattgtagaaaggatgtaaatttttcagatgattgcttttagaataacactgatgtttaatctctgagttctttccactacagacatcttgaaacagaggaaataaatgctgcagagtcaaaaacaagtcttcagggcaaaaacctggcttagggtatcacttataaaacatctctgcattttgctgcatgttctatattgctggatcatagctaaatatttctcccccaaagtgtatttctttaaatgaaaagagctagagaaatgctgatataatcaagaaaagggattgaatttaacaaaagcatggagggtggccttcattcttaacccctaccatttgatcaggtttctggcacttttgatcatgccaagcagattgttgtatgactaaaagcaacagaagttacttgtagatggcaataattccatctatgtataagaagatgaagaggtatctgacaaagatattgaccagtatagcaaatatttgagagctggccaatccatgtcatgtaaatttacttgaaattacattacatgtagatatgtaagtccatgttgaaatataaagatttgctgatatttttgtgaaatacagtcgtttctagtctacactcatattcatcacacatgctatatatattctgaagacattgatggcaaatggaaagcattacatgcccagatacaaactgaacttcaagagtgggactaattaatcaacactctattggctaaaacagtcaactatggcacaccgttggttggctgatcactgtcaaatacaagggttccctcatatgataagaaatttgggagtgaagcaggttgtcaacacagggtttctgagtgccttgggagttgaactgtatgccatttatcttgatagttcaaaacctaggtcagtgtttggtatacactagacacagtatataaacactggttataaacatttgtggggtgagtcagtgtgttttgagttttagcaaagagtaacattcactgcacctctccagggcatgaaagtgtcaaaacaataaatgacctcgtttggcaggataggaaacagataggcccacaatttgacatggagtaacttcgtgagaaataaacatagcaggcatgatgtatttgtcttcctagaaaaccaatggcttccctttatatccaacccaaagggttccattctttatacatagtcctcagtggccatctgtggtagagatgaatttcgtccacactaagtgagagaaatatcacatttttgttttcttaaatcaacttagttcaactgtgacccatctttgaattcccacccatgcttgaccccagcctccagtgcccactcccccacgtgtgcatgaacatgtgtgcacatgtgcatacacacacacacacacggatgaggctctgatgaggcaaaaataagaataaaaccaagttctcacctttggaaaggtccttctaagatccttcaatttactgtctactttcaaggatgcttaatatggccctttgtgtcttgtaacctgcgctgggtcacacttagggtgtacggatttgggtgggcctacggaaacagagcccctcatttctgaggacacttcactctgctggtgctgtcagactgaagggcttgagtccttaacaccagcagcctgtggtcctttctccccttttcattctgacttagctgtttccctgcttccaatcctctccctcgttcctcaccagctctggcactccattatttctaaaggctgagattttttatataaaacaaaaaagaagcttcgggtttactatggcttgtgttttctgccaggctaacatcatccatgcagcaacaaatttcaaagcctggattctgccttgaaacacagcaaagaaaaggcagaagtaaaacaaatatgattgactgtcttaaatgttgtgtgctgtaaaacaaagccaaagtgtttttggtgaagttttagggaatggtagacggatatttgcaataactaaagttggctaaaaatataggttcatgaaagatgaatttttaaactgtattttaattagtctttatgattttgaaagagtcactttaagtcgacattctttactcatctcacctgaaattctagtggatgatctagtggtaggcttgtggtggaactgtactcagtgtgatttgtgaggtgtgcatctgtgtgcttttccttataaactcttacctggcagtataatttttctcccctagcagcttagctgctttgaaaaataaatttagaactcaggtgagatatctgctaaatacaaccacagaaggcttggaaaacaattttttctaatactggaatatatctacagttggcaggatttatcatcattctgttcttaacatgacccaacctctctatacatctatacatatttttcatatgtggcatgctttaacaaatattttaaacacaaagaaagtttctttataaaaaaagcacatatattaaatctttttcctaactgagatgttggtctaaagtaatgtttaaaatttatgtctaatttttattatttttacaagatcactaagacttctcccttgccttgcaataaaaaaggaccatttatagtaagtaggaaagtggatggatagatgtattttaattaggaaagaacaataaatatttaagacccatagccacatcactgtgctaggctaagtagtttgtgtggaggacattttccttaaaatttgactacttttttttcttgaggaaaaaaaaaaaaatgcccaggtaatgtagtcactaagcaatcaactggatacctgttttcaaggacagtcacccacatacacatacactatgtttgcaaggatttaccaagtgtttccaaaacactttgaaacccaaacacactctaggaattagcactgctctcaaatgcatcaagcactctgcagttcccagtaagaatctggatcacaggccattgcgcatccccagctgggctcaacatctgctctgaatatgtatttaagaattcagaggctaatctagaaggactagatcaatttgacctctgttttagtgttcctgtgtttaatgtgatttgtatttgaactctttgctgactctgcactttttcttgaagttcctgtctagtatgaagagaaaaactgtgtgggaatct

SEQ ID NO: 50837 - DNA, 1038 bp, Bovine  19866880824583
  misc_feature (1)..(1): n is a, c, g, or t
nctcttgcctgctttatttttctgcattatacttatcacagtctgacatactgctgagctcatatacttatttactttccgccttcctctactagaatgtaagctccatgggacagaggggttttttggtctagttttttcactgctgtgttaccagtccctaggacaagactggacacataattggtatccaattaaatgtaaaattgactactagagaaaattttacttgaacattttaaatttagagaaacatagagaaaaaagctttttcacgtagtactgtgcaaatgcctaagaagtcaaattagtgactctatttcttctctggtggctcagacagtaaagaatccgcctgcagcgtgggaggcctgggtttgattcctgggttgggaagatcacctgaagaagggaatggcaacccactccagtattattgcctggagaatcccagggacagagaaacctggcaggctacagtccatgcagtcgcagagagtcagacacgactgagtgactaagcacagtgcatttctcttctagataattaaacatcattgacaagtaggcatgaggtgggatgtgtttcttgatgaatccaagtcacttgcccaaagaattaaaccctcacaaataacccaacttcccacttttgactttaaacagatgattaacaaaaaagcagttgatatgggggaaagtatgcattaagaaagtatacttactggaaagatgtttcttctacaaaagaataagtaaatatcattaatataacaattaatagggtatgatacagattcatataaaaatgagtttggaattaattacttgttttcaattttgattctcacttgctgacatttataccttctaaatggagggttggcaaactttctgtaaaggccacaaggtaaatattttaggctctgtgggtaaagaggtaaaaccaaggatattaagtaggtactaatataacaaaagagaaacaaatttccaaaatttgtatcaatgaactaagaaatcataataaaacggaat

SEQ ID NO: 50838 - DNA, 1031 bp, Bovine  19866880856752
  misc_feature (1)..(1): n is a, c, g, or t
nctgctgctgcatcgcttcagtcgtgtccgactctgtgtgatcccacagacggcagcccactaggcttccccgtccctgggattctccaggcaagaacactggagcgggttgccattttcttctccaatgtacgaaaatgaaaagtgaaagtgaagtcgctcagtcgtgtctgactcttagcgaccccatggactgcagcccaccaggctcctcggtccatggggttttccaggcaagagtactggagtggggtgccattgacttctccaagcacaacatggtaaagaaatcatcctccagtttgaatttaaaaaagaagaaacatagaaataaagaagcattcagtcagaagaagcagttcacctaccaaggaggaaaatcagagtggactcagatttcttcacagcaatatttagtatccccaaacgtagctcagcaggcaaagaatccacctgcaatgcaggaggcctcggttcgattcctaggtcgggaagatctgctagagaagggatgggctattcactccagtattcttgggtttctctggtggctcagctggtaagaatccacctgcaatgtgggagacctgggttcaattcctgggttgggaagatcccctggagaagggaacaggctatccactccagtattctggcctggagaattccatggattgtatgtccatggggtttcaaagagtcagaactgagcgactttcactttgaaaactgtgagcacaaaagtttagatagcccttcttgtggcataaaaaaaattacttgatgagacattctcaccaaacaagtgctgtaatggaaagaattgaggaaggaagaattcatggcataaaagtatttgtgatttgcactgaattgattagattacagaaacaaagctgttataaacattgagatgtgttgtgttagtaagaatatagctaaggaaaatgggcaatggtgggaaaaagcaatcagaaaaaattacaaacatgctaatttcttaaactttcatatcaggagttaaaagatat

SEQ ID NO: 50839 - DNA, 1567 bp, Bovine  19866880908845
  misc_feature (1)..(1): n is a, c, g, or t
ntccggtttatatgaggcaccttttaaatttgtattttccaggtttcatctttgcgaggctcagatcacagtaaaatattgtagcactagaagtcagcttcattttatgtctaaaaaagaaagagtaaagttgaatttatttctccatagaaagatttcaggaaactaattaaataaatattatggcagtgcatttgaatagttttgttatcagtgaggaaagaaaatgctcaaatattttatgtcactgttaaagaagggcaaaaaagccattgctgaataaatggtttcatcaaatctatatctgatttgaggaagtcaacttttttatgggaactaaaaaatgcaaaatacacataacccagtccctgaacacaatctttccctttgagttttcagaagaactcccatttcagttttggagccatctgctcttgccttttgccaccaagtatgtggatagataatctctcagggtgcagttaaatgaacatgaagaaacgagttcatgctataaagggatgcaaaaaagctaaagcgtaaatgatcacatctgtgcaaggtatggagcaagggaggagacagaagcatgcaaattagtcactcactgtcaacacagaagttcaagttccaagcaaatacactgaatgggacaatgatttacagcacacaaactcatccccgtcaggagggcagaaaggatgaataattggtcagaggcattcgtgtggcatgggaaagcaaaagcaactcagatcgattctgtaaacacaaaagaacagaaacaacccagcctgaatgaaagactgattacaactttccaatcttagatttgaaggactcaatttgctaacagcaaatttcattaagtccaaagtatcatgatggagattgtctttccccactgggctcatggtttttgttcttcggctgctgcatcaattaccccctccccacccctcgccagtaaaacgttggcagatgagcactgcggcaacccttttccggaaggtgggctccgattccctcatacgggaaagtcacaagtttggcgaggtgtgaagagatttaatttcactaaaagcctataagccgaggttgcattccacacaaaggatgctttctggacgattaatgcaacttttacatcctcttcaatttggctttaaaatatctcttccaatgaccataattctcagcctgagaacttttaacttttttggatagactgttttaagtgtttttcaccacttcaaatgaatgttgaagaacttcttcattaagtctttgtcatggaagaaaatctagaataatgtgcccttggtcctaagcatcttaattttagggtcatgttcaccttagggcactgcagtgtttagacctcaagtcctaagctaaggattaacccagaggcaggagcttccactccttatttctgtatccccgactgcctctcctcttcctcataccacccaccttctacctctttcaaggcctcaatccatgctcacttctctctttaaaccttttctgagtcatgctagtatttattagctacactgaatta

SEQ ID NO: 50840 - DNA, 1293 bp, Bovine  19866880979600
  misc_feature (1)..(1): n is a, c, g, or t
natcggatactctcaactttgtcctgaaacagtttttgtggcataaactggataacagctgcagaacgacaaagtgtccttttttacttgacttgaggccaatctgctaaggagtagattttaatgcaaagtcaaatcactggaagatatttaccttggtaaaatcaagtgttcatcaaaaggacacgtatgacattaatttaataaaaggatatttgatttgtattttttatttggaaaatggcacttcatttcactgtgtgaagatgcccttaggtttctaatattgcacatagtcaagaaatatatgtccctcaaatgagattgcttttttaaaggattaatatgggttatttaataggccctcgggactaatggcaaaacagtaaactcattgtattctaacattaaaataaaattcatcaaagactggattttacagtcttgtttatattactttcaaaactgatggcacatactagaatgttacacattggaaaggttaaagcaattaaaccacaaaaatctgttaaaatttatttaataaggaatgaaagagaagtggtaaaaatataacaaatcctttctcagaatctgggtttagtttaatacggtttacctttgctctctttttaattctaaaaacattattcttaaaaatctatgatataaaaaaaaaaaaaacccaactatgatgcaacaggggatatgtggaaactctttgtagtggccactcagttttgctgagaatgtaaaattgctctaagaaatagctttttaattaaaaaaaaaaaaaaaactgatagtatatttggggagtttccacatagaaccatgctcacttttatttttatttatcttttgcattttatttatatatgttttttaaattggagaataatcactttataatgttgtgttacttttctactgcataaccatgtgcattagctctatgtatacatatatacatgtatcccctccctcatgagtcttcttcctactgctccctgctgccccctaccccgtcccacacctctaggtcatcacagagcactaagctgagttccctgtgttatacaacagctacccatcgatttgttgctattcagtcgctaagccatatctgactttttgtgaccctaggacagaaagtgaagaagaacaaaagagcctcttgatgaaagtgaaagaagagagtgaaaaagttgtcttaaagctcaacattcagaaaacgaagatcatggcatctggtcccatcacttcatgggaaatagatggggaaacagtgga

SEQ ID NO: 50841 - DNA, 3447 bp, Bovine  19866881030372
  misc_feature (1)..(1): n is a, c, g, or t
nctaaatggtacagctattccaaagtccctgatggtgaagaaactgaaggggaaagagattgtggttttaaaagaggcagtcaaaatatcatactttgtgttacaaacatgcaggaccatgtgagtgcacctcttagatacaacgtaggggccctgcaagataagagtccagaggagaaagcttcattaacatcacaatagattctactgtgtgtagagtagtccagcaacaattatggatgagtactcagaaaataacttgttcagctccaggaggaagctcattgtggcctgaggctgcctcagaggatattaaaaaggcacaaacacaatctggtggaaataccagcttcccagtgtgaagacaaggcagacggtaggggaacctgcaggtgtcaaaagctgagtaaggctgagggtgcaactttgggggttaaggagcctcaagtgtgagcactcatttttatttttcttaaaatagcacagaaaggacccagcctgtgcagcatctaaactaagggtcttatcctttccggctgaagactgtaattctattctgactttttttggactccctctgccaatgaaaaaatcatgtgtcaaccaacagagcttccctgttgcactaataccatgcctgatttgcctatcacatatgagataactgatgtgatggaagcacacactggagaagagtagatggtagccgataactactggggcttccctttggctcagtggaaaagaaactgcccccctagcaggagatgccagtttaatccctgggtggggaagattcccctggaggagggcatggcaacccactccagtattcttgcctggaaaatcccatggccagaggagcctggtgggttacatagggtcgcaaagagtcagacgcaatttagtgactgagctcgcatgcacacatgcagtaactactgagcaccagctattgttctaaaatggttcctaagtattaactaatttattttctgtagccacttacgggacagattctaatggtctcatccttttaccactctatttttggttatgctaaaagctttgtaatttgactgtccatggctcactgagaactcattgatctccccccatattcaattactttgatcaaacataaattttataggactttaagactcctgaatatattcaccacagtcacatgaaataaccctttatatgtctatgcatgtgtgaaaaatttatagtttatgaaattacagttatatctcttaatttgattactaaacaggataataggtgaggctttccaggtggcactagcagtaaagaacccgcctgccaatgcaggagacatagcagaggcgggttcgatcagtgggtcagaaaaattccctggagaaggtcatggcaacccactccagattcttgcctggagaatctcatggacagaggagcctggcgggctacagtccatagggttgcaaagtgttggacatgactgaagcaacttagcacacgcgaaaatagaataataagagttcaaaaagggaaaatttgggggggcatggtttatttagactagtgtggtccgtgggccatttgttctagaatttcctagtgggaggtggttaaaaaaaatatgtttactgcccctatttggaccaactgtacctgaatttatagattacattctgagaaaatggatttttggcaagcactcctgggtgattataatgcgtacaaagtttcgaaacccctaatttaaactaatttaaatgctgtgaaatctctactttccagtgatcaaacataactaatgtctgatacttataatcgcaagatatttaaaagtttgaatgtgatttaagaaatgaataaatgtttttgtttcttgtatgctaatgtaggcttaaaagcggtatttgaaataaatgatgcagtgaaggaagaaaaaaaaactacaagattcggcagatctttaaatcagatcatcgattaattgaaacacctgggaggttagtcttcttaataacataatctgaaaagcagaaccggttttactggctttggattaatcgtttcagggtaagctcttttcccttgtgaacgacttcctgtctgcacccagaaaggagtgaattttggggtcctgcattctgactaagctctcccttctcataaatatttagattagaagaaaaaaaccaggatcattcttttaaaaacctcaatgaatttttaaaaatgtataaacatagttggaaaagcctgccagtgattaaagggtctcaaatgtaatattacattcctttccctttccaaattctcttccacatttcaagagacaatatatttgtcttagtaaatctaagttaagattaattattttagtaattttcatcacaatatttaattatctacaagttttctgttgctcctaactttgtctttattctctgtcacctacagggcacactctccttcctgcaagttaaattaatatttctaccatcactgcagtggctttttggtgccatttgtgtgggccatttccttaaagatctcatttcctagttgaggtgtttacacataaaaatgccacagactgtcaagttccagattggtttaaaattagaatagagtaaatataagcttccaagctattgtctgtaattcactgacatgactcataatgaaaaatgaagaaaaagaaaacgtaaataatttcacttaaccatccatgtaaatcaatgtacacatattgttattcttccctttggaggttagtttcaacaaagaaaattaggtttttttttttattgctacttataaaagccaaatatcaaaattttaatctctccttttgatttttatgccttctgtgggctgtggtttcaatgcgaatttcatttccaaagcctctgtggggatgtctggacctgtcccatgtggacaccactcaactatcaatctaggtcttgggtggctgtatatcctgtattcgattcttaaggtcagtggtgtactgtttaggatcagctccattcatgtgcaatctgagatgagcccaggggttcacaggcaactttaggggtcatgtccttgagttcttctatcttgatggtctccctagtactatctggttccctggggccatattttgccgtcttctggtcagaaagatggactttatttactctgcttttttgcatacttacacaaatgggctcatttccagggttgaacagtagaaagggaaagaaaaaaaaaagcaatggggattcactctatccttctggtattacatcattctgatcaggaaggaagccttctattcttagacttgcaggctcctgtcaggtcctattgctgccattgctccagcaaccagaagatcacttagaaactgctcaagagaacaaagaaaaacactgggagacttccaccaccgtctgt

SEQ ID NO: 50842 - DNA, 494 bp, Bovine  19866881075911
  misc_feature (1)..(1): n is a, c, g, or t
nggtgtccagtggacctacggaggagccctagggtttataccataccatgtacttgattaatggtcacttgtttcctgagcgtcagcatgtctctaagatttgctctagtcaatcaggcaaatgcagaatgccattaaagtgataaattcaaacagcccacacagaattgttgcagtctgtcatgtcaggtcccactttagagagatttttaactttatggatcactgatttgataaaccaaaatgagtcctttaaagctctccttttttatcaggttgttgaacttatcaggattgcatgctcaatgaaactctgtttcctggagtctgaacacctcagaggtgaccagtgtctcttcttgattgactgaggtatttacttgtttctgctgttcattccatgaaggtgagatttcgtgtttgtctcttttttttgaataacattgctgagaaatgtgcttctactttactctggaattcttgaaatgattttt

SEQ ID NO: 50843 - DNA, 1065 bp, Bovine  19866881077280
  misc_feature (1)..(1): n is a, c, g, or t
ntataataataatgagaaggaatggaatatcaaaataatgaccaatatgtgacacagagacatggagtgagaaaatgcagttggaaaatggtgttgatagattcacttgagacaagttgccaccaaccttcaaactgtaaagaacgcagtatctgtgaagcacaatagaggtctgcctgtattgagtctggaatatgttgctgagaatcagcagacaggctactgttaggtttatgaatataggatttacaggagttaacagcagaatagcataaacaaatgtggttctcaggaaagtgcggtggctgaaaatgagcagagctggatctcagtggcatggtgaattctagactctagtcagtcttactttactgactttttgatgccacaaatttgatgtcagttctcacttttgcccttttctctttgccgtggctagcttcttcctcaatttcctccatgctagagaattctaccctcatgggaacataaattacccagagtaggtaaacctacatcaccaaagatactggcagtttctcagggctgttgaaaaccctttatctccagagcaactattaaccctcatgtgacaaaactactgtatttctctcccgatgttttacagtattaaatatatccaaactgcctgtgtttataagcacaaacttttatacaaaaagcatgcatttgtaggctcttttggatcctctccttggaccagtggctcggaattttagtatccttatttacactgaactgactccaaatctaaaatttgattatagagaaaacacagatgcctgtacatcagactaaatgacgaagcttttatgcagaaacaattaaatgtacaagacataaactggaagacaattgtgaagattctatgtagaaagtaagcgacaaatcaacaacttctattgtggaaaatttcaagcatatacaaaagtaaagagactactacaaagaactcccactcagcttaaacaattagcacccatgggtccgtctttttcatccatttggttggtgctgagtcgccaagtctgcctctttgggaac

SEQ ID NO: 50844 - DNA, 1679 bp, Bovine  19866881112433
  misc_feature (1)..(1): n is a, c, g, or t
natgatggagtcctgacctcaattcctccctctctcctgatgctttagatagattccagaccttattcctgagcccaggtagatcctcctgctcactgtggatttttcatcttgagaaatacccttacttatagcccatttgaggagctcaggtgatctacaagcccaaaacataccactgtcctttacccatccaaatcgattttgactcctacctgcaggatgctaactcttaccacctgtgaatatggcacaaaaatttgacataagaaaaccctccctgtgcattcaggaatgctatcatgcataaagacaggagaactattctctcatatcccttcaggaaggaagatagatttatggactttgagtggaatttttcctgactcttgatgactgactagacagaaaaagggaagatttattttctcactggctctcctgtgtacaagctcggtcatctgcaacccagctaattagaaaggtcagtggtaccttctgagcaaagcagagaaggaaacctgagccaaactgcaaatgtacatattactgatgactgccgcactgaagcagtgggaagatggagaataatgctcacactcagtggacgacctttatgagacatttttaagacgacgcagtgaaggctactgtggaagatgtcactgtcagcaccctcagggcaaaattaataacgcagcaaggctggtaccgtgtttcattgttcctgcagaagggaacagcgggccattatggatacaggaaaagtttaagaataaaaaaaagatgaaatattcctcaataagagaccatcactgagcgcacagaagctacagcgtgccacctgactccttcctgtagtgcaatgaggggaggcatatttcttgagcattgggtatgttccagacacagttattaaggtaattttctatactatagaaataacatattattgtcctctcttcatagttgagaaagcagagatttagagatgttaaatagcctgccgaaggttacacaaccagcaagcgggaaagccaggaccaacgcctgtctgtgtgccaagtgccaccccaaagaaggcaggtgaaacgtctttcatgtcagatcgctcttgctacttcaatcctactcttctatcaaaagtaaatactattaaaattgtaaaagcaaggagatcaaaccagtcaatcctaaaggaaatcaaccctgaatagtcattggtaggactgatgctgaagttgacactccaatactttggccacctgatgcgaagagcccactcattggaaaagaccctgatgctgggaaagattgagggcaggaggagaaggggacgacagaggatgagatggttggatgttatcaccgactcaacggacatgagtttgagcaaactctgggagatagtgaagcacagggaagcctggcatgctgctgtccatgagtcacaaagaggtggatatgacttagtgatcgaacaacaacattaaatgactataatttaatactatagttataatgaaatatcagattaaattataattaatatcatatgacatcccttatatgtggaatcaaaaaagaaatgatacaaatgaaattactaacaaaacagagactcacagacttagagaacaaacttatgggtgcctgtacacacactgctacatttaaaa

SEQ ID NO: 50845 - DNA, 1324 bp, Bovine  19866881118086
  misc_feature (1)..(1): n is a, c, g, or t
ncatgggatttcccaggcaagaacactggaagtgggttaccatttccttccccaggggatcttccctgactcaggtatcgaactcgagtctcctgtagtacaggcagactctttaccgactgagcccccagggacgttactttttaaataaagtgggtgaaaatgtgaccacgtgaaatttaagttccaggtgactttctaactttcttggatgtcagcatctgtctatctctttgtatacatggaaacaatctaaaaacaatagaaaaaaatacaagcaataaaaacagaatatacttttcatgagttaagctgctgtttataaaagcaaacagtacattattgaggtcataacttacttgtatgaagaacctctaataagctcaacttaaaaaaacttcatatcccattatctcttggagagagtcaccatacatatatacaacttaaacagtgctggtatttcatataaaaatggcaaccagagcagcagatgattccagagtttctactcatcttttttttgtgtgtattattgaattattagcttttactggacagtggcaaatgcagaaaagcatcaatttcaataatggatctatgacaccaggaaaagtagtaatccaaatggaaaggagtcaaacattttgcaaagaaaatattctccttgaataataacgatgtgcttgaatcctgtatgagataattaataaaatgttcaaatgactaagacaatcttaccgtctggtgcctgaggcataactaaaagcaaagcgtgaaatgagaaagccagctgactcccaagagaaatcatctacttcatgggaagaaagtgacagcaagcaacctaatgcactttttccatctagacaagggatacaagacactgtagagcagggatgcccacggcaaatacatggcttagagaaaaacaacctagggcggcactttccctgcacctgataagaaggtcaggaaggttacatgctgaatgtgacaggcatttttctctcttctagctttgttttgaattttaatacgcttaatattaaagacaatcttattttgctttccaggtagtctgagaattaactttaataaaataatctcttttgtgtaaaggatttatttggatacagccagcaattttagatggtacttatggtaattctttattcaagcaggaggtaacacataaatgttcctgtgtgctcagtcgctcagtggtacctagattgtagccctccaggctcctctgtccatgggattttccaggatactggaaatactggggtgggttgccatttcctcctccaggggatct

SEQ ID NO: 50846 - DNA, 844 bp, Bovine  19866881141126
  misc_feature (1)..(1): n is a, c, g, or t
nccatgacattatatataaagtgtttaataaatagtttcggcactttattttcagagcatttttttttagcactggagaagctggtaggttcccagactgagagacaagattctcatcttgagcagctaaagctttggccttgtagctacaaacagtaagagggagtagtttcctgggtttcactgaacaacaataagtggatgactcttcccctgcaccgttaaatgggctaaaaaattgaacacttctgctatttttaatgtagactaatcagacaaaaccaactgtgagatgaaggaagctctttgcaaggctgtattgaaaaacaattgttccagatttagttaggttaaactccccactaaaaataaatctaattacaacagtcaatgatataattaaaacaaaagttgctattagattctagagccctaacctttatacaacacaattttactttatggaaacgaaaagtgctctaagaattataatgataaatgttttgtttttaatgcttgtccactggcagttggaaaactctgcatttgggccagatcctgactgcttgctgtttatcacgtcactcagttcaattgctcagttgtgtccaactctttgcaacgccaaggagtgcagcacaccaggcttccctgtccatcaccaactcctagagcttgctcaaactcatgtccatcaagtcagtgatgccattcaaccatatcatcctctgtcgtctcttctcctgccctcaatctttcccagcatcagggtcttttccagtgagtcagttcttcgcatcatatggccaaagtattgcagcttcagcttcaacatcagtccttc

SEQ ID NO: 50847 - DNA, 769 bp, Bovine  19866881155480
  misc_feature (1)..(1): n is a, c, g, or t
ncttacaacaaaggcctgtaaataaattcttgctgctggtgcccagcagaaaatcaagagttctcttaacagaaaagtttgctattcaacactcatggaattaattaccaatgtttacagcacaaattttaggcaggcccaagaagagtgatgcccactgcctggaatagatataaaactggaattaaaaaaaacaaagcctcatgtaggtcaaccaaccaaactcttaggccatagttttctatccaattaatgcccatttagtcctaaagagtaaatgtccgatcttttaactgaatgcatatatacatatacatcatatacatactataccacgtataattgtgtttattgtgctctgatgtaacaatcaaaattcttttcaacgtcggtcactttgatgtttatctctttaattctatcttgtagttttcctgccatgtttcacatacaaaaacatactgtatcatgatttttctattattttgactgtcaatattgctatatctcattagcccttgatcatatgcacatgaagatagaaacagagttaagggcaaaaatggaagcagctgcttaggcctttctcatttgactctcagaagaaccaagataattcacttccacatctacttagataatcagaaatgctcaaaacctccctaagagtctaattactgttgtttactccaaagtccacgcttactctttttcatagttaaccagctggcattcctgctactagttctcaagcattttattttcggtt

SEQ ID NO: 50848 - DNA, 1733 bp, Bovine  19866881159621
  misc_feature (1)..(1): n is a, c, g, or t
naaaccgcttcctgagaatccacccgagagctggcagagaccctggcagctggctcagtgctatgtgagcaggaattccctgatgctgtggtccaaagagacagagcacaggttcggtggggcacattcccttggttccctggacccagggatgatcatctgaacgatgagagatgggaacgttattccactggctcctcccattggacatccatcctccttcagccctgcacctttgggttccccagtgtgacccagctgggggacacatgcattgaataaggctctggggaggactgcagagagatgatgcaagggcttgcagcaaaatcctggcaggaagagaagaatctgagcttcttccatgttcaccacagctgtggttaaaatcagaagagacctgagtaaatgcaacatgggccccgagggtctctatttcagacgaggacagcaaaggagacagcaggggcatgctatttacaactgactctcacttaatgaagatttcttcatcttgacatatggcttaaaagcaataataattcctaacatttatatagcacgctcatacatatttatatgtcccaacttccaccaaggtaactattaccattacttttcaagggttaaaggaaggaaaggaaaatgaatatgtcttacagagcactggtataagaaatatatcttatgtatcagcgatctttgactatcagagacaaagataaaaataattaaaacaatcggaggcagttttgcccagcattgtttttagcattatattctgaagagtacatgagaatacaatgagatagcacccttgtgacagggagaagctgatacacttctttcagagggaaagttgaaaatacgtaccaaacactacttttaaatagctatttatatggaatactactcagccataaaaaagaatgaaattttgtctcttgaacaacaaggatgaacttggagggcattatgctaagctcagacagtaaagcatctgcctgcaatgcaggagacccagcttcaatcccctgggtcaggaagattctctggagaaggaaatggcaacccactccagtactcttgcctagaaaatcccatggacggaggagcctggtaggctacagtccatggggtcacaaagcgttggacacgactgagcaacttcacttcactatgctaagtgaaataagacagacaaaaaaagacaaattcagtatgacatcactttcatgtggactctaaaatatacaacaaggtagtgaatataacagaaaaggagcagacttacaaatatagagagaaactagtggtcatctttgaggagatggaaggggaaggggcgatgtaggggtagtggattaagaagcacaaactattaggtataaaatgagctataaggttatactgtacaacatggagaatatagccaatattttattataaatgtaagtggaatataacctttaaaaattatgaactactatattgtacacatgtaactcatattgtatatcgactatacttcatttaaaaaaaggtaaaaataatcactcatgacatttgatccagacatcctcaaagctgagtagaaagttgatatacaaaagtattcactgtagtcttatttttaataacagataattggaaacatctgaaatgcccccaaatatgggatagtaaaataaaatatggtgcatccatatgttcttatcttctggatttctcaa

SEQ ID NO: 50849 - DNA, 1008 bp, Bovine  19866881160379
  misc_feature (1)..(1): n is a, c, g, or t
naaccatcacattctctgtcagccccttctcctcctgccctcaatctttcccagcatcagggtcttttccaatgagtctgctcttcacatcaggtggccaaagtattggaacttcagcttcatcatcagtcttcctaatgaatattcaggggtgatttcctttaggattgactgatttgatcttgctgcccatgggctctcaagagtcttctccagcaccacagttcaaagacatcaagtcttcagtgctcagccttctttatgctccaactttcacatccgtacatgactattggaaaaaccatagctttgactagtcgtacctttgtctgcaaagtaatgtctctgctttttaatatgctgtctaggtttgtcataccttttcttccaagtagcaagcatcttaatttcatggctgcagtcaccatctgcagtgattctggagcccaataaaataaaatctgtcactggttccacattttacccatctatttgccatgaagtgatgggaccagatgcccttatcttagtttttttattatagctagcttcacaaaatttcacttatgtgaatatcaatatactacattttttaaatgccagcttttatcatatgtactgcttcaagtaacattcaattattatatataactcatttttaggcaaatatttttcattatttcagccatgaacacatgctgaagatagagatgacattattcaagcatgagcaggatttgaagaatatatttgaaagaccagttggcagtacactcaataatcttcagaatgtagaacataattgtgtgagggtgaaaagaatagatcacccaggtctgatgatgaaactgagaaactctaacttccacgcggtgcagaatgttcttgtgcacaagtcataagaatataaaataagagatttgaaaatgaaatttttcctcagcagagtggataccacactgcatttctcagctgcctggatatggcaagtgatgtatgttcataaca

SEQ ID NO: 50850 - DNA, 2127 bp, Bovine  19866881174911
  misc_feature (1)..(1): n is a, c, g, or t
ntggtttttccagtagtcatgtatggatgtaagagctggtccataaagaagggctgagtgctgaagaactgatgcttttgtactgtggtgttggagaagactcttgagagtcccttggactgcaaggagattgaaccagtccattctaaaggagatcaactctgaatattcattggaaggactgatgctaaagctgaagctccaatcctttggccacctgatgcaaagagacaactcactggaaaagaccctgatgctgggaaagatagaaggcaggagaagaagggatgacaatggacgagatggttggatggcatcactgactcgatggacatgagtttgagcaaactccgggagagggtgaaggacagggaagcctggcatgctgcagtccacagggctgcaaagagtcggacatgactgagcaactgaacaagtctttggctgcagtgagggagccagtatccatatctggacccagtacatttcagactatccatatcccttagtatctttaaagtttctaatactaaaatagcatgaaaatactcctaaggttgaagatccttacaaagatgctcattttccattaagatataatgctgtccttcaatgataaggataataaaatctcagagcagtggtgtaaggagagaatgggacaaattgttgagagtaccactaaaacatatacactgccatatgtgaaacagataatcagtgggaattttctgtatgatgcagggcacacaaacccggggctctgtgataactgagacgggcaggatggggtgggaggtgggaaagaaagtgaagtcgctcagtcatgttcaactctttgcgaccctatggactataccccccagactcctctgtccatggggagaatacgggagtgggttgccatttccttctccaggggatcttcccaacccaaggatcgaacccaggtctcccacattgcaggcagactctttaccctctgtgccatcaggaaagcccagggaaggtgagaaggaggttcaaaagggagggtacatgtgtatacctatggctgatttctactgatgtatggcagaaaccaacataatattgtaaagcaattatcccgcagttaaaaataaattaaaaaaaataaagttttgaacacatttcaaaaaagaaatctcagagcagctcacaggagggatgaagggcactcatgtgaacctcagagccccactaaaccctccaggaagtcatttccatcagatttcctactagcctggggtggagcggttgagacagctggcatgctgttatactcgcaaaatttaagatacttgtatatttcagcatgggcccgacaaaaacaggggcttgtgttttataagatgataccaaccagtccttgccattagtacgtgaccttcaattaagagtgtgaggaagatccgaagtggaagtggataattaacacctttcatgaaaaagtttctgaaaaatctttaacacaagtcacattacaggtgatgaggtaaataggaagaggatgaagaagaaataaaagaatttactctgtgaaagcgaattgagacagaggatttcagatatttattatttacttctggtctcttctcttcatacacacacatatgcacatactttcatattcatgttcagagaataagaagccaccctgttggagtaagacagaatgtaaataaatacattatatgggataagagttcaaatatctatgaggtacattaaagaattcatggtcttagaatttcatctccctcttttcagaatactgatagaatgatttcaggaaacaaaaatcatgaaatattttggagaaacacaatggatatttacattctatcctgggggttctgtcctttcaccaaagttgcataatatttacctatctaccttttctgtctgcttatcactttcatagcactgtgctttcattcctgggactttctggcatagaagaaaactgctttgcaaacataacagaaatcagagagaatgttaagttgatgtaaaaaacctaagataactttcaaacagcattcttgctcattgttccaagtgttttctggtaacttatcatttttagtgttaactaagattatt

SEQ ID NO: 50851 - DNA, 580 bp, Bovine  19866881225931
  misc_feature (1)..(1): n is a, c, g, or t
nacaggaatttcacactatgtgcacgtgaaattaagttcctgatacgtcgtgttattaatagaagcaaaggaagaccttgctggctaattctcatgaggatctctcttctggaatttaccagcatttgttacccaggatttctgaggtgttgctgactgctgcacagtagcttcgactgagcgacttcactttcacttttcactttcatgcattggagaaggaaatggcaacccactccagtattcttgcctggagaatcccagggatgggggagcctggtgggctgccgtctatggggtcgcacagagtcggacacgatggaagcgacttagcagcagcagcagcacagtagctttggtcaaatgattgggcaaaatcactaaagcgcagcatgaatcctggtgtttgcttgggctatggcagggtttctcgatctcagcgttattaatgttttaagccagacagttctttgttgtggagattgccttgttcgttgtaggatgtttagcaagatccctggcttctacggagctcccccgaggtgtgatgaccagcaatgcatctctagtccttgataca

SEQ ID NO: 50852 - DNA, 1299 bp, Bovine  19866881226044
  misc_feature (1)..(1): n is a, c, g, or t
ntgttctgaccgtgtgagtaggtatctataatctctgaattagcaccacaatcaaagcagatacttgtgaattaggttaaaccccacaatactggaaaataaaatttaagaggaagccagttgaaataaacgtcagggcctttttaactcatactctgtcactgtcccagggaaaatcatcagctccggtaatgatgcttttcccagaggccgagcccgccccccatcccgtgatcattgcccttattcatttcttgtctcaagtcatctgcagcagacctattttttaagccctacgaaagacagtcaagtcataattaacatcttttcagtggacagtgacttagctccagaaatcccctcaaacctcatcagagtgaactgcctaccttaacgctttgcaaaatgaattaatatgcatctcacctccaccctttgaaggaggtgacagtaaccagtgaaaatgtccaaaaagatggaagagcaaaaactgtaatcaaacaggctgaaaaagaaatctgaatcatatttgcctctttcacacacaaaaatatactgctcaaaaaacttaaacatctactttttgacaaaagcttataaaggcttttaattacttaatttgtgtctttcaacgtgtaataaaacaatgagaaaacaaataactgtaggagtaaattttaagtaatggaaaaagcctagctcccttaattaaatgcattttttaaaaccgaataaccaaattcttcaactcttaaaacaatctgccttaacgagccccaaggtgattcttgagccactcataggtagaagaagaggaaaaagttcgatgaccttgtaaattagggactaaaacgctgtccgggtgtgagagtcagtacggtctcagtgggaattacaggaaaacatctgtccagaaattgttttttggggggaaattaccatgaggaaggggaaaagttggaggtaaaaacggggaagggaggtgacgaatggtaaaataccgaatgggaacccaaacgatgcaaaattacgaccttttttgccccagctgtcaagcaaacaacttctaagcatcttcagataaaaaggaaaacagtgatttggcacaggcgtcagctgaatgttgggagagttggatgaatggggcagacttgttatatacacctagtggtggggtgggatttcccaggctgcagcctccacagcttttctttgctgcactgcagaggcgccatcttctccgtcttaatcttcgctcaatttccagccttttatctgcaccctaaaaaaaaaaatgac

SEQ ID NO: 50853 - DNA, 742 bp, Bovine  19866881235035
  misc_feature (1)..(1): n is a, c, g, or t
ntaatggtgaaaccatcccttactatggtgtcatggttcttactacattatcaaatgtcaccaagtatgaaagaatcctgttaatgtctacttactgagtaatgttgtaaaatttcaactctcatgagcaagcaaattaggaaatccttacaatttctggacctacataattcttcctagtttcatctgtgcctgttttctctcatgatgcgatataaccaactcctgctagcctgtaaaagctgattattaaaatattgaggaattttgtgagccacagccattggtggcttgcaataccaatggtgggagtatttacaccccagaaattgacaaacactataaaacagagtgtttaatttttctgtttttctggacacacaatcagatttcccagcatacctgactctcagtcaaagaagaaaaataatttcctcttatttcctgcaaaggacatgggctcttgtcttatcagagtttagagcttctggtaatactgtgctgttcttcagaggaaccatgcagcttgatgacaaattagtttattcccgtaataaacgggaaacaaaggtattaggacaaatagcagtgtccttttgtgaatgctcaccagcaagagtatggttagtctaacactttacaagtatttttccaagtggcatttttataactaatctttcttcatgggagggatctgagaatcagattggatataattggaatgacacatgtactgggtagc

SEQ ID NO: 50854 - DNA, 1737 bp, Bovine  19866881343800
  misc_feature (1)..(1): n is a, c, g, or t
nggtttaagtctgtaagagcggcctatcaaagaagcaaatttacttcctatcctcagaggttttaccatttacaagaaagaaaaagtagcacttataaacatttatgccaagaggcagtcagtttaacaaaaagctactggaggtgaggggtcacttttgctaagctcaacaggcagattgcattttaaaaaggtggcatttgtgacaaaccatgcatttgggtcagactgtaatttgagacattctaagactcaaaagcaaggatgagaaggtgggaaagcattggctgtatgtgggaaatgctaagcagcctagatggaaaagctagcaggacccagatcacaggaggcccagaatgtatagtctgggagtctgtattttgtttgctaagcaataaaatgacaaaattaaagagctgtgctttgtaaagataaacacagcatcatggatcagctgggcttccctggcggctcagatggtagagtctgccggcaatgtgggagacctgggtttgatccctgggttgggaagatcccctggagaagggatacccactaaagtattcctgcctggagaatccccatggacagacaagcctggcaggctatatagtccatagggtagaagagttggacacaactgagcgattttcacttcacagaccagcaacgggccaattagacctaattaactatttgcacaaattcttgtttgtcataatgttactgccccgtttaacaatgaacaatataataaaaaaaattataagtgaaaattccatcaaggctagtattttcacctatgcctatgataaggcataggatcttatttgttatttccacaaaaaaatattaagccagctctaatttaagaacttgttaatgatgtttcttgtcacggactcagttttcttctataccagtatgtacaacagaaactttctatgataacagaatactctgtgtctgtgctgtctaacatggtaaccactagccatatctggtattgagcaccagaaatgtggctaaaaggcaaatgaggaattgaatttttatttatactcaattagaatttgaatagtcacatgtggataacagccacagaaatatatagcacagttctagacagagccttctaactggatacttgatgattgacgatcattgtccagttcttggatccacaagcttttggaaacattactcttccatgccacctttcaaatgtaccagctagaaaagaggattccttccaagaagttccccaaacactgaatgtgtcagtaccttatcacttaatctattttaccttctattatatttacttgcttacaaactttctaccctcttagacttaaagaatattatggaaatgccaagtggcttctttctttgtagcccaccattctcaatagtccagtgctctgcatatggtagacaactaaataaaacaaaactctgaactaatctgtatcactttcccaaagattttggggttaaatctgatgatggctaaggtcattaatcaccttcaaaacttttgcggttctgtaattaggttttccctggatttgctttatgccatttcagagtcttctgtcttttgacagtcccagaaatatattaactatggaaataatgttaaagaaaaaaatgctgtgcttatacatttctccccaaatcaatttagtggtcccaagatcactaaattgagagaatattctgagtatattttcc

SEQ ID NO: 50855 - DNA, 849 bp, Bovine  19866881457763
  misc_feature (1)..(1): n is a, c, g, or t
ncttgtgtgtttgtagtgggaagggcagctgtgtgataatcaaaagcatatgctatttggcccgactgttcaacaaatagtttctctctcttccctgttgtattttcaggtgtattttttttttttacatgagccttcacttgaggtgttacattacactgaaatctctgaggatcagttctgtgccactgagggcttttagctgcagaattttttttttttttaatagttgattggatgctatctcgaaggagtctggctgtccacactgttcatgcaattcttggagtctagtgagataatctgatttttaaaatgctgcctgaattgcaaaatcatgctcttttcaggaatgtgttctcaaagagttagaaaattaacactgaaccttgtggaaccacctcgctttgtgtgccctatttttttttccccctaagaggagtctgaggatcctgaacaagctgagttgtcactggcacgtgggagttggtaaaggcaggagtgtgggttctgcagtttcatttctccacctgaggaattcactctcctggtgccacaagaaaaaaacaaaatctcacaagcatctaagtggaattactgttccacgccctcattgatgattacactttctacatttgagtttcttactgttgttgtgtttcatgtcagacattccttaatgttttccataaatatttattgaatgcctttatatgagggggagagagagagagaggtgaatagttaaagatcaaggtggatgtccagtagacagtgaagttcctcatctgtttgtatttacgttgaaaaaaaaaaaaggaatgcttatcccgcacacttgaatcattt

SEQ ID NO: 50856 - DNA, 1911 bp, Bovine  19866881497777
  misc_feature (1)..(1): n is a, c, g, or t
nttcatgtactgttgaagcctagcttgaatgattttgagcattaccctgctaacatgtgaattgtccagtagtttgaacattctttggtattgtccttctttgggactggaatgaaaagaccttttccaggttccattgtaggtaacctagagaaaatataaaaacatgcataattctaccacctgtaaatgcctgttgtatttcacgttttaaagcatttttcagatcatgctgtaggttccattttatatcctgcattttattccttaacattaaatcttctgacattataagttctttgtaaatgtagtgtctaatggatatatgaatctgtttagggcatcaggagctatgtaattgtggacatgtgcttttcttatttggcatttccaacccgaggttaggatgaaagtagtgatgtagggagggagcttgcgccaaatacttgttaatattttaagtatttattgaatgatttaaattgctgccctcgagtagtgttcaacacagtggtccttcagctgtaaatgacctaaaggaaaagagatgagcaaggactgtagagattaacaaggataaagaaataaaggaaacctgacctcgtcattcaaacaagcagtcctcttatttagtagttccatgatcacttttgtagaaagaagtttgtaagatgctgttaatcctgacaagcaaatgtagtcagggctcgaatgtagaagtcagtaaaattgtgatttcagtttctagagcccctcattaggagctctaattaggtaacgtgtttacacagatgtaaataaagtttcctcctttcatctccttggtgttcaatttgctcctcattttatgtggttgaaaaataagttgggcaaataagaaacatgttttctgtctatctgactccgcagacccaaaaatgaatataaaaatatctgtaaaggaataaaaatcatgctgattaaaaaaaaaaaagttgggaagatgtattccatgaagttcccaaaggtaagaatctttagctacaaaaaagaagaagatttgattttaaatttaaaaatgtgtgtggtgaggtgccacttccatagaaccctgcctagggctgtggaacacattcagccagacccgtattaatctttgattattatctgctattcacatcgacaattaaagaatactatatttcatttcataggtttttggagtaaggattatgttgttggctgaaattgaatactgtaaataggcaataaataaatgttacccctgcgagcccaaacttgtttttctttgttttgtcatatctccacaattaaccactctttattaaaatgatatatagtctctcagacctagttatttctttagggctgtctcttctatgaacctcttcttatactccgtctccctcaactcatgtaaaaatgttaaccaaaccaaatgtgtatgctttttctccattaatctgtcttttgtcagtttaatttgcacagacccaggaactaaacctaacagggtagagaaaaaagtgttttccactcctacaagtattcagctggaggaatagtattaataaatgcaaaggctatgaggtgtctgaataagtcggtgaattgttacaaatatctcatgaattatgtctataatttatcagtgatggctcacattcttgaatcatttgtgaaactaatggtcagtgtcttccatattgaatttactcagtgttggagaagaatgcatgttttaatcaagagggatttatgcaagacgttctgtattctaaacattttttaaaagagttcttcgagtatataataattcagctttgcttctctttaaaaatgtaagatggggagaactactgttctacagctatttcagggtttttgtttttgtttctagcaagcattaga

SEQ ID NO: 50857 - DNA, 1528 bp, Bovine  19866881658932
  misc_feature (1)..(1): n is a, c, g, or t
ntatttctattaatattttacttattaaaaacacagcctcggatgtggtcattcgcccttggccacttacactataaatatcaggtttggctgtctccgcccccctttcccctctcgtgctgccaggctgcgtgataaaggaccaaatcaccttttgtatccaaatgtctttgtattctcagcaacatttttttctcctgttctgaagacttggcttgctgccattttcttctccctcactgttcctgccaatgtgtggcattcagaattgacttgggcatataatcccgtctttgaatgcctggtctgtatgcatccctaagctgtatggtcttgttgaaactgctgatccaaatgacatcccgtctaggacagcttctcttcctatgtacaccgctgctcactttttcttattttcttacctttctatttccagggccacacccaagaggctttatccctccttcatggctttaccgagcttcccaggtggctcagtggtaaagaatccacttgccaatgcaggagacgtgggttcgatccctgggtcaggaagaaggagaatgaaatggcagcccactctagtattcttgcctgggatatcccatggacagagagcctgggcggaggggttacggtccatggggtcacaaaagagtcagacatgacttagcaactaaagaacaacaagcgacctggctttgctgtccccttgtccattgttaatcctaaaagctttgtttctctcccttgcccatttcttgaaagaccagggtaagttcaagttaatattttctgagaaccagaagcactttggaaataccagctaatggtaaataatagtggacactattgtgcctccttcagtgttttctttgggtcaaacccaaaattgtgaaagtcgacaaacacaaaaggaaatactctcacttcatacatttcaacggtatgtcatctattaaatagaaaccagtctttaaaaatacagagaggaaaaaaaacacagagagggagataaactctggcttacctctgcctccctcaaactgggaacaaatttcattcgctaaatggcagattatgtggtgaagctttgttctcctgataaattcctatttgcatttcccctggggatttaacagagtccttttgtagttaattaactgtaaaataagataaggttggacagttgtaaaaggagttatctttaagattttccactggactgggcatcatgtattttatttctaatcaaaagccaagaaactatctctaaactcactgggaggaaaacccactctcaccagcccctctcctttgatgttgccgcgtgtcctggtgagtgcttttattggaaaacttaaggagcaggattggcacatcaatagcgataagccttttgaagtggtgcccctcccatccttgatgctcgagattaactgtggttcttttctagctgctcctttttttatatatgacttgtgtattgcacatgcttttttccctgcgctgtgttcaggagccacaa

SEQ ID NO: 50858 - DNA, 732 bp, Bovine  19866881743563
  misc_feature (1)..(1): n is a, c, g, or t
naaaaaaagcaggcaaaggacatggggggcggggatgggggcaggggcaaggaccatagggtcctgctccattttagaaggaaggaatggagaatcatacaggaagtttttctaggtcaaggctgggaatagcatgtattccattggctagaactcatgcatgtgaccccatctggctgcaaggggtctggcaagtgtggcctggctgtgtgctagtgaagaaaggaagtgggtctcttgaataatagccagtctctatcacagatgtccaataagtccatctttactgggctgttaatatacttcttcagcttgtaaataaccaatgccatttgatgtccaaccttcagtggctccggcagttccatcatgtgaagtgcccaattctgctctgcgtggaactgtggtagagctgcgatgtcaggacaaagaaggcaacccagctcctgaatatacatggtttaagaacggtgttcctttgtcagagaatccaaaacttggctcccatatcaccaacagctcatacacaatgaatccaaaatctggaactctggtaaggtcattttaaacattggcctaatgactgtcttgcatttgggaaaaagaaattattagaactaaaataatgtgagtagagggctgataccattgcttgttaagtagagagaggcaaggggagcaggaaggatggagccactcacacagagaagtgatgggaaacaccgccatagg

SEQ ID NO: 50859 - DNA, 2674 bp, Bovine  19866881746300
  misc_feature (1)..(1): n is a, c, g, or t
ntctttcgtcgcattttcccaaaacccatttccaggttaaaacaactgagaccttcagtataattttactttgatttactttttaatcatctttacaattttgaatgaaagacagaagctgtagtgtttggaatgagagataccctgaaattactgctctatttgaaagccttaatcatatataatttcctcgtttataaatgttaaatctcaaatgagagatctgccttcttcaaacatgttttgtgtgccttttctgtgcaacaaggccttcctttgaaaagcttgttcagacttagttttgattcaaagcctgagcttttgcatgcctagaattcttgctcttcaaaatatttgctccctggagaggtcagctgaagatggagttgtcatgtgactatggaccattgacccggaagatgtttaggtaacggaatgagctttggcggagttccactgctttctttctagttgaggggagccaggaaaggagggcagagctggctgtgttcagatgggaagaacttgcttaaaaatgtttgagacctgaatgtacccttcatttgatgcctttgccttactgcttaggaacattttaaactgcagcattcctaagtgggccgtagcgtgtagtgatacatatttaagtgatcttgcatctaaacaaatgcattcaccctctgcctggtgagtagaatctgaatgatgcctgtactctgttagaaagggacagacgttttcattacaaaattcagtcaagcagaaaagtagcaaagtgagcagaaattttcatttacatccatgattgaagttgcagtgataaaagaaaatcgctaggttcacgaatagccgtgttctcattctgttatataacacggaggatttggtcaatacggaaatagttttttgatacttacattattgaggaaggtgctgatggatagctttaaattgtacataccttttaactgaccttagttccccccaacccagggttttcatagtatctttaaacagactccagtacccccttattatcaagtccattattgatttgttaaaatatggactttatgttccattaccatagagacccacagtaatttctttgcctttacttgtgaacaccaccaggggtggggcctcccaagtgacgcagtggtaaagaacccacctgccaacgcaggagacacgagtttgatccctgggtcaggaagatcccctggaggagggcatggcaacccactccattattcttgctggagaatcccatagacagaggagcctggcggctacagtccatggggtcacaaagagtcagacacgactgagcaactaaaaaacaacaagtcagcagatgaaatggaactcatatcactagggccaaacctagacaccaccatcataagagacgggattagagagtgagatcaggattttccaatttccctgctaaatagttcatgatataccttttggtatatatatatatatataagctttaatgcagtaatttgctgccccaagcgctcttccttagaagcccagaatttcacttctttcggttctctcaggagcagtgagccctggcaaactgatttacagtaatgaagctaagccttgtttacaaatctaagtggcagttgctaagtccacagttgaatggtaactgagggagagattcttatatggccagatccatccccaatgaaaagaacatgtgatttttgaaggatgattcagaactgggtaatttctaaaacatatttttattgaagaacttgatgaatcatgtatacttttttttttttttttttattctgtgagataattgtgtccctctcccctaggtcgtgattggagtacaatgacaggactccagtcctttctgctatccttgaacaaagccctgggaatttagagcagtgttctcatgccagtgaaaggttgtgctcattccaaataccgcatcctagatacttcctggctagctcttttgttaaatgctgtgatatcttttttctgcgtcattctctccttatctacttcctcttgccccaaatagttttgcatctttttaggatataatttttgtttctggaaagttttgaagtagaacatccctgaaatacagggcgacatgtattcctctgattcttaggagacacccccactgtctcctaaaactagacatttcaggtctaggctacacaccagagaatccagaaggtacttaatacgctcccaaggggcacagtgtggcagttgggtgtcaaggggtctcccaaatagaagaggtttgggctggaacagccaaagtctgggcatggagaacacatggagtggtagctggttgtaagcaccggtgatgaataaagtgtcaagggtgctgggacagactggcaggaaaatggaatgaagccagtgaaactcctctgctaaccttagtgagtgatgaagactccaggacatggggtcatgatgagcagatgcacagatggaaaggagaggggagagctagaatgatggtttttatactcaagaaatggtttactggaattcggaacatttttacatgtgacatgagctgagatccatcttcaggaatatggatagttggagggagtagagaggtacagcccttggggctagagacataatcagggtaaatatt

SEQ ID NO: 50860 - DNA, 884 bp, Bovine  19866881812197
  misc_feature (1)..(1): n is a, c, g, or t
ntgtaagaggatttaacacctggcacacaaaacattaaaaacaaccctgagaaaaccctggtaaaacacaaagttaatcataatgacctcaattagattttcagtgcctgtcaagttagtagcatatagtgatattggcttaaaacccttgaagttgaaaagcacaattccttaagagagtagaaataatagaattttaatttttttcttaaagggccaattttgatcctagttcacactaatgtaaaaggcaagtattagcagtaaaatggcaaaaaaaaaaaaaaaaagaagcaaactgcaaaaagccaaattataatgaaattttcattttgatggtcgctcaatttcactccaatacacaatgtcttctcttcaaatttcactatcttgatcaaagaaaatcatttctaaacaccttcaactgaaaatgtcccagtcaatcagaggattgatgaaatatttcaacaacaggcattgttttccctgggtcaactgaatgtctgaaataaagagtagcaaatgaagttactgacagcatttcatatccttttcacaataaaatgttttagaaagattgaaagagtaaatcttatttaaaaggcttaatttttttttgtagacttgtagttaggtgtcattcacaacttttttaaacataagagaagctagctgtcaagagtcaaacataattatcactacagtataaaattccagagtcttcctttagaaaatttgtcaagtatttagtaaacactagatgtaaggcactgcagtgagttatgaaacaaattacagaaatagtttgtgatcaagtttaacattaacttctctgccccactattctatttttaatatctaaccaccaaagtacatccttgttc

SEQ ID NO: 50861 - DNA, 944 bp, Bovine  19866881939443
  misc_feature (1)..(1): n is a, c, g, or t
naccccatggactgcagcacgtcaggcttccctgtccctcaacatcttccagagtttgcccaagtttatgtcctttgaatcagtaatgccatccaaccatctcatcctttgtcacctttttctccttttgacttcagtctttcccagtattaggatcttttccaatgagttggctcttctcatcaggtggccaaagtattggagcttcagcttcagcatcagtccttccagtaaatattcagggttgattagtttaaggttgactggtttgatctccttgttgtccaagggactctgaagaatcttctccagcactctaatctgaaagcatcaattcttctgtgctctgccttctttattgtccagctctcacatccatacatgactactggaaagaccatagccttgactacacagacctttgtcagcaaagtgatgtcttagctttttagcacactgtctagcttgtcatagctttcctgccaagaaacaatcatcttctaatttcagcccaagaactcgatgctgttaattaaataaagctagtgttagaagcagaagcagaggacagcctctgaatatcaggcatactgaaggaaccagtgatctccacaccctggtcacatcggagttacttatgtgaatcagtctaaaattggactgtcaccttcccacataaaacacagcaggatacaggcagtgtggacgcaagagagaaaccaggacttgtaccacaaccatggatgtcaggccacctgttatactgaaaaacaaaagcaggacatgaaaatggatgaaaataaaaccaaaaaaatcacactgaagcttgcttatataattgaaaaacagtaaacctcttttgggggtgcaaatttagtgtcaccctcagatttcaggctaggaacatgctcaaatataatagagcaagggaaatcacactttct

SEQ ID NO: 50862 - DNA, 1158 bp, Bovine  19866880452705
  misc_feature (1)..(1): n is a, c, g, or t
natgtgagagttggaccataaagaaagctgagtgctgaagaattgatgcttttgaactgtggtgctggagtcccttggattgcaaggagatcaaagcagtcaattgtaaaggaggtaactctcaatgttcattggaaagagttgaaggctcattcactgtaaatgtagatgaggccaagagaggctgaagtctgaagtactcttggtataatcattacactaaactaatttagaggtccccctgccttggaaattaaaaattctaaacaaatctcattttttccatcagccttctttttaagaaggtggattatgaacattctctccatccttgaaattgggctggtaatcttgatttgtccatagtacaagcttagttgtagtgaagagaaaaaaaatcttgggtttcctgttcttagagtagggcttttaataatcagaccagaatgaccatgtttctgttgttagcactttaaaatcattgtatcgagtcttgtgaaggagattttgtttagctgctacatgtggactgtaagattttaggtttctaatctccttttctaccactttttaaagttgtttttaatacttttgttgaaaaagctcaacacaaggtaatgatttgcttcttttaaaactctatgagtacttaagatagtaaccttttttatatttaacattccactgtcaccactatgtaataattttatatactgcaaataggcttacgactagttctcattagatagctgatttaaaaagaaaatatttgccctgataatttagttactgcctttcgtggtctactttctgacttatttatgtgttgaaaaggtctgtagtaggaggacagaaatttagaattagttttctcatgaaatgaaagaagttatcttttcaaaaagctacacaaacaaagaactacacagagacagccagctgccacaataactaaatatacatcttctgctttattttcagtcaaatacatggtaattgtgatatttacgctttttgtgcagagcttattctagaataggaagagattactacgactgacagtatttgaagaacctcgtgcatctttgactcacttgtgtgtgatttaggccctgctctgctgttggattcctttgaggtctaagggcattggttggg

SEQ ID NO: 50863 - DNA, 1788 bp, Bovine  19866880639212
  misc_feature (1)..(1): n is a, c, g, or t
ngctgttttgagaaggatcttttagcttcttcccaaattctggcttataccccaaatcttaatttgggttgagcatatgaatatctgggttaaaaacagtcatatccttaaaaaaaaaaaaaaaaaagtcatatcctaaaacagtttgcaaatatatgatcacccatccctttatctaatatcctacttccttttcaaggtgagccttgagtaaatatgacagtcctcctgggaattaggggtaggactaggtaaaatttgggtttgtaaaaataaagttcaaggatattttgtaaaatttgtagtgatgaaagtggacaaagggcataaagataacttccctacccttatctggaatttagtaaatgagcagatacatatatgactgaaacaaaaaagaaaagaataagaaagccacacaatatgatataggctacttactaaaatttcattgaaaagtttaatcatttaaaatatccatattacttaagagaaagatatttagtgctaagtgatccacaatttgatattgaaacctgtcacagaaagactgaaagcaaaaggagaagggggcagcagaggataagatggttaggcagcatcactgactcagtggacacaagtttgagcaaactccaggacatagtgaaggacagggtagcctggggtgctgcagtccatggggttgcagagtcagacacagcttagcgaacaaaccatcaccacagaaagttgagtacatgacctatttttcctaatgtgatagtatactacagcaggttgtgcacagcagtatggtatgacctgaggagactgaaatacccaactggagtcagaacaccatggtcagattccaggtctaccacctaatcttggtcaagccatatactccatgtatgtggttttaatgtgaaaataggtaaaataatgtgtgccaatgtactttgcagggttcctgtaagaatgaaacaaaaataggaaaacacataaaactatacattaccatagaaatataaagaacctctcaaggtgttaactacagagtgatggaaggagaagagaactttaggaaaggcaaagaaatgaatcaaagaatggctgagtggcagtgacagtgtaggagttgtatgctgtaaacctttttaaaacagtttctagcacatttagctctttagtagtggaaactaaggtataaaaagagtgagacggccccagctcgtattgccaaggtaaaattaaaattgtaagtgaggaagaaataaacatctgctatcaaaaaacaagttccaggttgttttttttctttttaagatgagtgattcaagtgagaaataaaaatataaaagaaaacacagcctggttccatgcggctttacttctcctggaggtgataaccatggagagcggagaaagcctcaagggaacaagggcttgcagggctgaagccttggaccagcctcgtccaagagctccgcgtcctgaagtcctagtaaaaactacaactcccagaaatcccggatcccgaagggggtgggcccaacggtgtgtgggcggggccgtcagagcaagcggggcgcttcttccgtgaggagctgctggagaagtggcgggactggcggcgatggaagctctagaggagaaagaggcgcaggtgatggggcgggagctgggctttgcggcctccgggaaaccgcgtctttgacacacccgccccgccggcggatctcctgggctagccacttttactatgttcctctgctgatccatttttagtccggcttcaccatt

SEQ ID NO: 50864 - DNA, 1402 bp, Bovine  19866880859416
  misc_feature (1)..(1): n is a, c, g, or t
nacgcgcacggacagcatcttcgcagctccccttgaggtgcttcctccgcagccgcagcctcgagactgactgggacaaaatggccgagctgcggggaaggtcaaagcagtcagcccacgtgacccggatgtaccgcccctcgctttcacccccggacgcgaatctgccagggtgcgggtggggggttaattactttcttcctttaagtatcatttttagattttgaacctccaactgactgattagacgtccgccagcgtcgatccaggcactggttacatattcactttgatctttctcatcgaccttgtggttgccctgggcgaccgcatggttatagcggaactggctgagaagcagtttccaggccgcatcctggtagaaaaacgatgctgccgtcaccttgtcctggggcgcagctggctagcttgaccatcgtgggggttgactgtggcgggtcccgaagatacagctattaaaccttggtgatgtgggtgcaatagttactcttcttgggcgtgtaggcagcagagcatttcctgctgtgcgaattaacgcggattaatcttcagatcgctagccacacccccagagactgagtcaaaaactgggggcaagctgaacgtttgaaaagcaccctcactgtgataagcactcaaattgaagaatcgtagttcttttagattcgatctgaaagaattatgtctgccaattagggcaatgtttaacattaaaatgtttaacaagcaaaaatttgaatagagtggttgctaatcctgggaagaattgtccagaatcactccagagtgagctagggctcaatttttcctttaaaagtagctattttcatgacagtatagacactactttttcatttgaagtaaaacggcaatgatgacaataactttctatacctacccaatgaaatcagggcaggacttttgctccccccaaggagattgtgtgtgtgtgtgtgtgtgtgtgtgtgtgtgtgtgtgtgtgtgagagagagagagagagagagagaaagagagagagagagagatactgagataattgtgaaatgtgaagaatttgggttgggaaggaaaatgttaggtattttgtgatgcttgttgagtcctatcagactgcaaccccatggcctgtatcccaccaggcttctctgtccatggaatttttccaagcaagaatactggaatgggttgtcatttcctccttcagggtatcttcccgacccagggatcaaactccatgtcttttgtgtctcctgcattggcaggtggattttttttttttttaccactgtgccattttatggcattttatgatagtggagagtatttacattaactgcacttgtagctgttttgagaaggatcttttagcttcattcaccaa

SEQ ID NO: 50865 - DNA, 1388 bp, Bovine  19866881138693
  misc_feature (1)..(1): n is a, c, g, or t
nccgacccctccatgcccccatgccattcagtcacctgtcaggcagcatgagctaagcaggcgggggccagaaaccgctgcctcttttgcttctcccactttccagggttctgatatacccctcttccttccctctgtccctcccttctttccttcagataccttgctaaccctatggtacaggcatatattcactattgtaaggtataccaaactacctttctcagacagatttagccccaccaccgtcttcccccatccatgggagcacacccctcacctgagtcttctactgcagtctttgaagttgccagtttcacaaaaagctgtgaggaccagaaaaaaaacaagaagaggaagtcaggaatgctgggccaggcttctaaaggcaaaacaggtttaaaagcaaagtctgtgaagagacaagttctaagtcatacttatgtttctcttgtaagttaatcactcaacttgctctttaatcttcctaaaacatatccctaccttctgattgctaacaatctttatccagatttcataaaattcaatttattaaagacccaagcaggagggagcctcgctctaaggaacacatgagatggagttttgaagaaagatgaaaacatcagaacccctcccccatgaccaggtttctctagctcttcctcaaaataggacatgggtttttccggctcagaggactctaatagcctgaaggagggtattgccaggagcttagagtgcaagtccattttttgtttgtttgttaagattattaattggctctagtttgacatacgtgaatcttggatttttcaggctattggctctcccaggtaccttttcttgttgcttcgggtttgccatgttggcactgcggtggacagcctgctctgcttcatctttgtctcggcatttctgctcatagttcttctttgcctttgtagttatgagacaaaagaggatcaaaacagataagcagactgtgactctgaggagcagccaccctaaccgctcccctcacccagcaaataagagggcacgctgattagggctgtgatcgcctctagactgtgtgtgctcagagcagctgctctttttaatctatctctggaaggtttctccatcccctttccaaatcatgtatgtagcggcaaccctgatcaaggaactaacaactcctatttggcaaaaacaaagtctatgaactttaaaaatttactgaaacaaaagactgaatataaattaggcaaaatcaaatacctgatgtaactagaggacgtgtaatccaacatttattcattacactcagaactgagatgcaatgatttggtcctgagaacttaactaacaatgccttcagtattctcatgtacctcgttacaaca

SEQ ID NO: 50866 - DNA, 1031 bp, Bovine  19866881147532
  misc_feature (1)..(1): n is a, c, g, or t
nttccaaggcccgaagacgagttggcttgaaagcccctgggatcattccctcgaatctctgtgagggaaccaatgcaaactggcattaaggctgtggatagcttggtgccgattggtcgtggtcagcgtgagctgattattggtgaccgacagactgggtaaagacttaacagcttgttaaaagttctaactaaaacatgctgtattgaaaggttacttttagacttggaatggtagatattaatacttggactatacggcgagagtagactgtaatatgagagtaacttgtagtggaatttaagttggggaattctttgaagtactcagtaaggtttatgtttgtttattttttcttatagcaaaacgtcaattgcaattgacacaatcattaaccagaaacgattcaatgatggaactgatgaaaagaagaagctgtactgtatctatgttgctattggtcaaaagagatccactgttgcccagttggtgaagagacttacagatgcaggtattaaggaatttcagtctcattgcagttatctgggatgctgcaaatcttagactagcttatgcttataatgaagtctgattttaattactccctaatgaactcaaatttctactaatacaagtcaatacaaaagtaagaagtaaaaaattatatcggtagtataaagcagcagtaaactgaaggttttgttagtttctttaaactagaagctattagactgggtaatcttaatagtaatgacagtagtaaagtgcttaatttttattctagtagcctctaatttaaaatcatagtattaataatcatgtaaaacttaatgtttattttcttctcagatgccatgaagtataccattgtggtttcagctactgcttcagatgctgccccacttcagtacttggctccttattctggatgttcaatgggagaatattttagggataatggcaaacacgctttgatcatttatgatgacttatccaaacaggtcaaaagaaatgtgtttttagacatgttt

SEQ ID NO: 50867 - DNA, 1978 bp, Bovine  19866881174917
  misc_feature (1)..(1): n is a, c, g, or t
nataaagtaaaaaaagctaagagacatatgttaccaattcctcaaagtaatctcagttcttttaaagaatcaatctatagaaaaccaccaagcaacatggaacctttattttaatgtgattactgtacatctgcagtattggagtaatccgaatggaactagaagaaacaatgacaaaaccaaactggcatttgatgtgaatccacaggagtttaagcttcaaatccagccaagaagtttgttacaatctctttcagctttgcatctgactcttctgagatctttccatcggtcctatttgaaaacaaaagcagatcagttgtgacctgggcaaaaattcaatgactaacctaattacagaattcaaaagaattttaacaagactttttattttaaagcttacaaaaaaggagacatcaggttatgttcatacctgattttgctcaacagggcctgatgttggctgataacgtgagacaagaaagcattctcaaattttgtgatcttgctgggctccagcttgtcaagatagcccctgacacccgcatagataacagccacttgctcttcaatagccatgggagctgaaaagaaagaagtaagttgctcaacaaatgcatgccattgtttccagagttagagaaacttatttttttcacaaattattaacatgtcttcatagatcatggaatttcacaagtagaaattccattattagtactccttcccacctccctggagaaacagtttttccccttattggtaagccttgaagtacaatctttgcacttattccatgagcaccatccatcagccaacaggactgtctggggtaaaaataacttgctgaaattttataataagataatatacattttttggctgcaccacatagcttgcgagatcttagttccccaatcagggatagaagccaggtccttggcagtgagtacagaggtcctaaccactggacccctggagaattcccaatactaacgttctttattagttactctttattaattattagtttattagttatctattagttatcccttgtggctcagctggtaaagaatcccctgcaatatgggagacgtgggttcaaatccctgggttgggaagatcccctgaaggagggaaaggctacccactccagcactgtggcctggcgaactccatggactgcatagtccatagggtcgaagagttggatatgactgagcgaccttcaccttcaacattcttttaaatctgccagattccacacgtatatagccaaggaaatggtagggagacatagaatctactatgtcttaatttccaaaagaaaggtattattatacccttcctagcaattccattgaaatgatgactgtaattaattaaaacaggtatcaatcacattcaaaaggcaacatctttaatcaaaggtaatggcacatactacagtttgtaaggagctatgtgatattcccaggtcctaacacagagtaggaacttgaccaaatgtacaactcacaatactgtccctgcttgagcagctcagtcaaacgcacaccacgactcaagagttgttgagtggcagcatcaaggtcagaaccgaactgggcaaaagcagcaacctcacgatactgagccaactccagtttcatagtacctgccacctgaaacagaaatggttaactcaaacaatacaaaaatacttcaatgacacagaccaccacacaaatacatttttatttttaacctaatgacaaagtgatacaaattacctgtttcatggccctggtttgggcagcagatccgacacgggacacagacaaaccaacattaatggcagggcggatacctttgtagaacaattctgtttccaagaagatctacaatgtaaggaaaatacagaggcatattagcaagcttaaagaaatcaattattttcacaattaagtcactatagcaaaaactgaagccccaa

SEQ ID NO: 50868 - DNA, 1928 bp, Bovine  19866880454883
  misc_feature (1)..(1): n is a, c, g, or t
ntcttaaccaaaatgagactgggccttccagatctatggctaaggcaccatgcactcaggagtttggttggaataatgttctctgtatggtttagttggccatggcctacacaagggtagagggtaccattagttaaagttcttagtaaaccaaagattccctaaggcatggtaggatatagcttttacagatagagtcaaacactcctttcacagtactcaggctttaatagtgagaagactgtttaataaatctagggttggatagtagagaaaatactgaataaaatttcacaataagtttttgttagactaaagcctttcgtcatactcactaagtctaagacagcatatttccacagtttcaacacaacaaatgccagggaaaacagatgccttaaatttcattcttttgggaaacagctttgggtcccctttcagagtgtaaaatggccagagcagtccacacgaacacacatttccagcacgcttcactgtagagaatgaaacgccccaggcagcaacatgattcgtgccaagggcatatggcaggtattatgattagttagggatgaagattcaatttgacaggttttctttttgttgttagtcatttcagttttcaaagtgatcagaattaatagtccaggccaggtaggtgggtatctagaacgctgatttaataaaaagaaagccggccttgcatatcatttcaggcaagatttgaattattgcatccagcattatgactactcaggcaataagatgcctggagactgaattcccaaagaaccagtagctggacaaggccaatatcagaaagggatcttgtcacaattgtgtgtggtccatttagtaataggatattgtgactccccatctatgccaaagacagatctagctggagagatcataacagatttcctaaatgccagaagctggtctacctcatctagtcctccttggagggtagggagccagtcctcagaaccaacaagaatcagacgctaacaccatcccagccccaagtctccacgcaagcaaaacacgaagtacctttgttctatagcttttcttcacccaagcagagataaaaggcatgagaattctgaatttcagactctaatctctcatccaacaaatctactgcatgttaaccaagtgcaaagtacaatgaaaagttttctgagaattacaggaagaataagactttcattctgccctaaaaccacttctgatctccaagaggatctaaaatctctatataaatgatgaaaatgcaaggatgaaagcagtcatatgagtccatataaagatccacagaggtctatatagtgactcctaggagttcagagctagatgaaacaggaatgagtggataaggcttcacagagaactttttccttccaactttcagcttcccacagcatttaagctgaaatttgagctgggtcattgagagtggacagaaattgtataagcacaaacacagggtagaaggtttccaagcaataagatgataaactgaaagtgttagtcattcagtcatgtctgactctttgccaccccatggactgtagccctccatggaattcttcaggcaagagtactggagtgggttgccattcccttctccaggagatcttcccgacccagggattgaacttgtgtctccccattaggcagattctcccgcattgcaggcagattctttatctaacagagtctaacaagatgataaagcatgagcaaagccatggaggtaagaaattataagccaagagtatccagcagattcaatggtctgaagttccaatggcctctcaaagaggaaaactaagaaacaggactggatccctactaagggcagggctggaatgccagccagtgagtctacagactttaatctgctaaccaggggggaccag

SEQ ID NO: 50869 - DNA, 1456 bp, Bovine  19866880680408
  misc_feature (1)..(1): n is a, c, g, or t
ntatctatgagttcaggttttttagagattccacataaaagtgagatttcatagtgtttgtccttttctctgacttttatcacttagcataacgccctcaaggtccatccatgtgtcataaatggcatgttcatgtggttttaggagtactgacagtgcatataaaattgctttggtatttagattatattgtctacattaaaaagagttgttaagtctcagtgcaggccatcccaaaatacgccatgatggcacattgattattttgaattatattgtttgagaaacagttggtgcaagaacactctgaccttccttctctctgtctccctggaagcaggaaataaatctctcctgtgaaatgtgccctccctgcctctggaggtagagacatagccttatggctagagatagggaattcagagctgagaagcctgtacaaataaaccttgttgcttttttgctaatttattaccccaaacccaaactctgtttagattcttcactgattaagaatccaagcctaaattcctttgttctgtccattccttacaaatttgttgtttctttgtctaaaaagtatcaaagctgtctgctttggtcactttttaggtcctgtttctgtaagattccatttgtatgagtgatatctgtttttttaaaaaattctcctgttaatctgtcttatgtcaatttagttacgagattagtcaaaaaaaaaaaaaaatcaagaagagtagcaaggaaattcccctctttacaacagagtagagcaataaataggtttttgttaaaagcctcagtattataataggactacagcctttgctactatataaatttatgaggaaaactttcagatgttaacataaaatgtttgagaagacacattgtttttgaaaactattttagggagtatataagccaaaaaattcaccactctaacgaaataaaatcaatggccccagtgttctcttcccagatctattataaaactaagcatttctttcaatttcttcatttgtctttatttctctaaatataaaatggaaataataactctccttatggtcagagatgtctgcagaattcttgccaaaaaaaaaatcccctgtgtaatagaaagtcacgttgattgttaatttacttgcaaactactgacagattagaaataaaatcatttactaccttgttcttttttaatatttgttagaagttattgcagaagaatctgaaaataaatgaccacccagtatccaagagttctaacaagaaagataattcagattctcagagcgggacttccctcatagcgcagtggataagcatctacctgccaatgcaggggacacggtttcgatccctggtccaggaagattccacatgcctcagggcaactcagcccgtgtgccacaactactgagccatgctccagagccggtagtgcaaccaccaa

SEQ ID NO: 50870 - DNA, 2228 bp, Bovine  19866880832592
  misc_feature (1)..(1): n is a, c, g, or t
ngaaaatcctgtggacagaggagcctggtaggttacagtccgtggggtcgctaggagttggacatgactgaatgacttcactttcacggttcactttcacgcattggagaaggaaatggcaacccactccagagttcttgcctggagaatcccagggacgggggagcctggtgggctgccgtctatgggatcgcactaagtcggacacaactgaagcgacttagcagcagcagcagaaactaacaccacattgtaaagcaactatactccaataaaaattaattaaagaaataaagatgagaaaaactttttcttttagaatgtgagtgccttaagcggggatgttggtgggaaaaggggaaagaactccacagttctctgcagtcatctctacttcctactatggtaacatcactaggctgcttcacaaattgctatgaattttctactccctaagtatatttgttttcttttattttttgcaccatgactattctctcatatcccctttagcactaacctcctttgagtttatggacactgcaaataacgttagtcaaaacaccccagaatcctggggcggcagaggtaacgagctctgcaaccagataaaatcagcaggagtctgttaagaaatcaagcaactttcctctcctgctatatgtttgtggtttcttctttgatcaatgcccaagaacaagctgactcctctatatatttccatttcctgagtggacattattgtcagcaataatattaccacccactttcttttctcctttctcactctgtgtatgccatatttagattatgaattcccagagggtaggctggtcttgtttgagtttgttcatctttcttttttaaatgtttatttgtattccaattttgcattgtacacatagcacattaaatggaaacattcctcattcttatctggtctcttttcaagaggttagggaatcacagaacatactgtgtgctgaattagcgcttttctggagcttggccattaaaaggaaaattaatgacacatatgagatagtctttcttagcagtctcctctgaacatccttgacaatctgctagatcatacacttgatcttataatccaaaagacaacaacagtgacatatttcttggattaaagagaaaaagaacacattgcaaaccaacagagaacaaataaggataaaggagagataagataaattatttatacaataagcaggccaggcggtcactgcatcagccgaatataattattaggtaaatggggctcataggagcttaaagtttaaaccacatggagcagaagttatcatatccctaattattaaattgagaaaccatggttcattggttggaattctgggaatgacttgaatgcaaggaaagagtatgaaagagggattgcaatgaaagtgatttttaaagatctcttctgccatttgtgtagtagcttcttttacatgtttcctcactaatttttatttcagggtaagaacctgtgatgactgactggacaaagaagatggaaaaataatcaacctgagtgaaaaggaggtctgaagctctgagtgaagaagaccccaagggtgaagccctcaggaaggccctgtgatgagcttctataccaggtaatggtcactgctgaacagatgctaatacatggtagactgtaaaggaagccagtaaacattgaggaccccttcacccccagcaaaaactgtcacaggcaatgcagacacacagatgggaaaacagagaacctgcctcaaggaatgtgtcctattgaaacagggctgagcatcatgcaaatcggtatagccttggaggtcggcacaagcgtccccggaagatcatcaaagggaaatgaacacaggcctggatccatgacactcagaatgactgtgatgtattcaatgctcacaccacatgcaacatgttctcggaaccctacatatactattctagttcacaaagacaatcaataatggtcaacatgtacttggtacttactaaaatccaggctgataatcactttgtttaacgtgcaccggcctggtctgagacaggtattacattttctgcttcacagatgaaggaagtaccttaggaatttaaggaatttccaaatgactgaatgagcatgtagttacgaatactgcatgacatggatctatggctgtaagaaatgaaagtgtggatttaaaagaatgtgaaga

SEQ ID NO: 50871 - DNA, 981 bp, Bovine  19866880845332
  misc_feature (1)..(1): n is a, c, g, or t
nctgggaaggattaaggcaggaggagaaggggacaacggaaggatagatggttggatggcatcaccgactcgatggacatgagtttgagtaagctccgggagttggtgatggacagggaggcctggtgtgctgcagtccatggggtcataaagagtcagacatgactgagcaactgaacttgagctgaactgcacggaattgagcatcagagaagtggatactgccatccttgggctaatatgttccttctctaggcaagctgtatggaaatccaattgttattagaaggccatgttgtacatttacgatgagaggcaaagctgccaggagatcaggacacttacaacttctggccagctcatcctcttcctagagcaacagagcttgggaattgaattataatcagaagatagttctgggaattcttcagggcagtttggtcatcacctcttccagttagaggatcttctgagtgctcccataggactctttgttacactttgtccaacaatgtaatagcacgactcaggcttcatcacaattgcctatctactcctttctgtgcatctcttgatgttgtattgtattgctaggttgtattgtagtcatcattttaccttcagcttcagggcagctccctaattgtagaaagtacttttgggaccagggtgagatgtccagaggcatcctcttcctcagggatgaaatagcctctgcaacttttagggcaagtcttcacactgggcccctctgccatagaaagggcttgactgggcaccagcatctgcctctgattttcccttattttcttggctgatgtgaatactttaaaaaaatgatatgacatggcatagctctattctaatttttattttttgaagtttattatggaaaatttcaacatatgtaaaagaagagagaatagtataataactctgttgttccaccccctttgcctccaacagtcatcaactcacatt

SEQ ID NO: 50872 - DNA, 1259 bp, Bovine  19866880945938
  misc_feature (1)..(1): n is a, c, g, or t
ntctccctcatctgatacaaaaaagtataacaggttcaggctagtttgctagtgtgactcacttcaccaaggtgtgatcagtactgggtcagcttattattaagaaaagcatgttcatcagcaaggccggcacttgtacccacactacacagagcttcctaccccccaggaagagagcccacctagctctatgctctctcattcctaactccattctcctggcattctggtttttaatattcttttgagtctaatggatcaaacttgactgtgcgaaagtcacctggagggcttgttaaaatgcagattactgggctccaccccagaatttggattcactggggtggaatgggcctgagaatttgcattcgtaactatttcctagatggtgctgatgctgctggcccagggaccacacttcgagagccactcgtagtgataggtgatagtgctcaaccctaattacaaattagaaccatctctggacatattaaacagatgcacatgaccaggctcctcccacaactgagtaaatcagaatctcactgggggtgtgtccatggtgctgggtttttagaagctcccagctgatgctaatgtggggccacatgagaagggctgcaaaaaagaggggctgataaatacataaaagttgaagtgagatttgactcaaaactcctctagagattctgtcttttctcttatgtgagaaacatattttaatattttagaactgtttaaaatatttaaaaagccattacacatcagtatatgtctcaagttctcagaatttgttggtattaaatactaaagaattatagtatgtagtcataataacataagcctttcctttctgtttgctgcaatgggcaggcatatattcaattaagcatgattttggcaagataaatgttccattttctatgagagaattaaaactagcaggatatgagcacagcaagaacttaataaatgccaaggaaaacttactcatcatcaagagagtaattgtcaggagactctactgagtaacactagaacttctcagtgaatctgagctataaataaatttgggcttggaaacacatcccttagttcttggatatcgtcaacggaatctttcacgttttttcctgagacactgactttgcatacataccttgcccgaattgttattctgactataagagttagaagcactacattggatttcattccacgaggccactaagaggccactgaaggattcaggtcactgc

SEQ ID NO: 50873 - DNA, 1046 bp, Bovine  19866881044379
  misc_feature (1)..(1): n is a, c, g, or t
nctgaaactccgtactttggcccctcatgcgaagagttgactcattggaaaagactctgatgctgggagggattgggggcaggaggagaaggggacgacagaggatgagatggctggatggcatcactgactcgatggacgtgagtctgggtgaactctgggagatggtgatgaacagggaggcctggcgtgctgcgattcatggggtcgcaaaaagtcggacacgactgagcaaccgaactgaactgaactctgacttaatgaggtaataataaacataagattagctacatgcctaatgtttactgtgagtttgtcaatatgctaagtaggcatcatatatattgttgtctcatttaatcctcctaataaccctggccagtagggattattaatccattttataagtaagaagtctgagacttgaagagattaaggaacttgcccaagctagtacagtgaagaggtaggagttaagctagtcttctctgacttcacacctcatgatttgggctgtactgtttctctcttactgtcctgtgatcaaacaatgtcagcaacaaaccaaccaaccagacagacaagccaataaacaaataaaccaaccccccaaaaaaacaccccaatttcaaccctgttgcatgcaatatatgtaagaaaaatacttatatttactcagcagcggcctaaatatggtgtagtgtttcattctcactgacatttatgaagaaactggaatctataacatcaagttaaattcaacaaatacgaagtggctactgtgctggtcatgcttcttaaaagaccctgaggtgaaaaatcaagagatacttcagaaaaacctagagatactttgtataagatatctggttttattttagcccttcctgttatttcctacatacatatcattggaaggtcttccttctgttttcctgagagatgagatatgttttatgtctctgtaaaaatcatcatgtgaaagaccatccacctcagaaatgtcttcctcatttcaacctcagcctactttgtagggatctcaa

SEQ ID NO: 50874 - DNA, 1028 bp, Bovine  19866881058694
  misc_feature (1)..(1): n is a, c, g, or t
ntgtcccgatgtgtccactgtggctacttatattttgtgtgtaagctatgcatccttttcctttctctcttaatatctattgtagttattgtttctcctctatgttgtaagttcttggagccttggagactagggaaatagtcttcccagttctataaatcagcaggttgccttatacaatgtcctgcatcttatgagggttgcaatcgagaatgtaaatgggatatttaacattttctcaaacttttcctttgccaagtttgggtacactttgttctgtttgagggcttagaataaataagattttaagaggcttgtgatgaacagaatgagacttgtccctaatccaaaggtaaaataatattaagaaggttattttattaatttaataaactaaagagtattcctttgatattaactgggggtgggaagggcagctattactagaaaggacttctcaagattccttctggtggccagattcatggacccaaataagaacttatacatgaagaaattaagtcctggagtagttaagagacatgctttgggggcagtccttggcagagctgagataaaaaagactcctctgctcagacccctggcttcagcctttggtctgcccctagtgagctgatggtggacatgtgagtgtgttcctggtagacacagtgccctcataggtaagaaaatgacctttagggctgctgacccttgcacattttgtgacctttccaattccatacagccagcaagtaagtagaactccattttttaaaaaatgagacaatgcaaattcttgcagcttttcttactgggctgttttgtgcttggtgatagcaatattatatcactaagatttacagaaattatttgacctttcaatatgtgttccctaaacccacttaaaagagcaagatcctgaagggatgagctaataaggtctatgtaattgagaataaactggtgatgttgctaaaggctatttgtgtgtgtgtgtgtgtgtgtgtgtgtgtgtgtgtgtgtgt

SEQ ID NO: 50875 - DNA, 1040 bp, Bovine  19866881175576
  misc_feature (1)..(1): n is a, c, g, or t
ngtgaaaagtagtttgcttttagacaaaatccttctactttaaactagattatggaaatattgataagaaaaattatgcataattaagtataatttacctctgtggaaccattgtttaaaaatccaatgattaggtctaaatgaaaaggaatgtattatataaattgtgatttttaaagaggtaggttttaaaaaaaaactttttgctttattttaatcaaatttttcttcatatacatggtcattttagcaccctttaagaaaagagatacagagatcctagcatgggttccaaaaataattaaaattattaaagtaagacttacaagagaagtagcaataaattggggatatttggcttagagaaaagtgagctaagagtgactttttattgttgtaaggaatatggaaggttttcagtcagttatgtcttgtactcatagaaacagaaatgaccttcagtcaaagcttttgtaatgaacacaagggaagagtctgttggccagttacagaagaaggccaaggactgtctagtcctagagatgttcaataagaaatttagaaaatacctggaagtcatggatggttgacaaatagagctcagtagcatctttgaatctgagctgccaacagaaacacacaatgcctatccatgagtaccatgggaagccatgagtcagataagaaggaagaaatataaagactatagaagaaaaacagaggaagaagaagaaataaatatgaatgtacatctgaggaagtggtcaagttagcattcacctatcagatacttctgaaggtcactcgtgacctctgttattttgtacaatatagagtgtaatagagttgtcatcatcaaatgccatgcttgtttagaagtgacccaagttgagcatgacaaacagaatagccaagagtttcaggcactcactctgaatgcagtatcgctcccctactctccacaagagctccttggggacagctcaaacaccacaagggaccggccaagactgattcaccaactcacttcaggaacccat

SEQ ID NO: 50876 - DNA, 1625 bp, Bovine  19866881217404
  misc_feature (1)..(1): n is a, c, g, or t
ncactgcttgatccatcagtgtgtcagcatgaagtgctacagcatcagaaaccccagggcttgctgcgttatcacacatacatggacaagagccaagtcaagggacccagagcctcaacaagcaactctcagggatagtactgagtgctaaaaaggtgtttccaacatgcgtgaacagatagactcaggacacaaaattactttgagtctagtgggcacccattaggaaagagtatcacagagaaaaacttcctttcttttatgagcagccagagaccggtctcctacaaaaggctcggaatttgaagagagcacgatttaagaagaataaagaatgattcgtgctgcttctttccttaagagcatcaaaataagcaagaggtggagcactcaggtgtctacatgtgactgagataagcacagttcatgaatcccattttaaaagaaccttcaaaccatactttaagatgaaggtcctttgagaaagcatgctgaagttccaactagcaccagagcatacctccctctatcagctaaggccacataattatattgtaggaacaattttttaaaataacccaagaatgggctggagggtctgtttatccataaaagagtctggagacttattctgtcaagctggtgttggacagatttttctttgtcacatgaaaacacataccgcatgacaaatttttagatacaagtgttcacatttttcacttactgtcattgttagagcccgtttccataacaccataaggaggagccagaagtcctgccatgtactgtcgatatttctgaaagacaagattgtaaactcagtgcacagatatttactcacttggagcattcatgtgtttacatgttaaaaagaagaaaagctggatgtcagtaagcatctgagtcttgtatttatagagccatgaagcgtgctgtctgggctctgtggcctaaaataaaaatgctgtgttctaaagaggtcttcccggatgagactgtaagtgcccctgcctcgggaggggtttctactgcaacccactccttcacggtttgtgattgattaaccaaacagtgtgggcttttgccctcccctccacctcctgcctggcttctcattctctcaaacatgtgctcaggtttttgtggaggaaaaagacatttggtttttatagatgcagatacaaataaaagtgccaccttcctaacaggtgaatggcactcaatcggccgtctttcaaagcaaaaagaaatgcatctctggaaagtgtctgatgtgaaagaagctgattcattactatttgccagcttccttttacactgtacacctgcccgttatgtgacctccaaagaacctgtgggatgttgtcaaatagaatagtttggcttcatttagaactatttagatccttctgaattttctccctctgacttttggtccagacgtgctttaaaacctgaggctcagtgatacatattagcgccgggagtctgtgctgttttgaaggaataaggcttggtgagcatacagcaagcagatcaagctcccagtgagacagaagtgacatttatgaagaatggaatatgagtgtgagacattctctcttctcaggtaataaatacag

SEQ ID NO: 50877 - DNA, 1715 bp, Bovine  19866881225142
  misc_feature (1)..(1): n is a, c, g, or t
ntggaacctttgccattaaagtcctgtcggatctatttacttatccaggggatgctcccaggacaattaaaggcatgcagcttaggcactgcctttgaaacccctttcctgctgcttgccagtgtcaacagccaccaccaccaccagcaccacttggcatcacctccaaagggggtggatgaagccaaaacagtatctgcttcatcaggttgttgtgagaattgaatttaattttagtagatagtgagctctcagtaaatttagtcctttttcccattgcaaccacttggtatagccttgtaaaggctaaagatgaaactgttggctataaacttgtgccgtgtttacattttaactcattttattaaactgaacctcctctcctgacttttgcagggctagtgacttgtgtgcaggcagatgtgaaagatacgggctgtgcccagcctgtacggtcagcatgtgcttgtgagtactacgcttgctgcaggaactctttcatctcagtagctgcctggaagggaaggcggctcatgacatatgaaaacagggaagaggcattctccgcccagaatcagcattctgaaaggatgaccctgttcatcccagtcctgttttggccagactctcctgtccatcaaaagtgctaatatccagctgctgtgaaatacaggagctgtgatttattctgcagtgcaccgtgccagtccagaccatgcttcaaaatcctggttttcccctttgcacaaaagagtttggacaaaacaaagctgggatgagcaaggtcatgagctcctataccctactggccaaagaatgggagacaaaggcaaaacaaagactggctatccaaagctttgcagattgtgggaagtggtgttgccaaggtgatgatttagcgctagacaggaggagctggtgttaacaaggacaggagacccaagccacatttcctgaaagggaagagagcaactcagagggaatttaccaccaattggtaggatttccatgttttgtctaaaatatgtatttcgagcctgccttatgttggaaaattttgttcagaactctgaactctgaacacagcagacttatcacatcctgactgtcagagataatttaaaatcagattcgagggaaggaagggacattaaaagtcatggttgttgtccaatccaagcctgataaaaaagcatttgataatggtctatttatagagacatatgggatggtcatcagcagcacagagcccaggcactgggccccagctccaatgccggattttgcaagagacactcactagttagggaaatcatttaacctcctggtactcagattagatcaccaatgaaaacgagtaagacccatacaatttcagattggagagaaaaaggcaggaaaagcctgactcctcacatttagtttggaatattaactattccttttcttttttaaaaccagaacacattgtcaggggacaacagatcaacatgtttgtttatttatgcttaactcatcgacttgcctaccaaggactattaggtgttctaatttctaagccaattctgtatttgaataaaaatgtgggtttttttctaagagaaagtcaactccaggcagatctatattcaactcaaaactcacctctgcacccttcaagtcatttactcagttctcttattttataaacagtgggaagttatttattagcaagt

SEQ ID NO: 50878 - DNA, 1484 bp, Bovine  19866881300565
  misc_feature (1)..(1): n is a, c, g, or t
nttggaatggtactgtgtgtcgaggtttagtaacagatctgctgagcggcttgactggtctccgcctcgtcagcgtccctggagtctccctgtctcctaggctgcattctctgctttcctccccacccccactctcaaacgaagaacctgaggggaatcatgggaggcaaagtctcaagccctgacctgctaaccaaaggcgtagctgaatttaagtttaatatttactcagccaggaaatgctctaattaagactagctctctaaatcttaaagccccaccctgaaagggcagaaaaagattactcatccctcagggcagagccctctgggaaagcacttttctgccctacacccagatgtctcagagacggacttaggccgatcttcctgtcaagctcaagcaagagcataacagggatggtggactgaattttcgtggaatgtccattggctttcagaataaaagctggctgtgtagatctctgataccagataacaaaaaagggaatggccaaatatctggagcagaaaggagattttccatctaggtgagcagtttagtaagagcaggagtctgatggcctgggtcaaatcctggtttcaccatcctttcttgggtaaactttcttgggtgactcaatcctctaagttttcatttcctcagggttaaattgtaatagtagcatctacttcatgggattggtgcttagagaatgtctgatttgatcattaatttgatcatttatgcaataattcattcaaataatatgccaaacatccaaaatgtaccaaataaagtgcaatgtaatgatgatacaggaaactgttcccttcctgaaggagcacacaacttagtagggaaatgtataaattattcctctttgttgtaataattgcaatcataaacatgtgaactcaagtattattaatgtgcagaaaggaagctctttccatggaaaattttaggaaagtttcatgatgacacctaaactgagtatttttttttcaagaagagaaaagaggaaaagttatcccggaaacttttgaacattatgaacaggagaacatcaatgagaaaaagcctggtgtgtttggaaaacaacagaaaatttggctagagtgtggggtcggcatgataggtaatgaggcaaggatgtcatgggccatatcaagacatttagatttatatgttgcatggttaaatttccatttaggatgatagttcctatagtaatacaaaagggaatgaataaagaagacatcagaacccagaagaacagagagaagactatgactacagtctgggcaggacataaagaggagtcaactcaaggtcatggcaaatgatgggaaggagatgaaggcagaattaagagatatttagatgggtactcttatctagtctctgcataaaatcactatgaacaagtcacttctgctcctgcttccttacatgcaaaacttgcgttaagaaaggattta

SEQ ID NO: 50879 - DNA, 1183 bp, Bovine  19866881351010
  misc_feature (1)..(1): n is a, c, g, or t
ntcagacctggggcaggggtgcaggaagtagatgaagagggaaaggaaagggcggaggggaaggcaaggctgctctctgccaaggtgccttcccagagtcgtgaacagaaggctcgtccaagaaacggacaataacaggctgtaataggaccgtcatctcgtgggaacgtatggaatgcttaataactacttcctttatattttttctaaatttccagatgccttctgaagatcaaataaacgtatttcagaacattggggataaagctaaatgaatacatttgcattaaaatgactttgcagtttgttttgattctttgtgctttaacagtaacttagggttataaagagcttgtccccattcctactgaactgttgagtccgagataatacatggagctttatataaagggctacagaagctattcttattatgagtaccttcagattcattgtcatcattgccacaaagaccttttaaaagaatgaataaggtgcttaaaaacatatactgaaattctcctgtgtttttggaagggtttatagataggtgtacatggatatttttctctattataacaacagtaaaatctcaaacaaatgtacttgataacatcagcctttcactactgactccttaaagggctttgaaatattcatcatcacagccttgttagatgaagcaagtattatgaaatctatttttccagcaaaaacattataacagagactaggtaagtattagtatactaaaatcatgtgtttatagagccagtgatgacatggatatttcaaaagtctttgaaactcaagatgtttaccacttatcatgttagcattttaattatatgattattaaccacttagaaagtgaaatgttgactctttactaattacaagttttcccaacaacatcaacaaaattcagaaagaaggtgttgaaatgcattcatttgatctgcaaacatttactgagtgtctgtacaagagaagaaaggactcggtgacacaaagagcatggctcctgcacagaggaagttcaagctgagttagcggggagttgtacatgtccagcaattatcaaggtgatatgtggtaagaagggcaattaacataggaaagaaggaaatatgaattcagaagaacaggtatcactggtgaatgcgaattctacaaagacttc

SEQ ID NO: 50880 - DNA, 1091 bp, Bovine  19866881356374
  misc_feature (1)..(1): n is a, c, g, or t
nctcagtaaaccaatattttaattgaataaattttaacagtctcttcaaatgagttacttaatttatgccatttcaatttaatgtctctggtcaagaagccaacactttggttcataagatagatgcccgtggattttatcttagtgtctactggaacatgtgaaactattaaacttttttttatgaaacacatttgccactttcagaatggatttcctcaaaagcgggtactgggtcggggtggggagaatagtgtcacatttctactgttacattttggctgtctgtgcatctgtcatttcgaaaaaatcagcaggttttaggaggaaaatgatctgcatgaggtttggaagctggcaaagagggtggcttgccggatgcagcagtggcctcaacattgcgagcacggcagtagccggtgtgcctcttaccaagcataattgctttttcttcaatctcttccgtcccgtgcatgtgtacaggcctgctgtttttgaccagcgtttcctatacagatcccgatcagtttgtttataaaacacagcctcccagggagcagcccgacacatcccctgatgtgatgatgaatagctacctaggtttgtgacctctgagatgacaaataaatggtcttggtcatggtcatttaagaatttttttttttgatccatatagagcataaatctttttattttctatttcatttcaagtgaagcacacacaaaaagcatgctgcagttgaggctctgcagccagaatggcttccagagctggattcaattgtgtctcctttataaacttgtatcctgtttttcaacacgcttcacaatttgagaactgcaacagtagcggtgatgcttttcataaataaaacccaattaaaagggtgagcttatagtattctgcatctgcctcgtcttcacataggaagatttgctttatttggacaattttgatgcgtggacatttgtgtctgcttgccatttaacctcagttggtaatctgacatcctacctgatgctttataatgagggttctaatgtttttctgccctctgaacaagtgtgtaattgatacagatgacaacttg

SEQ ID NO: 50881 - DNA, 564 bp, Bovine  19866881356916
  misc_feature (1)..(1): n is a, c, g, or t
ngaaaacgtctgttaatgggacacacacagcaagctgttgcttttaaagttagccaccacaaccatagcaggttccacagctagcaattaaaaaacattgatcaattaccaattacagaagtagatcaatactacgcatcagaagtaagcctctctttatcagatggctgagcatggatctcagccttgtgatatgtggcatcatagtgatctttcttatttctcttgaagaaaccacactacaaggaagcaaggtatttagtcagtgttacagttctgtgtataaaagctaaacaaaagaaaaatctcaaagtttaacctgtttcctacttacagcttgcttacaaagagaccactatggatcaaccaaaagggaacagaccccataccatatgacacagtgacatcaagtgtgctgtatactcagttgctaagtcctgtctgattctttataaagactgcatggactatagcccaccaggcttctcggtccatggaattttccagccgagaacattggactggattgccatttccttttccagggactcttcctgatccagg

SEQ ID NO: 50882 - DNA, 1936 bp, Bovine  19866881393054
  misc_feature (1)..(1): n is a, c, g, or t
ncaaatacacagttggtactcaaagctgagaaattgaagaatatcaagaaaatgactgttaaatagaagaggaccaattattaagtactactatcttcctacaagggttcaggggaaaaggtgtaaccagcaaaagaaactgtgtaagaacgactaaccaggtgggagaaaaacaagagaatatggactgtgtctcaaaaggcaagtggagatgtttccaaaatgttcatcatgtagatcatatcaatttgacagaacactggaaaaaagaaagaccacagtctgggtttgcatttgatgttttatattttacaaatgacatggctaataggcctacttttccagcctggttaacagttgggtgagttgcattcagtgctggttcttggaatgttgttgttaggaagacagcaggaccgaaaacaaaaataaaatatctcacacacaaggtgcagggcaaatgcttagcctgtggcttaaactcgagtgagatcatccacctaaaatgtaggcaaatggcagtgtccaaggaaggaaagatgaaaaatccaggcacagaggtgcagaggacaagtggtagggtaacacgagtacaattaggaaaacctagggcgttatttctctataacagatggagagaagagcagggagtcaatatcactacgataaatactaaacagcaaggaagcaaagtctcacagctgaggcatgcaggctgctgcgaaacccagaagtgatattatcaataaagccagagttggcaagtgattaacaaataaacaacatatggctcgttggttgccatgtccctggaaacatcttgtctctggagatagtgtgcctctgtaaatgagttcctggttggtgcacatttgcttctggtacaaaagacagttgtgaaattgtaactacctggttacaaatgctgctaagtagacagctataaagttctggttttggacaaatggactcaattctcctcttttctcccactaagtgcaactctaaaccctggacattatatgtgaaacaaacagagaaaagactctgtgtggtggagagaaggcagactgacacaggacctttttgtctgaaggtctgagctgaagtggtgagttccttgagttttcttttttgcctcatgtatcccagactgggtgctggaggagacagtattccagaaataccacttaatacagacaaaaataattcctcaagaaaagcctgctgtctccaggacaaggaaagggggagcccagtaaggcagaaaacgtttagataataacttctcactttaaacaaacactccagaaaaacctgcaggcttagtcccgttcctctcaagatcaagtgtgcaacctacactttcgctcttgtctgactgtgatgaagcagtccttcccacctagattttaaagtagcgatcataaaaatgcttcagtaagcaattatgaacatacaggagaaaagagaatgtctaagcaaagaaatagaaagccttagcaaagaaataaatacaggagacccaagtggaaatttgagaactgaaagatatactaactgaaattaaaaacgcaatggatggctcaataacagagtgacatggcaaccaatgagctcaaagacagaggggagcattagtgaacttggagacagaacaatagaaattacccaatttgaacaacagagagaaaatagactgaaaaaaaggaacagagactcagaggtctgtggcagaagatctaacatttatgacccttagactggaaggagagaaagaaagatggtgctgaaaaattgctagaagaaataatggcttgaatgtttactaaatttggcaaaaaaaaaataaccctactaatttcagaaactgagtgaacctcacccagggtaaacccaaagaaatccatgcccaagttaatcaaaattctgaaaa

SEQ ID NO: 50883 - DNA, 950 bp, Bovine  19866881426510
  misc_feature (1)..(1): n is a, c, g, or t
ngtttatgactaacagataattactgttttgttgttctaggaagtagagaaaaaaaaagtggcacatctgggaagtaataaagatatgaccttgacgatttctctgggtctcttatgctttgttttattgccaaaaagtgacgagaccatcagctcagggtgttgtaattttcctaattgccttagcagcagctggcttgccgtgattactgatgctttggagacgaccaaatgttgagatttcagtcaggcttgccatgattcatctttgggaaggaaattcaataggactttgaaagtccagaaagcagaagtggggaaaactcttcctggaactttcctcaaattctccagagtcagttgttttgaacaggttcctgatttctgactagaagtgagatgctttacctgaagtttattatttagactttctcaggagcagctgcacaggcctttgcagtggtcaaagcatggtcttactggataacacaaagcattaggaaacatgatgcctatggtcaagtcccagtttcatgacgggttatctgtgctgccattggttgcctttaatattttattgaaaatctctataggattcattagaactttcttactgagggcttacaagcccaacaccaggagctgtattaggatctgttggtctgtagattttagcatacatactaagtgaagagcactacagaatatagaattactttatgaattagcttgtatttaccaagaatactttattagatattattcacggatgtccctggtggtccagcggtgaagaatctgcctgccaatgcaggaaacacaggttcaattcctagtatgccacagggcaaccaagcccattcaccacaactactgaacctgcgccctagagtctgtgctccacaggaggagaatctgccacaataagaagcctgtgcaacaaagagagc

SEQ ID NO: 50884 - DNA, 1055 bp, Bovine  19866881615753
  misc_feature (1)..(1): n is a, c, g, or t
ntagaatatttctattctcatgtattatatattttgtgtatgtctgtcttattgtgaatgggatctgtttttttattacattttccattaattgcctgcatacagaacagtattgatctgcataattatttatagctgatccccctaaatgcttattagttctgataattgagtaatcctaaatcatttcacccaaatgccctgaatggcagataccattttaactgatgttattaactgaaatttttttaaaatttcttattctatcatcactttcatttgattccttgatattgtatttgttgtaatatacaatttggagacacaattttattataagatttatcttctaggatgacatgtccttcatatttcccagtatgttcattccaatttgacaaacataggttttcagttgcttcccttgctttttagacagtcttctgaattatttattttggccatgccatgcagcttacaggatcttagttccctgaccagggactgaacctgagccatagaagtgaagtgctgagtcctaaccacgggcccaccagggaacttataagataatcttctaatttttaattagaattatttcatctccttttaaatatgtaagtctcgtaagatattttattgtaaaccagcaatgtaacaggttctaaatatttatgctacactttctttagtcagatgccttatattaaatttaccgataacattgaataataacacattgtttcagatttccaaacagtgacaggtcagaagcaaaaatctggttgctattggctgcccctgtgcgatgtcaaactctggtttcaagcagcaaaatttggcattttcgttctgttcactcactgccttggcccaaggaaatgacttggatgagtgcccttcttttttattcagagatgccatagattaattgtaaagacttcctttcatctacataacagaatgggttcagatagccttttaagctattatctgcagtttggaactttgtgctgcaaagtcagcagttatacaaaaggggtctgttagaaaca

SEQ ID NO: 50885 - DNA, 997 bp, Bovine  19866881661667
  misc_feature (1)..(1): n is a, c, g, or t
ncaccatgcagtttttgctaaaataataactgtggtaacacaatataaatgaaagcaggtagttcgactcctgctgagtggacccagtaccttggaaatgggaagatctcttccttcatgtggtctcaagatgaggattacacatatttatcggaagagtaaggtcacactaattatttttaagtggatctccaatgttggagaggacctaatttagttgttggggttaattaacatctctaaccatcttagaagatttattagcagggacatttggagttgagtttagaatctagagcatcagtgcgcagcgtattctaaagatagggaagacagctgctcaatccatccatcatgattaatatggtgagtgctatactcattataatcaaaatctacagaggaaatattcttctggaaatgtcagaggctcattaaagctgtttatgagcaggagaaagtaagggtaggactctacctggatagtttgccagcaaattttaaactaaatgcaatatttaatcctgttgtgtccttctgggactgtacagatagggccggccaatcataggtctggggaactggccacagaattatttgttgctttaatgattttagcccagtaggttttcccagctggagctggcaagcgagagaactagatttccttaaggcaggaatgagtaacatttaacacaaggaagcctccctatttagggtaatatcattgtcatgataaattgggaaatatgctcttaaacatcttctgtaacaagtttatcaaatttacatagaccattatttacttatttaataaataagtgcttttttacttaatttttttattgaaggataattgctttacagaattttgttgttttctgtcaaacctcaacctgaatcggcaataggtatacatatatcccctccttgtagaacctccctccccatcccacccgcccaggtgatacagagcccctattgaatttattagcca

SEQ ID NO: 50886 - DNA, 1342 bp, Bovine  19866881668023
  misc_feature (1)..(1): n is a, c, g, or t
nacattcttgttagcagtttggtttacatcctcccttttaaactgtaggaacatgtttataaatatttgtctttcaagctttgactaacttaagaagctccctattaaagaccataggtcaaatccctctaattaatgtattaagcctactgtggggatactaaagacaaacaaaataacataatatggaagagggtaaccttcttgccttgctgtgacaagcttcagaaggataccccaaacataaaaataagtcaaacctggtaattgaaaaataggactccagctcttactagaattaagaataagaactgtggaactgaaattattttctaatactattctgctgaattacagataggtttctacagaagaaagctctattttatactaaatggtatcttctttaacactcattgggaatctacttggcacagtctctctgatgttctatgttctctgctgatttcttttggttaaaagagtatctatggctagggtgacttcccaagtggcgagaatggtcaagaagaacccacctgccaatgcaggagatgtaagagacatgggctcaatccctgggtcgggaaaatcccctggaggagggcaaccccctccaggattcttgcctggagaatcccatggacagaggaacctggcaggctacagttcatggggttgcaaagagtcggacatgactgagtgatcaaggacacacaataaacattatgggaatcatcaccaacttaccctcaaatgattcagaaaaaaaatatatatatatatatacaaagatggagagagagatttcgagagagagaagcaatgctaaagcaaatgggcaaaattttagcacgaatggctagggtgatgttaccctgatatctggagaggtggttataacttggtctgatttgaagaaacattctctccagtctgactgtaaggcaagtccaagcccaaatacctgagggttgtgcccatacacgctgtgattgacgcaacataacctcaggtgctatttatctgaagggctcccaagccgctgagctcctggcagctgctcaagaaggaacgtctgtacttgggaaggactagtagctcctgttaaactcgggacctgtaactaggtctcagaaagcaattagctttcattcagtcccttgtaactgaataggacacaagggcacgagacccagggagtgtgtatttagcacaagcactagatgaggctctgtgcactgtggtttaagataccaatgagtcctttctaggcagaaggagatgggtacagcttaagtgactgtcagcgcctaccaaggttgagcaatttgtgtgatta

SEQ ID NO: 50887 - DNA, 538 bp, Bovine  19866881849201
  misc_feature (1)..(1): n is a, c, g, or t
natgtgcttttcttcctgacaaacagcaaagacaagttcttccctggaatcagcattagacacagcttaacaagatcaggcaagctggctgcaggaaggtttgatgagggacggcccagtattagcatctgataaccgaatcagggaggccagccttgtctcaggggcagccagtctgtcctgcaccagggctctctcttgcccctgcctacaccaagaattacacggcaacaaaactcagcccagtacgccaaggtcccaggctggatgctaaacaaactctaatcaggtctcaacaaagacagtgacctgagcatagacaaatattaagattacaagcaaccactgtggacaaggcacctttcaggttttactggcttgagacatgggttcagagaatgtttcctgatgatagcgatgtctgaaaataatggatcaaaagaatgtattaaggaatctggcaaaaacagaaagaaggggaaagataaagcaacaacacagagaaacatgcctgtccttcaaattttacaaatatgca

SEQ ID NO: 50888 - DNA, 1057 bp, Bovine  19866880542563
  misc_feature (1)..(1): n is a, c, g, or t
ngcaactaatcctgggtaccacaactacgagcccacgtgcacaccctatagcctgtgctctgcaataagacaacccaccataacgagaagcccgcataccacaactggagcaaagcccgagcaaaaagcaaggaaaacccatcacagccaaaaataaataaatacaacttttaaaaaagagacatgttcacaaccaccagaatataggtggaaaatgagaagtggtataagaaagatggataaaagggccatgggcattcaaattagagatgattgccagctgggagactgaggaagcggtgatgtggaagcaggggaagagaaacaaagatcagcagcagcaatatatgagcaagtccttcaaacaggaaaaaagatgaagccagggaggctgaagtggataatgcacaaagtggaagaatgggaaataaggttggaaacataagagggtgccggattttgaaaatgctttaacatcaagaagatttgggaaccatgggagtttctatacagggaggtgacatgctcagagctgtttttcaggaaaaataatgtggcagctgtagttatggaaattaagaaaaaataagaaagactagttaggaggctgcctagttccagtgggagaactccttgcacatcctttctggcacacaagggaccccccagcacctaagcacagccatgaacggctcacatgtgactgccgaagcctcaaagctggaattttccttccatcaacatgtcagccaatattaaccaagtaagcaatattcattgtgaacaagaacaaaaacagacaacattgtggacaaaactgtagccaccccatcctgaccaagtaggtcaccgtaagggccggtgatagaaggggccaccgtgccgccagtcacagcaaaggagaagagctggaaggacagacacgttcacaagtcagacaagatggcagcctttgagtcctggcatcacagctcttcttacctctggtctggatcattttgatgacattgcccacatactcgtagaggatgaccagattgcactgagcaatgtcaat

SEQ ID NO: 50889 - DNA, 1409 bp, Bovine  19866880601703
  misc_feature (1)..(1): n is a, c, g, or t
naaacacctaggtgaatatctggggactgcagttcagcctagctcagtggacacattgaaaagccatcaccatgcccaaatgtcagaaacttgtagactttcctcctcctatatgtcctgcagacaaaaccaaagttttgttttgtttttaatattgtttgagtatattactctcttgctcaaattttcaaccagtagattaactggaaatagaaatgctgtctattttattgttattctttaaagtgtaaaaaacttacatgcattatgtattttataattttaaaaagtcctagagataatcctaaaatctgggtagggggttaaaggatgaaaggctacctttgatcctcagtggccagtcctcatgctgacattctcacagccttgctccccacgcctcagtgacaagcaatgacaagtcctcactgtatctcttatttagtgctctttataataaacagtcctgctctcagtcctcggtcatcacccttgaagtttccctttatgcaaaatttaagcctcactaatctaaaaagcaaagtcagattttgaatagttggcttaccaaatgaggttgtggttggaattcagaggcttctgccatatgactccagcatgagtccaacttgattttcaaactttgttattcatccatacataagcacctagaagatatttgtttgtccatccctccattcatcgatccattcattcattcatctatccatccaccatccacccacattcattgagaactcactctgtgccagtaactgtgcttctgccgggcagcctccccctcctcctaagtctagaccactagggcggagtctcctttgcccacatcccacagcacacagttctggctccattcattgtcatcatattgaattatactttcccatgtatagccttcttctacaaactaggagctccctttagataaaaatgaaccttttaaccattctatccttatctgacaaaccataattgcagaataaatgtttgatgaacaaatagttaagttcagaaattagtgaagtgtggtgtctgtcttgggcatgttcattgttcagtagatcatgttgaaaagaaattgttttggcctcagcaaaatatatctcaagattttgctgccaatatactgggacagagttgggacttttataaattctgttaactctgaggtggagaccacttaagttcctgctcttctcagtgtatcagtggctggaaactgcacggtggtagggtcctcaacttaaatcccaagcctggttttgctagttagctgtcagtttaccatccctccaaaacctccaggttttcacctgtaataaaggggaatcataacatttgccatatcaacctaaaaagggccttgtgaagttgcagtgagtaagtag

SEQ ID NO: 50890 - DNA, 1859 bp, Bovine  19866880944619
  misc_feature (1)..(1): n is a, c, g, or t
nttagctccaggtcttgtttttgtggactgtatacagctttctccatctttggctacaaagaatataatcaatctgattttggtgttgaccatctggtgatgtccatatgtagagttgtctcttgtgttgttggaaaaggatgtttgctctgaccagtatgttctcttggcgaaacttttgttagcctttgccctgcttcattttgtactccaagaccaaacatgcctgttactccaggtatctcttgacttcctacttttgcattccagtcccctataatgaaaaggacattttttgttgttgttgttagttcttgaaggtcttgtaggtcttcatagaattgttgaactttagcttctttggcattagtggttggggcataggcttgaattactgtgatgttcagtggtttgccttagaaacgaacagagatcattctcccatttttgagactgcacccaagtactgcatttcagactctcttgttgactgtgagggctactccattttcttctaagggattcatgtccacagtagtcaatataataatcatcgttattaacgtctcccattcccattttagttcagtgattcctaaaatgccaatgttcactcttgccactttctgtttgaccacatccagtgtaccttgattcatggacctaacattccaggttcctattcaacactgttctttacagcttcggactttacttttaccaccagacacagcacaattgggcgtcctttccactttggctcagcctcttcattctttctgaagctgtttctctactcttccccagtagcatactggacacctacagacctgggaggctcatctttcagtgtcatatctttttgccttttcctactgttcatggggttctcaaggcaagaatattgggagtggtttgccattcccgtctccagtggcccacgtcttgtcaggccctgactagcaggcacgtgcccttccgctgttccacgtagctggaggacatgcccagtgccctggctgtcccactgctggttctcgttgagtgtgtaaaccttcactggctgctgggcatgttggccaacattccacccgggggcctgagcaaaggccctgctggagctgttggctggagctgactgatgttggaggaaacccaggagcgcagggctccccagcctctctgctgccactgctcgtcctagggccaatccgccacccagcggcctgactgttgccgctggctgcctcctacctacatagctgttatttaaccatgtcattgactctctctgggcctcagcttcctcaggactttttaatgtttttgaatatagcctgacaggcttgttattcagattaaataatatacatgtacaaacactctctataccaagtgttacataaatgttatatgtatataatcattatctacttgaaaatgagcaatgtaagaagggtgtgtgtgtgtatttctgtggttaatccaagaccattcagccattctctgctactccctcttccaacactcctaaaggctgatttattaggtagtttagttattatgcaactgatatgccgattgctatcagagcatttatatcaaagagccatgtacctaccatatctggaatcttccaatttattcaaattgaagaacttctttcctggttgtgcaggatccaaaggctcaacaaggtgtgcaaatgggttgctcatgattcctgatgaccaggtgtccctgaaaaggacagagaacatttaatttctcctctcaaagctggatcttatttattccaatgagtatttgccctctttaacaattatgatacacactgacttcaagaaatcacttattat

SEQ ID NO: 50891 - DNA, 1091 bp, Bovine  19866881048691
  misc_feature (1)..(1): n is a, c, g, or t
nggagggagagaaacagagagtaaggtgacacgaggctcacgtaaagtcctgcaggatgactcgggcaggcttaaagggcacttctatgttcttatgctgcatgcccttccaattcaggatattttcaacatcatttttcttcaccaaaaattgatcacagttccgaatggctgcctccaggagaactctgatagaaaatggtaaggatcctaggaataaaaggagaaagcataacaaaacaaacaaaaatccatgagacatcttattatcagagctctttaaagccaatctccatccaaacttgatacaaggcaacatccccggtagtcttgcaacaaggaaagagagtaaatttaaactgatttcaacaatttgaaatataagaatattgaatgggcttgagacattcagttattagaaaatacctgcagcctaggcaaaagtaaaatattacagttaattctttcatagccagtggctgcctagccttggaatccagtaacagagcttcccttaagttatcatgaaggaaatcagtctagattatttaatttgctgtattactgttagtgagtaaaatacacatacacacatacagagtagtatttgttatgaaacctcagtgtgtaaaaaatgagaaaataacccctttacgatgattaaaataagaccaaagaatagtcatatatacctttcaaaggaaataaacacctaaactccatggagtatggtcattggtaaccatgttttttagaataagacaatggtaatttttaagaaaatttattttgcttataaaagaagtggttcaacttgatacctaagaattattcactagtattatccagagaaggaaagagcacaaaggcagaaaagcataggagttgggacaaaacaggtttgtgttttcatcctcttctgctctttttgttgctgttcagttgccaagttgtgtctcacgctgcacaccatgaactgtagcacgtcaggcttccctgtccgtcactatctccctgagtttgcgcaaactcatgtccactgagtcagtgatgccatccaaccaccttatcctgtgtcgttcccttctact

SEQ ID NO: 50892 - DNA, 835 bp, Bovine  19866881127255
  misc_feature (1)..(1): n is a, c, g, or t
nacagcaacaaagacccagcacagtcaagtatactcaaataaataaatatttttaaaataaataaattctggaaaacacatacttaaagcatacttacagtcacgtgatacttgagataataatgaataatccagacaggaataagtacatgagtaaaagcaaagatactgtgtcgatatgtcttatagatctggaggagaaaaaaaatacatgagataaatagatttctcacttttttttttgccaaactacagtaatatatgcatagatgcatgcctttaaaaagacttctaaaaatatccttaatataaatttatgataaaatatggcattaaaaaatgagagtaagtttcactgatttaaccagagtaaccaaaactatagaattttcaggtaaactcatttccctgatttatcaacgtcagatacgcacgatcaacaccatttatcaacgtcagatacgcacgatcaacacaacacattccacatgtagggtggacaaccttgagtacactaatgctagaaaaagaatgttttacctactgggataagggtggcccaagctcactttgaggtgcctttacacatgctgtttttaaaaagaaaggcaaaggacagctaaaaatggagtttttccatggcagccaatttcagtgaaagagacctatcctttcagggaatgtataacctagattataagtgctataatagatatgattatggaagagaacgttaactcttaagtaaggcaagacagatttcaacaaatgattatttccttaaatcactggctgtcaattttcaatcagtggctgccagtgagtaatatcagag

SEQ ID NO: 50893 - DNA, 2661 bp, Bovine  19866881130489
  misc_feature (1)..(1): n is a, c, g, or t
ntaccttatctcgcattaatactgctctacaactgaaagaccggttgaggagtcaaccctgtccctcacagcggcaaaataaacccatttccaacgttattttctcgtttctctcacttcctcccctaaaggcgggataggcccccggacacgtgacaccgcccccgcccccaactccgggcggaagaggccggccaggctgatgggaaacgcccgtggaggcgagtgggcgggcgctggcgcccggctgaaagatggctgccgccgcccggcagccaccgccccggaggttactgtagggcctgcggcttccgcccgtgctcgcggaccaccgccaccgccttaccatgaagccagtgagtcgccgcaccctagaccggatttattccgcggtaggtcctgggctcggcgggcctccacgggctctacgctcgaggcccgcgggtggaagatcccctatatcttcagcgcccagaaactctaaaatccattcttgaattaagcctttcactccctaacctcgactccgcctcttcctggaggacacggtcttccgcttcttacgtaagggctactgggtgaactcgcttccggaactacatgtattcgagtttgtcactaaaatccccaccttagcaacgtgcacggcaacctgatgggggccgggaggacgtgccactcacaggttgtttttacgcctactcttgcatttcctagttgctcctcgcggtcgtattgctctcctggggatacgtcatctatgcatcaactgtagctgcacgacgacaactaagcaaggaatacccagacaaaatcttcgggatgaacgaaaatttgtaattcctctggatttgacttcatgcatatacagttctttacctctgtctggtacatgtctcgatttgaagtaaaatctttaatacaatgattccaaattcacttttgtataccgtccgttatagtaaccattaattctcgatttttcatataccaagaggtttgtcttttttaggttttcatataacaaagcacaaggatcttaggtgatgcagttgtaaagaatctgtctgctaatgcatgagacaccagttccatccttgatgatggagcaggaaacggcaactcggtccaatataacttgcctggagaattccagggacagaggagcctggcgagctacagttcaaaaagagttgaaggaaaagaacacggggaaggataacaaagcaaagtaaatctgacagtcttttgctctagagtttctaaaatacttctgaaatgtctccagaaagcctttaaagcaaagtgtgctgtaatttctgtacttatttttattgcagcatttcattccgttgtatactttcacatcaactaaagtacagtgtaagaaaaaactatcatgtgactaaacaattttctacgttctgttttccagattaaaaatggccagaaaaagtaggtgactgaccatattattatttagcctgtccagtttttacttattgttagataattcagtctcaaattgtacagagagaatggcacaggttgggaagaaacagacaacacatatgtgagtaaactttattacttttccagaaaatactttaaataagttggtaatgtagcaacaaacttaggcccatacacctttgaaattttaaagtaatcttcaatgatgttgatcgggaaattctttcatgggtgggattacttctccagtctccagaattgtatcaccctagaaaaacaaaggtgcattagtgataaatcttgtcagcagaggtaacagttccccttcgagctcatctggaaaacctagctcagttctggcattcaaactttaaaaatgacataggtaaaatagaagctgtctaaagataagaaaccagtatccaaaatcttaaggaataaggaacaaatagggggaagttttactcgaaccaaacaaccacaaagaacatgaaagttgtgtttacaaagtgacagaaggatgatctttatttgcttggccccccaaaataggagaagccctagaaagaagttgtgggaaacagcttcacttcaatacaaggtggtatatattcccagcaactaaatatggtaggcagctgccagttactgtttggctcggaacagatattagagacagacctgcagactttgcccaggcagctggtccagctgtctttccagctttccaaacctagatacagcgtgtgttgcagaacaggaggggactttaaagctagaaccaagtagtgtgaatcttggaaccctccactgacaagctgtataattttaggcaaagtacttagttttcacttcagcgctctctttaagaccgcagattccataagcctcacagtccatgaattgactgagtagggcagaattatcccatcaccacctgccattccctgtcctggttgctcaggactataaacttgtattagtgtaagccagtaaacattttggggaaaacctgtttccacagctagctttaccctgacacagaaattaataacctgaactggtatgaatgctgctgtaataaaaattgaactatatggcactggcttagcaaatctggcttcaagccactggcactggaggctaagagatggaaacaaaaggcactaatcacttagaagcaccaat

SEQ ID NO: 50894 - DNA, 1522 bp, Bovine  19866881157901
  misc_feature (1)..(1): n is a, c, g, or t
ncttctgtgtaaccctttaaaccttctcccagccgagaagctggggctttatgttcagctaacacatacatgtgattagttgtacacatttctgtttgtttaatgaatgtgttactagtgtgtggggactgaatattatttatttttgtgtcccagtgactgggacatggtcactgctctgtaaacattgattggaagcctgactgcattttgtatgcctcaattaactacaaatacaagaaatagcaataccgtcagattgtgagacatttataagtattcagcttattaccagggtagattatgaatatgtatatcaaaagtggtctactgagacagaaatttctggggggaatacaagaatattaccccatttctttcactgaaaaatacaaaatttgattttccactattattagactccaatatatattcatcctttatctctccaggaggtgtcccaagcttcttgcaactgaaatgagtgctaaatgtgcctggtaaatcactctgatggttttcaccctctagccagaatggagatcttagttggtttgcttctttcaacagcctgaaaattcaagtaacattagatttttttaaattcccaagactagaggaggcagatacaattgttcttgcaccgccaaatgccctgtgaagaaagtgccagctcttgggaacaaaatcttccataacctctcctgcccaagttcaaagtcccagagctctccaacaatactcaactgcttgaaacacctgaatttcaaatccctgcaaggcagcagctgggcctggtttactcactctgagaggccctggttcccataatagcatctccagttcaaggaggcatcagtctcagtgatcaaagtggggactcccatggtggtccacctggcaatgtgggggacatgggttccatccctggcctgagaagatcccaagcgttagggcaactaaccctgtgctccacaaccccagagcccaggagccacaactattgagcccacactctagagcccgtgctccacaacaagaggagtccctgcagtgagaagcccgtgcacctcaacaacgagtagcccccatttgccacaaccagagaaagcttgcatatatccatgaagacccaacacagtcaaaaataaatacataaaagcttaaaaaaaaagatcaaagtgctccaccagtaaagcccagtgcaaatgggagcttccactcctccaattaaaatttgtttcgctacacttaacagcacccatgaccccactcaacatggtcctgggagagctcaggtaaggtaatgtcttaggcttgttacaaacccatcagggccaggcaaacaatacagacaacatttcactatggtgtgcggcgggaagagcaactgagaatgccagtggtgacacacgatgctgcagacgtgaggactggacctggtgtgtccttttccttgaggatagttggctgttctaaaaaaggtcttcacaacccagataatcacgatggtgttgtcact

SEQ ID NO: 50895 - DNA, 1470 bp, Bovine  19866881173363
  misc_feature (1)..(1): n is a, c, g, or t
ncttacacacacacatgcacaactttatgtacaattttagaggtttcatgtatcccagtttaagactgtctgtctgtatctgggcactgattaggcatggatttgaatgtgactgaaacttttttataatcagacaaaagattcccattgagatgggcactgattaggcatggatttgaatgtgactgaaacttttttataatcagacaaaagattcccattgagaacctcctcagttatcacccagcttctcaaacctgttctctttccatttcttgaggattttgcagtggactttcctggggtgcttagttctcagctagacaagaagatggctccttcgttaaaccaatgggtcttggacaaaagccttggcaggacttgattctcctcctgttgctatgcccacggctgcggaatcagcctcaccaggaaggaccagccagatcccagctctctggaggaatcttcctctccatctggatcctgagggtattgttaaagtgagcccaggtttagaagctgggtgagaaatgggatggaggaggataggaaagttccagctgctccttttatgaagagacaagaaaaaaataggtctggcttagccactgggatggggccctagagaaggagataagtgatgctgttaagacaaagcttttaagggttttgaaggtgctggcaattgggctgagcaggacatgcagaactggagtttgcactagggggtcagcactctggttaatgcgcttttcacacttacatgttctctgctcagatcatccctctctgaaaacttgggagaatgtttggggtgcattactcctgctgccttattactaccgttgccatgtgggcttcaatctctttgttaataatatcccctccagttccctgaatccttcagtttctgggaacttcccactacaggatttcctagtggctgtgcatgtactacttgtatttccctaccattcaagggctttttcaagaattccaataagtaggcaaaagttcagattcccttctaattccaagccatgagaaaatattttgtatgtgataacaactagataaacagaagttgcagtttctccagctgatgagaaagttcgattttgtttcatgttatttctgcagaatcatagaaaacaaaatgttggctgaattccatggggaaaaataagaatttcagcagtttcacctaattccattacatcatcattttccaaattcaccagttgtcataccatattgcaaaatgtcaccaccaatttccttatttttaaatactatgaaaaaaagagacttttgttgggtccctggagagaaagcagaggatgaacttgtacaagagacgtgtcacgtacagtcattgtgggtgctcacctcctataaatgctgataggtacagagaaaagattttgacagtgcttttgttcatgttactttttttaaagagcaaaa

SEQ ID NO: 50896 - DNA, 870 bp, Bovine  19866881176033
  misc_feature (1)..(1): n is a, c, g, or t
ncatcattgtcatcattatcattatcgacatcatcactaacacttattttgccccagaaaataatactttatatggactaactcactgaatcctaacaaacactctatgacatcaagtattaggagccccattttacagatggggaagagacgaagagtggaagagctgagatttaaattcagggagtctaaatctagagccttctttcctagctacattgtgatacaggcaacactcaaataaaatagttttgaaaggacacattttggtctttccagaatacccatatgccttggtttgaacccatgtgtcttggactttccttgagtcggagaagatgggaagagaaacaaaaagtgcattgtgtcctagaagctaagggacaaaaaggaaagagcgatcatcttctcgaattgtttagagacatcaactagggtgaggactgtcagataacctctggtataagtcatggccttggtgagggcatttcttatggaacgatgacagcgggaaccaaatgcaatgggttgaggaacgcataccagctaaaaagaaatcactgagcatatatcactttttaacaagttctctagcttagaggacagaaaacaaattcacttctggatgaggaggctcgatttaaaccgctctaaacccctagcccctaccttctacctcccacccacacccacaccttgctcttttgtagggaactaacatttgcagcactcctattaagagacaggccctgagttcctcatattcattatctcactttattttcacactagccttgttaggattatttcaaggttcaaagagattgagtcacacaaccaagaaagtggaagaaaccaaatctgaactca

SEQ ID NO: 50897 - DNA, 1232 bp, Bovine  19866881194829
  misc_feature (1)..(1): n is a, c, g, or t
ncttacagaccaaagaatcactgcagctagaatatgaaacctatgagaataactataaggggaaagaacattctacctcttcattgaatctccaagatatcattatattcatatatgaaaataggtattaatctatatgaacctcagatgtcagccgtatcaccttgcctataacattgagataagagtggctaaaacattactccagattttctgcaatatccaaccgtgtacccaagatgtctgatatcccagagggatatcttctcacagttaccaacagctccaagctttggctttccttgaactaagtggttcagattatgcattgttgtatctgaacaactccctgtccctgttctgaaccatgaaatttagcaccactttctaatttctacaagggagaaaacattcccacaaaggctttgtgttttaatagcttttccttaaagttttcggagatgaatggtgttattctacaggtaacttaaaatacagagttagatgtccataacattcaaatgaccttctgccattatactaaaattgccacttccacttcagcctacctccaggcctcactccttctcgccctcattttcctcctcccctcacattatgagcattctaaaagtatataacctgacagcctctggaaaatatttttagtactatttgcttttttattagtacagataatattatagctgttaaaatggattttctaagctttactagttatgttacaatcagtagataatagaaattctaagaaatagacaataactattttcttctgtctataacctctttaatctttaaaatttaacccagtggttaatgtactgtaaatagttcaatatcatcagattgttttggtattttggatttgcatgaaagaacaataatgattaaatccattccattcataatgtttatgtttaatgctgtgaggagttgcaattttatcagcccattgagcactgaacctcaatttgagtatataaatcatactgtaaaacaaaataatacccttctaaatgtgttgctatgtactattaatgacatgctattaaaataattttgggcatcatagtagatttactttgtaggtatgagtttaaattgtttgtaaaatgttttacaaaaatgactaataatgaaatgtaaataattacattttctttgtccttttttatacagaagatacacaggaggcatatgtagatcaa

SEQ ID NO: 50898 - DNA, 1467 bp, Bovine  19866881219430
  misc_feature (1)..(1): n is a, c, g, or t
ncctcccagttcgctgaacttgctctcttctttctccatgcaagtttcaaagttttgggccagttctccttgtctgatctgagaaggcattcaaccattttctctgcacctgccatcagccccttgttggaacttatctaaggaagacaattgtagtggactgatcaagtgtttcaaaagttttcattttatgagtttttactgaagaaacgtcaattcaaatactatcaaatttaagatcactgtatactctggttcactaggtctctttcatgaccgttcttgccccagtgcaacttgatcttttaagatacacttccctttatccttgtcctcttacacatgatatcaccatgtcaagccctgtgttcttacctcctctgagatgttattatattaacatcagctatatcaggaaaacaaattacttcacacctattcaaaatatgggtatactggcataggcatatttggaagaatataataaaatattaacaaatagttttttctggatagtgagacttacatggttcttattattaatcatgataattaaaattcattgagcaattactattatgtgccagagatttataagcactttacatatattatctcattcaaagcctataaaaatacctgactaatacggtaccattagtattcccatttcatacaggaaacagagacttagagaaactaaatgtgcccaagatcacaccactagtaagtggctgagcttggattaacaaaattgatctgtgtccagagactgaatacttaaccactggagtccataaccttttttctttttatttgctaaactgtttgattttatttaaatttgtataaaacattattcacaaaagtagtaaagtaattttaactgaaaatagggcaaacctgaaaaaaatctgtgacacaaattgattactcagatcacaaataaaagtatccttctaggtaattatgccttagatttgaggactttaaatgatcttgttcagttctaaaataacatagaaaacagaagacattcctcatggtcaaatttttcccccaaattcaatatttaatattaagtaaaatacctgaataatttcttcacattcttgattaagtaaacatccagatatttcaggaaggatatcttctggattgattgtggttttaaattctggttgtaaacgctttaaaagtaatctatactcctccaatttttcaagtttttggaaatcccaactttcaatggcttcataaagtccagaataacctgaaaagtagggggaaaatggggctcttaggacaccaactaaaaaaatatgttgagattaaaatttaaaagtcatgtttgtatgtattgtgagagaactgaaaacaactgtaaatcacttccattatttatgatctttcaaaaagaaaattcaatattcattttaggcaccccacatttaaggtggagctagt

SEQ ID NO: 50899 - DNA, 1253 bp, Bovine  19866881280733
  misc_feature (1)..(1): n is a, c, g, or t
nacatgcacatccttagtgataaaaaaagtaaggaaaaagaaagggagaagctggcaagtgccatggaagggagagaatggtatttctagttgtagggaaaatatctgttttaacatatattctctttttgttctgatttttccttaaaaacctttccattaggctatgacttttggcactgcaagacacgaccctactcaaaatacctcaagagcatcattacggagaagaatgaacaatgctgagtacctgaagaacaggaattctggctaagattctggctttctggttcttctttgtagacaatgtgtacatccaaagttttcatttcatcatcctcaagatctttcatttgaacattttctgcacctttatgaaaacaaaacacatctcataatctttatctgattatgatcttgatggtgaaagccctacaaagaggtcataaaattttaaacttccattacgacttcttataaccattccctctaccttttaaaacaattaaatgaaatcttttttaatttgaaatcttgatttgaagtttgaactccagtgtcatttaggactttattattcaaagtgtggaacacggaccagcaacttctttaggagcttgttggaaatgcaaactcttgagccccaactgaatcagaagcttcattttaacaagatccctaggtgatccacaaccacaccaaagacaagccctattagcagaaacacttttgtcttccattcctgacccgacccaagacaacagatgtgtattttgacagattatttctgaaacaatttatgatcttaaagaagactctgaaaggctaagaccagacactcagatggtttatcaaactcagctcttaaaataatgctctgagaagatgttattagcttcaggaagacaagggatagctcagccacttaatcgaaacagattcttcctttcaatcttgttctagtttggttccagatggattctaaacaagagaaccaccatatagtgtctaagatgattctattctgaaaaggcagtgagttgtggagtttgaacctttaactctagaattttcaacctatttctctcatcatctaaacccagagagtgagctcagactctgcctttcccccaaatactctgggcagataggctaattctggatgaaagggtttgtcctgatccattttcaggggatatatacaacccaactaattctgtagacaaaaaaaccacctacctcccagaactcaa

SEQ ID NO: 50900 - DNA, 682 bp, Bovine  19866881530012
  misc_feature (1)..(1): n is a, c, g, or t
ntctgtgtgctgactccaacaagacttgatgcttccttccattgtgctcagccgcattttaagcagctccctgggaggtagtcagtgctgtgtacggggatttcactgcatggttcacattgagatcagcaaaagggtggataaatccctaggtgcggttttaattttgttgccaggaaaaaaaaaaacaaaaaaaccgcaaccagtgttcagagtccatcaggcttagcttctctgatgtacctctgcgaagtgcatcgggcaagaaacagcccatcttggagccaggccctccttgaatcacagctgccagccagacccaggaggctgtgtccttggagcccaaggaccgtgccgcccagtgctgccggtcatcggctcttgagagctgcttatcctcttttcagcgtttggcaaatgtgcttcaccattagctcaagttctcaatgtgttcctcaaatgattcacagtgactcctccacatgtcaccttaacccagtaggcacatttttaagagcggtttattcattttaaagtattcaaatgcctcccagtcacaatgactgaagaggccaagctcttcagtgaataccactgatttcctgaaatgcttcacaagtactagttaggtatagtgacggggcagggggcagggctgagctcctgcactcgatcccaggag

SEQ ID NO: 50901 - DNA, 1385 bp, Bovine  19866881774266
  misc_feature (1)..(1): n is a, c, g, or t
nttagtttcggtgttcaacataataatttgatcttgtatatacttgtgaaatgaccactacaacaaatctagttagcactccaccaccacaattaattacaatttttttccttgtgatgagaacctttaaggtctattttcttggcaactttcagattttcgatatagtgttaagtatagtcaccacgctatatattacatccacatgaccttgactcaataataagaaaatcattgcaacacaaaactatatagtgcttatgatttcaattatctgtttatatacattttgatatgccttcataagcctttttaaattaatttttattgcagtatagttgctttacaagggcgtgctagcttcttgctgtatggcaaagtgaatcagttctatacatatatatatatctccactattttatggatttccttcccatttcggtcaccacagagcactgagtagagttccttgtcctatgcagtaggctcttattagttatccattttacatatagttgtgtggaacaggattcttgaaacgtaccttagtcctactaactaacacaattaggttaatttgctctgcaaatggaagtctaattcattacccgaaattctgtttgctttttcaacctaatctgcatacttgctacgtacatattttagcaaaatgaggcataacaaaggaaatatttatgttcctattgaacttgtttaaattatgtacacacttaattctaaacatctcttccagaagcataaaggaagcaaccttaatggaacggaggcaacctgtaccttatcaacctgagatgcccaatctagcctgtgtatatccaactaggtttctggctcagctccagaataggtcacaatgatgtgcacagcctttctgacattttccgtcatcccatgggtccagtttgttaccatcagtcacttgtcatgtgggctctattgatgtgatctgtcctcttgagatctgtaagttaaaattttcttataatcaacttaaatttagggaaatgacaaagccagagatatcagatgtattgaagtcttgcttatccttataacagctgctgggtgaaatggaaaacactggcttctttcccaagattatacatttaaaatacaaatataataatgatataaaatggtcaaagcatcagagaaataagacttggtccacatttttctccatcaatgaaaagagaactgaattatcacgtggaagagagccaaaggcacatgatacaaaataacaatttaccagacatttatcttttcatttgtgacacacttttagatttcacagtacaatgtggaaatagaggtagagtgttttggaaaacatattttagtgtaggcattctctgatcaca

SEQ ID NO: 50902 - DNA, 1802 bp, Bovine  19866880237150
  misc_feature (1)..(1): n is a, c, g, or t
ntgaatctatttgtcatttccactgtataatcataagggatttgatttaggtcatacttgaatggtctagtagttttccctactttcttcaatttgaatatgaatttggcaataaagagttcatgatctgagccacagtccactcctggtcttgtttttgctgactgtatagagcttctccatcttcggctgcaaagaatataatcaatctgatttctgtattgaccatctggtgacgtccatgtgtagagttgtcttttgtgttgtgggaagagggtgattgttatgaccagtgcgttctcttggcaaaattctgttaacctttgccctgcttcattttgtactccaaggccaaacttgcctgttactccaggtatctattgacttcctacttttgcattttagtactctatgatgaaaaggacatcattttggtgttaattctagaaggtcttgtaggtcatcatagaaccattcagcttcagcttcttcagcattagtggttggggcatagacttggattactgatattgagtgatttgccttggaaatgaacagaaatcattctgttgtttttgagattgcactcaagtactgcacttcagactgttttgttgactatgatgggtacttcatttcttctaagggattcttgtccacagtagtagatataatggtcatctgaattaaattctcctattcccatccattttagttagttgattcctaaaatgtctatgttcactcttgcagtctcctgtttgaccacttccaatttgtcttgattcatggacctaacattccaggttcctacgcagccctttgaaatccccttcaaagggcttctaaagaaagttcagggcttggtgacttatttgatacatgggatgaccaaatttctcggctggaaatacaaagaacggtggtagccccaagagaaatagcttttctctaattccagtttgacagtacactggatagatagattttagacagacgactctaatctctagatttgtcagttccacaaaacagtcaggagctgggtgtccacggtaacggcaagtcagattgaaaagtcattctggagggcagaatgataaaagcgagaaagaaagaaaggaaagaaggggggaaaaaagagagcgagggtgcacagataagtctttcctaggagcggtcgcatcccggagaccagcgggcactacaaagggaaaggtggggcttgtctaagaactacaactcccagtaggcatcgagaagagcaacgaagcttccggccagagcttatttccggtctttcgggtgctgacgctctcttccggttttgaaggcccctgaaagggtttgggggatgtgcacggtgagtcccgacaagtgggagcaggggaatcttgtgtccgcactacactcagcggctaaaagttagctccgggaggtcagggaggagagagggcatgctggcgggaggacgtgtaatcttggcaagaatgggggaggggactggggccacgaagggccccagaaagggatgtggagggcgaggacgaatgggatccctgggaaaggatggagggtgggatgcaagagcgtggggcaggaccccgcgagcgcgccgtgggatcccaggggagctggtggaggaggaccagagggaaggtagcagccgtggggtgcttctgcgtaaaggaaagctagaggctgctgtgggtccgagatcggccgaatccggcagcccaaggagcgtgggctcatagagtcctctcagaagatcctgccagttagggagcatccagggccca

SEQ ID NO: 50903 - DNA, 1757 bp, Bovine  19866880430495
  misc_feature (1)..(1): n is a, c, g, or t
nccaggcccgattctagaggggctggcacttgaaggccttgatctgggcctcacgttctgcccagccgctgagctcccttggcttggcaacggtttaacctacccccaggcttagtttgccagattttttacttaccaaagctaggtcggatgttggtgatctcagcaatgtaatcagaggctattgctataaatgcttttgcaatggtcagacaagtctggggcctccagtgggtaccgaggccgccgctgcagagcattaggttagggagggggaaggtacctggcggatgcctcctgcgacggtctggtccctggttgacagctgcggtcgcctcttaagatgttccagagttgcgctgagcaaaggatgcagccagactggtcctgatgccggaccaggaggcccctccttcctcccaacggcctttggctaaagactccgcctctgtccgaaaagttccggaaggcaagctccgcccctttccggaagatgcttggaagggggaccccttccaacgccaagatttcaagcgaatgagaccccacctatttagggcttgtgggtctataagatgaattcctcaaggcctaatgaagaagtgtatgtactttatcatgtgaaatcctctagatcttgtaattcggattccccaggcttaatatagcagcagaatgttctgggggagggggaagcaggagtttggaaaagtaaaattctgtatttcctgcatttgaatatcaattgcatcattgttatgcatttctgagaccactaaatgttattattgaaatgtttttaaactttaaaagctgtggttaaagaccaaacctggtgatggttgcacaacgctgaaaatttactgaaaataattgaattgtataagtaaaatggatggattctctgacgtgtaaacggaagctgctttaaaaaaaagactaatgaagagtaccaaagttaatcattgttggacggttcaggtgctgaaaactgcttagaaagtgcatgggagagagagcaaaccaacggatctacaggacagaaactaaactggaagcttttagagacttccttggaatttgaagagtttagggtgactctcggttagagtcactgttggtggttatttccatgattacatcaagttcgccattttaggctgtggatactttcatcccgcttcaattctgtctgcagacaggatcaggtcaagtaaattattcaaatgtgtaagtatttgttggtggttcatggcaacccactccagtactcttgcctggaaaatcccatggaccgaatagcctggtgagctgcagtccatggggtcgctaagagtcggacacgactgagcgacttcactttcactttcctgcatcggagaaggaaatggcaacccactccagtgttcttgcctggagaatcccggggaggggggagcctcgtgggctgccatctacggggtcgcacagagtcggacatgactgaagcgacttagcagcagcagctcctgtaccaagagcgggatgaatgtatttttccagctttgacattctgtacttctagaaaagagaaaagaacatggttttaggagttatttattcaaaacacatgtattgaatttattggccttcaactatgttccaggcaccttcctggaaaccagatgaatgcattagaacctagagtcaggatacctgattccatctgatagttgtgcatctttgtgaaatcacctacacagctgagcctaaatttt

SEQ ID NO: 50904 - DNA, 2093 bp, Bovine  19866880457925
  misc_feature (1)..(1): n is a, c, g, or t
natgagaactagagaataataaaagttaataaagacaactgtgcttaagcttatttatctactaaaaaatgttttatgatagggtaaaattccaaggacaactattctactaagacctgttactggatttttagggcagttaggagtgatgtgtatggcagagaaaaggaattgtgaatgcttttgagtggtcagtcagctcaagttcaccagagcattttattctggatacaatcaatttagaaaggaaatccacctaaagacagtttgcacacagcacttaggtcagttaggactcaccttatggaccctggagacaagccttgtcattcctttcagcattatccctgtgctttaaaaaaaaaaagtgaaaaggtaagccacaactgggaaaagatatctgcatgatgggttagtatctagaataaagactgcctggacactgattaaaagacgaacagaggacatgaacaggtatttcgcagaaaagggaatacaaatggctagtaaatctatgaagagtttcaccctgatgacaaatcagggaaatagaaattaaaaccacaacaaaaagacttccacaatcatcatattgagaaaaattaaaaagacaacagcaaatgctagagcacggggaacactgggaacttccctatactgtcaatggaactataaatacaaatatcttagaaaacaaatttgaaattacctgtaaagttgaaaaggtatataactatggcccaggtattctactctgtatttattttagaaaaacacatatacaggtacactgaaaaatatgtcttacaatgtttataggagtagaatatgaataatcaaaaactgtaaaaagcacaaatgtccactgatataaaagagtgtgtaaaccgagacagtcacacaatggaatgccatacaaaagtaaagtgcagttacatgtatggcatagatggacctcaaaactaatactgagggcgagctctaatacagaacatgatatagttcgtatgaaactcaaaacacaaatgctatttggggaatacacttgtatgtagtaaaactgaaagagaaggagcatgataaacacatatttagaatagtatttacccttagggaagagataaagggacaagactggggaagggcacggagatccaaccagtctatcctgaaggagatcagtcattggaaggactgatgctgaagcggaaactccaatactttggccacctgacgcaaagagctgactcactggaaaagaccctgatgctgggaaagattgagggcaggaggagaaggggacaacagaggatgagatggttggatggcaacaccgactcaatggacatgggtttgggtggactccggtagttggtgatggacaccgaggctggtgtgctgcggtttgtggaatcgcagagagtcagacacgactgagcgactgaagtgactgactgacacaaagaaaattataatgacctacttcaaatgatggataatgaatatatgatcatttgctttttttatttttatgccatatgtgttatgtttattcatttgtatgctgctgctgctactgctgctaggtcacttcagtcatgtccgactctgtgcgaccccacagacggcagcccaccaggctccgccgtccctgggattctccaggcaagaacactggagtgggttgccgtttccttcaccaatgcatgaaagtgaaaaatgaaagtgaagttgctcagtcgtgtctgactcctagcgaccccatggactgcagcccactaggctcctctgtccatgggagtttccaggcaagagtagtggagtggggtgccagggccttctccacatttgtatgctggaaatatttaacagaaaaaccttaatcatgtgaagtaaaaaactgtttaaaatacttaaatgcaactctcaatattcactagtagataataaagttgaactcatttattcaacggctacacagcacctgttatatgccagggcctgtgaataagatggtgaacaaagctgttatggtctctgactcaaaagagcttatagtacagttaagagatgatgtaaactcctatgaattt

SEQ ID NO: 50905 - DNA, 2566 bp, Bovine  19866880462519
  misc_feature (1)..(1): n is a, c, g, or t
ntcttcttttccccatttgagggaggaagcactggctcagacagcccgggcaagcaagaaaggatacagagaacatatcgtacagctgggtgagcaaaattggtgtttttcaggtaatgcaggagctcgagggctggtttccttaccatcaggcaagcttcattgaatgtcttcacctaacaagacgggaaaagagggagaaaagggtggggctggaaagtctagccagctctggtaatatacaccgagcctaatacagcaaccataggatcaaactgcctactcttcatttactcagttaaaggatgttggtatttaattcgaaaatttaaccatgtaatttagctaaaaattaaaacacatcatcccacactgagcacataacagtcagcttttgattatttctgtaaatgaagcattagttaattgaaatttataaaaaattctgatgtctcataacataactatgcacactacttaaggttgatacaaatattacaagtgtgtaaaatgctgaacaaggtatctgatacatgctaatcatcaaatcagctgatggcataaagcctgttaattctttaaaatttatttttagctagatctcactgtaaccacctatacttttctctgaactatatatgtaccagctcaagagccaggtgtgaccagttgcctcagctatgaggccatacttgacaataccagcatatagatataccagagaactaacacacaaaattaattccttttttaaaaaaattaatccccttttagccaccaggaatagtttggtggaaaaattttggaagcagtgatatgtgtgaaaatggtttgcaaataaagtatttaatgatgtgtattgataaaaataaatatctaaaaaatactatttacaagtatgttagataaaggttaaaataatgttgatttttttttttaatcctaaccaaacaactggattggaagaggactttgacaggtaagttcaaacttaacaaaaagtgaaaacttcaaaaacatgatacagatattaaaacagaaatgctgttattaggcaatatgacagtactaaatacacagacaatagcgagcgggttggctttttacataaatggaagctgtggaaagaatgagtgattccctccaaagctctggtgggtaagccattctgaaagcaacctgggatacagttagaccctcagaaccacgttagagattgcactatgaatgtcttggaacagtttaaagtaatgatttcttctaattgtgtcctatttccaaacaacaaaaattttgatgagagtctatggtcgagaattagctcctttactggtgtctcatctgatttcttgaaatgaagcacactgaagaaatgacatcctctggcttctaagctaaatatcacctgcacagtcaagtttgatatttcagtaagaaggaataatttctgagactgaaaataattaagcaggaattagccaaagaaccagttttgccaataaaccctgctttccagttaactgaattcttttcactggctattaaggcaacccaagatcacactctttgggttgacgttatgactacaaaactattttctgaaaacccatgagactgaagaacaatgagtgatgcatctaagccatatgctgtttctgactcatgaatacgtttttgtttttctacacatattaactattttcaggatatcttgctaaagcaaatattaaattaatttttaacaatttttgaaggctgaagtttctagaaacctgttgggtaacacaagaaaaaagagtggggtattatttatttacttaagaatattttgcctggcttcaaaaaggatttaaactcgttaacttcagatctgcttaaaataataacaacagcactattcacaaaaaataatcaatagctgaatttatctttttaaagattcaaattaaatcttttagttttctactcatttaattctacacctctgctatcaacaccttgtgttacaagttccctccaaaaccctcccgttttgagcacctgcattacaaagcgaggaggcaggccatgggggaacacggtcttcagttcttggatggatatgttgtagtgctgacccacgtgctgctccccatgcttggcctaggaaataaaaatgcaaacaagtataatggagagcgacaaagactttgaaaaagcatcaagggctttctagacgctactgagggaaacagttctcagagctggaaaagatattctattctttaatttcttatcttagacaaaaatgttcactattgtccccaaatccacagtgcatgtattgaacacaaagcttatattggccctgaatgatgcagccagttgctcagcaacatgaaccctagatgtggaggcagcagagacaatttttgccatctggattcttctgtgctgtgtatagagatgctccaatcacgtgacaagatcctctgcatgccactgttgccatagaaaccccagaggaactggcagataaagggactacaattacaggggaaagctgaaagacacttcaagacttcat

SEQ ID NO: 50906 - DNA, 1994 bp, Bovine  19866880577308
  misc_feature (1)..(1): n is a, c, g, or t
ntccttacctgtcctctgccttggtgaagaaattcttatcctggggattcatgggcttcagagaacacactggaagtagttctggatacatgaaaaccttgctcgtggctaggatccaagccacttgctttagcaaatagggcaatctataggctgtaagaagaaaattcattgtaagtgaaattccagaacaaaagagggattcacaaaagcttctgaatgtattttggcatttagagagagctgaccctaaataatgtgggtatccacccatatacccatctcccaaaagtttccacaatcattctcagccaaacatgtacataaaaggagtcccattcaacgttattaaaagttgattgtctttttctttcctgtgtggaacacttaacacactaacataaacacttatcaagtaccaaggaacacctggcagataccctatgctcaaaacatttttacctccttccccttttaaatccttgaaaggtaagtgaccttcaacaatgttttctttcttccaggataagactcccacttctttaatctccctcacgaatctagtattccaaatttcacttattcttacttaactttcattaagttctcccagattcttcctgaggttgggacaaaaaaatcagaaagagaatgagacaattcagtctcattcatttctgtcttgttgtctaagcctcccaattccaggcacttctgccttttcagagataagcacctctatagttatatttatccttccataagtgtaatttatatccccagaagaaaagcacaggtcactatatatgtaggttataaccgcatgtgtactctgttgtgtccaactctttgcaaccctatcagctgtagtccatcaggcttctctgtccatgtgattctccaggcaagaatacttgaagtgggttcccatttccttccataggggatcttcccaagtcagggatcgaacccgtgtctcctgcatctcttgcattggcagtggattcttttaccacagagccacctgggaagcccaagttataactgtagtctggtgttaagttttcattaccaacatataactaataaagcagtttgagatcagtgtccatgacataatgtacttacattccactgaattataagagtgggagttaaaatgaagaccaaagtccgaatccagagcaaaccataattaatttgttaaatcaggaagaaatcagaaggaaatatttgatttacaagaacagaaaatattttcacacaaaaaaaactaaaccaatgaaagtagaaaccaaacctgcagatgtctttaaaatattgaacatggcaaatgtacaacattgttactttgttcctaactcccaaatcaatgtttcactcaaaatggagataccactataatctttatgggaaataaaatgatgttaatgaagaagacagtaaaaacctaaatataacctgactttaccgcttgacttccatctttatctcataccagtggtcttgacctaatccctaatcagatcagatcagtcgctcagtcatgtccgactctttgcgaccccatgaatcaaagcatgccaggcctccctgtccatcaccaactcctggagttcactcagactcacgtccatcgagtcagtgatgccatccagccatctcatcctctgtcgtccccttctcctcttgcccccaatccctcccagcatcagagtcttttccaatgagtcaactcttcacatgaggtggccaaagtactggagtttcagctttagcatcattccttccaaggaaatcccagggctgatctccttcagaatggactggttggatctccttgcagtccaagggactctcaagagtcttctctaacaccacagttcaaaagggatcaagtcttcggcgctcagccttcttcacactccaactctcacatccatacatgaccacaggaaaaacctctatttaagtccaattattagcaatgagtc

SEQ ID NO: 50907 - DNA, 4169 bp, Bovine  19866880579232
  misc_feature (1)..(1): n is a, c, g, or t
ncgtatgtaaatgaatgaacatggctgtgtccaagaaaacccctttatttatgagcactgaagtttaaatttcatataatttttatgtgtcacaaagtagtgttcttcttttgatttttttcccccaagcatataaaaaagaaaacagtacagatttgaccacaggccatagtttgccaacctctgctgcaaatcaccagaggctatcgcccctcccttctctttgaagagtgcaggttcatcaaggtccttcttgctctggttgtttgcgttcttttatatcagaaggactttatgataattagtccccatcacagttgttttagtgtcagcctgtgggttatttattcactctctttttaagagataacagtgaggtaaccatcatatagcgcttctctcttgggccttcctctctccagaaccccatttctcaatgctctgccttctctctgcctctaaataacagcaaccacaacaatagtagcatttactaagtacctaatatgtgccaagcacagtattagttgtatttaccgacattatcattaagtctttcaatatccttgcaaggtagtattatcattcccattttacagatgattccagagctcaaacacatgaaataagcaatgtcatgtggttatttattgagatgcccaaggtcacttggtttatgaaggtggcagagctagcaaatctgccgaacttcaaagccactgtagcatcctgaagaaattacggtctcggagttctgaataagagaactattaaataataattaaataatacatgcctccatctcagcacacactggaatgtgtaacgaatcaatggcgactagggaaatgatggagattacacacagaggagagatcaggagatgctgatggtctatgttggtggggaaagcatctgatccagaggcaggaagaagagtaaagtgactgagagccccttctggctttcctctcctgcccccatccccagcatctgatcccagacctatttcagaatctcctatctctgctcagcggaagcagtgatgtgacacgatgtgatctcattcaggagctaaataaagccattgtgtgagccccagccctggccgctcccttgtaccatttcctgagctcaggaacccagggaaagatgggagggggctgggagagaactggtgtgaagagcagcaaggaagggaacgtagagccacagaaagcggagggcggaatatctctgggagggggatgaggaagccttgctaaacctcatcactttgaaggagagaatgaaagttattgacattataccatgaaggagtggaatttagaaaacagaaaaactttccgaagaatggaatgaagatatgagggagaaggagtccagtgaattccattttcacagagggcggagaccatgaatgacaggacagaagaggttagaaagagggcagatctttgagcagaggtcagattcaaggtggtctctgttggaggaaggagggtgagatcccaggacatgaagatctcaggattaaaaatgtctgtccaccaggctaaggcagcaaggtaccacctccagcaggaagcatctccagggatggagggaaaagaaagggcttccattcactgcttttcattcatccagtcaaatccaccccacgagcaaaatccagccaggaagagcaggtagaagctgggtacaggtgtgtaggtctaacagctttttctcttttgtgaggtcattgaatgccagatccaaggtccgcatggtgcccctcagtgcccatttctgtcctattcccagcctctgttgctctttttctagtgagcaccccgagttcctactctttcctccctcccagcttccctcaatacttttttgtcagtacctcccgccccttgccccaaatctcagctttgagacccctggttggcagggatcatgctgtggccctcaggttctgtcctgctccctgcagaactgcccatcccgtttattttattttttaaagatatctgtatttggccgtgtcgagtcttagggtctttgttctaagatgggatgtgggatgtttcgttgcagcgcatggactctctagttgaggcacgtgggcttagttgccctgtagcacatgggatcccagttccctgaccagggatcgaacccaggtccccagctttgcaaggtggattcttaaccactggaccactagggaagtcaccgggccatcctgtttacagatggcacatcagatgacacgaggcccaagtctgtggacacagaggatgggtcccagtggctggacgagaggccccctctatgtggcttcccgatgtgctgagacagcaggcctgggctggtctcctaggcctctcctttcctattcttagacccacccggcagggcagcagaatccacctgcagaggcctgagtacttgtgtcctcccttccccatggtagacaggcgtgcagtggggcacaggcaccatctcagtggtcctgtctgcagcggcagcaggttgcagtgagagagggagcagtagctggaagggacgactttccaacaacctggactttaggggtgtgtgtgtgtttgtgtgtgtcgggggcagggaataaaataacctgtggaaggcttgacgccctcacaggaagcctgggaggagggcgagttctggctcattgcttcctggtcctcctgggtcctcccagcatctcagttgcttctctcctgggggaagaggagcctgggaaactcattctagcagaagttctgcagagacggggcctgggagggagtgcagaggtagatgccgctgatgtgagctgccctcccgcccctccgccaccttgaaactctggtatttggtacttgtttctggagcggggcttatcattttcaactttaagagctcctgagggttcttaactctgagacacactgaggcaagccctgacagcctccaggagtgttgggctatgagaacaatgcctacctggaagagagagtgaaggaatttcaacatggctaatttgggggccctttgctctgctccgtggggagaggtcagaatagctgtcttactacccaaaggacaggagtcttagaaggaagaagtcataatactgtcactcacgcaccttttctccctgctgttttatttgcctagactcctccctctccaacgtggccaaatcctaaccactcccacccttccaggcccatctcaaaggctatttacttccttctgtttcccttttccgagtcctccaactggttatatgtactcagcacaaagccttcttttttgaaacttttcttgtgacatttgacaaatcctggccagttgtttgtgatctgtgcttttgtctgcgtgcacacatgcacgcactcactcaccagaatgaattccttgagggtaggaacaatatctatttctctttgcttggcatggcttcctgtcagataggtgctcatcagatggaatgataatgagtgaacgagggtgtcattatgtactggacagaacactagactgggagtcagaaaacccacgttcctggtttgactcctcagctaattctttgtgtaatcttgagccaaccatcctccagttctgtgccttggggaagggaggagtgggtaacaggatactctaggcctggctgactatgacactttcctagttccaaggttccagagttctagaactctgctcagcattctctgtcttcttgattcagactggcctgtgtgcggcttccatgaacagagaagtcccagaggtgttcctcgcaggtggagatctggtgccccgaggccacactcgccgctgcctctctgcggtggagtccagagcgcagctggaggaagaggaagaggaggagaatcagagggaggggagaaaaaaggagggcgaagccttccatgctgtgcccctccgaaggtcgggcgcttttcgtgcccacagccacaactacgaccccttcaaaaggcatagctgggggccgggcagggagctccaggatccactgaacaggtaaaacaccggagacctcctgtctctcctctcaagtcctagaccctggagaaagtggttgggaaggaatgacaggagttgaagaggcctgggcccctagcctctgccggagagtctaacccagg

SEQ ID NO: 50908 - DNA, 2788 bp, Bovine  19866880587478
  misc_feature (1)..(1): n is a, c, g, or t
natgattacataagaactattatatcccaacacaattactcattcactccaaagtagggtgatcaaattaagtgacccctgggactccctggcagtccagtgattataaaactctgcactttcactgcagggggcacaggtttaaccactggttggggaactaagatcctgcatgccactcaactcagccaaaaaaattttttttaatttttaataaaaatttaaaaaattaaatggtcctttcagagctgttttattcaatattctgtttttaaattttaagacagacatatttttcattgactggtaagactactggggaaaacctaaatattaaaaagaactacctaggtcacctgaagctatcacaacattattacctggctatactccaatataaaatagttttataaataaaatttatgcttaaacttatcaaaaatagaactagctaatgatgggatttagaaggtcatcatttgacaataaccatagtaatgattgtttcaatcaagaataagcaatggatgctaaaataagtgggtgaaaagatgttttacctcaaaaaaaaagatacatattaattgattttaaaatggaaaaataacatttttacagcaaggagaaaaaaagcagacaccaccttaaccatatgatcaactttaacatgacagaagtcacgtgcctcccgaaatgctgcactgaaaaggacacatcgctttcgggatatctgtgccaaaagtaaatcacctgaataaaactatgagaaactattagaaaagtcaaaatagaggaatagtctgttaaataattgcttcataaggttcaaaaatgtcaaggttatgaaagacaaaaaaagattgagaaactgttcccaattaaaagtgtgtaagacacaggacaactaaatacaacatggaatcctaaactatatcctcgaccacaaagaaattgttcttccttgggtttatacaaaagactattggggcaattggtaaaatccaaataaggactttaatagagtttatatctaatattatacatccttattgtcataatcaaatgtcctcatttttaggaaatatacactaaggtatttaggggtaaaggagcatcatgattgcagcacactccaaagtgactcaggaaaaaaaaaatgtgtacaaagagaaagaaggagaagaggttaaagcaactgtggtaaagtttaattttgaggaatctggctgaaggctgtttctatgttccacatttaaaaattctctctgcgggacttctttggtcgtctagtggctaggactccacagtccaatgccagaggccaggttcaatccctggtcagggactagaccccacatgccacagctaagagttcgaacgcggcatctaaagattccacacagtgcaaacagataaatgattttttttttaaatgctgtcacatacctttattccttccttcggaaatgccattctcacaataaaatactacaaaccaaatagtaccaaagacctacaatttcatgacacaaacttattatatcagaatgtagtatcttccgttctcccttcccaatttgagcaacaacaaattactccattcgctttctcagcaatttagagttacattcacctggaaagaatccatgcagaccggactggaagccagctcctcatctactgcgtgcaacttctccatgaaggtactatccctggtctgtttgggctttggtgggggccgggggccccatgggcactacctcagcactgatgtgcctgatggcaggtgtggtcactttctcagcctaattaaaagaggcaactatgttagaaaatgaaagaggggaggggaggaaaagtgggaggaaaaaaagaagcaggaagagacaagcacatctttcacatgctagcaatttttctcttcccagccagatagaggttaaaagaaaaaaacaaagacattgccaagtacattaatctaataggtttcatcccatttccaatgaagccaacaggatgctactcaggttactgaagatgggaaataaaatggctttagaatattagaaaacacatacaaaaaagagaagggtagaagaatagaaaccctgccagtcactcatatttgaacccttaacaaaaactcaaaaatctttctccctgtcactgagttccagttttctcttaacccttcactgacttaaaggacgtggaaattcagttataactagtcacaaatacaaggaagataatggcatggttactgatcttgaatcatgtttggcaacaggtgacagctcagaatcaccatggggaaactatctatttatacagttaaataatctacttacacagtatttctgagttatcttattagcatggtatggatttacctctgataatatgccgctctcctcatctgtttcagtcatctcagaagactgcctcaatcgggatttctttgccccacgtggagatgaagcggtgctttccacatcactttccaataaactctacaaaacaaatccagttcactttcatatttatgcccccacctcattctactgagtctgaagtatctcaatagaataaatcataaaatatcaatcactgaattagtcagagtaaaagtaaaatttaaatagaagcttaattttctgaagtaggaacagggatctgatcaccatatactcatcagtgtcataacctctgcaaaactgtaaggcactgatttaaaatcctttaataaacaagtcaaagaacacattaaaaaacagacttgttacat

SEQ ID NO: 50909 - DNA, 1388 bp, Bovine  19866880603552
  misc_feature (1)..(1): n is a, c, g, or t
nccaatcagtccctttccacctcctgtcagttccttggcctgcatcctgggtgccatgctagaagggtggggcaagagaagggctgaggttcagagggacacacctgagaagactttgaccatagagtcccaaggaattaacccattagatcccagggaacacctaaaggtagtgggtgaagtaggaagcccctaatctgaatggatggagtaatatggaatctggaagcctctgagcctcagacatgagttggtggccctttaaatcttacaattaactcagacggatgaagggagtactgccaggccttagaggaaggggaccctgggtgaattaggacttgaaattttaaaactctagccatcctttttgtccatacctcttgagtaagaaaaagagactagaagacatcataatggactttgctgccaggtgaacttgagtttgaatccctcttaattgacaagggttagctgtttaactgggcttccctggtggctcagtggtaaagaagcctcctgccaatgcaagagacccagctttgatccctgcattgggaagatcccctggggaaggaaatggcaacccaccccagtattcttgcctggaaaatcccatggacagaaggataaacctcacgtttaatacagggattgtgatatgccaacctcatcaggattgtgaggattaagagtgcataaacaagctttggcatcactggttgcacaagtagtgctaattaactgttggccattttggtgattttctgtttgtacacctgtgcacactcacacagacacaaacagaatacaccttagttaaaaacgggaactaatacaggagactggtggagaattgttctgccacttcctgggtgtgctgaggggttcctgaagatctctacttctggggaatgcccactcatgaaggaaggactcagggaaagggaaaagggaaactcaccagactcaggagatatcccaaagatgggagacccgttcttgccctcggttggtgacttcaatatgggaggaagtcccgcttcaggtagcccctctaagaatccagtccagcaccttaatgggggtacctctctcttgatccttttaagggaattgctcatggtccagaagtttgcttaggagacaggggggactcattccagtccagaccagctgcctctccaacaactctagcccttcccttccccgccctacttcaaacacccttgacagtgctgggctccggtctttaacccctttggtgccaacgctggtccagaggattcctgggttctcctgtctttaacattccccaaagggcagccatcagattcagtcacaggtggaaacagatccaggaagccaagctggggtcactctgagcg

SEQ ID NO: 50910 - DNA, 812 bp, Bovine  19866880794103
  misc_feature (1)..(1): n is a, c, g, or t
ncatcattgctgcactctcctttccttcctcaaatagaactttctggcctagagggaaacagcaaaagctcaagtgcagaagccaagatgccaaaggccaggggttctagacagaaagactcctcccccactattcccaaaaagcaatgaatgaggggaggggttaaaagggtgccagtcatagctctgacggcttcagaaggggtacccacactatccttgggttacccagcacccagaggcccagagacctagctccctaggctgtatgtattcctgacctagactggcccctctgtatacttctgtctggtgggagaaaactctaaaccagaaatcaacaaagggtatccccccacccactcaactcacgtgcacatgtgtgtgtgcatggcacccccaccccccacccccccacacacagacacacactgctgagacagactccaatcctcttcatatcttttcagtggggattaaatcagtggtacgtggagatgcgggcaggtcctgggttcgtggaaatgtgtgtatgtactgaagcatgtatgtttgaggaaacagaaccaatataatcctctgtgagccatactgtttagctccactgaacccttttcttcgactcaaattccattaacatctctaagtctcctttgccaggccagagcctggactctctggcctaaaagaactattagtgtttccattccctgtcaattccaagttctcaactcaggctgattcccccttcttacagaaagtctcatcccctcctccccttgttgggctggtccaggatttgttaacttctg

SEQ ID NO: 50911 - DNA, 3734 bp, Bovine  19866880877925
  misc_feature (1)..(1): n is a, c, g, or t
ncttgcatggggctcctcagttcttcccatagtcactttgatgggcaattggtctacacaagatccagagctaggtcccttaggactcttgtcttggcccagcaggccagcctctgctgcatctaccaacaggttcccgcgtccaccttccctcccggggccatctttgtctctccgcactttgatgattttcttcttgttgctgagggtttctggatatatgctgatgcctttgagcatgtgtatgaacttgtatggtgggttcttgtgcttcttctctgcctgctggtggcagcatgtccagacaaagacggtcactgagacacacaccaccagcacagaggccccgataaggccagcgaccactggtgagacatctgaaagtggagaccagagatgtgtcaaggcggctggacctcggcctctgccagagcacccctgcttagggcctccggctggggctgagctaatctgcaacccagccttcttcaaagcaaaacttgctcatctaggcttaggaacgtctcccctctcttagagatgccctcacccatccctccaaccaatctgtggctctttcttcccaccaacctggatgaaatacttaccttctctagaaagcctcccctgcagtgcgccacctgactgcctgttcttttctcggccttgcctctgcacttacggacttggtttgctcaatggatttgtatttcacataaagtggccccgtaagtgttataggtcacccttctacataggagccattcacctcaactgttccacaagggcatgagctgtgtctggtttcgggaggatattccacagcatgcagcacagggtttgccacagtgggtttgtgtgggctgactgataggtagggtggaaggatgtggaattgactttggatgggtttggtagggtgcccaagggtgataaaagtaggtgagtggtaagaagtagaactgtgggcctaagtccttttgaaatatgtttcaaatttcagctcccaggcatttgaaatacttgtattttaatgtaaaatacaaatatttaaaaataaaacacaagtattttaaataggaagaaatagggaccatggaacatgtcagaccttgtcaccttcttagtaaagtctttcctgaccaacctatttaaaaatgtaaccttttccacccttgagacctacacttctggccctgcttaattttctccatatgacatgacatgagttctctctttcataaacacacacacacgcatgcacacatatacaaacactcacatataattgtattagttattgtctatcttcactagaatgtaagtttcctaaggacagggatcttgtctgtttgtgtgctgtgctcagtcactcagccacgtccagcactttgtgaccccgctgactataacccgccaggcttctctgtccatggaattctccaggcaagaataccggagtgggttcccctgcccttctccaaggcatcttcccaatcttctgggattgaacccagtcttctgaattgcaggcagattctttaccttttgagccaccaggggagccttttgtttgtttagttcctgtctatatccccagcactaaaaacacccagcaggtacttaatatttgttaggtaaacaaataactaaagagaaacaggtttttttttttctcttcccttttctagtcttgtcttttcctgcacaaattgggcccctgacttagataatttggttttgggatttcttttcccttaaatgcactgaagctaaattgggtttaggccttaaagatctagataaggcctatagttatccatactacgcattagggtaagtctcaagtagggcagggggaactaaggaaataaatgtgattcttgcatattctagatttttcctagaagatccgtctatcaggcataggcctggcctgctgcctcactcactgcaggcttttgttcaaacctcatcagaaaacatttcctgtctgttccaaggaagatagtatccccactactctgattgatttctctttgtagcacttattacctctggtatatatttatttgtcagtcttctcttactaggtaatttaataagaccagtgactggctgttttgttcactgctacattcccaggtcctagaaccatgtggcacatagtaagtgttcagtgaacaaatgagttagtgaattcaaaacagcttccactttaggagcttgggattaacagataacaaactactatttaaaaaatagataaacagcaaggttctactgtatactacaggaaactatattcattatcctgtaataaaccataatgaaaaaatatatatacacacatatataattaaattattgctgtacataagaaactaatacaacattataaatcaatgatacatcagtaaaaaatttttaaaaacccagttgccacagattggagaaagaggatgaggtcaatatgactacatataacagggataaatgtaaaattctatttagccttcaaaacctattgataggaaataggagaccttacttgataaaatctgagtaaaactaacttagtagtttaagtgatcacaagcttggagtatacctaggctgacttatactatcagtgtgatgtctaaatcatagaggggcagtataatttcatctgctctggtcatgacacacatgaagtgctctatctatttctgacaagaataaaaattgctgttttttgtgtgccagtatgatacccgtgccagacactgtgttagagcttcctcaatttgactcaaataactcactgaataggtaccattaatagcccaattttacaagtgaggaagctggggactcaaatctgctctagaccacaaagaagcaaatgacagtgatgagatttaaaccctggtctatctgacaccagaatgtgtctatattatggataagcaggatagaagaggacctagaaaccatattaaatgaggagaaactgaagaagctgaagctgaagggtctgggaataacaattttctttaattactgaaggtactttgctggaagaaggtctcatctgattttacttcggagggcaggtctaataccagtgcatacaggctacaagaagacagataaattcaaagaactgaattattgttagaactgcctctcaatggcccagattgcttccggaggcagtgaatctctgaagactttcagagactggatcaccttcgtcagatatattattctaaaaggaatttccttaacaaggattggaatcaacatctctgaaattctttctgcctcagacattcaaagttctatgaatgttgggaccaggtaagaaaagaagtggtaacattttgaaataatacagatgaggagtaatgccatttaacaaaaagtatatcaaggtgactgtgtccatggccatgctgaataataatagcatttattttcagaatatcaggtgaaataaaaactgttagggagaggtttcacataatgggagcagccttggctgtaagctccttgagagcgggcagaaattataacctgtttacctttgaatccccgagtctcttgcatcaaacagaagctcagtaaatacttgcttgaacaattgattgggttcaattataaatcagaatgggcacaatctgaaaaatcggctctccgttcacctatgagagattttcctgaaaactgtttgctactgattcgtaaca

SEQ ID NO: 50912 - DNA, 2503 bp, Bovine  19866880904964
  misc_feature (1)..(1): n is a, c, g, or t
ncagcagctgcccccctccaacttagccggcctgccctgtgccaggagggcagggagtcctggcacagctattgttcgcctgcacaaatgcccgtctgtttgcatcactgcccccctccatctctgcttgtctttctctcctgacccgacaggtgtggcctggttggggggcaagctgggtttcaggatgcctgagtcttatgctttccagcccaactttattccctatggccctcagcacccctcttctgctccactcgtgtgcccacccccaccgtctgctatctcatcttcattcatcaagcaagcgtttattaagtgcctttgtgtgttcagcgatgtctttttgtgttatgttgctggctttggtgttaacgtttcgatttggccgccgtctcctcagcctcctgccttcatcttatccatggaagctcataaaggaagcaaagcctggctgagatcaccccacaccctcttctcagtcccatggccaggaaccccctctcgcatttcccagccctagaacccatccctcaggactcatggccctttgcagcctatgactctgaacccctgctgtccagggtctaagccacagttgacttgaaacctggtagaaccttccagggaccttctgggcatcaagcacggcctggacagagactgtaccaccttggggaagaggctgctaccccttgcccagaggtcattctcagcatcatgtgacctccagaggtcttggtttggacatacctgatggaggaacaaggacactgagagtttaggctctgtttggagaggctctcactcctctgggtcagctccgccaccctctgctgcccgctagggaacacaggaagccaaagtcctggctctggcatctgtggcctttgcatatgtcactgccttactcatctctcgcctgggagcctaagccagaggaaggggagactgcctgtgtgtttgagccagcagcctcaatgccctctgccatttgcctagtctttctccaaaatgaccaaggtctgggatgacagtggaaaggaaagtcttcttctgactttcagaggataccatctgagcctaaattcaaaggaattaggagtgaagttctgggaggagggaggaaagagtaacaagagaggaggagaccagaattccctggtggtccagtggttaagactccacgcttccagggcacagggcacaggttcaatccctggtcagggaactaggatctcacaagtgcatggctcagccaaagagagaaagagaggaggcggaaggggagactgaaagctctgaagctgtggtaaagaatgaggggatccctagagcaggggcaagggtgctgctaggaccccttgtcttggtgtcttggccatccatccgtccttctttacttcctctcttcccaagcatacgttgagtgcctgttatgttccagcccttgtgcttggcgcttacccgtgctttattcactccatccttgatgcagcagtggcggagatgcaggctgtgtagcaagaccttctgtgagggtttgtaagaaagcaggactctggacgctggacgtagaggactgaaccaagcaggaagggcctctgagtgtgtgagtggttgttgtggattggggagtaatgggcccttttcttggtggacagatggggtcatgaggtgaagggctgtcctgctggctggtggcaggcaggtaacaggggtgatcttaagaatacttggaaagagggcagagaagcacacagggccattgacagggagcaggccgccctggggtgcaggccctgtgtccttcttgcctcaccagcctgagcccttggggagggtgcagactgcctccaggacaatagcactaggcagtgccagggccgctcgctgccgggcagtgtctgtgttgggatgtgctgctgctgtggctgctgcccgctgctggcccacctagacagggggtcccttggagagagggtgagtgttgggaggcggaggaggctgggcccttggagccagagagggaaggtccacaagagtccctgtcccctggctgccccggtcctctcgccctctttccccgcctctttcccaggtgagtgctcctggaggcctgagggcagaaggcagagggcagaggtcgggggagaaagggagttgtagcagctctgtagcggatctgcaggactgcatctgcaggactgcccattttggagctgaccctgcttcagatatgtcacttttttttttcttaatgtagttgatttaccttattatattagttttagtatttttacagattatgtatgctccattaaagttattacaagataatggctataacttcctgtgttatacaatacatccttgcttcttttctgtttcggttttttttttttggtcatgctgtatggattttagttccccaaccagggactgacccctcagcaagaaattgcagagtcccaactactggaccactagggaattccctgct

SEQ ID NO: 50913 - DNA, 1104 bp, Bovine  19866880911054
  misc_feature (1)..(1): n is a, c, g, or t
ncctttgtataaagaattttggaaaaatattattttaatgagatgcactactctaagtgggtttactgagataaattatatgttcatttttttgactttggctgcattttgagaaatttaagccttgtttggagcgaggaaggaacttagcttagtggggagaatagatgagatgagtcagctgtgggagatgatctatacagaagcactgaggaaaagaagaataagtagtttagaaacttcggaatagggagttccctggcggtccactggttaggactctgccttcactgccaagggcctgggttcaattcctggtgagggaactaagatcctgcaagccacatggtgtggccaaaaaataaataaattaaaaacttcagaataaatgtgcttttatttatctaccacagagtagatttcctgtggtgctgaacatcttaaatattctttggagatatgagtttacagttgaataagtgtctgaaactttttttccctagatgaagcagatgatgatgatgatccggaatataatttcctggaagacctcgatgaaccagacacagaggatttccgcactgaccgggcagtaagaatcaccagtgagtctgtgtgtgttatgagtcctgctcttgacttttccacatctagctttgtttactttgcagagttttgagggtgaagcagcccactcaagacatttaagcttcctctgcctatttatttctataattctttacattgacatctatattcaggaatcctgtcaacatcccacagtcatgtattgagttcagtatttggcagcgattgtaccaaagtaagacatggcctctgtctgtaggatgtcagcttagtagggggatacagacaggaacagttacagtacaaagtgataggtgctgtaataatagcttatatattggtggcctaaaagagggtatagtgtcctatgtatactatggcttgggaaatgactcacaaaatgattcaccttagtttagaaggagtaataaggttttggtgaatgggggcagagaggggttttgtaaatagaagaatattttgcagaccagaaattatgaaacagcaatacatgta

SEQ ID NO: 50914 - DNA, 1148 bp, Bovine  19866880955297
  misc_feature (1)..(1): n is a, c, g, or t
ncgccccccaccattccttgccttcctccttgggacttccttgaagaagaaggaatttaagtggaacctgccgctttctccttcccactctcctggagtctatgcagctcccgcatcaccacccataactcctttctcttttcactccatttctattcttccaggctgtcttcagtcctccacctcctcattctctgcgctctacttcttaccttcataggccccaaaccccagaggtcccttttctgtctttcctcctctgttcccaccttcctcctcccccaaaccttaactgtctcctctctcagaacaaagagtcctttcctccctagaaggaagcagggaccagaggatcagggatggctctggaggctagggggtccccctggaatctaaaggaccccagctttggagcgtggtggtgggggagaggagagagactatttctttgttctgactgttggagaggtggctggctttgtgtgcgggactgggagtggaaccggagaggagggctgggggagccctggagggaactggcggtgctggcagtctgggagggaagttgaagaactagggggtctccggagaggctgaggccttgcggggcataggaaaagattcttggggccttagaggttaggaaaagagctgagggggaggggagaagcaaggatgggggaagggagtgtaatgcttaaggtagtggctgagtgactccagggggtcggatggcgcctagagagggacgtgcctgggctgcccgagggatttcaagaggggttcagtctcagtccctctggctttcctggaacccctgaccttggagtcagggacggcagatctgaaagagtgagtcccgtgtgtgcacatgtcctgtcctgtgtgttggtgtgggtgtctgtgtctgtctgtctgtccccagatgctctgggtcactgtttgaatgatggtcaccaaagtagggggctcattgccctctggacgtgaggaagtagttccattcttagctcagtctctcctttgaagtatcatctaggaacgagagggagcagattggtcatggttcctggagctgatcggaaaaatggctgagaggtgctggctggacccttctgggtttgtttatgtctccttgggggaggggt

SEQ ID NO: 50915 - DNA, 972 bp, Bovine  19866880968398
  misc_feature (1)..(1): n is a, c, g, or t
nagagaggaggcgcttggcctattggacagaggatcctggcgggtagagaactggagggagaggcagaacctagcaagactactgaagggtatgcaaggaaaagcgtggccctgatgggagaagcaggcgcattctaagcaacggagagacacagacacagcggagacagggagtgatctgacggcagcatagaaggtggactggaaaggcaagcatggtaccaaagcagagggcacctgacactgcacagaacgaaggtgaaggagaaggcaagcaaccaggcagtactccttcctgttcatttcactgcttgattttgagactttataacatactttgaaatatgctccttcctaccacaatacctcaagttttgggtccttcttaacttcctcagaatttagcacctgctctggagattctctgcaagagactgcaaaggaaggcagagctgagccccagccagctaagggtgtgggtgactcaccacaacaggcccatcctcctgggccaggtatgtcacagttgctgaggtgaagttgaaataaccagccttgagagggcgcaggaccacggtgtgggagacgttgctagcactgactcagagttaaggagggaaaaggatgaagctacagtcgtaacaaactttcaacttagggactaaatgcacgttcacaaaaagagttgctaacacatgtaatatttcatatctaaaatactctgcaaaaataataaacacaggctttgtacctaagcctgaagtgggtggtattatatgatatctttttaatcaagttttaagaggtctatgacatattcaatattgaaatgttataaaacaatacaggttatagatgaaaaattagtcacttacggtcacagaaaaccttttgctgcctgtaacagaaggaaattcttgaaaatacaaaacaaaaacaatacaaagagaacacttaaccttgtcagaaaat

SEQ ID NO: 50916 - DNA, 1310 bp, Bovine  19866881029262
  misc_feature (1)..(1): n is a, c, g, or t
ntgacctgggccctgggcgcctgcctttccccatagccgagctggggatcaaagatcagactttccctgagggtgttgcatcaaggcagagaggccaacctctctttccctaggacgcgtggatcctgtacttggcagataaccagaaagaggagggggtttaacttgccgccttcacccagggttccctttgtccaggttggtgagcatggtagaaaggccaccctcctgaggggtgctctccgtccaccgcctgcccatttcctttagggccacctgttccacccagccccgaccctggggccacagccttgctcgcaggtccctgaaggtgtctgccagggcccgccggggctcctgcctgagaaggcagtacagcacggggttgaggcagctgttggtgtgcgccaggcaggtggtgacgggaaagacataggtgtggacggtgtagaaagtgctgtcccagggcaccaggtcaaacttcaccaggacaccccagagcgtgaccacatggttggggaaccagcagaggaagaaggaggccagaaggatgcggatggagtgggccacgcccctgctgtcccgccatcgccgccgccgccgccttaggaaggccagcagcagcaggtagctggtggtgatgatgctcagtggcaccataaaggccaggaccaccctctgcagctggtaggcccccagccaatacctgctggggaaacgcagcaggcacaggcgcacgccactcacctcgccctcggccccaaagacagctgtgggcaccgtcaccagagaagctgccacccacatggccagggtggctacacgggcccagaagagcgagaggtgggtgcctggccctgcagccatggccaccacccagtaccgggcgacactcaacgctgtgatgaggaagatgctggcgtagatgttgaggacggtggccgttaggaccatcttgcagagggcacctccgaagggccagtggaagtccagtgccgactcggctgcccagaaggggagggtgagtgccagccccaggtctgccagagccaggttgaagacgaaagtgtcagaaggtgggcaaggggctcgctgagcacagttacccagcacccacagcacggccgaatttcccagcaagccgacagcccccacaagcccataggccagggcaaccgagaccctcagggctaggaatccaacaggcatcgtggcatcagcagcactcagcacgctgcctccagaagcgttgacccagaaagcgggcagggggcaaaaggtgttggggcgtgggcatcgcagggcatccg

SEQ ID NO: 50917 - DNA, 982 bp, Bovine  19866881039179
  misc_feature (1)..(1): n is a, c, g, or t
ngaggccagggtggctctccttgcagctgtcgtccgctgggtatcccccagctccctgaacagctgctgagggtcagagaactgattggagaaggagcaggaatgttgtgtgtctggggaggtggggtggataggggagctggatgggaggctgccagccttgcagctgctctgccgatcttcctgggctgaactgggtgttcaggacttcagggtccccttgccccctccctttctgttgactgggtggaggctgaaatctctaaatctctgaaggattagggataaggacacccatctcaaatttctagtctgactgatacatagtgagaaagaaaggatatggcagcaatgtgtatgttgagggaatagcggttagaactcctgaccttcagccacatctcaggatagccctgtattaagtacaagccaagatttcttccttccccaagatgcctatacagagggctcccaccctatccacccatccacccccagacttatggcaaagagctgcttctggtttgagcaggacggcccactgtggaacagaggagtgatagctttagcttctaaatctctatggaacctggcagggaaccccagacagaaccagtgaggcctccctccctcctcactgttcaacttgagtttatgagggtgaggagggaaccccaatctagatccctctagagacctgacaaaattcccaatctggaagctcgttgccaggggaactggggaggcgggcagcaagcgctattttgagagcaggtggaaagcggaggttcgatccagagacactgcgtgctggagtagaggagagctccagcggggtgggcgcagccccagcccccacttctgtctgcccctctgccccaccctgctggccttgtatttgtggaagtaagcctgatgctgggtattgtctgaaggagttagcagagtttccggtgttgttggatgggggaggggaagctgg

SEQ ID NO: 50918 - DNA, 654 bp, Bovine  19866881254083
  misc_feature (1)..(1): n is a, c, g, or t
ntgcactgaggcagagtgacattcagggtccaaagaacttacttgggcagatgagggcttccttggctgtgatgctcttgttacaggcatagcacatggtcatgcccgaaacggagatggtggtgaagaggtgcccattggtgtagcgtgcgtccttggcttccttcatcttctccttttcccgggtctgcagaaggggcgagagagacaggaagtgaggttggaggatgccagggtgcctgagaagtccagagaggcaggcgagggcagaggtgagagagcaacgccttcctggggttgccagaaacacaccacttcctgaagcagagcctgccgcagcgtgtcagaggtagctgtccaggagtgactggccatgcccaagggccgagctggcccctgacctacctggcccctgcggctgggttgcctcctgttgccgctcatcgccacagctctagacctccgcgtcctcactccacctcccggctctagctctgctcgcccccaagctgctgtactctcttctctgtgccgggagaagatgcgcagagaggaggggagagcaggcaaagcagaaggtgccagctcaccagcgctttcaaatctatgggagttagctcctcttataaccatgacaacccggtggtggagccg

SEQ ID NO: 50919 - DNA, 1011 bp, Bovine  19866881292829
  misc_feature (1)..(1): n is a, c, g, or t
ngggcagttgggcccgggcctcaaggacgcctccaggctgctgttgctgtatgatgaggacatcctcaagtgagatccactccaggaacaggaggatttggcctttgctcaggcttatctgaccagggtaggcaaatgctgcttcctgttcctgccagcccctctgaacaagactgcttttccttcaggggagatgttttttaaatgaagtctgcctattaggctgcacaacagccttctatgcatctgcctttgtttacctagaaatatcaaaagagctgtgtgagtgaaccacaaggacgccaaggttagtcatcaacaaatttattgttactgcccaggcataccacccctctgttgccccaaaactgaggaaagatgatagccaccatcatcagtgcgagggtaggctaataaagactttaactgagcccttggtttgagaaaatagacatttgatacattgaccaaaaagtggatctcagtgatcttcagagtcatgaaccaacctgtttgtggcagcagtccctatctcattcttttggtaaccacctggttcctttttactcctagctaagtagagtcctagcagtgattgtcatggtttttcttgtctcctgatattttactaacattcctaatttatgtattatttaccctcagatgataccatgctgaaatatatgtagcaagcactccttatctatttcaacatggaggtgaaaccaggaaggagaggtttggactgtgagctagagaaaatttacctgattttgcaggtagcactgtagtccctggaaaatggaaaaatttccattccacactgtcagaaaaagagctctgccttgctcatggccccatggcttccattaatcatcagatcttaggacctgtcagaggagtagcctctgatgggatgatctggagctctttaacagtaactcctccttcctcggtccctttgtttcttggtcagggtccaaagaaaggggattggatgattggaaaagt

SEQ ID NO: 50920 - DNA, 1515 bp, Bovine  19866881317292
  misc_feature (1)..(1): n is a, c, g, or t
ncctgccttgtcctcctcatcctccttgtcttctcatcttcctccctcaccttatttctcctcatccggaaaatggcaatcttattccgcttctgtctcttgcctggaacaaggctgggatcttcttccttgaagaatccgagagcaaggaatgaagtgtgctctccactgacccatcccattacatatgggacttcgagtctaaggggggggaagtgaggcagagaaggattgagatcagagggaaagattaagccaagcacccacctgctggtgagtacagagcgggaagcacagctttagactgccctgcccagggaagacatgcgcttaaaatgacccaagagaagttaccaagcagtatcagccaaggacacacaggcatattctaagcgtatccaatgatagctcattattttaaaaaggattcaaatgctttggttaaagaatccctttagaagttaggtaataaccctctaatttatctgttctagaaatccaggcggttcctatttgaaggtgatggatctgtttattatcttgattgtggtgatggttttgcaagcacatacattgtcaaaacataaagttgtacactttaaatatgtatagttgtattgtgtgtcaattatagctcaataacaaaattacagctagcatttaaaccctcccccaaataaacaagcaagtaagttcatatatcaagtgtgttcaacagcgtataaatgttgagaaggtacaatggagcgcactcataaaaatggagtagctagccggaggcagttttgtgtgtgagattctgagtcacacaaactgagctcagactctagcatcttttaggcaatcttgggagagttacttaatttacctttgtctccatttcctcatctgaaaaatggggataataatagtattgaccgtacagggttcttatgaagtttaaatgagagataaattttcataaaatggcatgttgtaagtattcagtggatataagctgtgactactattactgttggtattttttcctggaaggagtcaatttgagccatgtttagtaaaaatgtgaattggaaggacatagacaagatatggaaggttgccacagaacatcaaaggggaggtcagtgacctaagatgcccatacggtggtagagcaaggggtgggagaccccagagggaggggtactcacgctgggtcaggtcctggctcccttgatagcctaggtcatcagtggaagctgtggatgggtgtcaaggatatatcaggtggtgttaaaggaggggttttctacccctggggatccccaagcttctttaacctcctaaagggaagaagaaggagaggttagttagaagtggaactgctcacacacaggcagaacttcaggagtcaccctgctttgcacctgctgtgtcccatcctgccctcctacttcgagattcgaagacagagacatattatctctcttcttcattatcataaagttctatgatcactaacgcattgagact

SEQ ID NO: 50921 - DNA, 586 bp, Bovine  19866881397023
  misc_feature (1)..(1): n is a, c, g, or t
nagtaggaaagattcaggcagagggaaatccttccccccaccaaccaggcgtcagaattctgggcgttctctgagtcgcacagtaggcgcccagagttccccccaacctgcgccccgccgcccactctccgggctcagcacctggcccggcccccactctgcctctgcgcctcgaatcccgaccagtaaccggggcgaacactcccctcaaacctagggtcctcccccctgcccagtgcaaggtgtcctcttcccactctccaccacgcccccagcccaggccacaaggcaaaccccggcctcccttccccagcacgcgccacgctcccctaaatcgccctcgcaggatgccccctacccgcctgccctaccctcctgctcctccgagtgcctgctgggctcccgccctccactccccggccctcccgcacgcccgacagtctcagagccacccgcctcttcgcagacccctcctccgcgctcacccccacccccgccacccttactacctctttgaccgaggctcggtcgcagatcacaatttcctccttgtccttgggggtcttgacggtgacccgaatggggg

SEQ ID NO: 50922 - DNA, 1284 bp, Bovine  19866881801681
  misc_feature (1)..(1): n is a, c, g, or t
nccatcgagccagctttctcccgagggggttcctgggcctatggaggtgacccttgggtgacagctgttcttggtatctctcttgctctctgtctcacagcaacagaaagctgccctgctgaagaacaacactgccttgcagtctgtttcccttcgcagtaagagtgagtagtgagggtgcaggagctgccataggaccctggacccccaggcctctcggcccatgggctctgctgcccccctgaggttgttccctggcacagcaccttcctcccttcagttggaagctgatggcggccccacaagggagatctagaccaatgggcctgggggcaggacaggagaattcaaacgaggttgaaggcctgggattgactggtcatctgagcctgctctcactttatattattatgatcagttatttacatggcacttggggatgttggcagaagttgttaagggccaattcagaaagatctggtgtgacagcaagagtgggatgcttagtcaggaagactagagtctgagtctgtgctcagccaccagctgagtcaccccagacaagtcccttcaccatcctgagctgcagtttgcttataggcttgggcggggaagagataagaaaagctctttgtaaccattaaaagtattgcacaagtttatgggtagtgttataatcatctttctctgactagaactgggctaaaggtggggttggagaggaggcttcctttctagtcaaggagcctgggaggcttgagtcctgggaaggcaccaggtttgaggcttgcttgcttggtatcccctccgacagctaccactcgggagcggcccagctcagccatctacccctccgacatccggcagtccctgctcggctcccgccgtggccgctcctccttgtctttagccaaaagtgtctccaccaccaacattgctgggtgagcctctacttggggacgggagaaccagtcaggcagagtgaggcggtggagacaggtaggggggaggggctgagagatccttcccatccctgagttcagaatgataggtaaggagaacttagggtgactgcctctgggatcccgccttggttccccaacctgggaagggatctctcgcccgagtgagtcgggtgatgcagccaggctccactcccctcagacacttcaatgatgagtctcccctggggcttcgccggatcctctcacagtccacggactccctcaacatgcggaaccggacactgtcagggagtccctcatcgacgaagggaccgtgccc

SEQ ID NO: 50923 - DNA, 804 bp, Bovine  19866880818989
  misc_feature (1)..(1): n is a, c, g, or t
ntagcaagcccagaggcaaaaataaacacaaaaggaaggcgatcacccttgtgtccagtcacacacacacacgcatgcacatcttcccgcatactaacccacacatactaacacactccacaccatcacactctcacacatcctcacacacatatacgctcacacatcttcaagcacattttcacatactcagaagccaaatacccagaaaaaagagagagacatcgcctccacactcgtatgctccttgagaaattgcagagagaggtgaggcacttgttctctcctctctctcccccctcacagaagggttttcatttaaaagttgcccgagcccaggctttcagattacagtctagactatataggtttcctaaagataaggctgagaaattgatttcaattaccaaagtggagaggcagcacttctccagccttctgagcggagcattaaccctggagatccgggagctgcaggagaagaatctggcacgccaggcacacggggagcccgtgcacgtgctcttggagctcacacatgcacactcccatgcaaaatctcactggcgccagcttgggcagagtccagacctttgcgttaggagcccgggttccagctttcattctgccaatattttgcagtgtttgaagacctgcctttctcctctctaggcttctcctcatagaccccatttctgctcccaagggctcatgaagcctgtgctcgctcctggctgagctcctgtctgttgagactggctccccaggagatctaagcaggtactcagagccctagaacccagt

SEQ ID NO: 50924 - DNA, 1831 bp, Bovine  19866880845739
  misc_feature (1)..(1): n is a, c, g, or t
nctgggaccccagacccaggggcatccacccctcccctgtagacttcggcttgccctttgacagtgacaggtggtattggtgcaggaactgccccccaggtagtgttttttgaccccatttcctgattggaatccttgctcttctgtaattagccctggagcattcgttcattcactccctcaattgttcactcaatgaacactcatccttcaaagcacaattctaggtgctgctctgggcttggaggggaacaagacagataaggtttcctttccgcttctgtggaatccccactttaactggggaggcaggcaataaacaaggagaaaatgaactgacgagatggaaaagacaaggggtggcgggtgggccggggggagggaggaaaagaacaaaaatggtgatggggaagaattctctgaggaggtgacgtttgaaaaaagattgtgagcaatgatctgggctcttagaacccatttcccaaaaaaattggggtaattttaatcatggctgtctctccagtttgataaagaattcaacaagttaatatacatcaagcacttggcccagggcctggcatataatagtgcccaatcaattgtagctctgtgtctagctaaggaaacgtggacttggggaggcacagcagaccagacaggacgcctggcccaaaggtttgctcgcctggtcgcatgcaggagggcttcctggaggaggctgtcagcactggccagctgtttgcctgaggccggcccacacatctaaatcaagaaagctcatgccttggctgagaggaccccagcatcttggactcctgagccaggggagagcctggacctccgtactgcctgagtcacagcctctactcacccctgcctgggtccctaagccaccaccttagtttcccattaaggctggaatctaccaccagcccccacattctgctctgagtcactcagagccctagcattgaatgaacccggaatattgatgacctacttcaggaaagccagcccacccaaaactcactgcccttgtgaccgatggcccccactgtactgccacctctccaggctcagctcctccaattagcctagccctgttctctgccccaggaggcagaatcccatttctcctccatcctaagggtgggagagcctcgctgcggccagagggaggaacagacagacccgagggacagaggtcagcctggggcaggcaggacagaacactcagcgccagagcaccacgtgtttcccttccccccacccccaggcctccacgctgccctacaaacgccactagtcctgactgatggcaggaaattggtccccgctaagcacatctcaggagaactgataaatcctcatcggagagggggagagaggcggagtgaggggagagctaggggggctgatgggaatggtggggaaggggagggctgctgttctgctgagacaaggcccatcgctcttagccctgggcccctcttctgcctctggggtacctgtgggcagggggacagtgatgagcagacagcaggcttctatgtctctctccatgtgaggccttcctttgccctttccactaactacagtccatctcgttcctccatcaaggcccagctggtatcctcccctccctgccagaagccttccaagatccttccagtaagatgccagctccactggtgggcatttctgtatgccaagcccaatgctaagcaagtcatatgcagtatctcatcaattttcataactccctaagaagtaggaactgttacagccattcggcaggtgaggaaagtggggctcagagaggttaaggact

SEQ ID NO: 50925 - DNA, 1610 bp, Bovine  19866880904655
  misc_feature (1)..(1): n is a, c, g, or t
ncccttgatgcaggatggagtatcccttccatgcctgacgatgtattttcctttatttctaaataaaactgagctgtaacacggagctgtgacattgatctgtccgagagctgtaacatggtctctccgagagctgagacacagtctgtccgagggctttaatgtccatcgcttcaaatttttgttgtgacaagacagaaccgaggaaactacctattcctctgacaaatccatctcagggagtagggcctgagtctctagatgatcccgatgctgaagtttgggaatcgctgctccaaggcagtgtcccttctacagggtgcccctttccccaccctccccccatcccagctggaggccccttggaggggaggaggctgcaagaccacagttgaatctccctgctgaaacgagaaccctggagggggcatcttttccctctgattctaactcaagacatcccggaacctcaccagtagggctgacgccagggtatttgaatagctcattagctctgctctgggcttcaatccctcttaattagttttgcaaacgatattcataaaaaaagaaaaaaactccaaactcatcacatagcaaatgcaggtccctgtgaagtttgtggccgtgggtatataggcgcgtgtctgtgtgctgtgagtgagaatatgtttgtgagcttgtgggtgatggtgagtggtgggcgtgcttgtgcacagaggtttcagccaatgtgcacgtgtgagaaagctcacgagtgagtgtgtctgtggtgttgtggtgtctgtggccacatggccacctcatctccagggacccccaccaagcaggttatccttcccctccttatgagtccctaacacacccaagtattagggaaacataaaccttcaactcccctctgtcctgcttgtttttgcttccccagtgcccccagctctagctttcagaggcaaagattaacggtcagctagtcagctgagcaggagggggacagcagtgtccccactgtgggaaccatcctttgtgtccagtctgaggctgtgacatagcttctgggtgtcccttacacttgcactgtcccctgatgcccagggtttccattctcgcttgtcccccctggattcctctgcttctggggagctgttcctggctgcagattctcaggcctcccccccagggagagtcagccctcaacagggctgcctgtggggttcagagagaggactggctgtggggtgatgggcctagactttgggggcacttcctaccccttctcaccgccacccccctcccagcctcctcctgcattccctgctgtgagcatccccatttggagccaagtaaatttatggcataatcccacatggaaatgcatggaaatgctgccaattaccatgaagccaagagaaaggctgtctcgctggcgccctccgtggtctgctgtctgcggcttcctgccttccagaaaccacagggagccagaagccagccatttggcccagattggcggagtggggccgtttgtataaaactctttattagtctcacctggccttgaagggtttcagtaggaacaagtgtctcctttgcattaaaactgaacaaac

SEQ ID NO: 50926 - DNA, 741 bp, Bovine  19866881187307
  misc_feature (1)..(1): n is a, c, g, or t
ngttctgttcctataacctgccgagctctttccctcccccagaacatctgttcctcactgttcctgcagatcctccagtggctggctccattgtgtcaccattcaatgttaccccctctgacctcagtatctaaccacacctccctctgcctcatcagcctttgccaccgtcttcagagcattaacactctgcaatgaaattattatggctttatgtcattattctttgtcatctgcttagaatgtaaaactccctgggaactgagctttcgtctgacttgttcccagagagagctccaaacacctaaaacagggcctggcacatagtaggcactcaataaatactacccaatgcatgaataagcccttcatcacggcctccaagactctggctctgttccgagcgggactctcccacctgcgaactccagcctggctgttgtctgcgtagttctttctgcaattaatcatgttctttcgctggataccctttgtgttgtcattggaggctgcatctcattcatctctgtctagccccaggacctggtgcatagtaggtgctcaatcagaagttccctgtcattagctctccccccgcccgggggtgagtgatgggctggctcagcagcaaacctttctgagggcagaagcagagggagtgagcagctttacccctcccttgcagggtccctttttggcagagagaaggagcgcaaagaggagcaaattgagagggggagg

SEQ ID NO: 50927 - DNA, 1528 bp, Bovine  19866881729801
  misc_feature (1)..(1): n is a, c, g, or t
ntaagtctccaggcctagccagattctcaaggaagggaatcagcctccatatgtctcagtaggaaaaaaataggactgtagtcaatggaattctccaggccagaatactagagtggttagcctttcccttctccaggggatcttctcaactcagggatcgaacccaggtctcccacattgcaggcagattctttaccagctgatccaccagggaagcccaagaatactgaagtgggtagcctatcccttctccagaggatcttcccaacccaggaattgaactggggtctcctgcattgcaggcagattctttaccagctgagctaccagggaagccccaggaaaagtcacagtgcatctttaatgcaccacagtgtctatcacactctgagaagccatcacagtagtgagaagaccctgcatttacaagcacattagtgggacttctctggtggtccagcagttaagacactatgcacccactgcaaggggcacaggtttgatccctggttggggaactaagatggcatgggttccatccctggtcagggaactaagatccctcgtggcacacagtgtggccaaaaaataggaaacaaatgaactaaatagcacattagaggtggtatgctgcagtccatgggttcacagagagtcagacacgactgaatgactcaacaacaagaggtgggtttgaatcccagtgcctctgctcacaagctgcatggccttgagcaacctaaataattcctcgagggctcagtctcctgatctgtcaaaggctgttgttgtgatgactcatatgcaagattcaggcaacagcatttagtgagcacctactgtatgctagatggccagtgcctgcgcctttcgccttgctttcctcccccactctcctgccccagcatgcgcctaaggggactctagagatgcgggggaagggtaggagagagtccaacagcctctgaggtcacattagaagccgaccagcagcagcctggctcctgccagcctcctgatggtcctgtctgctcccgtgccaaggcccaaggtgagcccaggagcctcggccatctggtccagctgggccagcgagaggcagctttgccagctcaggggcggccctggctaacaatggtgttaatttttcatttgtttgtttgattttctgcagtgaatgaggaatgttgcaacaacatctggagccgcccccagcggaagcctgcagagtggcagtggcagcggtgacagctcagaacgcaggcctctcaccgtgtggacatccacgcatccaccagcacacacagactatgtgcacgtggtcatgtctacatgtccacacgtacacatgcacatgcgtgtggtgtttgtacaccacacaagcatgccctgtacgtgtgtgcttgtgtgtgcatgtgtgttcaaaatgtgtgcattcacacctatgacccatacacacatggccatgcctgtgtgcacagatgcacatgcttacatgtgtgttcagacgtgtgcattcacacctatg

SEQ ID NO: 50928 - DNA, 1008 bp, Bovine  19866881213132
  misc_feature (1)..(1): n is a, c, g, or t
ntgtgaaacaaaaaaatatttatactaacagtaaatcttccttgaaaacctgattttgagagaataggtaccttcttggagtacatcttttagagttatcctctccctggatattgcgatatccttcaccttagctttcgcctccaaaagagtgacacttctcaggtcattcttctctatccgcaaggtaggataacctgaggagccaacaaagccaaaccaagaaatataaataccttcttatggcatcaggatcaactagttcagttagaaccccaggagtcaagtcacaggaacaaatgaaggtaagaatcaaaaaggaaaaaggcacatacagggagaattatttatgaaggccatactaaattttaaagaaacactttcccacctaccccaaaacctttaaatgcagaattaaaacaagaaatactaaaaataatattttattaataccacttcaattgcttttctgccaaatgaaacaagctttgactcatggaattaatctaatcccttgaatgaactgcttttttctccaaagattttctaatatagtctcctaacaaaaaaacttcaaatgaagagatgtttgtaaaaatagcttttcttaaaaaaaaaaaaaaaaaatatatatatatatatatatataattggtttaatcattctagcatccatacagccagccatatctttgtgagattcatattcgtttttcagttcccttgattcatattcattcttaatatgatgatagcaaaacaaaatttctggccataaattaaaattctcattgcaacaaaaaaaaagttagaataaaagggaagatctagtgttattagcaagcagaaattggaatggtattttaggggagaaaaatcccgaaagaaagggtggactcagacaatgattattggtggctgctggaagaactacatgaaaagctttgaaaaactttattataagaggatgcattaggatgacaaaacctgatcccactgatcagcaatt

SEQ ID NO: 50929 - DNA, 1828 bp, Bovine  19866880348966
  misc_feature (1)..(1): n is a, c, g, or t
natgtaaagggagaccctcctaatgagattctctcagaggatgattattccagtctattctcagagatttaaatgaacaagtgttatcgtttttaatggtgtctcagacatattctgttggtgcattgcttttctgtattcaactttcctatgaattgagctgtgaaccgaaatagagtttaaacctttaactgtatgcatttgtataattatctgaatgaaggcatgaaggttaaataaagcattttgtatggaacgaaactccctaattattactaaggctgattcagacactttggaaatcatagttattaccatactaattaaacctttgttatgaaaagttttaccatttgtgtatagtaatttaaaacagaacaagatagactgtatactaaaaggtgaatagaggacgttttatttcgtaacaaccaggacctaaagtgggattcctgaaagtattttaatgagtgtaaaactaaaaagtggtctagaaatatgaagtgatatgaaaacaagatatttttcagagcctaaaatcaaatctctgtgaatgaatgaattacattattttttggactttgtgtgtcgtttaagtgtagaatgatctatctagcacgtgacaaagctggttcatttctataaaatcttaaaacaattataaggtttggaaaaataagaccattaatgaatggaaaagtgaaagtattagtcactcagttgtgtcccaactctttgtgacttcatggactgcagcccaccatgctcctctgtccatggaatactccaagcaagaatactagagtgtggtagccactcccttctccagggaatctttccgacccagggatcaaaccctggtctcctggattgcaggcagattctttaccttctgagccaccaggaagccctttaatttaaataatgcttaaaaagcacttgaaaaatctaagtatcctgcagttgtgttcagtcaccaggctgtgtctgactcttcatgaccccacggactgcagcatgccaggcttccctgtccctcaccatctgggagtttgcccaagttcatgtccatcgaatcagtgatgccatccagccatctcctattagtatccttcacttgaagacctactagaaaaatccattcaacaataagaatggtaggaaatcctactaacaattatattaaatggtgatagatgataataaaaataatatttgagtacttcctagatgcccagcagtgttctaagtattatatttgttctctttattcttaccaaaatcctgagttaggttctgttattatcctaattttacagaggtaaaagtaaggtactgtgttaggcaacttttccagtcagcctggttctaacactagagagtccttagctactaaagggttacaggttaggaagatggagaaaaaatagaaggtggggagagagaatgagctgtgatgaatatcatagaaatattcaagaaatatatttgattatgtacaaataaatattaacaaacccaatgaatacaattctttatttcatacttggcaaaccataatgtggtttaataactcataaaaatcagagactgaagtagattttggcttactttattactgcttcaaatccttttgtaaatgaactttaagttcagtgaaatcactgggttccactcagagacactgtgcgaggagagccagtgggttacaatttcctcctccagggtatcttcctgtcccagggattgaacctgtctcctacattggcagacggattctgtaccactgagccaccagggaagcccatggattacaatatataaatat

SEQ ID NO: 50930 - DNA, 2438 bp, Bovine  19866880386398
  misc_feature (1)..(1): n is a, c, g, or t
naatgcaggagacctggatttgatccctgagttgggaagatcccctggagaagggaaaggctaccctacccattctggcctagaaaattccatggactgtatagtccgtggggtcacaaagagttggacacgactgaatgacttttactttcatataggtatcatatgggcttccctggtggctctgtgataaagattccacctgccaacacaggagatttgggtttgtttcctgggatgagaagatcccctggagaaggaactggcaaccgactccagtattcttgcgtggagaatcccatggacagagggaggctggtagactacagtccatggggttgcaaagagttgggcgcacctcagcatggttgatttacactcttgtgttagtttcaggggtacagcatagtggttcagttataagcatcttcattccttctcggattcttttcccatatagattattatgcagtgttgagtagagttccttgtgctatgcagtagatccttgtgggtaatccatttatatatatactgtatgtacgttaatcccaagctctgtatttatcctttcttctacatttcccctttggtaaccataagtttatttattttattttttttgaagtctgtgagcctgtttctgttttgtaaataacttcatttatataattcttgaaaatgttattacttgttttaaggtatttaacgactcgagacttcactcactagcattcctgaaagtgtgtatctgacacttacactgctgtcctgcaacagaatagaatgtccctttactacctccatgtcagcatttctagtatcattttaaaaatctttgtttttttttaaagctctgtcccagccaggaggagtgctgagcttagatttccccagtcgctgtcaatcacactggttagcaggagtctcgtctgctggcaagttttctttttcagtcagatcggtctttctccattctgtcttcctgttctgcctttgtcttccctgaagcgctagtctgccccttctccccttttgctcagatgctcatttgatggatgaaatcaacaggggcttgatgtgtatagttaattctccacataaacctattaattatgtacgcttctgtgtgcctcgtggcagtcacagcttaatgagggaccacttcagaaaacctctggacagtctcaccccgttatagtcttagaaagacctgcgtgtatctatattccatttaccaggaagccaaaatacgaagctagaaaagttcgtccgcacaagggccttctgctgatttgtaggggagcatttaaacactattgcttctgccacttgcctggtgttgctgcctctgacctcagggttgggtgggaaaaaatggatttctctcagctttgccgttagtcttgtttggcttgtttgtgggtctctctttaaaggcattttctatgagcagggaagcatgtcaggcttctcttgactgcttgcttgctttaaatatccaaaaaataaagcctacatttttgcaaatataccaccctttacataaaaagtgtgttattgctgtatggatttgtaatgtgttgtggtttccagttgtagcattaggtgtatctgcctctctcaggtcattttctagtctgaaatttgatgttttccagtactatgaaatagccttacaaaaataactcttgtggcgaatgttttgtgaaatcaaaagcaaggtccatctggtagcagacaagattaatctgtttgagaatggtaaacattttgcatattttaaaatatgtaactagcacagaacatttgcctcaggcacttgaataagtctgtggtttagagtgaagattcaaatgaacgttttattcctaaaagtctataaggtatgctttcttgtcttgtatggtaaaacttcaatatattaaatcagtcactgaataataatgctcttttaaaaacaaaagaacaaaaaaagtaacccgtgatatagtaaagataagcctataacagttaacccttttttaaaacattgcaaatagtataataattttggtttattaattttacaaagaattataaataaaataatagataaaattgaatcttatattgaattcaaattaattttaaagaagtagtgggctttacttttttagtagagattagttactttcagaataatttggcagaatgtacttgagaattccatatactcaccccactctttaacagtttcccctacatagagtcttgcattagtgtaatatatttgttggatgtaatgatttaatgaacctatattgattcattattaagtatagtccatgctttacatcagagaaggcaatggcaagccactccagtactcttgcctagaaaatcccatggatggaggagcctggtaggctgcagtccatggggtcgctacaagtcgg

SEQ ID NO: 50931 - DNA, 2262 bp, Bovine  19866880434272
  misc_feature (1)..(1): n is a, c, g, or t
nctgaactgaattgactgatacctgcttaaaaaaatttagaggattctcactgcctttaggataaatcttcagttcctagagctggtccttaaactcctgttaaacctctacttatatcattgagtttggagtagtcacgggtacaactctagggggcgctgttcacaggttatcgttgtgcctgatgctccttctgcctgaaatgcctttccccgggctttcccgtcttttaatacacaacctttcttgagtttctctaaatacttcccttcgctgaaaacagagttcttcctgtgtcacctctacccctgtatggatttctttcatatgtacttagtcgatcagtcgtgtcctactctttgcgacgctatggactacagcctaccaggctcctctgtgcatggggattctccaggcaagaatattggagtgggttgccatgcccctcctccaaggatctttccaatccagggatcaaacccaggtctcccacattgcaggcaaattctttaccatctgggccaccagggaagcccttctttcatatagtctacaacaattcagtaattcctatttttctacataacttctctactgtctgagcctctgtcccctggtaaagagtaagccccttgaaaacagaggctgttttatttgttttcacattctgagcacttagaacattgcctgatgcatagaggtaattaatatttggtatgagtacaagtgaatgaatgcatgcaatacaattaactttgcattggcgtggaaattctaatttacctctttaaattttctccatgtgtatttggagtgtttctttctataatagctttggtcccattctaacatcctaacctgtcccttctgattgttttctagttccattgcctggtaactgctgtctctagcaggacgtggctttctcctggagcaaatattatctgccactgaacactgttttctctactggatcatgtgttctttccttgtggagacaaccaagagtttactatggctgtagtgcaattggcaactgtcagaatcaaaactcattaataaaaaaatgataatgcttcaaagtacattacattactccttcaaaggcctttgtgaacattatcttattaatcatcacaatagctcaggggaagataaacattgttggttatcttacctagatcatatttggaagaactttttttcttgttattgtttgattatgctatgaaatctggagagcaattatcatattggctatttggatataatttgatatgctgatgtaaaaatttctctggatcagtaaggtggtttttatttcttttagatatctcacccggactcttgtcaaattctttccagagagtgaagcaaagaataacaagcaaaagactctgaaatttctgttcaaggattgaaattgagcttgaggctcaataaaccattgattcatgatctggaaatcaaaaaatgaattactgcactcatgtaggtgttgaataattattgaaagactgaatgatgtactgatttataatctgagagtttaaaggagtgagcttatgtaggaaattagaatcttagtcaggaattctattagtaactgatatcaatgggtaaaagagaattcttttaggaaaggaattagaaaactggtttaaaaaattactcagcagttctgtccccacctcacctccaacatcttagttttacttttctcataacacttgacccttgtttaagtgtatttgttgacaactttactttcccttctggagcagggtaaagtgttgggtgctgtcacatcattggggctgttgaattgaaaaatattacctagagaaatctttcataaaaaaaattgaaaggaagatggcttcaatttcagaactataagaagagattgtctaattctagggccctatattcaaatgcaatggcagatgttctcagcgagccttgtatgaagaatttgacatcttttaatgtctcagcaacaaactgtacagcctctggaagaaatgtcacagatgacattggcactttctacattctaagatggtgtcttccgtcatgggagtgtccagggtggaatgatcattggtgcaactatacttctgttatctttggtcacgtgtgctggaggaggactttatgaagtttacctcaaatttctttccagtccaggcaaacatttctgactttttagactctgtcaactctctatgtccaattcataagcatagatagacttaaaa

SEQ ID NO: 50932 - DNA, 1961 bp, Bovine  19866880449186
  misc_feature (1)..(1): n is a, c, g, or t
nttcacaggcttgaaaccattgatctttttactcttttttttttttttttgaaagagaaggtaaaaaattttattactgattttagaaatcattcctggaaggttgaccttaagactgcagatgttagatgttataaacgagctctgtaagatcacttaaaaagcggtcgtgttggaaggtccctggcagtccagtgcttaggacttggcactttcactgccatgggcccaggttggggaactaagatcccacaagctgtgctgtgctgctgctgctgctaagtcgcttcagtcgtgtccggctctgtgagaccccatagacggcagcccaccaggctcccccgtccctgggattctccaggcaagaacactggagtgggttgccatttccttctccggtgcatgaaagtgaaaagtgaaagtgaagtcgctcagtcgtgtctgagcctcagcgaccccatggactgcagccttccaggctccactgtccataggattttccaggcaagagtactggagtggggtgccagtgccttctgcagatctttttactcgtattgcaaaattgtacatgaggaaaagttaaggcagctcagttgcccatggtgttcttattctattaataagactgttggctcttgtgggcgtggtcatcatctattcgcctatctcattaacaagtcaacatacttgcatatctggatgagtagggaaggtagcataagaagctaatgcttacagaggattcagggtattcacagagtatctgcgctacatattttattttatttgaagtttcctggcttacctctttcagtattttgcaacttgcctcccacttcttacacaactttataatttttcctaaacatttaaaatcattttttaacacaatagaatttgtcagttttgagtttactatggtttactcactttttttttttttttttacttcaaaaaatgctcaatcaaattttagcagatcacattgtgagtgagttctctgacaatcgatatttttaaaaaatagaaatgatttgatgaattcttatataatgacactgtagattgttggcttaaaatttttttaatgtggacatttgacttgtttaaaagtggaatacttatataatcatggcacactaattatattaggatatttcttcatattctaaagtctatgccatggaaatatatttgtcatttgaaggatgtttgagatacttattactgtagacacatttttaattggaaagcataaaactacttgttaaaactgaattcttacaaaattcaagttaatatttaacacatgaaacaaagtaagaaataaagaaactcttaatgctgaagtttcaccattaaaaagtgctttaaagttttctgaacttaatttgaacctttattttcatttaggtgccattaaagaatctgaaaggggagtgcaagaaagattgtttgaaatttgcctctaaaacaacttaaccactttaaccctttgaatggatgccccagacagagctaggaaacaataaactcaagagagagagttcaatttagttcagtcgctgagtcttttccgactctttgtaaccccatggactacagcacgccaggctttccctgtccatcaccaactccttgagctcactcaaactcatgtccatccagttggtgatgccatccaaccatttcatcctctgtcatccccttctcctcctgctttcaatctttcccaccatcagggtcttttccaatgagtcagttcttcacatcaggtggccaagagagagttaggaaagataattatttctggaacccctgcccctctggcatttcttcttttcctgcctcatgagagagggcccattttcgttggctcagtggtaaagaacacatttgcaatgcaggagacaggagtttgctctctgggcgtggaagattcccttgaaggaggaaat

SEQ ID NO: 50933 - DNA, 843 bp, Bovine  19866880499477
  misc_feature (1)..(1): n is a, c, g, or t
ntgccttgagttttctgcttctgttcaaagcaagatgaactaggaagaatattcagactcacatttgcagcaatattagtgctttccaccctcaagagaagggacagaaagactttctagcaaaatgctgctttctctctctttctcattcttcttttaaaagtacactctgaatatccatgccgtttattaatattactactattattatgtgagaaatgaattacactcagtcactaaaaagacccaatgatgtgcttaggtggtaaggtaaatttcattacattttatggtacattatcaaagcccctaaactccaaagcataaagtttgacatcgttagtgatttcaaagggttagcaggtttaaacagattcggggatatgttttaatgacaaaccatgatttatgtacatccaaataaacattagagaaagaaatggcaatccactccagtattgttgcctggagaatcccatggacagaggagcctggtgggctacagtccatgggattgcaaaaactcagacatgactgagtgcacagccacaggtaaatatcctccactaacctgtgtcaaaacaagctgtcatactttacttgattctttaagcaaatcgcattaaacttaaagactgcctcccacggaataagctgaaacacctgttttcttaagcagcatgtcctcggtgagacattacaagtaaggaaataggacatgagaacattttataatttgtgccaaggtaaaaccagaaactacctcctaaattaagacaaatgaaaacaaatatgtgacatgtttgtctactaataaatgtatgttgttaatttaaatgattt

SEQ ID NO: 50934 - DNA, 2397 bp, Bovine  19866880540947
  misc_feature (1)..(1): n is a, c, g, or t
nccttctgaggtattcgaactattctatattttgatttacacaaagatcacatgaatgtgttcatcactaagctgtacatttagatctgtacccttaacaatgtacatgtcacatctcaataataaaacatgacctagaaacttaaaagacagtaatggaaatatttttttaaattagttaataaaaatgactaatgtaagtgtacactgcttatcattattactagagttaagaaataagaaccaaaatgatttataatatattatctttgccacacatgctataaagattcacttgatacgagtgaccgctaagccatggtgaggtcacatgttcaacacatgtgcctgactctgcctgacatttaatcgagtctggcacatgtgtgctttagtaatgtactcagctgtgcaattttatgtgagtggacatctgtagagatgaatttgaaaagaatttgtgcaaagtgacaacctttataaccaatgatatataataaaaagagtcataacaagaagcagcaacaactaacatttattaaggctttattacattataagcactgtgccaactttctgccttcaccacctcaagaactgcattttcaggagtttttaaacataggaacagagatggcagaagatctgttttgcaatcagcccttaaaataatagtcatacaaattaatgcaattataagcttcaaatttgtagaaaagaaagctggttagcaactctctcttatgtgatgatgttataattgcaatttcaaaaataactgaatttcattaaaatgaacctaagacatttaaaatctagcattctatagatacatcttgaaaggcatcatcaaaggaacttttctgacaccaaatgctgatcttctcattctaagagtttatagctcacaaactcctttccttatcccacagaagcaatgaataagtttgaagacatgatgtgaatgaatttcctggctcattcctttcctaaacaactactgtcttcatgattaatatttttcatatgtaaagcaggttcttgatactttttattgttctcgtataaatcatctattatcattacatcaaatcttatttaagtttcaattctaaaactctaaattccaaactcttcattaaattcaagttaattgattattaatgaaaaaatatataaatgggaatcaaactgtgctaaaccacacgctctacaacttagggtgaagttatgattcctgacacagttatcatacatcgtagcagttgagtacaaacgtaaacttggaaccccgtaattaagtggttaccaggggttatatttaccagggagggctcaaatttttcaacaatgttaataatcattgactcagtacttaagagacctgaataggaattgagagataatttagttcaaaccccttgttttctgattagaaaaaaaaagaaaaccccacagaggttaggttgggttaggttagggtctggattcactttttgacatttgcggagctgaaccagcttctcaaaccacctttaaagatgtgattgtctgcaacacactgcaatagcatttaaaaaaaatgcaagcacatagttatacacacacgtaggaatatattatagtaaggaaactgtgtatatggagtcctcgttctatatatatcccagttgaaacaccggcccaccctgtttgttgtctgataatgttcaatgtatttaaatgtaacttcaaaaataccttccaattcccctttgtcctgatgaagcaattccaaaagctttagctctcaaaagctgtcagagtatcactctgacctttgcactatcttcaattccccatagctttctttaaaggatgttgtaagcagagtgcaaggatcatgaaggaatccttagattaacctgtcccaggcaggctttactttctttttaaccagctcacaaaattaagaaaccactagaccagcaagtttattagattattaacttactctgtgccctcaactgcataatatgcatctttggactttctgccttccacccagagccaagttattactactctgcaatggcaccccactgcagtactgctgcctggaaaatcccatggacagaggagcctggtaggctgcagtccatggggtcgctgagggtcggacatgactgagcgacttcactttcacttttcactttcatgcattggagaaggaaatggcaacccattccagtgttcttgcctggagaatcccagggatggggtcgcacagagtcggacacgactgaagtgactcagcagcagcagcagctctatctctttaaactaatttcaaaaggaacaaccgggtttttaaaaacaatccggtttggtaaaaaggaaatactacacgttttccct

SEQ ID NO: 50935 - DNA, 1769 bp, Bovine  19866880595075
  misc_feature (1)..(1): n is a, c, g, or t
ntgctgaagagactgccttttcttggagttatattttatgcaataaaaattaaaatgttataaatggccacaagtatatgtctatgtatggaatccaaatatgcattaacaacacaaagagctttccaaagaatcctttattttggtgactgcaaagaatatgaatttctccttttcattcttctcctctccttcctcttccaattctgcttctttgtatttgtcttcatcttcatctatcttcatcttcttctttaatctttccatgaaagagtggaggaatattgccctagttgcagaggttgatgtgatcacatggaaaggaatagacagtgaaaccagagatccttcaactgccctaagattcccacactttgctttatcatcattcatattcacaatgtatctttcttctaaagatctcaaaggctctgaaactcatattattatcataaggctgtgactcaaatacacacaaatttaaattttaaaagaggatgattaatttcagagaggcctggctcacttggtgctgacttgcttctttttcctgtggtgagcctgagttttctgaatcagctattgtgtccctctgcagtagatgggtaacccagtacctgtctttgctaagtcagagtatgctgcatgctcacgttccctttgcctgagtgactacatgaggctctgtcacgtatactttttattcatgcaatgtatcaggtaacaagcagaagcaaaggttaattttcagggaatgcaagccggactagtcactcaaaggaaatggtttgtgataaagagtcatctgtagccaaaggctttttattcccgtccccagcttgtttcatgtttaaatattgcttatatggaaaaatccagtgatattttgagtgtgtatgcattattttttaagtcgaggtgattctaatatgatcagcagaaatcatgaatgactaattttgggttctgcttgttacgaaaacatctgtgagatttctttttctgataagtacagttgattgtgggtattccataagattctgctttttacattttaatacccttggtagatatttattcagtcctgattgtgtgcaaagctctgtactagatactgaggaaggaggttattagaataaaagaggaaagagatatcaaaatgattataacagaggttcagccctcaaaggactggaggaggaaacatcacataaatttcaagggtggaaagtgattggtcccttatgtgggctaaatatgataggaaatctcattttcaaactgagaccctaaggttggaattgtggctgctagttcctctagtcctagcaatatcttttcagatttaattacaaacattcatgcaaacatcatacttaattaatccacccatgctggattgatattatccaaaataactggaatttatggaaaatatgaagaagagggggaagcaatttctataacaacttaaagctattttgttttttaggattagtactaacttaatgtactttctattctgaacaatatcttcctagctcctcttttctctgttagccccttccttagcacagagtcagccatgactgaagtgacttaagcagtagcagcagcagtcataaagctactaagtaactccttaaaaaaattatcttgaatcagaggaagaaataataaaagagtggtgttaaagtattttcaccatgaaggataagggggaaaggggaagaatttttctaagaggacattaaatatattttcttaga

SEQ ID NO: 50936 - DNA, 1983 bp, Bovine  19866880617591
  misc_feature (1)..(1): n is a, c, g, or t
nctacctcctgcattaggaggcagattctttaccactgcaccaacttgggtgggcatgtacacatcgctgcatttaaaatggataaccaaaaaggacctatagtgtagcacataaaattcttctcaacgttatgtggtagcctggatgggaggggagtttgggggagaatggatacatgtatatgcatatctgaataaaataaaatataaataaaaagttaaaaaaattttggatcctcatttacttttatcctgatcatggaaacttgctttttcaggatgagtccatctcacctcctcagtcctggtttattacacccatgtggggagagaactcggcttctctttgctatgtattcctggtcccgagccctggcctgggttcctctgatcctctctatccttcagggacccaaccctgggctcagacatccactgtcagcactgttcatatgagtcctctcacagctcattctcctccagccagagcttctgtctcattcaacctcttgtacctacagtgtctaggataacaagtacagcagtaaattagtaatatcaacaagtcaattttaaagaagcactgactttttaaagtggtggataaaacaaataggaggggctacagcctaaggcaggggggaggatatctagtcttatctgtcaactcctttaatcttcctgagaacgactgatgtatcataaatgtatattttaatttgtctttccatagcaaccgtctcttatttggcatcttcccaccatgacacattttgcctggagattttggtaaaattatccaacagaggaggactcaactcaatttcccctttcttaattctctttcttactacttctattagagcttctccctggccaaagtgttcgtatgctttgcctactcttctggcattcaaagtaggcctgggaaaccctgggagacaggagttgagattcttttggggagtccatgaggtcaaaattatttccatcatattaagatgatttttctcttacatgtgtgcttttataagtgcacacatttatatcagtagaaacctctgatagtaagaaccagttatccaggttcaattaatggaagttgccaggcaaagtgctacataatttcatacatacaaatgtttaattgttactgcaatcctaggagtgagatactgtgtcagctctgccaatgagtacattgagtttcagagaggtgaatttgcacatctacagcctgcacagccctatactccccacagccagaatttgaatctagatttatctccagtggatggacctctgcaactctaacattttgcctgaataattctattattctccttttaagaaacagctaggggcttccttggtggctcattggtaaaaaatctacctgccagtgcaggagacgtgggttcaattcctgatccaggaagatcccacaagccacggagaggcaactgagcccgtgcaccacaattactgactctgtgctctaaaacccgagagctgcaactgctgagcccatgtgccacaactgctgaagcctgcatgccctagagcccgtgctctgcaacaaggaagccccggcactataactagtgagcagctccaacttgccacaactagagaaaagcccacccagcacagccaaaaaataaattaattacaaaaagtaggcagggctgtgttccaataaaagttgaaaagtaaaaaaagaagagagaaagggctagcacttacacaaacaactttctctgtagattgtgtgataatgagatttgcatctttccggatagataattgaacatgatgctgtatatgactgtctgtagatgtgataattttccactaattctcatgtgaaccatcaattagaatactatcttcttttgatcagaaggatttttttttgaaagtcaggatcttcaagactgagtgttctcaaaaatatgagctctcttctgtgatgcagcttat

SEQ ID NO: 50937 - DNA, 782 bp, Bovine  19866880686328
  misc_feature (1)..(1): n is a, c, g, or t
naatccgtggggttgcaaagagtcagacacgactgagcaactgaactgaactgtgggagtaataatccactagagaaagaatctgtcatttagaactaacagtaatcctctgactagttcttagtcctctctccttttcattccatactctcttggagtgcatatgctctcaaaattttaattgatgccctcttgtggctatgagaattcccaagtgcataactgacctattatctttcttctggctttttattattgtttcatttcaggaaagcttaattataatgttctgacataattggaaactgtattcttcatgtaggcctcccacacaaattcccctgccttgttttcccctcaattgttaatgaccctgtagccggactggacccagataggctaagttgactgaatcactgatctcagatgcaaaaatttaaggggacatcccagaaataaattcacacacttacgatcaattaatctatgacaaaggaggtaagaatgtacaatagagaaaaagacggtctcttccataagccatgctgggaaactggacagctacttgcaaaagaaagaaattacaacattctttaacactgtatacaaaaataaactcaaaacgggttaaagacctaaatgtaagaccagaaaccatgacacttctagagggaaatataggtagaataatctttgacataaatcatagcaatatttttttggatcagtcttctaaagcaaaggagataaaagcaaaaataaacaaatggtacatacttaaa

SEQ ID NO: 50938 - DNA, 1430 bp, Bovine  19866880689015
  misc_feature (1)..(1): n is a, c, g, or t
natgggtaacgtttgcctcacaggaatacggaaggcttaaacgagatcaccccctttcagacacgtagcacaatacttggtacatagtaagttctcaacgagtgcaagctaagagcaaagcgggaatttccaaagtccatatagacttgtgggtagagtgtggtgccatcttggctgacaaaactatttttcaaatataagcctggtctcctccgaatctttgcattttatattgaactactgattatccaggagcaaaaacagaaactgtttccacatccaccctgccgtcctcacaaacctttgctctcatggatattagtttcacttctttctccagaacaatagctgcatcgcgaagtgatgaaaacttcccaaacacggcctgaaggaacagaaggatgggaaggcttacttgtgggtgactggcccacaagcaacagattatgattctaactcaaagtcccagagatgcagaccttcacagcagacaccagcctacgtaggagggtgggatcacaatgtccctggaaggtgagctgcagagcccacagctgtgaaatacagctctttgtgtgctgaacggtgaaccagggcacactgagacaagaaatgtttatgtacaggtgtcaataaagtgaaagcataagctctatggacagaattgggctggtcaagggcagctaattcctgcaaataccttgttactcattgaatgtaaatgatctacttctgcattttatcatgtttacacagtgatattttgtgggacctgcttccaggtttatgtgtatctttaatctgggaaagtccagggcttattcactctaatgttgaataaaaggtcactggcaaaaatcaggaaccaatctaaaacaagagcgggatggcgagttttgccaagtgtgtacatatcaacttatttcaatattttcttaaaaatccattgtcctgaaacaaggcatggcttctcatattgcaaatgaaaagtcaaacatttcagtgaaggcaagcaacaacacggacaaaaacaaaacctcaaacgatgccctctgtttccatcagagccacaaagatatatttttatgtggatgtggtgggtaaaagagaataagtacagtcacgtgaaaaatcagcagagctccacacttcagatgttgtattttatttacgtgatctagcatccctgagaagttgtgaccgtgtgttatacccattttacagataaagattctgaagatcagcaggcctgatgtatctgcctaagacactcatgactggtaagccacagggctggtccccaaggctgacttattcagcctagtcaaatcttgagctttcctctctaacatgattctttacattttgttttcttcagaaaaaaatgttatgggtacgtatgtgtgtgtgttttctttcttcactgtaca

SEQ ID NO: 50939 - DNA, 1445 bp, Bovine  19866880704837
  misc_feature (1)..(1): n is a, c, g, or t
nacaaagcttattcagctgtaaaaatgaatttatgtcttgattcagttgacttttgtatctttctcagtaaaagggaaaagagaaagtgctgggaaataacagttattgacacaagggcatcagttaacgagtcctgaaaagaaagcgtagcctgacattttttttgtggagggaggtaagggggtctcctggcttcttcgattatttctggactgttccacaaagaccctccacatgtttgtttccacagaaatatcgacaaacactagagactcctcaagcagagtgaattccctcagtgaaatatatgtcctctgccaagaatcaaaggtcatcccagtggagtgccgtcttcgtgctcagccactacggagtgtctggaacagagtgagaacaaaaattaccctatttcggtgccccctgaactctttcgggaagtatcccaacaaaacagtcactgggaattcagatagcacatttggagactgggaaagggccaggccaaacagaggagaatgtgacttagagacaataaggtaaaggaaataaatgactcaaagaagagttttaagccaatatttacacccgtattgccatatttacagcttaaacactatgccctgaccaggcaggaagtacacttttatgagtcccttaatgaatgttaaatcaataatatcccaaacaatgggccccagtgaattttcttatgaaggccatagagggagttattcaaatggagtcagagtcatttgcactctgtaatgcacatttttttaggagacagattttcaaattagcaacttttaatacaatcgaaagccttttctacatgtttattgttaaagggaatcatgtcatagaagacaggtataatgcccaactaaaaacgtctatacagcagattttattgtcagcagaggcaatggtcaaagaacatttgccttcatcatgaccacaataagagaataattacacatgcagaaaaaactaattaaatggctaatgagcaaaccaatatgttcgactgtaacatccacggcagccaggcaactgagcatatggaatagattttatcagttggttggtgccatgtaatcagtaactgctttttttggaccttggtgacacccgacccatattggctgattggcaggtccagataaatgatcaataagacaaaagtactctgatttcataaaacacaagcccagcaaaaatgccactgacctcttttgatgttactgagatgctcaggaagcacttttgaaattttatttatttttttgggtggcccattgttcaatgttctctggttgcatttacaagtgtaataggaaatgacagtcctgccagtctttcttaaaatgtcaaagacagcatcatgtaaaacaaaactcaaagacatcccccatttgtgcatatcatgccaaataagctgcat

SEQ ID NO: 50940 - DNA, 1431 bp, Bovine  19866880745805
  misc_feature (1)..(1): n is a, c, g, or t
nactaaccttttggtattctattattttaagtgtcttgtctatttcttaaaaaatatttaaggttattatttatcttacatcaaaagatctcatgaaaaaagtatgaaagccatatatgttgtcaaatataatagaactgaaaataagtaaaagtgaaaatatcagatcagcttttacaaaaattatttaacatgcattatttcaaaaagttttcctccactgttgcattaaattttattcctttttttcccttctagtgtttcaaagatggttgttctatttctattatttctatttttatggttgtgtgtgttagtcactcagttgtgcccagctctttgggaccccatggactgtagcccaccaggctcctctgtccatggagttccctaggcaacaatactggagtgggttgctattggttaggatcagcttaagggaatatatatatacttgtatataagttatgtatatataaacctatctatcaacagcagtctatcaataagaatgaagccatataaattcttggctaaatgagaaatttaatacattttccagttctcagaaattgatggaataattgctgaagttttagttccagattgttaatttttttattgtgtactttcaatttcaagacacccccctgcccgcacaaccccccacccacgtttaaacaagaattctccagtattcctgcctggagaattccatggagagaggaggctgacaggccagagtccatgggatctcagtcagacacgactgaatgactcacagaaattctgtgtgtcacagaaataacattcacatgtttaggacatgacagtaagtattcctggatttatacctggagcagggatttgcaccggatttgcctttctgtttccccccaccaccacctccagctcccctgtctgtttgattttgttctccacacagattaaaatgcacacatatgcacacatgtgtgtatgcccacacactcccctgctcaaccaaagggacatggtagggtcaataaaatgatgtaaagactagcctcctgaaatctacatcagactagggcaatcaaccacttaacaagaattagattgatttcctgagctaaatcagtcatggtctctgccctcaggagtacacagcattgtgggggtgatcagatgagcccagtggaaatatcacctggaagaaagacaaggagatgtagaaacgctgagttcaggtccctgttccaccactggttgccacatgaactgcaataagtcccttaatttctcagtcttatttctgatttcttctaataaaaacagctttaaattaaaaaaaaatttaattaagagccacatagtttgtcagcaagaaagaaaaggataaaaaacaatgaagagtctgctctcaaggtctatacccactagggaggccag

SEQ ID NO: 50941 - DNA, 1090 bp, Bovine  19866880764270
  misc_feature (1)..(1): n is a, c, g, or t
natatattcttttttggaggatatttgttttgcaatactgagttggtttctgcctatttgcagggcagcattggctgacttcttaattgatgtgataactaattgtactgcagaaatagtagattttttaagagagtggaacagaggttacattagttttgattgggaggtatggataatgttttgacaaatggaacataacaagatagacttttgagcatcagccgaaaccaaatggccaggtccctgtgatttaggttttatagaatgaagagacatagaaccttgtagagagaggcacattagagttaaatgacctcacaattgtgtctgggtgcatcctatttgctgactaatcattattaagctggatatatctattaataggcttttatggctccagtaaagactatctcattaggtagcccaacgccaagagataattgtgaaggaggccttctgtgaagacagcctacaaaaggtgactgaggggtcatcaccactgagatcagttactggaatttttcttaggaaatttctttggatatgagcaggttgtagccttcggaagcaccagtgatatccatctctgaccagtgagccatctacctgaggctcactgtcaggtccaaccccagaggaagataaaggagacagcatgagtcactctgtccaaatgagttcattcatcagctctcctatcataattggactcacattctcctagctagagatgctggtatgtgaacacctaaggggcttaatgtctcctttggaatgaacacatggggctaatcagagaagacgttcttctgaagatacctccaggagcttttccacagtatatcaatactatgaccaacactacaatgaatcacgttagttaatgcattttaaaaggactagggagctttgtcttaaagggatgagatgcaagactggcaggtttgaacatgttgatgacaggctagaccaaataaaatacatcacaactttaaaattctcttgaccaaatcttactcagacatcttcaagttagctccctctgttttatacattacttggaactctgtattttccttcatttagt

SEQ ID NO: 50942 - DNA, 3698 bp, Bovine  19866880788715
  misc_feature (1)..(1): n is a, c, g, or t
nttggagtgaatattaacacagttgtttctccccaaatgtccactgaagtaaaactgacatgtagtaagcctagccttgaccgaggtttacagttagtcctggaaatgaccagatttacattcagaacatcacaatgtgttcctaccattattttactgctaaatgtaaagtcgtgaataggactatacagcatattatatgaagagacaagagccctggaaattctccagtcccatcatttcagagcacaaatccatccaaacaagctatcaaggggtatcagtaaaattatactctttcagagccaaacatttggtaagagcaatttttaaagtataactgtgattaaacactcaggctttagacagtgaagactaccatgatggacagtgttctccggaaccagaccacaggattattaaaccatctcctgtttccccctctacgtttcagaacaaaaaacaaagaagtatgctagatgagggtataaagtaatgatcaaagtgtcagagtaacactgctgcgttccttaatcgtactgaaggcaagttttttgactgggctgttttctgcaagttgtctgaaagtactaaaagaacttgaaaggtcagaagttcagcaaaccatgaaaatactagctgttctttagtaaatccttactatatgccaagcagtatactgggtaatttttagacatagcacctctcctgtacaacagttctagatttcatggatgggaaaccaaggcacagagagggtggctgagttgtctgcaaacagaaatcagagtaggagtggaagtttacctctctcaggctccaaagcctgtattctccctgaggcactgctgcacctgtgttcccaagaaccagctttccatatctaacccttaagtagttttattagggatgtgtagtcatcagattttccaaataggatataaggacatgatttgacagtggtacataacatttaaaatcagtcttctgaaaattcacacatggagaatcattataaacaaacaccaactggctatctccctggacttctcacctgcctctgaaatgttcaacctggagatccagaatcatttaaacacttggtggctcagacggtaaggcgtctgcctacaatgcaggagacctgggttcgatccctgggtcgggaagattccctggagaaggaaacggcaacccactccagtactcttgcctagaaaatcccatggatggaggagcttggtgcaggctactgtccatggggtcgcaaagagtcgggtatgactgagcgacttcacttcacttcactacctgatggcattttagagcagattttcttgattctacgtgtttctttataggtggaataaagggttttccacttgtgtagaccttccagagtgtgtttaatttgcagttgaaagttacctccatgggactagttgttgataacaagagttgacttttggcggttgtaaatgggctggcatcttcattcagatgatgagcgagaagggaggacggaaaattccttttcatatttctcacctaacagtaccaccttgtaatgttttcagtagtcttacaaataatttgcctgtagtattattgttagtttaattgaattttatctaggaagctgtccaacatcagagaaatgaccccccaccctccttttctgtgtagagcacattctcttgacagtattgattcatggaagtactaatgggcttagaaaacatttggagaatgtcatttctcatgatgtttctttttctgaaaatgaatctcctgaattacaatctttctccctgttatttggctgagggaagagataaaacttgtgtaaacaaatttcctcccatgctgaaagcaagtgtttcgtgtacacacaacccattgcagaaaagggctctttcagttaattgggtttcaaaacaagcaataatttctccacagcaaaaccacaacattaagcgagttgaaaagagatgaatagtggaaatagtcacatcggtactttatctttctggattatatctctagaaattttaaatgtttgaggcaacaaagtctgccctttgtgcaaagcaagaaccaatgactcctgtgtgaattagtatatcttgctttttccaaatgcaggttgaagacgaaggtagaatttggatcaaattctagtcaaagtgctcaagtaatcaaaaagtaggatattgtagggacataccaacatcttccctttttgctaatgtcatgctcctaaaatatagcataaaacattttagaaaatgatgttgccctacttgtgtttctggttatcccgtagcagaattttgtatttacatccagactacaggatgtattttgtccctcagaacttgagtatattggacgggtatagttgaactggggcactggtgcctatattcaaggctctttcctatcaacttgtctgtctacactttgttgtgtttaaaaattcattaaaaaaacaaaaaaccaccatcccaaccccgccctatggaatggtggccgtattgttttgttcatgtctgtgtgggacacgttgcatcacatggcaaaccaactccccgtggatgtgagataactacttacaaaaccagcttgaaaacatcgtcttctgtattatgtcatcctgtatcataatgcaattatgtgtatcataacgtgctcattttaaaaaagagaaaccagcaaattcatgtttgtccatagaagaatgtattcagaactttctgtgttgtgaaatgatgagaacagaccacgtttaagatatacccacctgccacttaaaatgacttagttataattagtagtagtctagacgttgctctcagtgtgtgggggtcagttcaaacgtcatcctcttttgaataaatctctcggtggtatttgaaaaaatacatgggaataaagaaaaatatcatctttggccaaatcaagcaggcatctttttcctttccttgacacttagctcattctacttgctgattggattacaagagctgtgtaaaaaatacaaaaacatcctttcgtttacaaaacagttattctaggcttgaagcctctgaacagcaaatcaaatagatgtgctgcgtctgattcacttatgtaattttacaaaaggctcctgggtctctgaccccagagagttagaatacccagaggaggtcctctgcattaaaggattaaaacccccaaggatgctggcaagcaactgtattaatttcttaaatcttcatttggttttctgttcagagttttaattgcaaatgaatttatttctccagcttatctaaagatctaatttcccaatagtttcctctgcatttatatactctgtagtgtttaggcaacccctgttataagtttattaatattatgtaagtgttgttcttgtatttatgtatagtgtatgtattgtaaatatactcagagcttttttccttttactgtaaaatggtgatcttttttttttttcttgccctacaataatgtaaagggagaccctcctaatgagattctctcagaggatgattattccagtctattctcagagatttaaatgaacaagtgttatcgtttttaatggtgtctcagacatattctgttggtgcattgcttttctgtattcaactttcctatgaattgagctggaaccgaaatagagtttaaac

SEQ ID NO: 50943 - DNA, 1139 bp, Bovine  19866880884890
  misc_feature (1)..(1): n is a, c, g, or t
ntcatgtagttagagttcttatcttcatataagtctaagttattattttaaataggaggaagcttctatgaaagaaataattcaaaatgcagtattagtatttccttctggggattagaagcagaaagatgttttgttacatgctgctgctaagttgcttcagttgtgtccaactctgtgtgaccccatagacagcagcctaccaggctcccccgtccctgggattctccaggcaagagcactggagtgggctgccatttccttctccagtgcatgaaagtgaaaagtgaaagtgaagtctctcagtcgtgtccagctcttcgctaccccatggactgcagcctaccaggctcctccgtccatgggattttccaggcaaaagtactggagtgggtgccattgccttctcctttgttacatgagtttatataataatatcaagttaattatatatgatagctgctcatgaagttatttttcttcttctaagttattttttttctatttttaagtcaaaggaattgtaataacataatgttgttgatttttccctttctgtagatctaaaaaaaaaaccccaccattctatagaaatgtaaaatgtctataatcatcaactcatatgcatgtgtttcatcttcagagtctagaaataatgatggattaagacttaggctgtagtacattttgctttgaataccatgttactgccaagctcataattaaaatatgatggatgaacacataaaacactgcctttgtgtaaaatgctagtaaacatagtggttttggttcttgtaacaggtaggattcagtgcataggaataatatttgatcatgaacttggagaatttttgcaaacatacaaaattgtgcatgcatcttttgcaagttactgttttatctccaatgagtttcttcatagcacatgacaaattgcaccttttcaattttaccaagtgaaaaatctcatggcttacaacagtcaaagatttagactgcaaacttgagatccaggtactatgcttacctaacaaccattttttatttttggtgctattatggacaatggccagtaactagtctcaccactctctttgtaaactagaaaaaaaaagaagggagtatctacaggattt

SEQ ID NO: 50944 - DNA, 887 bp, Bovine  19866880923848
  misc_feature (1)..(1): n is a, c, g, or t
ncctccccttggcacatgcagggcagatttcccctagtaaaaaccctggggctaaggttacatcaagtccttggccagggaagtgggagtgggattcagctgtcacgctccctccaagcattcctaaaggcatattttccacaccaagggggattcttctggaggagcctggtgccagctgttaggataataagaatttctccaatttattatgtatgagaatcataattataaaagtcataaaaaatgttatgtgataaaaagaggaataataaagtgctatcggagtaaagggagagagggtctaattctgtctggaaagatcacagcaagcttaatgtaggacaccaacaagtgggtcttaaaagaacatgtgagaggcgaagagaaaataggagacgggaataggatgagctgggccagaaaccatggactttgagtgttcccttatagtgaattgttattttgtatgtcctggaaatgtcaggatttttgttcttttcttttagttttgggaagaaaatcatggcttataaaaataggattcattggtgaggaggtgatgaaagtcacagcttttatcagttagagagctatttatggtcatcatctaagcagtggattctaagctgaaccaaagtagtgtctttaaatctgattcagaggggcccaattccagggcatttcagatgtaggtccgtcagttcctggtaattgagtggaggatggcagataaggaagagggaggaataaccccagcagcttcgtctaagtgactcggataatattataataatgtcgttaaacatcctggagtttccagaagacactaatgattacattcatctatgtataaacaatagatttctgtctaaaacacagcagag

SEQ ID NO: 50945 - DNA, 1486 bp, Bovine  19866880948760
  misc_feature (1)..(1): n is a, c, g, or t
nggaaatatgtagctcaggcagtagaaatacattctctacagagaaccaggaataattgacacagtcctattaaaaattcccatagaacttataaattctcatcactttgactgtatactcaccaagcaaacttctgattattcattcgatttcctcggacccttgatactggggacggatgtaccctgtagtaggtagatgagaataatccagtcattaaaaaagcattttcctgattacaagtgaacaaaaagtgatctggcttataaatgatctctttcagattagcttaatgtagaatggcccacaactaagcacctcttagtaaatgaatgcagttcaattcctatgcctacagacctgcagtctctttccttttacaccacttttaacataacaagcatttgtcacaatgttccctgtgaagctcctgcaaagcaggaccagttttaataagttgattcattcattcagtccaacaaaaagttactgttgccaacctaatccctgccaggtttaggagtgcataaaaataacgtaaggtctaaggctgaccctcaacaagccctttctgctacctgttcccacaagaaggacacatagagacagtctaaaagtgcacattccctcagtcaacttctagatttaaagccctaaagtaacatagcaaaggagatcggcatacaccctccccaaatatgttactttggcataatgattattttgattgaaggcagccacaaacacaaacacgggaagagctctctacctttcctctataaggacattttaatttgaaaaggtcttccatttaacaatccccacatcaggacaaggagtacaacatacaactcatccctagaaatggtattgagatgagctggcataaacaacccttatttaccgtgagtttccaccgcccccccatacacttccttgctacctccctaaaatgcagccccctagacgcccttgtcttttgacaaagcaatactccacaatttttttgcctttgttaaagtggtacgtaagtcccaaattctaaccacccctttgaattactcatcactgagtattcctgcaaacatgaatgcatgttttatgtgtaaataagctgttcttgcctctagctaacctacctactgtcagtttaatctgcacaccttcagacactaaacttgagaggtcagaggaaaagattaacccccatcccttatactactgtgctgtactaagtcacttcaagtcaggtctgactcttcgcaacccaaaagactgcagcctgccagactgcactttgcactcagaaggtttatttcttccaacattcctcctctgtccatggaattttccaggtaaaaatactggagtggggtgctggccccttatagtaacttcatccaaatgcccaggcacagaatctgtgggaagaaggatgggtgagtagttatctttaggtgaaagggcttctatatgtgatgctct

SEQ ID NO: 50946 - DNA, 910 bp, Bovine  19866880953093
  misc_feature (1)..(1): n is a, c, g, or t
nccctgctcttattctgggggaacacttgggacttgggttcaccaaggctcacggtgcaaccatgagagaaggttatctcagatttcttcgttgcttgattttttgccaccaaaaaaaaccccacaaaaaactcatattgcttcttgtcctcagttgtaagtcaaaacttttcacaccatatgaagtattatcacgtatgtttaaatatcttgaacctcatagatgtcattttcacttgagtgcaatctcaccccagagtacaagtttgaaaagaaaggttttggatattaacaaagctagcaaatttctaggctaaagcatcaataatgctttttaatgtgcttaaaaggatgtacattctgtatttatgtatgtatgtatctgaaccacagcaggagaactaaataattcagtggaatgcatagagaaaactaatgatcccatattctaataactgttttatgaaaagcttttcatttggctctcaaaactgcctcataagtcaacacttggataatgcagtgaagttatatttaactctagaactctcctcacatgccaggtttcaaatatgtttctaagtaaatgtcctttttgggctcattatgactattcctgtcttccctcaaaacaacctcttatgtatgttcatttcccttctttccttgacttctggctgtcagatttacacctcttccaatccatgttatcttggcctggagcagcaatatcacacccaaggacagggagcccgagcttgacagatgttgccagagagtacctagcaaatgttttcttacaagatcgatccactcaagcaatggcccacaatagtatttcagagcaggtttataaggagctactggaagacttcttaataaatcactgatggaaatcctactttgctga

SEQ ID NO: 50947 - DNA, 1066 bp, Bovine  19866880960271
  misc_feature (1)..(1): n is a, c, g, or t
ncccccattaaatctaattaaccctcacaatagcttgatcttgttgttaaatattatgctttggtttttcacagagggggagatggaatacagaggaagcagccatttgcttacacactgtgtaaaagctggggcatccctcacaatcactatttttcacaatcactaaagcgtattgttccctgtcaaacctggaaagctgagaggataataacgctgatggccattacataaaaggaacgggataaaccaggttctttgttgactgcatggaattgctcttactttttagtccaaagtacatcatactgaagaaacttcactacagatagagattgtgagacactcaaagtgagtgacgtaagctaatgggtagagtgccatgttgtcaggagagaggcccagtttctgcagcttacatttcagtggctaaatgtgcaccactgagtccataacacattttcttttctttgcttttcctggagtattagagtaacaataacttgttcttacataattcatagcacataatttggttagtaagtttaaaccagttttatctgcagagaagtaatccatgaaaaacaaaaaggatctttaatactagccttgagaaaattcaacttgtatttattcaacaacatttatttatactcccaagcactaggttagaaagataaataaaacatggtttctgtctttatggggcttactgtcttgaaggatgtgtgtgtgtgagtgtgtgtgagtgtgatgtcacatatatataatgtacaatattatataatacaaataacataataaaatgtggataatgctctaagatatacgttcatagtacaacatccagaggagaataattatcaactttatttaagactagtttgggaatggacagtatggaaggggaaaaaatataaagacagaaaaggattatcagaaaactgattgccaagaaggttttcgagtaaaggctcaaaattaatagaaaaaacagagtcctgacaaagtgctttatttattgattgaaacacaggtacaaagacctggagacatttctaactta

SEQ ID NO: 50948 - DNA, 1211 bp, Bovine  19866881008099
  misc_feature (1)..(1): n is a, c, g, or t
nacttgggttttgatcatttaaaaagtatgccttagttatgtagagagtttgtcaatattgaaaaacccagtttcatattttttcaaatcaggtacattgaaaatttaaatcattttttttgtcaaggtcgtgatctgaaaatgttacataggaaatcatctatatttaaattcatatataagtgtgtgtgtatatatgaattgcatgaggtaattccatgtggctaagtattgatattatggtaccatattatgtatttccattttctccagcatcttgcaatatttttaaacaacagcttcaagctataggttaacatttcttaggtgtagggaaattttgtcaaagtgtggttgactgagtttcagagatcgacatctgtgtccttttcccacatatctggtccctgcctggagctctctcgagcagggaattggttagacaggcatacacagcacagacgtgcctgtttgtcttgcctcatcctggtagtggttattttctgaaaaacacaagggaaaaaccaccaaataaaaatatagccagcatttattagtaccgttataattgtatttatttttcttagattaatgagttcaataaaattctgagcactagccaatagctaataatcattacaacattacagctttaaaattatcctagcttatatcgcagatgttcagaaatgccttcttcagagttggaaaataaattccagaaaatgtgtgtctggttacagagaataggtttatagtaagatcagacgttttccagtttttatgtaagtttctcttgagtctcatccactacttttccatgtttttatagttttcttcctattttatcaagtttatcagagagtaaaatatgttgtatggtttccaaaatggattggtatcatgatatgtggtggtaggtgttttccaacctactctcaaagtgatggttgtcatgaaacatgacctgcctttccatctaacaaatgagcactaactggcaacccctgcctcctggcatccttgtacccattgattagtatgatctactataatcaaggtgccattaacctccaattattttcattataccttgcaagtagggcaacatattaataggcccttttatttccttccttggccaattgtgatcatttttttgtggtaatcaccacgataagcccctcacacttaacaagtaacccctttca

SEQ ID NO: 50949 - DNA, 821 bp, Bovine  19866881035353
  misc_feature (1)..(1): n is a, c, g, or t
ncgtgggatggtgatgcccttttgtgttaacactgtgaaggggatccagccctgctgaatggggtgccgctaagagatccagctcttacgctcagctggacaagcagccttcctcacaccagcatatgcctccggcggtgcagtgccaagtggtctgaccgggagaagctgcggtcacagtctgcgcacttgaatggcttcactcccgtgtgtttgcggtaatgcctcgtcagttcatccgagcgcgcgaacttccaggtgcagccttcccaggtacacttgtagggtttctctcctggaagagacaaagggacataacgccgtgctccatcatttcccctgaacaatctagccaatgtgattatctggggacacgactgttctcagtggattttccgtttggtggtcctttgtcaagaaacctagccaccattgccagcaggtcttggggcgcacagatgggggtttcgatctaatctctctttgcggtgacagtggggaggttacttaacacttgcatcttcaattatgggtaagttactttgcagtcaaactatcaggaggcataaactggtaactctggtgtataatcaccatgggtagaccagaaaggcatgtgagagagctctacctaggctgatgtggccaaaggattgaaactcacaaagaattataaagggtaatgatttgtatgctttgttgcaatactgctctcaaacgtgcatcacttagatacttaaaggctattttagggtacactgtccttttatcagccacacaaaatttcatcaaaaggtaaagcactctaccacccccagaaa

SEQ ID NO: 50950 - DNA, 1860 bp, Bovine  19866881051533
  misc_feature (1)..(1): n is a, c, g, or t
ncacaaaatatttcctcacagaaaagaaatcccacaggagttaacactttgagccatagagttttgtttcataccccttttcctttttccctttacatgttttcctctgtgggcccatgccatgcagacccctggttatcaataggctctatgtggttcacaatttagtaaataaacagctaaattttatatagtacccatgctgaaaaggactgttataacctcttatacataccaatccctttcatccccacaacaaagccataagtcatattatcatctccattttacagacaagtaaactgaggcactgagagatttattttgtatatttcacacagctggcaagcagagaatatgaactttgaactttggttatttgtagtgaaagagcctgatactgctctgccattcaagggaagtcctgataaaatatcagtatggtaaattaaacaatatagtccccagaagatgattaatgcatgtcataaaaacaggatggctgcaaatgaagagggtcaggataggaacagaacaaaggcttttctcttagtcatccttccttcagcacctatgcaccagttcctgtgtaaagaggcatgggatagggttaaacaagaacagcctgatacgtgattcataatttgttttaaaggtactaaatactgaggttaattgcttagtgtgccgtatagttgatcctgtgtgagagtttcactcaaactacccacttttgttctatttataaattcctgaaataaaggaacttcttccagtgttattaaagtggaagcctgaacaggtaagatgtgccacatctaacactaccagggctctagggaaggagggggacgactaggaaagcctctcacagaatcagattgaatcgggctcattcaggtatagaagggctccatcttataactgattttgaagggaggcattaaattaaaacaggaagccagaagtgggcctgaattatattattctcttagtagactaagaggaggctgaacctttggaaatgcctgccgggagtttttcctgggacattcattatttttcattccattctgaatctggaaagagacaggttacctgctcaggttaacgcgagatctcaaaaagtgctaaattagatgctgggaagtgttaaaccattgatcaaagagattccctgtttgttacccaaggattacctcattctcaacaccagaattgctgggtgtttcttttcgcagtatcgatcatatttttttttacttgcttgactggttaaagaacaggtttggtcttgtcactagatttcttcacggttaaaatgtgaaaattgtagaacagttgtgctttttgaatgggctcttatttagctctcattgtctttaaataaaatttattatagctatttgtgttcttttaaagctatttgattacctttttctccgactacaaattcatttgagtctagctaaaataagctccaatgtttacttatgactctcttggtcatttagttggtttttgttttttttcctttttggtcatgatttaggaattatcatactgcaagtctgattgtaaaacttctaatacattttcataattgagttggttagaaagcttaatttttatcagtatatttgaaagtcagagatatataaaaacataaatgcttcaaaattttcttttgccatgtatttatataaaagtgtctttttactattttttattatactttatgccagcaggttgaacaatatctatgctgaacactgaatttttaaagctttagtgcaacagctgaaactttctataagcgattataatgtacttatatgtacagtattaaaataattaaaa

SEQ ID NO: 50951 - DNA, 733 bp, Bovine  19866881113906
  misc_feature (1)..(1): n is a, c, g, or t
ncaggtgcaaaatgggacacattctcctcaaagtgctaagagcatttttacatacctcatttttaaaaagtttataataactccttccattcctatagcatcttttgtcagggaggttaaacttcctctaaaaatgttttactcatattttaaagttccaattcctcttgacagtgtttccatggaacagaagctttcctgcatcttagaggagagaaaaaccaaagcccaagtgggcgagcgcagaaggaaagggacaggtgtgctctgcatggcccagcgacgcctcctcccccacaaagggaagcctgcagggctggtccctgccccaggagcgggctgcaccaacaatgctcgcaagacccacaaaagctctgggttggtcaggtacagctggtgtttcaaagctgtaaattctggtttccttgtgggataagaatcttgccttcagctttacaaagaataacagcaaagacttccaatgcgatcccctggatcgcagttcttaaaatccttaggctaacaccatagtctgtcttagctccatgacatctgtctgatgtcactggaacctgcagagcttcagggtcactattttgaattattttaatttcaagtacgtgaggctaatctaagactgaaactctcacctttgaccctataatgatgaatttcaacagcttcattgttctcagcagttgactttaaaataataaattagacatttctccaa

SEQ ID NO: 50952 - DNA, 1506 bp, Bovine  19866881153088
  misc_feature (1)..(1): n is a, c, g, or t
ntgatgagtaatttaatatttagagaaggcaataaataggaaatcaatgcagcaaaacagtaattcctacttgtgtttattatatttttcttaaatgagtatactctaaagacttgttatactggaacaaaattaatttcctttcaataggaacttaagcttctccatttcattctactgtgtagttactatagatacaacttaaatttggggatctgttccctctcacttgaattcaaagtagtaaatatgagatataattaggctaacagttaatgtaaactcatttcttgttgacactgctacatttctgtaaaatctttctcattattgaagttatttgtctagggtcttaaaaaaatatgaaacagctgatgactaagacagttcttactaaagcaagaaccaaaataaacctgccttgatcacattcatgaggtcattcaattgaatgaaactgcatgaagcctggaacacaatagcccaaatctctgaatgtagcgggataatcagggtagagaatttattgtgggggtgattaaaaagttgcatcagaaacataatgatccaccctttaattactttgctttgtagtaagcttagatcaatatcaactgtttgttttattcaagctgctttattttgcctccttaaagaaagcattacgtgactatgcaagtacaagaattaagagaaacttaaacatttggcaggaatggtagaaagtgtgatgaaagtgacatacatttggtctttgcaaagaaaagcttgtgccattgcaaaaatttaacaggtcatccagagtaagagtcataatgagatcatcatccttagctcagttttcattgaagtcctgtaaaatcatgatgaacatatgaaaatggaaacacttgagatcatgtatgaattggtgtttttaattgaattttggagtgtcagttgaatgcagttatccagtagagtagcttaattagttgccacttctcatctttctctggcttctcattgtgaaattgatactagctttttaaaaacaaaggatgctccagaagcaaacctgagttctcatcccatgccaaattggaaagaacatatggatgtgaaagaaaacatcctttgagggtggcctgtgttgagggcacattgtaatctgctagggacgttgcacctggttcccaatactgatgccacagacaaataaaaccacatagttcactcgggtgtggtaccagaccaagacaaggcctcctctcaatcagattcctctgaaagggaaaattgtacacaacttgaaaggcaatccagaaacagccttgatgttcagtcactaagtcatgtccaactctttgcgaccccatggattgcagcacaccaggctcccttgtcctttactacgtcctggactttgttcaaactcatgcccattgagtcaatgatcccatcgaaacatctcaccctctggtgcccctttggcttcctgccctcaatctttcccagcatcagggg

SEQ ID NO: 50953 - DNA, 2320 bp, Bovine  19866881153277
  misc_feature (1)..(1): n is a, c, g, or t
naactgccgcgcattttctgaatctgttatcaacactggaaagaacatgcttccaactaaatctaaaggcaacctgctgttacttatttgccaacacgtatggattaaaaaaaaaaaaatgaagaccaggcaggcattctgggaactggaatcttcacatattaaaattgagacacagtatcataatttttgccctgtaagtcaagaagcagtgaaatgctctggtaattaaagtaacatagtcaatattatctataaataatgagcatgcaaagatctgcaagatgatgagtaaacattttggcagggatcaactgccacagattggaagggaaagccatgtctttatcaggcctttcttctttctctcccccatcacatcaagctcatgggaatttcccagacaaaagccttctgcttagcttgtaatgaattaaacatccatctgacttaatctttagcatttctcttgctctgcccacaggtaactaactgccaccgagcagaaagatggctggacaggagtgtagagaactgggcttatgcctgcatctgacaaggaacacatttctgtccttggatctccatctctgtgtctgaaaaagtgagaagttgaattgaacttgatgacgtttacagttcaagcggcttccctggtggctccaaggtaaagaatctgtctgccaatgcaggagatgtgggttcaatccctgggtcaagaagatcccctggagaaggaaatggcaacccactccagtattctttaatgggaaatccaatggacagaggagcctgcagggctacagtccatggggtcccaaagagtcgaacatgactgagtgccaaaaacaacaacaaaaacgacagttccttttcagccccacaactgataactactgcattcagaaatgtcctgtccccccaacaccctttgaagagctagttctatctcagctttctcaaaggtttccagtagcaaccacttgagtgccttcctctattaaggcaaaaagtttaaacaagaagcaatgttcttatttttatgaccaaaatccatattagttacactgttcagaaagattcaatgaagtcatgtctaacatttgcaactatatgcatataaacatttaagttcactgtagcacagcatatccaaccataaaacatcaaagtgtgaaaaggctcttcctgcccttccctaaattggtaacacagaactttttcacttccaaatgtgaaatgtgatccacacccagaatgtgtcataattggcatggatatgctattaaaactagagcttcttttgcagacagctacataacatctcaggcatgttggtaagaaaggaatcataattgagactggtggtgacagtatccggatcgttagagaaaattaatcctattttactaatggcaattcctattaacaatgcctgattttgccatcataatataaatagtctagagtctctactatgtgacacataactctgcacaaaacagccccacgcaaatgttttgggtacagagcataaccatgactacgccgtcatcaaacaaccatatacacccaagtctttgaaaacttttggattggggccggatggaaggaaaaatacataaagagaagaaaaaataaaaagcaaaaaatgaggattttggaatcctcccactgagactggcaagtttggagccttaaatcaacttcaatgttcatttcagagatattccccaacaagccccgccctgtcctggtccaacctacacattcacaccaaacacgtttgtacatttcagactctagaatagctctggggataaaagcgctgaaagatgacttggaaacagccactctttgtgagtttggtatcagaatacgatagtttcaagcaaaaagacctgtgaagaagaaaagtctacctatagattcaaccctctaagaagatttaccccgtttcccctcatttgccccacaaggagcaaactatttttgcccctgtcattatcatatgcaagaaaaaaatagcattgcaagaaaaaaatagcaaatgctcttagttgtcggacaaaggaaggcatgaaacaagagctgtgacacatgacacagtgaatgaaattcatatgctgaacctcaaacacttcatcaatcctcagatcaacaaatattactacagtggaatggcagagaggggagagtcattctgatgggcagagtttatgtctggtctggattgctaccgctgattatttgaatattaaatgagttgtccgatgacctcatgttttttattagggtgctaatatatctgcaagaagtt

SEQ ID NO: 50954 - DNA, 1648 bp, Bovine  19866881175609
  misc_feature (1)..(1): n is a, c, g, or t
ntgggttgcctgccctcctccggggatcttcttgacccaggggatcaaactggttttttaccactagagccacctgggaagccccaagtagagactaaaatccatataactccctgtcttttgagctcaggttggaccggagtaaagctagcaagtaattttagaggtttgattctgttcttaaaattttctgcttttccaagtgaaaaatcgtgcatgttccacagagtaccttaaatattcaggaatcctccccgagtctaacaactgtagcaagaatctgaaataataagcaccgcccttggcttctgtcacttttttttttcttgacttcatttatatctctaaatacccagcattttattaaattgaccctgttggctctgctcaaaagccacacaacgggagaccctgcagcaggttgggctcgaaactcaccacgtcagtaggcttcccagcctctcttcagaggtcagtgtgcgtggcggcaggaatgtgaaggctctcgtcctgcggcagcctggggtaggtgttcagcagatgacggcaggggactgtcaccaccacactcactgctgaacccccagagctcagatctgtgctcacacatggtagctctcaggaaatgtttgtgaaatactgaagaagtaaccagtctcacaagtaacaaatctcaaaaaaatcttgagatttttttccaaagcaactaaaccttatatttttacaacaaaatttcacatgaaatatttagaaagagcagagtggtgacttgctagtatatgcttattttctgtaaatttcaatttcttttttttttttttttagttgaagtatagttgatttacaatgttgtggtaatttctggtgtacagcaaagtgagtcagtttcatttgtatacatatatgttccttttcatattcttttccattacagtctattataggatatcgaatgtagtcccctgtgctatacagtagagccttattgttaatctgttttacagatagtagtttggatatgctaaccctaaacttctaatttatcccttcctcactttccccttgagtaaccgtgtgttctatgtctgtgagtatgtttctgtcttataaataagttcatttgtagcatattctagattccacatatgtgatatcatatgatatttgtctttgtaggacttactttgcttactatgacaatctctaggtccatccatattgctgaaaatggcagtctgcattcttttttatggctaagtgacattgcattgcatttatatactacatcttctctattcatctgtggatggacatttaggttgcttccatgtcttggccgcagtgctactatgaacattggtatgcatgtttcttttcagattagagttttttccagatgtatgcctaagaatggggttgctagatgatacagcagctttgtttttagtttcttaaaggaaatggcaacccactccagtactcttgcctggagaatctaatggatggaggagcccagtgggctgcagtccatggggtcgctaagatcagacacaactgagcgacttcacttttacttttcactttcgtgcattggagaaggaaatggcaacccactccagtcagcgttcttgactggagaatcccaggg

SEQ ID NO: 50955 - DNA, 1036 bp, Bovine  19866881341809
  misc_feature (1)..(1): n is a, c, g, or t
ntttgaaatgctttgctacatgtgctaaatgtcgttgctaactctcctgtacagtctacctcgataaccacaggtgcagaataggtggatatggagggttgactttattaggccattttatataatacaagggtcttgagcatctgtggattttggtatccatggtggtcctaaaaccagtctctctctaggatacctaggggggactgtacttcaaaaagacaagcagcatgttaaaatttcaggattttcctagtagaacagagcattttacaaagcagaggatgctgattttacttggaaaacctaaactgtcttgaagtgatccctttaaattgttgtgtggtattaatagggaactgggggtaggggtgggaagtataagcctatccagcttgagttgacgttcctgcttattagggccagtctggggctctaaaggaaagaagaaatttgtttcttctccttatcttgttaatattcaactcatagtacaaattccactcacaatctttctaagactctagtaccacagagagataaacagagtaatggagagctctgtggttaatttcctatacaaataatagcagggagtcattttcatacatgaacttacatttgtcaaggaaacaagatgtaaatgcagcagagtaaatatcagtacatgcgtgctcaacggcttcagccatgtctgactctttgtcaccctatggaatgtagcccgccaggctcctctgttcatgggattctccagatgagaatactggagtgggttgctgttccttctccaggggatcttcccgacccagggatgaaacccacgtctcctgtggattctttaccactgagccactgaggaagctgataaatatcagttacagcaagtaaatctagaagtattttcggaatgagggtccaagcccagtacagcctccctaggtctgcaatatctaccattaaagtcgagtacacagcaggagccttttcatactgttcttcaagaaaattagagataccaagggaacatttcaca

SEQ ID NO: 50956 - DNA, 1403 bp, Bovine  19866881388355
  misc_feature (1)..(1): n is a, c, g, or t
ntccttttactttgtctgggagataggcctcgggggtccatttgtgctgggaaaaaaggcatatataatgaattaaaattagtgtgcagaaagttaaccttgtcctggaccaacatcaagcatggaatgtctcttctgtgtatatcacacacatggcatcctctagaaatcccaggaattagtgaaagcaatgtatttttatggactgagcactcactgactcttttcccttgttcatttgttttataaaaccgccatcagctctcggtagtttcaggggatgattacaaaatagaacgtataaaatccacaatattaccaacttctgagtggtcagaagatgattaggtagcttgtgagttactgttctaccttctggcttcttcttgcttctgctgccagagttcttgccattttgttgcatactaacattgcctggaaggtggcgagcaggagggagaggatttgtttgcttatagctctcatcagaagcttagagaagaacaaggtttacaagagaaatatcaaggtgtaggtatttttcatatcacagtgaatccttgtctcatagttcactgttgctctaagtggagatctgagagcaggaaaataacagaactagcagcctgtcattttaactgtatttacatgtgttagccagtgcccctcatcattatcctgatctcattttccaaaacagcgtttctaggtaagattctccttcactgcatgcttgctgaggcaagaaatagcccaatgttctgacccttgttgacagggaccaccagatcctttcaaatgagaaggttaccatcaacctttaatatattaatgcatatttttcaaaactggtttcacttccacctcctctttacgaacagctttagcaaccaccaactaggaagtccatcagccctcacttcaagcaccaaagaagcacaccttctaaattgaaagcactgtgctagctacataattgcattgctaaaatgtatgatttcaatgctcagccagcttcaacaagaatcctgctcttcaaacatgcctacataagacttctaaacccactactgcttgcaagaaaaagcaaaatgaacttaaaatcatggttacaatgacatttgggtacatttacagtttcctttttttcttctttggtttttgttactgtgcatcatacatcaggtagagtcgcagggaaatgctgatttttcccattttattaacccacaaaagataatttcttacgattttacctaatactgactatatgactagaaaaactatagagagttttgatagatttctaactaaacttggttatgaaggtgctaatatctgttgaaatctaaggtggagtatacttgacatacattctgcaagtataaacatatcaaaatata

SEQ ID NO: 50957 - DNA, 1071 bp, Bovine  19866881400346
  misc_feature (1)..(1): n is a, c, g, or t
naaacagatcctttaaatgaactcgcatttgcgatatgcattctcctatgtccccaaaggctcagagcttgtgtccagcctttgggacatgaacatgaggtatcattgaccccattttgtcagtgatgaaattaagggcccaaaatagagattcagtgattcgttctctgtaaccagccactgtggaacggagcaggcactctgagatcttctcagtccaaatttagcaatggatctcctgcctgtgctgctgactcctaacgggagtcagctggaattcttatttgtggaaggagaatttcaaagcacacacaccagctctattttattttagtacaaagattccacagatcttggcatttggttttgtttgaggtatggaaaaatatttgttgaaagggaaagaagagtttccagataaatatgagaggtcattgaggttcttgaaactgcttttcaaaccattttaaagatatagattagttttccctctggaatgcttgaaatattgtaagcactctcaatgtaccctctagtcatatgatttttctcttttttctggacgccacactttctctaaaccaccatcatggtttttctcatttaacacagtgggactttaaggtgattattctgaaattgtcagtggttctgaagcagattgttaccaaaacgatttttaagatgctcttcttaaatcaacatttttctgaatatatatataaatacacataagcttgtgcatataacagtatatatatttactgtttatacatatttcttggtggtttttttagaagccacttcaaaagaagtttccatgtaactttagtggaatgagaaaacattccttttcttactcccctcttaatttataaatgcattcaacctgttaaatactcatatagtaagtcttcaggcaaagctaaatcctctggtgctttctggaacttaaagcagaggtctattttaaggaacttggcactgatcagataacagatttttaagaccgtctacataagaagagtcagtcctgaaggaaggcaggttacaactccttccgccaacatt

SEQ ID NO: 50958 - DNA, 702 bp, Bovine  19866881627522
  misc_feature (1)..(1): n is a, c, g, or t
nctccgtaattgaaagagcttggagagatagaaggactaactgattcagccggtaggttcttgatgaggaaggatccaagaacttctttgaagggtggagccaatacacaggtaaatgacttggtcttcagaaggcttagttcagcaacaggagagagtctcttctacttgacaaaagtaaaggtgtcaagaatgaatatctgcactcatccatccattcctctccaaacaaccatttatgaagcgcctgcaggtaagtgtgcagtgactccttggaaagtaaacttgaaggaattttctgttcaggatagtctagctcctcaatgaagtaatgtaaatcatctgcagagtggtggaaagttaggcagcaaggcagttagttactgtatttctaaaactcaaaagtgctttaaatactttttattgtttttctatttacttgtttaatacaatagaagtgttttcatttttagagttaaccttctgtttctaattttttctaagtccagagccaagttgttttttttaacttgagcatttaaagttggcattttgtaaactgtcaccaggacaatcatttacagaggaatccatttctgcatgtggctcatgacatcagagacagatctttgaatgatgctattcaactagacttcataattcctaatacaaggacttcacgattatttgggagaaaataaa

SEQ ID NO: 50959 - DNA, 894 bp, Bovine  19866881792462
  misc_feature (1)..(1): n is a, c, g, or t
ncagggatcttctggacccagggatcgaaccctcatcttctgtgtctcctgcattggcagacagattctttaccaatgagctacctgggaagcccaaataattggtacatttttacaaatctaatggggaatggcaataatgattaatctgtgaaggaaaacgtggaagaatttttatttgttcttagtctaactgtctgatgttaggatttggcatttccttgtgggaaaccaattacagggatgttctgccaagataaaggaaggaggaaataaggaccgcaccccagtaagactatatggctttaaaaaacatttttaaaaatagcttgtctgatgatggaatcaattgaacttaaggaatatttcctaatcctactgccatgaggtgttagtttccaaatttctgtgactattattctgaaagtggtcccatttctcgcttctgggacttcccaaatcctgtgcctggctctgtcgtcggcagggagatggttacaatgagtcccaccaggctgctttgagtcagggtcacatctggggtaaaaaataccagttcttgcctttctacacccttcccttaaaaagtctctcttatttgggactcatgatttttttcttcagtattctattagcattatgacaggagagaattttttctttttgctgaaacatcacatatttttgagataatttccctgttaaagtcacaattattagtttctaaactggcagagaaatgatatcttgactctcaactgataataacccatcctctagcatacataaatcacagatataggtcaaggaaaaaatgatgccagaactttccattactggtttcctttaatttatatatatacacatatatatcaattatataaatatatataa

SEQ ID NO: 50960 - DNA, 1155 bp, Bovine  19866880360992
  misc_feature (1)..(1): n is a, c, g, or t
nctttctgtgttagtgcctgtgtttgtgctgggtgtaagaactgaaggggctgaaacaccacccttcttagaggaaataagtagcctgccaccgtttcttatgtgcagaatgcatacgcaaggctgccagcagagagagaaaggatgtcaccactcaggctgcagcaagaggtctgaggatcacctgtgcctgggatccccctgccctccgcttccaggaggcgggggtgatgacacggaacagacccagggacgctgtgtggtctgtcgtgccctctgaagagcaccgagcttaggacactccccgtgttgtaaggggctgctgaaaaacccatccatcctttgccccgaagcgaggctgtgttcttattatgtgcactgggagacaaatttgccctccatcccagagggaaatactctattttttcaaggctatttgctctacagacattcttgtaaagataccctggaataaaatactcgtatatggtatatatggtgttgtgtgggtgatatctatgtataccatttaattctctccgtaattctgtaaagatagctcagaattcttgttttagatgtaaagaaggaatatcagctaagcatcttgcctcatgtcatagaggttgtaagggacgaacttttggatattcaatcctttgttcttctactcaacagccagtaatctctctgaccagccgatgcactaattgccgtgaaaagcagagacactcgtatatattctgtgaccgtgagttctagaaagaaatccctttgactttttatactgcttctgctagatatatctattcctattaaagaaatatctgtggtgctgttgtcttcatgattggattgctacaaagcgtatcatgtacagtaccatccaaacaagtatggaagatggtgatcgatgaagcagtaaggtttcccccttcaatcaaaccaattgctttttgtaagtattattttggaagatacagttaaaaagatgttgaattaaattgagcttctgaaaattgctcacctcatgattccttctgattacgtcttggcataattccgccaagtttcaatatgtaatttagggataatgtataatgggtattagaactattgcagcttctccacatttaaaggagaggccaattttat

SEQ ID NO: 50961 - DNA, 811 bp, Bovine  19866880722210
  misc_feature (1)..(1): n is a, c, g, or t
natgaaaaatttctaagtataagtctgcataagcatcttttgctctagatctaaagaaaagctgcagttcctacccaaagtctgctgtggtaggtgtgttgctgaggaagatgttttcaagtctttaagtgctgagatcaataaaaccgtgtgattgtctcttttttgtttagacctgggcgctcacggctcacccaaagataatgggaagctaatgctgcaaaagagagatgatcctcatcaaaggccagtcagaacccttgctagtaatagagctgctaaaatcgcctgcaacagagactaaagaaaagtacatgcaggcaagaaccagagtttctgatgcttggctgggcctctgatgggaggctggtttccacagtgcagaattgtctctctcgaggtgttgtaactctttcatgtttataacaaagataactctttctctctaaaccgaatggatgcagtcaattagaggtctgtgattacatctcaaatgagagaaatcagaccctttggttggatactaggaagaatggaaatggctgatctcatctgcctcccaaaaaagcttgaagggtaagagttacatatttaatgtgaaagttattattattatttttccttgataatctgttctgatggacagatgtcctggaaaaagatccagacagaatttcaattggagccggggagccatttaaagactgttaagttctgcccatactttaaaatatatgtgttgctagcatccaaaatcatgtctgacaaataataaatgctcagtaagccctcagatagcaaattaaattta

SEQ ID NO: 50962 - DNA, 1556 bp, Bovine  19866880917282
  misc_feature (1)..(1): n is a, c, g, or t
natttccaggtgtactgcttttataaactattccaaatcttgcttgagggtagtcagttgaagaaaaagtgagacttggaaaaaatgcaaaagcaattctagatataaatctagaattaagttcattccatttacaatgattttttttaagctcatgatgtccctaatgtcactgaggtacttttcctaaaaatataatgaaccctcccagccacagtcatagatgccaccacactgcaaccaggactgacagtggcctccagaaagaagcagagcatcatgtattttgagagcactcacccagaagcagagctacagaagaaataaatgtttatatctgagacttaacagaatgaggcactttattcaccctctatcacaaatatagactggtacttttaaggtgctaaattataaaaattagaataaagttttaaatgataaaatatgtcatgtaacccaaattaatgaacagacaagcagcaagcaacaagatatgcactgcctaaaacaggcaagctattttgttaaaaatccttgacaaatggataattaagattgaatattgactacattcatgatttacttttttatatctcctttcccactgatttgaatgaacatatattagtaactagtttcataggatatctctacaaccagaaaattatctagtgtaaaatattcttagattttcaaatgtttttatgttacagaaagtatattaaaataagcaactaaaattgtttatgatcttcctctaaagaaaatcattaagaaccacagttctgagtttccaggaaatgttttgcaagaggaaattccatacctgcaaacatcagctctgagacatcgggtttgacatggagacaggtgaaaagcggcagaggacactgcccagtattgactttttccttcaaactactcagggtagtgttcattctctgtccacagaagaaaggaaaggttttacatatataaacggttacagataagaaaaaaaaaatctacatcaaatagtgcttccaaccaagacccttaaaacttttatgataaaaattagccttattattatctagaaatctctaatcctgaaaaaaataaaagctcactggaagtaattatcttcattctaaaaaacagccataactctggggactatgttgacatttgagctggaaaatgatttggcagtgatagagcccagaaggaagtcagtcctcagattctctggcacaggctccacccgcctactttatcttctgataaaatatcaccctatgatcatgtgtcaaatgtgtttcttccatgtgattcattccttttgttctggctttctccaggcaacctccatttcttcctctgccacttaaatattacttgtcttcacctctttatctaaaaatattgctacttgggcagatgagcagttgagggttaaaatatgtagctttctaaagaaaaagaatacaaaagtatttccctatacatcaaaactgccacatggggagttccctgggaagtccaggggttaggactcctcactcaaactgctg

SEQ ID NO: 50963 - DNA, 1353 bp, Bovine  19866880942922
  misc_feature (1)..(1): n is a, c, g, or t
naaaatagataactaataaagacctactctaggagaggggattcttctcaatactctgtaatgacatacatggggaaagaatctaaaaaagaatgaatatatgtatatgtataatagattcactttgttgtacacttgaaaccagcacaatattgtaagtcaaatatactccaataaaaaattaatttaaaaagaatgcctcatttgtataaatggtgagtgaggagacaaaattaaaaataatgcaaaagacaggcacaaattataaaagcagtattttaaacatcagttttcaatacatataactttgaggcttataacatttattttagaagttagggtgcaatagcaaatatatcaataggtcaatcaatctataattaaccactgttgttcagtttgattgacttcagtgcataaaccaaaaaaggagcaaaattactgaaaaaataaaaaataatcaaaaatgatgcacatgctaagaagacttttttccctaaagactctttcttgaaattacatcttttcaaaatgagaagtagaaaaggaatgaggaaattaaaattcgacttctgaaaagtgcagcaccacttgctgaaaataattattcagtgacagaaataaatgcatctaagagcatgtgagtgtaattagtgtaccacaggtagtaaatatcatgttatgtttcaatgattttatggatatcaaactcatctgtatgctatttctaatagcaattttatgactaaaactaataaatataggaaactgttctgatttttaataatacatggtttcttatggcgatagtttatttgggctgatgtaaaatgataaatctgaaggctaaggttaaagcacttcttggaaaataagtgaaaacattaaatgcattcgctgtcctagatctttctaaagtcattattgcattttttcaaagtatacttcaggggcttcttttccacttcaaagttaaagccattaaacttactgttccatgtaataaattaataaacaagaatagattaaccaaatgatatggagaattacctcttccagttcctctcattctcctctagttcactgttgtttctctcttgggaagtgggggaaagttctatttaaatttagattgaataaagtgctcgggtaagatatttcagactcccagaagtgtggtatgtgatagaagaaatggactttttttttttttttcctggagcttttaaatattttggcctgtgagcagctctgttgagttggctgccaaaataagactggcagttcttaagctcccaccagagctcagaaagcaacccaggaaggatttccccaaataccaactgtcctctg

SEQ ID NO: 50964 - DNA, 3152 bp, Bovine  19866881099684
  misc_feature (1)..(1): n is a, c, g, or t
naaaaaaaaaagcttgatagtatttctgtcttaaatggtttgagacttgttttgtagcctaacatgtgatctatcctgaaagaaattccctgtgtacttgaaaagaatgtgtattctgctgtgttttgatgaaatattttctagatgtttggtaagtccatctcatctaacatgtcatttaagacgactgtttctttattgcttttctatctggttattcatccactgatgtaagtggaatattagtgttctctacttttattgtattattgtcaacttgctttctttgtgcctgttaacatttgctttatatattttggtgcttctatattaggtacatgtataataatgatgtaatatgtcctcttcttgcattgatgcctttatcattatagaatgcctttttaaaatctttcattatatgctttgttttaaagtgtatacttcctctgatataagtattgctacctcagtattcttatttccatgtagattaaacatctttttccatcctcactttcagtctgtgtgtgtatgttttaccctgaagtgaatattttttaaacatatagatgcatcttgtatttaatccagtcagtccccttttgtctttgaaatttagcccactgacatttaaagtgattattataggtatatatttgttgccactttgttacttgtctttttggttatttctatagttccactctgctattttcttcttttttcagtttcttaacttttgatttgataattttttttttcatagcctgcttatgttcctttctctcttgttttgtatatatgttttaagtttttgatttttgattagtgtggggtttgtatatgttgactgataactatatttacttattttaaactggtagtaatttaagtttaaacacattataaaaggtctgcgttttttattccttctctcatgttttgtttttttgatgtcctattttatatcttcatgttacctctttaactatttattgtagtaactattgattttataattgttttgcctcttaatcttctatactagcttatttaaatggtaaatttaaatatagccttcaccatatatttacctgtactagtattttcgctttcctgttgattcttacctcttattgctcccctttcttttccagtagagaagcccctttaacatttcttttagggtaggtttggtattgatgatatcttttagtttttgtttgtatgaggacaaggtagattcttatgattttctgttaatggtctgctagctgagtaagcggcagagaaggcaatggcaccccactccagtactcttgcctggaaagtcccatggatggaggagcctggtaggctgcagtccatggggtcgctaagagtcggacacaactgagcgacttcacttgcactcttcactttcatactttggagaaggaaatggcaacctattccagtgttcttgccttgagaatcccagggacaggggagcctggtgggctgctgtctatggcgtcgcacagagtcggacacgactgaagcgacttagcagcagcagcagcagctgagtaagtagaatacttttcacctgccttccataaaaaagaatgtaagagcaaataatgatgtagattcctactattatatgcttgaatgaaattttttacaagagaaaaaaatagactggcttttccattggcctaaagaatgaaacttcaaagacagtgctagatatgaataccttaagaaagagtttgccatgctttctcttaagtttatggattacctttcctttaaactatgtctagggaacaaactgaaacattttttatgttcattttctattttatagcctttaagatggaaaataagctgtctctgaagtgggccaagttgcatgcttacaggcatttcttgtaacttgtaatatcaccctgcctgaaatgatagtgatatattctttacttaactttacaaacttgcaggttttatttttcaagagtacaaaagaactgaataacacagacctgaaatggaatgctattgtcctggataatgtgaaagcaatcattttgtaatgtgtaattcatttctttcttgtttcttgtccggattgttctgaattttcactccagctggaatcatcattgttctcatgcagacagtgtggctggtcacatgtggaagaacaaaaggcaactcgattaatctagtgattattttacatccatgatttcctcattgacttttatttcctttcttatcaaaatttatttgtgttaatttgcctttgggacaataaaggttatcaaatgtcctatgaagggagcaatttgtagaataagaatgaggcacaaagctggatttgtacaaagacttgaaagaagtgaggaatttgcctgataggggtgggggttaagtttatcacaggaaaggaaatagccagtttgaaggtgggaagtgtgcccactgaggtggaggtggagtaacctggagaaaattatataaaggggaagggtattaggaggtgagctcaaagggctgtcataaggctttcacccaaagtgaaatagaggtatatgcagggctttgaacagaggagtgacgtgaatttacattttttaaatgattattcttggatattgattgagactagctctagggaggcaaggtagaaagagaaagccgactatgctagggcagggatgatggtggtgataaatgtttgcatctaggtgtattttgaaagaagagctaacaggattactgaaaatttggttggggctataatggaaatagagtcaaaggggactctgaggttgacttgaacaaacagaaggatagagtcagcattatatgacttgggattcattacgttctggatgatcctgaattacctttcagatgccacacaccaattttctgttttcaatacttgtgactttttaaattcctcattctccctgtgcctcttactgtgtaaagtactttgtttttgacctcttttattttttttaatacttaaatttacaattacttctatccttatttccttccctttcctgttgtatcaactattttaacatcagtgtgcttaactccacacccatgaccttccactcagtcatcttgaatataaaactgtataa

SEQ ID NO: 50965 - DNA, 763 bp, Bovine  19866881153352
  misc_feature (1)..(1): n is a, c, g, or t
natacaactgagcttgcaatccaacctgacatgctttatttgggaatggacatctttaatctgctcctggcatcagtgcaaggcaaactatagagagaaacaagctcccagccggcttctcagatgaacagggaaattcgatcttgacaagaaaagaaaagttggaagaataaacaggcccaacaggattcctgactgttcaggagacagcctctgtactgagcacagtggagggaattacattttttggtgaacttgcccatttttttacatcacattcctcatccacagggagtatttaaaccctgccacattaagcttttataatctgggccatttgtgacttgcagatacatagtataaattaaatccccttgtttattttcttcaataaatcacagaaaggaagcctttgtatattttccattttaaattactttatccaagtctatctgaagattttattcaattatcatttgactgaatactattctgaaatacatataactgggatgatgtctcagaaagaatgatgcaaagaaaaagtgtgggagaaatcacggaactcttctctgatgtagctttacacccagaaaggcctggagaaaacaaacacacaaaaacaaaacaccaccacaacaaaaacccaggtctgtaaaaaagttctgtgggaaagaacgttaagagaaatgtactcctcagtctctctgttcataagcaaagcggtagggctttccctgatggcacagtggtaaagaatccg

SEQ ID NO: 50966 - DNA, 1292 bp, Bovine  19866881200061
  misc_feature (1)..(1): n is a, c, g, or t
nattggaaaaggcaatggcaacccactccagtattcttgcctggagaatcccagggacaggggagcctggtgggctgccgtctatgtggttgcacagagtcggacacgactgacgcgacttagccgcagcagcattctctttatcctcaggagaaagggaaactatctcataatcttcattcttttaataagagtgccacacttttgaaacattgtaatttatagtgtctcttacacagtagcaaaaaaaaaaaaaaaaatcttactgtactcagcactggccagactcttactacttatgtattcattttttattggatttatacagttgtctttcccctgaagagctccaggttctacgagagaacttttaagcagcaaacattatttcaacataatgagcctgactctgtctcctacagaaagcagaatatcataagcttagccagaaaagaatcgctgacccgtaacaagccaagtccaatttataaaggcaaaatgcccaaagaagggcatggccggtgaaaacaagcataggactcgagcagagccagaggggaaagtgcactgaaagacagagaaagcaccagctttctgtaaaagagaagcaccagtcctccttccccaggaagctcatgtgttgccatgaacacaggaaagagtgtggatgaggtcctgtggtgggaagaaacaggaatggatgggggcgtgaagactaccaaaacagtggtgtggggagaacagccattcagtgggttgtgtgcctgcgcacgtgcacgcacgtgctcagctgctcaaagagtcctgactctccacgaccccacggactgtagcccacaaggctcctctgtccatgggatttttcaggcaagaacactggagcggacctttagtaaagacgacaaacagaagagaagcaagagtggaaggtgagtgacgccatacctttcacggggcaccagggagcaggggaccgtaagaaaccctgaccttgacattaatcctgccatcatctgtggcttaaatacagtcatcaatggccaagatgatgaactaccttcttttatttctacacaccagctttgttccagacacaggtattataaacaaattaactggatcatatagttaagactacagtctcctaaattaagaaaaattcaaaattcctacctgtggagaatttcattatttgtgttggggtgatgggtgcatggcgggggcgtctagctaggagcctggacaacccagatgcaaattctccagagtgctggagtctgtttgctgggatt

SEQ ID NO: 50967 - DNA, 1186 bp, Bovine  19866881200141
  misc_feature (1)..(1): n is a, c, g, or t
ntatgggagagggttttcatcaatctgatcatttaatctaagttctttttcttaagatgtgttttcagaaattttggttcatttcaagagacatagatctcaggggttgaattggcttcaattcctggctttgattactgtctcaattagtggtaactgcagggtatcaactttaagtaaagcaaaagaaagccagtacctgtgatttttgccccttttttcccccctgtgctcattaaatggtattgcacaagggcgggacccctaaaccacctctgctggggacagacttcagcaatagatgctcaaagagcttggggatggaggctgtgagcaggagtttaagcagcacacttctgcaaagcttccttgtgatgcatttgagaggcagtgggggtggtaaagtcccctgcagtcattaaaaggttagtcaaagttttggaaacagatggcagaactgatgctaccactatgtgggagcccatatgatgagtaatgagacaaagtcgctaacgaagatgagaaaaggaaacatggttaaatttagggttattggcgaacttggaatgaggcaggaaaaagacaggggaagacaaatgcagagatacagaggaaagacacgtgatgtacagaaagccgtgcctacatgctatcgcagctgcctcacattctctttgcaatcagatgaggtataagttaattgacaaggaaacatgagttgtataactcagcaagacacagacctggaggaatggagacaaagagtaaattttcaattgtaacgttgtttttctagtaaaagaattaaaaatgttagcattccctttaacttaaaaaaacactgttaatacatattttgcttcattactgagcctcatgacaatctcaggctgagaattaattgatccctagtgtgcagatgatatgttgatcatatatcatgattgagagaaatgatctcatctattgtagacagaaaagattgcatgtcttgtcagaggaggcaaacttttttttttttaatgctattaaaacagaaaaataaaattcctcaacttagaattctcagattattggaaaaaaatgggcttttaaggtaaatgccaaaaatgtcaaatgagatcaatgcagattttgttaagtatcactaatcatgaaatgacgcattttattatttattattatt

SEQ ID NO: 50968 - DNA, 770 bp, Bovine  19866881305479
  misc_feature (1)..(1): n is a, c, g, or t
naaaaggaaaggtgtttttctttatactcttcccctcatgcgattctaataattttatttagttatttttggctgctctgggtcttctttgctgcatgtgggctttctctagtcgtggccagtaggactaccgtctaattgcagtgcatggaattcccattgcagatggttctcttgttgtggagcacaggctctaggatcaggggcttcaataatcgtggctctcggactcattagttatgacgcctggactctagaacacaggcccaggagttgtggttcatgggcttatttgccccacggcatgtggaatcttcacagaccagtgatcaaacctgtattcgctgcattggtaggtggattttcaaccactggaccactaaggaagtcctctacttgctattctaaatatgtagttttatttgtggtttgcagccctgagcactggtgacatggcagaagcgtggttaaggaaaaggaacagtcatctcttggttgaggagtgagttgaatccccttgtagcatgtccttctcttgtttggcccattttctcttgccatccttcctgcctagtcttctgttagtcttctaatttgtctgccattgacctgtcgagagagaaaagcgtcaagttagaaattgctatatataaatgttctaaaccaatacattgtgtaccttacacaatattacatatcaatcatatctcaatatgaagaaatacataaattcaatgaaaataactagctatttccttctgtctaaaaga

SEQ ID NO: 50969 - DNA, 819 bp, Bovine  19866881470669
  misc_feature (1)..(1): n is a, c, g, or t
naaaaggaacagagcggagtataatggctttattaaaagttgtttaattttcattctggtagggaaggtctatttttggcagattcattctttgaaatagccgtcagtgtgatataaatgaacgcatatatatatatgattgtaattacatatattattttctaactttgggtttagttttccatattcaactctttgcgaccccatggacagtagcctgcaccaagctccttcgtccatgggattttctaggcaagagtactggagtgggttgccgtttccttctccatgtaaaacaatataccaccttttatttttggaatcagtattttcaaataaaatagcagctgtttaaactttaggtcattcccttggtgtggtggtttagttgataaccatcaggaaattaatgcagatttctatggcaaagaaataaattactagaagtcccaggactccattcttaagaaatcttaccccagatctccaaatctttccttacagtgtagattctttgctgtggaattataggatgaacagagctgtaagaatcctgacttacggaactttaggggataaaatcaatgaagtaatataaagtaccaacaattctatctcaaaggatacatttctttaagattattggcctctgccagaggcggtattgaagataagactttctacctattgctctcgaaatgccaactgcttttcatcaattgcttccagaatgagcattcctttcacatcagtgtgccatctgaccgaagtttaaaaggccaaggtgacaactacattgtattcctattgacaatgctc

SEQ ID NO: 50970 - DNA, 1405 bp, Bovine  19866881514776
  misc_feature (1)..(1): n is a, c, g, or t
ngactcttatgaaagctgagttaattggaaagtgcttaggacagcttctgggtcataaaaagtgtcatgttacatgtgaactatgatagaaatagtagcaatagtataattatttttaaaaacagtgccttaaaatgagaaaaccaagaataaaaacatagaaatgttttcctggttaaataaaaagctatgacaataaaacaaacaaaaattttttttaagctagagtaatgtaaaggacaactttttgaattttcttcatttagccattagttaaaatattaagcacaacttactctttttaaatggtacattggaatgacattattaacaaaggaaaaaaaaaaaaaaacattcactaaacgtgttttgcatttggaaacaaaagcaccacgtcaagaatctaaataaggaagcagtggattttggaagcaagttgactccttctatgcattacctaaagtgttgcagaatcagtacagtgataaatgctcaatcacaaggcattccatcaatgtagcatgccactaaaatgaaaagcaggcatcgctttccagataaaacacacacattctgggaaaagcaaaagcaaaaatcaaggtaatgttttagcaaaggttgaactttctgtgctcaacattcatctctgctcacaatagaaactgtcataaatgtctttagcacaatccactacctgatgtaacacctatctaatggcttaatatatactaattacagttgacagtcatttaacacactgaacagtcttgtcaacatgtttagtttgtagacaaatttgaaacagtttccttcaaaccttatgtgtatgtgtctgtgtgtgtgtgtgtgtgtgtgtacatgtgcacaagcttaagagctcatgatacttttaagttagctttgttttccatagtagagctcttactgctttggtaatgacatttacagcagacttaaaagaaatcagacataatttttgacatgcattgattttcacatttgcataattactagtagaccaaatatttgatctgtagttgaaatctaaaatggtgacattttaaatttatctccatagatagtcatttcagaactaggaaataaagggtattttctaaagagaacattgtttcataattatctagcaaaatcatataccagaagtctaacattcatttctaaaaaagggtatccctacataggtcctaggttacaggcttggatcctatgacaccagtcatataaaaatagatgtatttttctattcaatgaaactgattgcaaacaaaagttgtaaacccacatagcattattcaaaacagagtagtgcctgtcaaaggccactgtcaagtctctttcagaaacccaaagacgggaaattacgaagacaaaaagttacagaata

SEQ ID NO: 50971 - DNA, 664 bp, Bovine  19866882053192
  misc_feature (1)..(1): n is a, c, g, or t
ncttgctggagctgcagtttccaaacacgaacttgggattgattatgcaaaagttgaacagcttgcttccttttgcttaggctttaggaagctgttccatttgatttttagaggacatagtcaggaaatttaaaatgtctctggattctggattttttttctgtgaaaatgtgtggtttgtatgagaagacatgccctgtctcatcagtcagcattattttagacagagtatttgtttctccctgggagacacatataccaattatccagaggaattcaattctcttccagctgcttccaggtcttatttataggcttgattatctgacagaccattcctaaatacatagctagtagtcttgaaatgtcattctcctctctccaagacaaacaattttgataaacactgcatctaaagcttcagaagtaatacaaagcaaaataaatggccttgttttttttaaaaaaaaattatattttttggtaaaaatacttttgaaacataaacactcatataagaatagtggtaaatgaaactcatttattgccctaaaactgtacactgtgttcatctgtgaaagtgctcacatcctatagtaataacttattggcgcttggaatagatctttcatcttagattgtcaaactgcagttgtcagtctga

SEQ ID NO: 50972 - DNA, 1046 bp, Bovine  19866880516172
  misc_feature (1)..(1): n is a, c, g, or t
ngaaatctttattaaacttcccttgttatattaccacttggtttctctctcctgactgatagaagaatccttaaattagagattatttcaatcgtgtcatcaaactggagactttaatactgccacactaatgaataagtagcattcacagacatgcctaaataacaaataaatgacaccaaatataaaactacaagttaaatttaattagtaacacacagacctcaagtatgaaacctgacaggtgggaaagagaactctatttgtctgaatttgcctaatatcacttgccccgtagtttttgtttgatgccatagtatttctatgctctaaagactgtaatccacctgcacaaattcagaaaaggttctccttcaggattaggaagtagaaagaacaaagtcccggcaccatataaccactggccagtcactgaagtgatgtaacagaggcctggggtggttatcagtgagagaactagactgcagatcatttccagggtaaactgtattttaaaatgttacaattctgtggactgaaaggactgttaactgtggactcaattttgggagccactaaagtaacttgtgctcaaagttggattctaatttgggagagcaggcaagtgcacaagacctgggtggaaatagctttacgacaatctgcacgagggaaaagtcgaataaaaagagatgataccactgtcaccgtctactcagccccctgacccagaaacatctgtggagccagggtttgtatgtgaggagagcaggaaagaaggtctcaaaggtctgtgctagagtcatgagcctgcctaaacggtttctacaatgaagcctaaggcaggagataaattctgggaccaattgtatttgtgcagaaaaaacacaggtactaaaaggactgttaacatttcacattaaaaatgtgaaatgcaaaggctcatcccagaaatgattaggaagaaaacctacccgaaaaataccaattatttaaagaattaaattttctattttgttctttaaacatacactaggtccatatga

SEQ ID NO: 50973 - DNA, 869 bp, Bovine  19866880881067
  misc_feature (1)..(1): n is a, c, g, or t
ntattaaaatatagagcttaaatgagcttccagatagattgttttgcctttgggtcaatattggcacaaaatagcgtgtagacaattattttttcctagtaataaattttttcccagtaataaactttaataaagtaattgggcaaaaacttgtttctaaagtttctaatattaaagtctgcttatacactttcagtgaatgtatacattctacacagtattcctaaagagtttgatttttttttttttccaggctgctgatcaaaaaaccaaaggtgagtttactttattttggggggtatattttatgtcaatcccaaagtttatgatgatgactttttaaaaaattggtggttaaacacaaagaatctaaccctgcctttgaatctgttttttacaattcactgtgaaattcctcacttatcactggttttacatctgcatttagttagcatatgcttaatctaaaatgcctaatgttatgttgggacacgtgtctttttcagttatggcttcctaagggtatatgcccggtagtggggttggatcatgtggtaattttattcctagtttttttaaggactctcctccgtactgttctccatagtggctgtatcattttgcattcccaccaacagtgcaagaggattcccttttctccataccttctccagcttttattgtttgtagattttttgatgataaccattctgaagggtgtgaggtgatgcctcattgtagttttgatttgcatttccctaataatgagatgttgagcattgaaatatacacattaccgtaagtaaaatttggaaatttgctgtttgatacctggtggtctgtgacaacctagaggtgtggggatggag

SEQ ID NO: 50974 - DNA, 1393 bp, Bovine  19866880339923
  misc_feature (1)..(1): n is a, c, g, or t
natgtcacttccggaacagtcggccgagctaaacgttagcgattatggcaacttcccttcccaatcttttaggagaccttggtgctgacgatcaccacaggaacttagctctgttgggctcaaggggtcatctctgacataagtggaaatgggaagttatcagaatagaagccctggatcttgctatttcagcccccagaacctgccctggctgagcttggggtgtcatcagccacacttgagaccgacatagctttcccgtccctctcaaggggctcaagagctgcaggaaggacgggccggcccgacttcaatcacagttcttggtgcagagagctcagctctgctgggagccaggaggacagtggctgagctcaggccattaactctgctgggcggctctgatgctgcgcagggctaattatgaaaggtgtaaatcacggggaggaggagagcaggcacgttattcaggtttattaccaacacaatttaggaaaagataaccaggctaggcctctcttctcctttggccagccagggggagcggtgctggcaggtaggaggggagaacccactagtcctctgggtgctgtttttcttctaatttttttttttttctgagtcaaatagcacgacatcatcagatttctaagtaaaactaagaaaaatttcactcagccaagccgactgctttcctgagtttctgagcgtccatgtatcacatgcatctatgatggttacacaggtagactcaggatgtacacgggattctggggcttttcccactgaacgttattatacagcatcattcgttatgggctggagactctgatggcaggaatcatttgtttttctttttcccttaaggcattttgcaaatatgcttggaggctaagggatgctgggtacctctaataaataaagcaaaataattaatagcccaagcagcctagagaccattcctagctgctcccgaaccaggcttctgagaaccaattgttctgtttcattcccaactgacttcatcctagagacagacttcactgagaagacaatagcagagacagctttcgaaacacaaaaaggacaaaacatagacacacatcccccctagattttataggaacttcacatgggtaagaaaagacgatatttctaaaccaagtgctcttattagccacatacactcagcccattgatggttgcacttgggaagttttgtaagacccagaaaactatgagcgacataagttccggtgagacctaggccctgatcaaggcaaggcccacagcggccatccagacaacaccctgagccacagagacaggcagagaacacatgttcacaggccggggcatcctcactgtcaggctcagcccagtcctcacggcc

SEQ ID NO: 50975 - DNA, 3916 bp, Bovine  19866880391448
  misc_feature (1)..(1): n is a, c, g, or t
nctataagtctgttctctctgtcggtgtctccgctgctttcctgcaaataaattcttcggtaccatctttctagattctgtatatacaaattagtatacgatatttacttttctgtttctctcttgggtttcttaagggcacaggcttctgctgcttctgtgttcttcccacagcctcgcacctagtaggtttccataaaagacttcccacagaatgtgttgatataaatgcccttgaaacactctcccttccccctgggaagcgttgactcactggtcaccccaggtgtaatgtaggagtaatctgctccatcgtagaccctgtcaaggggatgggagcacattactcactcaacagcatttacagagtaaggcgtgttgtcactaggaagaattttcagatcacgattatccgctctgcagtgtatttggttgagaagctgcaggtttgtgtatcttaatatctgttgtgctctttgcagctaaggaaacagatgcctgcacacccgagtgctaggtaacctggacaaccaggacaaatgtcacctgtgcctgacatgaccagaggtggcctgtgaatgttttctctcgtttgtgagccagaatgtcattggattggtcactgttctagaccattctgctgctcgaaaagttaccaaggcaagagcataatgattttttagttatttagtacttcacataaccccatacattctttgcaaaaatgctttgctctcggtccccagggcatacatggagcatttcactctgaccccactttccaggagctcagatacctggcaggccactccaatgggagactacttaccgtaccggcctccagaacaaggcatgcgtgggcccaacacccacctccattggcagctgggaaggctgaggcatttttgctgaggcaggtacaagccttattttatcttctatggagaaattaatttgagtgaatttttctccttttctgagtctaaaggaaagcctggttataatttctttaacatgagaggacatcccagaggtagagcatgcacctgcatgcagtaagctgtgctctggaaaagggagattaaatggtgtgtcttggatgatagagggcacacagcatttcactggaggtatgaatttttcctctgaagactccaaaaggccaggaatattaaacctgcacccctgaaagactggatgtctgttgccacaagaggtccaaggaaacctgacatctctttgatgtcttatttgttatcttaaaaattcatgcagatcttccatctcatccacaatatgctcttgctgcttgtaacgtaacagtaccatttctccaaactactttggctgaaacgcttgtgaaacgctgtgcatacttattcagctaccccatctcatcaccgtgattccttgagtggcttaagggggtggttaggggtgggtctctggtttgagaagcttggtgaggatgtcgggggagggtttctaacatgagatgcacatgtgtactggggagggggtggattggattagatgtattttaacgctgtcatctgtgaaattggatgagactcttcatacgatgctgctgctgctgctgctaagtcgcttcagtcatgtccgactctgtgcgaccccatagacgacatttcatataggcggcctagtggcctagaaatgagctgttgagtgaagatactccacccccaccagcctgccaatttctggtaataatctccactctttcttctctgtgtgggtggggtctcagagatacgcctgttggccattggaggtggagtgatgtctcaagctggtgacatccatgtgtgtgttagttgcttagtcatgtctgactctttgtgaccccatagactgtagcccgccagactcctctgtccgtggaattctccaggcaagaaaactggagtgggttgccattcccttccccaggggatcttcctggcccaggaatcggacctgggtctcctgcattgcaggtgacatccatagttaggatgaaatccaaatgtgtacgtattcattctccaacatttttggagcacattaagggcagagaaggacctggtgctgtgggtgccaagctaagcacaggatggtacaaggagtgacaaaagagagaacctgtggtcagcaggagaacctccatacgtgtgtgaaagtctcaccctgggctcttatttaatcctcagagcactctgtgagatgtgtctttctgtgggaggagcccagctctggaagtgcactcagtaagcagaggaccctgactctgtctttccctgcttcacatcttctcctgactctggctcagcaaactgcccttcccctgacatgcacccttccttgctttacattatgtctccctgctgcagtcccaccatgatggtctgggccctggaaaggaatctgcttcctggggtcgcagatccagctctgttcagctgtgggtgtgaggggatgtccaatgtggcaggttccatgcagcccctagtgtgcttgggagagaatcagccccaaaaccctacacttgaagcagagatctcgagagtgcaagcagcagcatcagtccttccaatgaatattcaaggttgatttcctttaggatcgactggtttgatctcctggcggtccaagggattctcaagagtcttctccagcctcacaatttgagagcatcaattcttcaatgctcaaccttttttatgaatcaacacacacatgtatacgttactactggaaaaaccatagctttgactataagggtctttatcggcaaagcgatacctctgctcttcaatatgctgtctaggcttgtcataattttccttccaaggagcagtatatctagttatcaatcatgtatgtatttatccatccatccgtgtatctattgtccaactatgtgtatatccattacctattactgtccacccgtatcttcccacctacctcctctctggaaatcattgcttattattattattgcaaagtttatttttaaggtttgtcttcttttgatcttataagagtgggagtgtttccttgccctgctgcctttcatgcttaagtggggcctctatcacctctcaggcctcagccaactagggaggctgtgaggcaggaaataagcatgggcgtggggtggggggttgaggaaggtcaggcagaaggtggaagggaaatgtggaaatgtgcccgaggaccctcctggaatgatgatcaggaccgacgtgtgacacgtggcacctggctgtgccatccacggccgtcaacatccagcccctgacctgtcctgtcccatctggcccctccctccctcctcactgtcccacccacatgctgcctctttgttcttatcctccctgccctgcccatcctcacagctggtaaacgtccaagctcctcctccggggccaagggctatggttgtcatcttgaggctttctggttagagccctgggctcagcagggggccgctgtgccacgtctggagacatttttgattgtcatgacagggagatgctgccagcatcttatgggtggaggccaggaaagctccagtgcacatggcatctcccaccaacagaggatgacccaggcctggatgtcccgagttgaggttaagaaactgggccagatgagggctcctgggtctggacttagtgcccaggtttggtgcggtcatggtccttgcatccccagtgtcccccagggcacctgtccaaggggcaccctgcgtctccacagggaggggacgccgcagactgagaggtgccatgggggaagctgcaggtgctgggcagggaggcggcacaatccctggtgcttgaaaaatgaccccctccagggcccaagtccgggatcccaagaggggagacaggccagctctcaggag

SEQ ID NO: 50976 - DNA, 2071 bp, Bovine  19866880485316
  misc_feature (1)..(1): n is a, c, g, or t
ntgcccctctccatgcagtttacgctggggttgtgtccactttgtcttggcttccccagtgcccggagttgccacagagagagcctcttccctctaaggaggccatttccagtagcatgatgccacctatagaatgtacctggaattagtcccagctgtggctatgcctccagcagcctggtgctgtactggaactggagagaagataatgctccctccttgtccccgattgaggttcggactggagaggtagtcttgtcacccagcgcttcctccaggactcttcctcttgccttcttgaaccccccagctgtttagtagttctgtgcctggcatcatttgagaaactgagaccagaacctggaatggctggagcaggaattcccagctctccccaggagtccctgtgatttcccaacagtcacaagctccagggttgtgtgctggctgaggcatcagtggtcagccgtcaacggtgaacaagtattttctaaaggttttggaagcccaataaacctgatcacatgaccccaaatgtacagaaggggaaactagacaggctactctaaggctgcctgatccaaatgacccttttacaggacaaactgaagtcaagaagggaaaagaaaaatgacttatccaaggcatctcagccagtcaggggtggagcaagtacaggtctgaatccaatttttttttttaattccccatccactgctgtttggattatccaggcacgtctcggcacaagcttccatgtttgcatggcttggtggtcctggaaccctggagctggtgcatgaagtcccatgatggctgcccaactggctttacctgggccttggaactgaatgcctttggtggcagccagtagctcttcctgggtggctggggaggagggaggggggccagaggcaggaaacctctcttggaccctgacctcaggctgtttcgctgcttgtctgggcagagtctgggaagtccaagggtcagtgaccccaactgcaccccagatgactctgttacgccaaacaccatgacttggagcagcagtggggcgtgtctagcttcctgctgtgcttggttccagtaccatgacacctcctcttaggcaccgcaactcctgggtgacagacctaagtcagccctgtcctcagcttaacttggtcaccagtaagttacttagccccactgaacttgtttccccatatttaaatgtgattactgaagtctccctctaaggactgtgatgaagaatagaagagtttggaagcttctagctagagcttggcatggagcaagcagccattgctcagcagatggaagctacatctatccactcccaccactcctgcacaccctcttgtgccaggttaggcacaaggctctgctagacaaatgaccataaagcttcatgtacatttgggcccatgtagaaacatgggaaactccatgtagaaactcccaagcgctctccagcgggctcccttgggcagctaatttgtgggtgtcagctccaacttccaccctatccttggataaatttctccagtcagtactctccagttctagcctggctccatcctctgctgcaacccagaatccagcaatctagccttggctggcttccctgaacatccctaggagctctccggtgtagactgcaccaggatctttctctctggggaacagaagtgcctgaacccacagaggctggaagaagcactaccttactgtaggaaattgagtctgggacctctttactcatcttagaaaaacagcacgtgtgtgtgtgtgtgtgtgtgtgtgtgtgtgtgtgtgtggtcttgccttcctgggatccaaattactctccatgtgggtccactagaggtacctatcagagcaacaaaatgggaaagaccctgccaatttggcagttgggaatactgatttttcagagaggaggaagtctgctcatcttgtggggcaaaggctgaaggcactttcctggattcccctgagctggaaacttgggctggacagcgggtgaaagcatcagctggagggagcagcaggattagcctacagg

SEQ ID NO: 50977 - DNA, 1631 bp, Bovine  19866880544610
  misc_feature (1)..(1): n is a, c, g, or t
nactcctgggactcgggacagccacagaactggagtgtccctccaacagcccagagggactggtaactccaggctctggtgtggagggccaggaaagaactctccatctccatctgtgcagaggctaagagcttccttcccccatttcgaaacagtggatttaagcacaaagggtgcacaggatcaatgatttccatgtccccagcatcccaggcctgcttcacaacctgctcggtcctcatcccacactctgggctgcaggaagggatgaaaccaccaagcctgacctgagggctgtgttcccacccacactcaagggggcctgggggaaatcccccccaccaggcagcttcctgaagaagacaatgccccacttccctccctgcagtcggggggctcccgcctcccagcagccctctcacagcagccctgtatacatgaatgccctcttccattgcaaacacagctaattccccttcgaccgtcctgcctcccctccgtgagtcaaatgtcacttggtgtgcttcccagatggggaaattagggcaaacagggaagtgatgcaggagcttgctaacttcagagagatcagccagctctccccgggcctggaccccaaaccttcttctcccagcccgtgaccccacgttccctgcaccggactcacctgggtggtgttcccccagcccctgcagcccctctgggggatgcacacagacattgttcttggagtagatgatctccccatccaggacggaggggggcccgctgccgccgccaccacctggggtaagggtcaaggaggtccgaggctttggaggaggcccggcgaaggaggcggcccagagacattgccgaggcagtgtttccatcctccgcacacttgggcccagatggggctcttccagacctgccttgggggaaggaagagagaggacaggcatggcccaaggtcatcaacatggacggggcattcctggggcagcatcgtgtcccacaccagtaagcgtaaacggaagctatgcaaccacggaaggggtcctgctagcacaaggccatacagaggaaatgggttctcaactgtggtgtgacggacactcggggctgggccattcttagtggtggtggctgtcctgtgccttgtagggtgttttacagcatccgtggcctcgactcaccagattccactagcacccgtttccactatgacaaccaaaaatgtctccagcattgcaaatatccttcgaaggcaaaatcaccccatgaagaaccagtctagggaattccctggcagtgaagtggttagaactgggcactttcactgctgtgggcccaagttcaatctctggttgggaactaagatcccacaagcccaaagtgtccacctcctacaaaaggactggtctagaggaacctgttggagaaggcaatggcaacccactccagtactcttgcctggaaaatcccatggacggaggaggctggtgggcctgcggtccatggggtcgctgagtcggacacgactgagcaactttactttcacttttcactttcatacactggagaaggaaatggcaacccactccagtgttcttgcctggagaatcgaagggacggggggagccttggtg

SEQ ID NO: 50978 - DNA, 666 bp, Bovine  19866880549588
  misc_feature (1)..(1): n is a, c, g, or t
ncagaatgtgatggtaatggggggaggggtttggccaatccacgactccattcagctcacacgggcgatttttccctctgccttccacgtgcagacatttccacctccttcccgatcagacatctctaaggcgattagaagactccccgtcaggacaccccactggtcggtggggctgtgggggtccccaggccctccctccaagccccacggtcccagctcccgcccccagagcccatgtgtcctctgggctccagtcctgtggtacagggcagatggccctgccgcctgctgggaggcgggcttctgtccagagtgattccttcctctcctcctcccgacttcccccctctttcattctgccccactcccaccctctccctgcatttcggggtctcggggccaaggccgagtgcgtgtgcacacgtgcgtgctcgtcggcggtgaagccgtgtgcacttgtttatttatttcgagaagcagaggaagttgaggtgttgctggttcttaccatttcatcttgatttagtcatttttatatggctcgcaaggcacatgcagatttctgtttctttatttgttcattaaaacttcaataaaaatgttataaaaatgtcttattttggtagttaattgccatttccatcttaatatgcacgcagtgtc

SEQ ID NO: 50979 - DNA, 1404 bp, Bovine  19866880572241
  misc_feature (1)..(1): n is a, c, g, or t
ngctgagccaccctatgggtaggacgtccagacctaccccaggagggccggcaggcttcttgggaggctgactcccaaccctgccagagaggggagccccggccctccaggatccagccctcgctctccacagtggccctccccctacccactgcctggactggcaagcaggcaatacgctgggaagggcgaggagcccggctgctgctggcagccagccaccctccccgcccccaccccccacgctgctcatttctatgcactgtgagccccaccagatcctatgaccttggcatttgggggtcacaggagaaggacaccgtgcgtgcacagcgcctccatccaacacatcaattaacattcctcgtgcaaaagttggggctgtaattacagcaagtgattaacaggccgaggtagcctgtctccgagggagcagattaacagcagaggttgggagcgccggcgctcacctcggaatcaccggtgcgtcttaaacaggggccccagtgccctgaaagctggtgattaatggaggggatgagaatggggacgtttccctggcacccatcgccgggctttttgctcttggcggtcaccgtgctggccaggtgcagggaaagggagggcgggctggccttgaggaaaacaccagagctccaggggagggggcaggccttgttctgcctgccccaggcctccgggccctcctggctgcagcttcccactgagctagaaggccaagtccacagggtccgtgaacaccgggagactcagccccttcaccaaaccgtgtggaatctgggaccacccctcacctgctgttccccagggaacatgcagggctctgctaagaggcggaggctgccgccaggacggtggccatcccagcaaagatgcccaggccaagcataacacctgcttagctggctgagggagtgaaggagccagagtgggggtacctcctgaggatgaagagggaaagagcggggaagacaccccagcaaactaggtgtttacaggtgcatgggtgtcagcacatccaggtgaatcagcacacacgtgtgtgtgtatgtatgtgtgtgtgtgcacagcgggctgacgtttcctattcttccagggttagaccacccctgttcccatgtgtggtgctgggcacaggcatttagggactaagtcctgcccaagaggctcttggtctcgcagggaagatggtcacagaaacctgataaatacccgagggctcggagggtgaggcttgccgagagcccagggctgtcccgggtctgtctgaggggatgggggcaggaagggagaaagagagaggcaacccgagatgaactgtgaagtcagctggggatttatccatcaagtggcagatgccaggcacacatcaccacgaatgtg

SEQ ID NO: 50980 - DNA, 1086 bp, Bovine  19866880606782
  misc_feature (1)..(1): n is a, c, g, or t
nccactaccaggtgagccaggcgggcacgcctggcatacgagcagggcaggatgcccgcataaccgggcacctcctctggggtccccttgctccaccatgcttggccccccacagaccacattcagcccctcacacggcaactgccttctagtcccacgtggccagcctccgaccctcaactcgcctcccaagtaactgaaatcgatgcaaattgcccactgactgcactcattaccacgttctggggttgagcacgctcctgtcacaaccaatcagcatgaaagacattgcgggacaagcaggacgctggtgcccacatgccggacccagcgcccacccgcctgccctcctcgggatggctcagggaaagggccctgagatcctgcttccctgccagcccctctgagagcccgggcaccgcccactgtcgcctcgcagggacgtgatttccccttgccatccttcattatcagcatctcctcaacaaattcccctgagagcctctcgctggccctgtcacacggctttaacgcccaaattagcaacaagcaggccatgttaaaggataggcaagtctctctgaatccatcagccttaaaaaaaaaaaaaaatagtattgacgcatccaagaggtggccgggaccatttctgcaagagcagcctccatccttcctacggcagctggcgcagcttggattagacaaaccttgctgatagatgtgcacgcccaccagccctcagaaatgtgcatcagcgtctgccctccttactagtgttgaagaaggattatgtctgatagaagtgagtctgaagaagcctgctgctggtgccacgggctgttttgtattcatccatcctcgcccacctcctcctgctccctcccggcccaggtctgggctgcatttcctgtatggattagcctgctccgtgtgtactgcagggtggaatctaggaagcactggcaaggatggtccaaaacactggatcacatttaaaagaaaaaaaaaattgtgtccgctttgcacaaagcctcattgcatcttttctagcagcaaatttgccaccttcgagacagcacatttagg

SEQ ID NO: 50981 - DNA, 1609 bp, Bovine  19866880622200
  misc_feature (1)..(1): n is a, c, g, or t
natgtcattgagcagcagctggccaccgaccgatgcttctgcactttggaaacctggccatgcacatgaatggggagcttgttctcaggaaggtgagtgtggctcccccacatgcagccctgccctcccttacacagagccccacctctacttccagagctccacccctacaggggcccctataagctccaccccccacatttatcaattcctgcccacatgcagagccccgcccccaccctccatcctgggagctccccaccaaggtcagaatgtctggcagctgctcagggcgcccatcaggctgacaaaagaggcccctctcctcatggaaggaacagattacccattttgacagacaggtcctccactgtgaggtacctcactcatagcccagagctgggaaaactaagcaggaggcttagggaggggaggtggccaaactttcatccaaggttagtgggataaatggggcttttgccacctcccctacttcccaggcttctgctggagacaccacttcttaaagctttctggtgttttccaggggcagcgaggagggcctggggtcaggggtggagtgggcaggaagaggcttgaagaagtccttcagggcagagaggtggagccatggggccaggctgagccagggagggccagggtgggccctgttccacttttggctgccctgttcaccttgcatatgactgttgggggagccgtccttgggtcaagccggatgggagcgcagcttgtgaaactttatagcccctgccttcagctggatcaggatgtcaaaagggatgaggcaggcggagccctggccctgacctggcacaaggagcaacctcgggtgctggctattgttgctcttggatcactagctgcccactgtccctcatcaccactgtcctctctgtttgcaggcgaggagtttgctgtaccagtttcgcctcttgccacggatcccctgtagcctgcacgacttgtgcaagctgtgtgggactggcatgtgggacagcggttacatgcctgccgtggagtgcacgggccagcacccagggtcggaaagctgcccgtatgggggcaccgtggagatgccttcccccaagccccccagagaaggcaggaagggcccaaagacgccccgagaaggcttcagtttccgcagataggttgggctccctgcgctggacaaggggtgaggggacctctgccaggtcccaggcatgggggagggggtggggatgggtgtggaggggacaggatggtagaaatggaaggaaaatgcccttgagcaacatgaagggaaacttatattaaggacaaaattggagtccggaagtgccagaagtaaaacccaccagctgcccagagaaaagttggctccccaaacagcgggaccaggatgtatgaccaccctacctggagacgcaggcttgctgggttctcatgttgcccacctttgatggatctcaacacaacccaggagttcttccagtttcatcagccaccaaagggtattattgccaggcactgggaaaggcagaaacagagacagaaggagagagacagcactgggaagcccagaacaagggggtcccatcca

SEQ ID NO: 50982 - DNA, 756 bp, Bovine  19866880646519
  misc_feature (1)..(1): n is a, c, g, or t
ntgggttattttaaattttcttctttttgcataagtgtagtttctaaattttctgcagtgaatatgtattccttttataataaggacaagatcacagatcatgccaaaggctgttcagattctctgaccacaaggggcccaggttgctcctcctgtgctggacagctcccatgctcagcctggggttgcccaccacaagcttccctcccaacactcctgggactctgggctgggcaaagctgacgctggtttaccctagtgctgaagtgacttggcgacccctccctgacaggtgggtttatcaccaccctccttgatgggcctctagtcctctactgtacccacgccagccaatggttgtgctggtggcatagctggttaagtccagggtatggctggggcatggcctcaggaggatttctgaagcctgaacagtccccccagcaccttccaccgccagttctggaggcaggcttggcccccagcacccactgcagctggggaagatggacagttcagcctgtcccatccccagggtggtcctacaagaaaagcaaaggacagagcttgcatggtagagaaggccaaagcccagctaccccaccaactagctcttcatcgactctctgagcctcagcctccttaacctacaaaatgaggatgatgctgtgaaaatgagatgaaaaacgaggttcaaggaccttgggtggggcttaaacagggcgggtactagcatatatgcctcctctttctcac

SEQ ID NO: 50983 - DNA, 1624 bp, Bovine  19866880692603
  misc_feature (1)..(1): n is a, c, g, or t
ntccccagcccctaggcattgacttctcttactgcagaggagggtccatttccccacccttagatgctgagtctggccaggtgactggctttggccaatgggatggtaagcaggggtagcatctgtcaaggcttgggaaggtgcctacacacttctgattctgcacctttgccttggccgggactggcttgtgggaaggatgcaagaggcatggagcagagccacatctgacctctacatacctctacatgtgtgagcaccctgttggaacttagtagtccaacccagaccagaaccacccagccagagctgctgccccacagacttgcgggctagctaagtgcatgctatttgaggccgccatgtttgggggctatttgttatgcagcattactgtggcaatgggtaattgatacgcctgttcatggagatgtggtctctagaggagggtcaacatagtgcctggtaactcaagtcacctccataacggatcaggagccatcctctggatggaaaggcaatcctcttttcccagaagctgagcagatgagaagtctatgcagcctggaccctgctgctggactataatggttggtactccaagatctgggcactgatggggctccaggacagtctccccaaaaggctcttggaccgaggtgtcaggaacctggaagttccagtgtcagtcttctgcccactggaggacatggactcatagagaagctgagaagggaagaggctgataacttcctctttcctgttgataaacaactttttaaagtggcgccatccagcagcgtccactctaagtgagaaaagctaggggcaggaagaagccttggttgggctgtgtctctgtgatgactctagcacttcaaggattttcctccccaggatgttcaggaggattctaggaacgattccaggctccttgttcctgtcagttcaagagggcagctttccgtgtccttgtctgtcctcctctaaaccccagaaggagcaactggggaggctctgggagcaggaagagtgtgctgggaagacctggttcccacacagaaagcagggttgccctgagtgacggctattgtactgtggtcgctcccgcatctgaccaccagagacgctgacttacagaagactggcggtcacggcagaacgcagaccccgcagggaagtgggagtgtttctggcactttcagctgcctttgtcttgttggtcagttcacatgtgccccttccctcaaacattacagattcccttcagagaattttgtgtgcacacacacacatacacacctcgacccatccaaccccaagttggtcacagtatttggtgaaaatggccttcaacattgccaaatgtagacgattcttcaactaagggagaagaatccgacacttcaacagcccgtgctcaggctcacgggcagcagattccttcacataccaagatggtcgggtgttgaaacagacagtatgaaagcccccagcctcctgctcttacacctctctaccctgaaatcagtggggcctttttttttttggcagatgtcttcacatcagctttgcagctgtggctggagaagctgtggaatctgttgatttattcaaagaatga

SEQ ID NO: 50984 - DNA, 2342 bp, Bovine  19866880732651
  misc_feature (1)..(1): n is a, c, g, or t
nggcccaaggacactgaaaagtctggagggaggaggctgtcatctggacacctgccttccgttggcaccaaatatctgagtgcccaaaaagtttgctctattgcatctgtcactggcagcccaacagcctcagagaaaccccgtctggtggtaggatgggtcccagcaacccagggaatatatttaaacccttgcaagggctcgtgttttgttgggtccccatgagatctttctggatccttggagatgcctcagggaggatgtgttggatgttgccattcgacagctcacctgtgaaagtgatgacagggtgctccagagagaattgatctgggcacagaggcttgtcattgaatatgtttagtggtgaagtcgggcagggttcagttcagttcaattgctcaattatgtccaactctttgtgaccccatggactgcagcacaccaggcttccctgtctattaccaattcttagagcctactaagactcatgtccatcgagccagtgatgccatccaaccatctcatcctctgtcatccccttctcttcctgccttcaatcttttccagcatcagggtcttttccagtgagtcagttcttggcatcaggtggccaaagtattggagttcagcttcagcatcagtcctttcaatgaatattcaggactgatttcctttaggatggactggttggatctccttgcagtccaagggactctcaagagtcttttccaactccacagttcaaaagcatcaattcttcagcactcagctttatagttgggttcatctcaagtgttaattgaggtagacagaaagtgtgatgggtgcaagggtgcctggagggtgcctgggccatactggggggtcctggttccatctaaagcttgctggacaactgtgatccatcgctggggtaatgtgtctataattcccaactcaaggagttccagcctccgtcccctgggtgtcagccccgcctggtttttgcccatttctcactcagagcatcatctcgccgccccgactgcttagagcggccggccccaggaccgcaggctgcaaggcgctgaaagacttggatgtggtcccagaggctccaggcagccctggcggtgtggggggtgggcacaggcaagcagctgcgtcccaggtggggagggggcagctcggggccgtggtcagcacgtccaggtgaggggtcctcattgtgaatgcacagcttgtcagcgccatctcgggagccttggataaagtgtgcccgtgaagaagataattgaaaatcaaaaaagactttgttaatttgattaggcagagccgtcgttgaattgttcttcatcaaaagagatttaattttgacatgcaattaaattcttctgctctaagatctgccccaagtgcgggagatgggcttggcagctggtggaggggcgcgaggagaggagggtgttgctaaggattgttaggtgggggggaagtgagccggggggtggttactgatgctgaggatttgggagaaagacagaaatgatggcaatggggtcctaggaggaagggcagagctgcggcagtggagggagccgagacgcagaggggcttagactgagggtgaggggcgaatttgagaagagaagcagaacgacagagcaggggactcgggacagtggggagctttaccaagaggaggaagggggaggccacacccaagtctcaaggaaccattctgtaattctcaggagggtaggaagcctggttatgactgggagccgggaggcttcttggtggcttgaaatcaggaaatatcctggggttgaccctggatctggaagtctatcttagagggaagcaagagttccatcagggattagagggtctgagccgtgtgaccgtagcctccaaggatgcccccagggttcaatggggcattggagggtctgagtcgtgtgaccccagcccccgagggcactcccagagcagcgatggagcccatgtccagctcctgatcccccaccccagacagtgaccccctgctcgcacaccccatgtttttattcatctatctaaaagcaaggatgtgggtctcttcaattaaaatgatagtggtgtttgctttaaaaaagtcactgatatttcttgaggaaaatctggaaaactgagaaaagtataaataaagatggagcaacatgaagctcccttaagtgacttgtgaggatttaggacgataagcacaaagtccagttagagctcaggcctgtctcgacttcatctcagtcccccctgctgcccatactcccatgtttgtcccgaggccacgagaggactcggtggtcctggctgtggct

SEQ ID NO: 50985 - DNA, 1348 bp, Bovine  19866880759633
  misc_feature (1)..(1): n is a, c, g, or t
ngtaggttgaaatcaccccgggctcattggcagagcctttgagaactcacctgggtgcaggctctgagactctaatcaaagaccctgcatatcgggaagtgccccctcctgccaggaccctgccattcattctctgagagggtgagccagggacccttgcgatgatgtacagctcagcagtaggaccagctctcgagagtcctggagtcaggtcttaactgggacaagattgggctgtggctgaaaacagcagaattcagcttgttcttctgtggcttttatttatttctatttatcttaaacacacacacacacacacaaaacacagagctacaattctacctgctccagcctgggagctcacctatgaccttttcacctggaaaaagccttctgttcttgacaagccccctcatctcagtcactcatttttcccaccactcagttgaccatgcacacatggagggcaggaccctatctcgcactgggcagtcgggaaaagcattctgcaggaggttgaatgtgcactgagctggatcttttagagggcctggaaggtggtcaggtgaggaaagagggtgggagggctctgtattgtggaggcaaagtgggcagcaagtgcagcacgccctccacgtgtgtgtggagcaaagagaggacgaggtcggattggtgagcagggcaagcacccctttttaatataaaacctcataggcctgttgccctaggagatggctgttctctgcagagcatttggggcactgggctgcccccgtgcaggccaccctgtccatcacagcggatgtgatggagggcctgtctctggaccagtgtgtccaacagatggtgccatcacaaagatgttctgtggctgaaaggtggccaatgtgcctgaggacctgaattttaaactattttatttaaattcatttacttttaagtggccactgttttaactagcttggctctggaggtgaactgcccagacagcctcagggtctcacgctgcctgacctcactgaccgctggctgagagcagctgtggccgagaccctcatgttctaaaagctttgttgtgaagcctgagccatgggagggggcgtgtatcgctctccagcctgagacattttgcttcacctgtgaaaacagcatccacttgatgaatggccagtgactgcactttgtgaaattaaattcttggcttggacagagcagcatggggataaccatggctgcccccgcaacagggacaggacagcagggcactaggcagcaaagggctcagaatcctggccctggcagctgccacatgagggcaaggcaggcagatagctacatcagcaggtgt

SEQ ID NO: 50986 - DNA, 1021 bp, Bovine  19866880859261
  misc_feature (1)..(1): n is a, c, g, or t
ngagcctgcaggtggggcatctggacacagctgggaacactttcaatgtgtttttgaagacataggaaaagactctgtgagttgggagagtatccttctcgaaactccggttctggcctcttctgccaaggtcgcacctgagcacattgaggctgctgtttgagggtcctcaagctgttccggcacagacacggatcccttcacacccagtctgggacagagtcttgtcacggagacccacggttggctaatgaggtcttcaggcccttcggggagctcccccaggcgtgtgtaaacccccctgagaacaggtgatgcagagcccccacgaggcccagcagctaaccaaagctctgggcgcctgtctgattctgaaccccaagttccagtcttttcctggcagggcacctggcaagtccccaggagcccccaggccatcctggctccgattccacaaggagcactctttacatgtcggggcaggaacccgccatccgggtgggattcctccagggaagtgtgttccttcagcaatgaaatttcatcagcagcaattaattctctgtcacgagagcccatgaatttgtgccagaagggggaggaaaagcaactgaatctttgatcaaacaagtctgtgtgctgaaggctgggtgcagttaactacatctcaccagtgtatggctgccggctgggacagggggcgggggtgctctcgctccttccaggccacttgggggaggggtggccaccacatggccagagacgctagcccttccaggccaccgctgtcctggggaggacgctgaggactgggctttagagaggggaggggcgagggacagcctgcaggccctgggcggctctgggacttggtgcctctactccgttcccggcctctcccgtgtaggggcctcacgatgaatggtaacgatcagatactggggtccagggctccagtgaagactggtattgattctgtactctgagtgtgagtgtgtatgtgtgtgagagagagagaggg

SEQ ID NO: 50987 - DNA, 1733 bp, Bovine  19866880926320
  misc_feature (1)..(1): n is a, c, g, or t
ncgcctctgggcctcagttttccccactggaagaacccttaaggatcatgggaagaatggctcctttcatctcttccttttgttccgtcatagagggggcgatggcctggggggaatctggtcttcaggccgacagacggattagcctcctgcctggccaggtccctaggtagcttgtgacccctgggcagccctggcctgaggcaatggtcagggaagccagccagccagctgggccagcctgctctgggcagggctgagcaggactccagaagcccggatgctctgcagggttgggtgtccagcagcacagaggctcatagggagagcagctcagaagatgctgaggcaggccaggtgtggggcagacacacacacatggggtccctggcacccccacccgccgccagcccctgcacagcactcgacttctgacctggcagcagcaatgcctcatctcaacttggcctcaatccagggcccagagccagcagctccccctcccagacttggggctggggtctcgggggcaggtctcacctctgttgctaacatcttccatcttcccacctctgaagccaagagaaaccttttgagaaaacaaacagtggtccttttttccccactctctctgtttttctcaacctcagagaaggtctccccttccccacccagtatccgtgagatcgatcaggtggaaggttttgcctccccaccccggcaccatgggagcctcccttagaccccacgtgggagtgcgggcgtccagatggggaagctcagctctgagcacagagctgggcagcaggagtgactggactggacactgctgggcaggacccagcagatgggcaagcccagagcaggcgctgagctgaacaacctgggaaggaaacccgggagaccaggcaagggagaggacaggcagcgggagcagagagcagagcagcactgaagacagctgcgagtgcgagtgcctgctcaacccagagcccgcgtggggaccacagcccccatccccagcctgctgccctgcccgccgctgcggctgccccactggggtctcctccccgagcctgcgtggagcctcggttccaaaatgatgatgtgtttttgggtatgtaccaagcgcagactgccgagttgctttttcggctccgggcagatccagggttgaaatgagaaagcagcctgcccagcacggcccctgaaagtgccccctcgcgcctgtccccagctggcaccacagctctcccccagggcccagccagcacggcgctggggtcaggagtgtccctagacaggaagtgcagccggccggagagccagactcccctcggtggcctccatgggctaggcggaagttctgaaaggccctgcatggggtgcgctgtcctatcccttccctcttgccagtccttgcaggaacctgcttcagatcccccagtgaaaacgtcaggtggctcccaagaccacggacacacccgcccagccctgcctctcctccactcccttcctccctgccccccacctgagtcacaatatcagcaacagacactggaccctggagagactggtgggcacgctcaatgtgagctggagccgacagccccagagctctgggtccccaaaccccaaagctgggagggcccagagagaggacaagccccaacccgaagaccccttccctcctccctggctagccccgggcctctcggcaaaggaaatgacag

SEQ ID NO: 50988 - DNA, 732 bp, Bovine  19866880947263
  misc_feature (1)..(1): n is a, c, g, or t
nggaaggtttagtcctagggaaggggagagaaggaagagggaagtcccagccccccagcccaggctgtgtgtccttcacaaccccctggggtggcatgaagtgaaggcactctggcacccatgggatggcatgcaggtgtcctccacactcagtgagcagagcggggacacaggcccttgctctcagccccagagacgcagggggcagtggggaactcacccgctctcgctctccaggaacacggagctgctgctctccgcgagggcggtgctgataggtgagaggcagaagggcgaagagaaggcctctgagtccgagtcgaaggaactggccctgctcacaccctcagccgacagctccaaggaaccctcctcttcgcccacctcgggctggggctcccggccttcttccgtcccgtcttgcgaactgactgctgacaagattcctgagtcgctgtgggccggcggcaaggccgggagggggccgtctgtccccaagcccggggccagcttctccccgtcctcgggcgaagggctgacacactcggtgtctcgaatgctctgggccaccaccaggatgtcctcgtctctggggatcagggtggacctgggctccgtgggggatggctggtggggggcccctgagctctgggcacgccggccccgagggcggggtgccttgcgcacgggggaactctcgggggtgatatagcgcagcgcctcctcgtcctg

SEQ ID NO: 50989 - DNA, 704 bp, Bovine  19866880959041
  misc_feature (1)..(1): n is a, c, g, or t
ncacgacagacaggtgtagtcctcacatgacttgctccaccagctccccctccagcatggatgcccacctgcagttcccggacggcagcggcctcctacagccccagcgctgggatgagccgcagagggctggcgccctggagcagatctgtggtgtgttccgagtggatttgggccagatgcgctccctccgcctcttcttcaggtgaggccctcttggccatgtccaggaagctgcctgtgcacctgccgtgtccccggggggccatgcttgggtctaggagcctgacattcccaactgtctgcttcccaacatcactagtgccctgtaggcagtgccccacaatggctgccccgcaggagcctggtctgggtagctcccaaactgtttcctctgccttcagcgtgatagtagcagctgttgcttgcgctctggtttgggggaagatgacaaactagggctacagagagagcagtgcttgcagggagctcccggtcacccaatcagaggcccaaccactcagtgcatactcaggataggctatggctttctagagggaggcactattttcttcatgatgggggaccatccctttcagttccccacctaatggctacctcatgtctctcttcctgaaagctgcaagacagcaccagccaaagaccagtgcttcaaagaagcaattgtgcctctgggggcattc

SEQ ID NO: 50990 - DNA, 1178 bp, Bovine  19866881008359
  misc_feature (1)..(1): n is a, c, g, or t
nggtgccctgagcacatgacactacctgtccactgctccacgcggatgcagccaggcagcctgggggtgaccttcagagccgcctaccctgccccacgccacatccacagagccgggcacacaggtgcactgccaggtaacatccgggcctccacctctcagctccaggccacagtccctgccatgcccacttctcaccaggtgggtctatgcctcttccctggtgtcctatcatggaactagcacctgcctctgaccctgcctgccactcctccaggctcccaccccaaggactcacaagaaggctgtttgtggagcccgcctcccctggaatggactctgctcgtggagactggtggctggacctgggggtgggggtatttttccaacacctcctcgattgacctttaattacactgtttgcccagctccccaaaccattaacttccacctcacagcaattgcacatcaattaatggagggcctgctctgagctccagctcctcaacacaattaagcgtgacagtccacaaataagaaagaactgaagaattaattaaggtctaaacaaattaattaccagtccccaatcaattccaatgccagcacacatgctcctgggctcaccggctttcctaacatctccacatataaatagaaagtgagatttcccacatgattgctgttctagaccagggcacggcgaggccccgaaaccaccttgagggagagaattggctgcagtgagtgtccttggggcttcccacgtactcagcacacactcacgcacacacatcagtcacacacatgtgtgcacagccctagctgaaaaatgaggggagaactggtggagtgctccaggtggcagagtgctccaggtggcagagtgctcctggtggcagagtgtctggggcttggcacacccagggaagacctgaggtgactgtcacggaggcccccacggggaagggccgaagctctggcctgatgccagagaggggtgggtgcggcatgaatcaggcgtcctgtgcccagtctcgaacctctctcctgggcagcagtggggcgcctccggacttcaaggtggatcaggacagggcaaagcagtggaaagaagcagctggccccaagagcttccttgctccccagagcctgagtccccagcccacccagggaga

SEQ ID NO: 50991 - DNA, 1204 bp, Bovine  19866881030155
  misc_feature (1)..(1): n is a, c, g, or t
nttaaaaatatctgttttatctaatacaaaggctgtggccagattaggcaagtgtcaaaatgctctgtgaattctgaaatggaaagaagtgaactctgaagtagaaattaaggggctgtttgtctgtgtgtaggggttttttcttgggagctggggcccagggtggtcagttcacttcctcactacagggccctctgagggggtgggagcccactggagacgagtcaggggctgtcctgatggaggggctctgggtggggggtcagccttagaggccagtgagaagttccctgtacatctctgccttgtcgtctgggccttcaggcagcaggctggggaggaccagatagacctgggccagaggccctgtcacacaccaccacggactgtagttctctcacctgtaaagcaggaataaggttcctgtgaatcaatgtacagaaggcatccagctcaggacctgaccatactcccttcctttccctgtgcacataaatatcaaaccacacagcctaccaggaagatccagatctttgctgcaccctctgcatgattcctggtggtcagaaaatctcaagtaggtccatgcaggggctgagaaagaagagacatactggattcttctatcttctcaacaccagttgcaagaaatcaggagccaaggtgagacagggaaccctgggaaacgtgaccagaaacctgccttgccaggcaaagggtccatccaccagtggctcccaccctgacatcctgatacccttgtccccagcacctttgacagccttgttctgggaagaaagcaccccagaaatatgtaatctcacctcttgccagttcttaacctgggcttttcagcaggaggagaagatgcctgattagaatatctctgaagagggcagtgagttatagtaatggacactcttctagctgtctctcccgctcataaatctatccccctctgaaagtgcagatggtccataatcgtccatcacgcccggagttcagcaccggacagctcccgggtggggtttttcctaggaggctcctttttctgcaagctaaacggaactgcagctccgcacagcctctccccatgatggagtgcaagcggtccagccatcaggaatgatttaggggagaatgaacaataaatatccaagaggttggagctcagagcagggaggcaaagaaggcgcctctgcag

SEQ ID NO: 50992 - DNA, 1518 bp, Bovine  19866881038289
  misc_feature (1)..(1): n is a, c, g, or t
ntggtaaacatgacaacgaactctgagcatctgtctaactcttcagcgaaggctgtcacgcctgcacgcatgtatacacacactcacacttagagacatgaaccacttgggctcacaagcaccaagaaaaaacatgcaacacaggaagaaggcaaagtggctgggagtaagatgtttgcagattcaaactttgggattgaagtagctggtaaacagaaaagcacccagtcggggtttgaagacctggcggctggagctgtgtggttagtccagaacaggggtgccctgaaggcatgaaggggagagccgctgctggcctggctctgcagcctctaaggcagcacaacttgaaggttatgagctcctctgatggggaggcagcccgagagtccctttagtcacacccaggggcatccggggacaggaatgaggctggtgccaggggcccagtgtgctggcacccctttcttccagacagggcagtgcactggcatctctccatctcctgctggggtagtggagggagcattcttcccctttatggcccactttccagttttagcctggctgtctgggacccccagcccttgggtctgcccaagtgggcaccattccaattgcagatagcatggctatcacacacgagtcggaaactgcatctggacacccctcaaccaggtcttggatgtggatctgtccccaaaggcacactgttgaaattgatttggctacacaaaagccgtatcttcctatttggcgtggagggtgagggactgggggggctggagttctgggaggcctaccctcagacactagagcccactgtgtcccctgccctcagggttatgggaacaacagaagactctacacctgctggctgatgttaaccggtaattgaagcagaaataaagttccctgcattcccacttctctttttggcatcaaagaccagtgactccactcactgatgcacctctctgccccaagtcagtaacagcaattctgttgttggctggaattgccaagactgcttctggactcagccatctcgggggaggcagttggtctggcagctccagcctttctggagaccctctgccaggtggaccactcagatttgtcccacttcccaaatggtacggagaaacagctgctcagctgggaaagagaatatggaacccccagaggtgcaggggtgggggggattgtcaggggaggtaggtgggaagtgcaggaagccagccaaggggaagggaagcagactaccagcaactgcccacatggcccagtttgcggggccacgattaggactaaggcagtccttgcaccgggtggcagaaaggagggcagtggaagtatgcccttctccttctgtcccccgagcttgggaggtttgggcgaacagctctgggaccagccccctccctgcccgtgttggactctgggtcaacatgtgggggctgcagctgttaatctgaatcagggtgagacggcacccacacctacctctctagggtt

SEQ ID NO: 50993 - DNA, 821 bp, Bovine  19866881110676
  misc_feature (1)..(1): n is a, c, g, or t
nctctccctgtgcagctcacctggggtcctgtccccaccaggggctcctccgccctccatgccccccacgcccactctggcaggagcctgcacagccactccaggaatcgttcatacccttcagcggcaagcaaacaaactccccgctccatttatttcacaagtctcccgatttaattaggttttccagttttctgcctgtcctgggccagtcactccttggagcagaggagaattcatttgcacctgctgtcagaaagcggctctccccagttagaaaaataattaagccatcatcacacatcaggggtaatgaatcaccatttctcactcagttcgcaggtcgtttgtttcccctgcactggcgaaggaggtgcagactaaatttgagcagctgccaaatggatccccctccccttgcccccacccttccctctcctctctccccagagaccctgctttctccttgattggtgcccccggcccggcagcctctgaggacacagggctctcccagggcctctagcctgggcttcaggtggcaggccacgaaatcacctgcttctgctttttctcaggcacctgactcacaggtggccactacctgggtagcctgggaggtgtcacctgaatgagacctgtatgagtttcctagggctgtcttaactaatgtccccaaactgggcggcttaaaactacagaaatatatcatatcatggttctggaggccagaagtctgaaatcaggtgtcagtggggcttcagaggcaggtccttcctgccccttccggttcctggggttgcccggctgtccttggcttt

SEQ ID NO: 50994 - DNA, 975 bp, Bovine  19866881155445
  misc_feature (1)..(1): n is a, c, g, or t
nggacagttcccgtgcgctgtgcttcctacgcacgcgtgctcactcgctcagtcgtgactcttttgtgaccccacggactgtagcccaccaggctcttctgtccatagtatttcccaggcaagaatattcgagtgggttcccatttcctcctccaggggatcctcccgatccagagatcaaacccatgtctcctgcatcccctgcgttggcagatggattctttgctactgagtcacctgggagcccagccccctccacagccccaccctaactgtggctgtacagttgaggaaatgcaactacctgtcgcccaaaggtccttcagctatggaagccagcatcaccctcagcctcttccttggttcatgctttgctctgcacctgccatctgcctgctttgcattcctgatgaaccaggagttatttaaggataggacttgtgccatggtgctcccagagctgtatggttaccaagcttctgatttccctagactttgtggttgcccctggcatcctgaaaaccccccagtaggtgagggagataagaaggaagcatacaagtggcccttttggttgaaaaagtttcggccagcccccttacccctccaactgtccacctcctgcccattggccagccagctcttcgtcctggaaggcagaacatgctggggccaggtggaggggcagcaggatcctgagctgagcggatgcttatttttaggagcttgcgggcactgctgcccatgctgggcctccgcagcattctctgcagatccatcccttgtggcagtggtccagagccaccctttttccagagaacctgggctggccactggtcagagctttggcatgaagggttcttcaaccgggtgctgctttgatctagagagtattggatccccagtctccctggtgctggtctccccctgtccatccccagctcctgcctccccttgtctgggttttccagggag

SEQ ID NO: 50995 - DNA, 1344 bp, Bovine  19866881294886
  misc_feature (1)..(1): n is a, c, g, or t
ntgctgtccttctgcgtcctcggtcgcatggggcaacactgtgatcccacccaacagccactttctaaaggattgacattcaattctagggctcaattcggtgtcccgacctgattgtaagcgcccccaagggcagccgagtccggaacagtgtgcccggggcaggtctggaggcggctcttcgcctggattgtccgggccagcgactgacccagcaagtgaacagcgatgaggcccaggagtggagtttccaaccacgtggagttttcacgatgggggaagacagggaggggagcaacctggaagcccccagagtgtgaccgagtgtgtctctttgacggtagccttctgggcaaatccattcgtcgctggagcagcggaggctgcgaacgagccgggttcaccccaccctgggagcgggccgcctgccgcccggggaggcttgggaaatgggcgaagtggtcagactggtttccggagccgggctcggaatccacgcgggctggcaggcattggtgggggaggattgagccccgccagcggcgttggcaaggccaccctgggatgctttgttttccatcctggaaggagaccctgcaggatgggggtgggagggacagcagacgtccggttgggaaacccagtttcaggtatgaaccagtagtctggcagctccccacccctctggtgcccagcccccttctgcccggtcccgactttagccaagagtatttgggagactgagttcccggtccacagtgaacccgggctttgatcttggtatttgaaagaaacaaggggaggggtggggtgtgtgaagaagagtccagctcggccactaacctgaaagaccattcacaggacactcccctctcccagcctgtttcctcatccatcaccatcttatccagtcagacactcctgggggtctgcatgcaccgggagatggggactcagaacccctagggagtcgcatggaaaggaaaggagggtgcagaagccgatggccacccgctccctcccaacctaggacgtgcagtcgggaggaatcaaccagcggttggagaccttgggtgcccccacctcatgcccaggggctggggacttgggaacgagaaaatggagtcttcagggagaaaattccctacctagaacagtgtggcacttgatggagtaggctgccaggagccagattctccctcggtctcaggggtgaggaaggggtgcctcaccttcccgccgccccacacacacatcataaaccccccaggtcaggaagtcctgtgcaggggcggtgaaggaagggggtgagcagcaagctgggggtttggggcgacagcactg

SEQ ID NO: 50996 - DNA, 1557 bp, Bovine  19866881386956
  misc_feature (1)..(1): n is a, c, g, or t
ncactctgtcatttgcataataatggcttatctagaataacacagtaatcagaggcaaaattaatttgatttcttcagttagtccttaagatcctgaaaacagaggcttacggcaagaaaaactgattttgctgagtatggggttcttgaccaggaccagggagcggtgaaatttaaagtagtggaaatgtcaggttcacagctgagtttgttacttatctagttgaagtgtagctactttctggccaaacgggtgaaggactgagccaccgtgggaatcctggaaaacactctttttttggtgggaggttcagtggcccatgaaacagggacagcatgggggattgctgggggatataatcaggtcgacattgaaaatagcgctgggcagagagaagatagacgagcggctcgacaaggattaaggaggtatccgcagatcagcgctctgggcctctggcctggcccctctagggctcagttccccaccctttggacagatcaagaggaatcacttccttgctctgggacggtcgccgcgacgattggcgcagcaaaagtccttggattcaaagcaaaaaaaaaaaaaaaaaaaggtatgtgggtgggtgatgagggtattatgtggaggaaacatcttttatacattaaaacgtctttttgatcttttttaatatgaagaggagtgggagggagaaatccacaaataaatatggtaaatggatttggaccagaattgtaatcgtggggccactttcaaggttattctgggctccagaggattttttcagaaggacttgttacctccaaggtcagtcttgtcttccccagcaaaccacgcagagagagcacagtgcataagggtgggagatccacccccagcctccctgcatcgccctgtggacaggaattccctatctcttccaagaagacggaagttttacgttttttaaggaggtggcagaaaaagcccccattgcggtcacttcttttgaaataattcttatatttcttttaaaatcagagttgaagagggaaagcaggattaggaattgctgagagtgaagcgacctgcagagtgaagtggggaagcaagaggggaaatgggcggaggattagcccacagtcgagggactggctgtttccgcggaaaggaaggagggcgccaacagacctcccggcacgggggagagggtgtcgctgagagtcgcgactactgggttgggacagtaaaccagccgtccctccatccttctctttcctctgcttttattatgactgccttttggacgcagtctccatccagacttttttacacctccctgggtggcacagctcaccctggaggtattatctttttttttttttcctggcggtgggtgtgatagcacagcttcttccctaggaggatgggtaccctgaggaaagggcacccctggaatacgggagcaaagttctagcctccctcaagtcttttcctagctgggaaacaaacgcggggagaattggggctcctagtctcccaatcccagatccaggtttcagcctcaatttctc

SEQ ID NO: 50997 - DNA, 1665 bp, Bovine  19866881425868
  misc_feature (1)..(1): n is a, c, g, or t
ntctgtttattacatttcacaccatagagctgaggtatgatgtcacaacgcttgattggaagtgctttctctgccgctcttcaacctcttgacgcacggtggagggctcccacactgtggcagtcatccggggacccagctgcttcccacttccagagggagatattgtgcatgccaggggagagtcaagagcctggcacgatgtgatggcaagagcacaagattcagaataaggaaggccctgaagttccaggccacagttagtctatacagtgacaggcttcggctgaagtgaatgctttggcagcccccagatggaacagggatcgtccaggcaccttctgttattcctcctagtagccatacagggtagggctattattatccgcatttcttcaattaggaaactgaggcacaaagaggttcatcgacctgcctgaggtcacacagctgctagtgaccagcgctggatcactgcaattcctcgtgccctcaccttctgccctcaaggttgctaatgccaatgggaggatgacaactcaaggacaggtgtcccagggaaagactggccaaaatcagctcccagaatgggggaggggtggctctcaccaggaagtaatgagcaggaaggcagcatggcccccctctaacctggcctgaaccccacggatacccttagacaaagtcccgagggagagactgcacgaattggatatgacctaggacacttgaggaggagttggtcctccccacaatctgaaggaacaggcttttgggataaacgagaggcagtggagtggggttcagatcccaatctgtgtgcctcggctgcctgcccatccaagtaggagagagctgccaccttccacacaacatgggtgtgagggatgagatgtgccaagtcctgtccgactctgtgtgaccccatggactgtggcctgccaggctcctctgtccttgggattcttcagtcaagaatactggaatgggttgccatttcctcctccaggagatcttcccgacccagggatcgaacccgtaattcttaggtttcctgcattggcaggtgggttcttcacaaccagtgccacctgagaagccctgagaaatgagataattgaggtaaatacaacaggtgcctggcaccaggcaggccctcaatggtccaaagctgctttagagaatttcgacaaaacccaagctttctgatgtcctggtccctcaggggacgggggtggggcggggtgcgggagacagaaggaggtgattgaactaggccccccttcctgttgtcaaggggctggtcagcctgaggcctgtctgaggcctgggggcttcctggaggggctactccctgttcccagctatctctcagccttgaactttctattctgttttgcaacccactcagaaagcggcatttctaaactcccttcttatcaccgggaaacttctgacacaacaatagctgattgtactgctctcctgggtgcggctaaattcctggaccccaccatcctcaccgcgcccccaaccccctacaacacgcacaccttttttttttggtagctttggaactctaatgatgccattgtgattggtgtgttcaggtgacagtgtgacccttgagtttagaggcatgaaaaagtggtgggggctgggaag

SEQ ID NO: 50998 - DNA, 1106 bp, Bovine  19866881529801
  misc_feature (1)..(1): n is a, c, g, or t
nactgtgggctacacaccccaacatgcaatttcctcatttaacctttgaaataatgacttgaggttggtgttactgcccccaaattacagataaggaaaatgagtctcaataacccagactcagaaaactggccttggtctcagaagctggcttctcccagagcgtctgatctaaggagccagagagaaaaagccccaaggtgggggccacggtctttttataacctcacaaccagtaagggcttttggtacccaaacttcacttggaccccttcttagagaatggacggcctgcagaggacaatgcttgtgtctccacccagccacagggatgtggcagctgatgaactaggatgcccgcctctgaggggggctgtcgggggagactgtccagccgtgcgcactgccagaatctgagcccccatactcgtgactgcaacatctctgaaaccaggagacaactctattgggagaacaagcactaattaaatttactgggatcattgaagaggaaattatttaatattctgaacagatttaatatttgaaagcatggatggccttgattcgtcgtggacgggttctttgccatggggcttacatttgatgggatccacacaagctaggaggaggggatggaggtggctggaggctatgttgtccctggaagccagaggagagggagagaagctgggcatggtcggagggtgaggtccttgtaacaaccctccacagggaccctgggcactgctatagcaagctggaagtcttgctatattcacagtttctgtggccccatatctgtgggtccctaacatctgcctgcatttgccccacctttctgtaacccagagcccttgttggccaaggtacccacctgagtgagagggttcagagtcttgtaccccttggaacacatgatctaaacacccttatgtctcttggtggaagtgagaagagatacaaacacttctgctatgtcctcaagacacatgtctggacatttcaggagccactcagccttgtcaccacagtgccacccaggaccacccacaggttcctctgagagctgctcctggaggagccgcaccccacgccctcatcta

SEQ ID NO: 50999 - DNA, 2136 bp, Bovine  19866881766391
  misc_feature (1)..(1): n is a, c, g, or t
nacgtgtcagggctgcctgtccccagccccaggcacctgccctcgtgcagcgtcacacagaggtgcacgcccagctcccgggcagacggcccaccgctcctctggggaaggcctgcaggggagggggcattgaatcagtccatttgcttcaagctccccagaagcaagaacattgccccttttctggacttgacatccacatgtcattttccctggatttcgcaagaggacactgtttccacaacacctgaccttcggatccactctggccagtggcagtataggggctgggaaaacaggaggggccccagatgctgacccaaggggaagatccaccacgtgggggtgaaggacacaaaggtgaagaggagggctgagctccaggctggtgttcttctctgagtaacagcagaatggggccccagggagcagactgcctcggctacagagggcaggcccttgaagctgaatggccattgggaaacatggtggaacttggttgctccaagtacacaagctgtggcatgggggtctgcagtcctccagaacgcattgcactgggtggccattcgctgccactgctcatcctaaaagggggacggggatcacaggactgtgggtctcaagggcagcctctggatcttagctctcagaacatgccaacactgtgccctcttctcctgagatcctccaggcctgcatatccagtcctctctccacatctttgcttattcgtcctggaatttgccaggtgctccctctacagctcattcccagccccagccccaccctctcctcctcttcctctaccttctcctccattccttgatgacccaaactctatccatcagccaagggctccctctgtccaccctgaaccacatcctgtttcatagatgtaaaagctcattccccaaccagtcaactcctatagaccaaagaccaaacctaacaccattctaatagcccaccccctctgggcacagataacgatggctcagtaggtgcccattgaattcaactgcaaggctgaggtgctagcacccccactggactgggagatttggggaggggcctcgtgtcagcccagggagggggaggttctcctgacataacaaaggccacagggtcaccatcacttttaacagcaaagaccattcttgatcatttctatcaccagtccagatatttgtgaacaaaaacgagtctgtctcaacagcactgacccaaggccagtgtaaactgttagtgcagtaggacatcttagatgctgctgggcttccagagtcaaggaggaagacttacacccaaccttggatttatctgaccattcttcccgtggtcaccctgtccctgcttcatccacagttttgctgaccccagtaaaggggagggaaggccagctgctaatgagacacactaatgagtctcaggacaaagaaaataagtggaattaagcaggagagactactagagagtcactaaggggcttacctgttcgatttctgtatgtgcaccaaggtaagaaaatgcctcctttacaggacacggatcttagagatgctctctggcctgccctagccccaggtcacagaagctttccccaccgcatgagctataggataggatttccatctggtttcccaacagggaggggagaagggctgttcctgtgcccacacagcctgggggagcaggtgccacctgctccggacctggcaagggagactgcttgctgttccaaggagctgggaagctggacccagaagggacttggcttggtttccacggatgctgccttggaactcgggccactttggagaaccttttaatgtattatgctaaccctgaggcaaggtaacctctctgctagtgccctgcacacacacatgtgcatgtgtgagtgcacgtgcatgcacgggtatgtgtgcgtgcactgtgtgtgcacacattgggattgtgtgtgcacacatgtgtgcgtgcattgtgagagtgtatgcacaggtgtgtgtgtgcgtatctggccttggaaaagtgggcattccccccacttccccatgggtgcttccctcccacctccccatgcctccctttgtccttcactaatgacttgggaataccaaacaagatcttttt

SEQ ID NO: 51000 - DNA, 800 bp, Bovine  19866882077355
  misc_feature (1)..(1): n is a, c, g, or t
nataagcttccaaaaattgcagtctatttgttgccaagtttaggacgattatttccttcccaacccccttggatattttttaatgccctgaaacacaaactgtcttccttggtggccctttggggctagaaacgtggtctaaagaagtccatctcaactggaccatgggaaaagagatggctcccccgccccggaaagaaagttgaaggtcagggatactaataaaggtcatcttggccatgtctccctgtcagtgaagcaggtaaagagatctgtcctcttgagattctgcctcaattcctgggagcagccctgggagaagctttctcaccgtcacccacgtcaagaaagaagactagagtggaccccgcccaaacctcagagaaatcttcaatgaaactcttatgcagagagaggctcgagactgaggctgacttgccagagatcccagcggtcccacttcccaaagcacagaacaagcctgtaatgacttctgagggcaaggctgggccctgaaaggagggagctgtcccctgtcctcaaacttctggtgtgtttttcagcacagacctggctgtacccccttccgcatcttgctgtcctgggacacggatcccggactgaggagtccctccaggagaggtgcatcaagagagacccctgagcacctgcccccgggatcccaggggctggcatccattgcaatgtgtccatcccgggccaggtagcctctggctaatgtttcatgagtcaaggctggactgagctcacctttcccaggggctgccttttatttgtaa

SEQ ID NO: 51001 - DNA, 1922 bp, Bovine  19866880366421
  misc_feature (1)..(1): n is a, c, g, or t
nattaggatggagtcaatcatctcaaactcatcatttccatattggatttagctcctgtgatatctactcagggaaatcgcccatcataaactagttcttaagtgaaagttatggattattctagattttttcaatagttatttctacttccaatctttagccatgtattttaaatctatttcctgtgtgtttttaaagaaatctacttttattcactccattgccaataatttaatacagaataccataatcacttggctagattactgacacagtcttccaattattattcatcctttgtactgtactgttctccttatgcactaatatattatctcattttataatatgggagtgattggatttgcaaacatccatatttgattatgttattctcacatataaaactcttaaaacctccttgctttcaggataagctttcctcagcatgaattatgaaagtctatatgacttaactccactttcttctcaagcctcatctcacacaagtcctgatcttctactccaatctccagtggtactaaacatcttgtagtttgtaaataatatgccaagctggcattttctttctctggaaatttttaatttttcacttaaccaagctatctaactcgtgaaagtgaagtcgctcattcctgtccgactctttgcgaccccgtggactgtagcttacaaggctcctccatccatgggattctccaggcaagaatactggagtgggttgccatttccttctccaggggatcttccagacccagggatcgaatccaggtctccccaattgcaggcagatgctttaacctctgagccaccaaatttactatatttaaatctaactcctagacaccacctaaaaggagaagagaacatagctagggagaacatctgggaagttatgaaagtaatctgggcacatgtgaagaatttgtgatctagaatgttagctacagaaatggagatataaagatgaatcctagtaacagctcaatggattctattgaaaaataatgaatagactaacttccaaggaaacatcaaggctgtttgagagaatattggtgatattcaaagaaaaaataaaactgagataagaatcctcacatgtatctcttcatctataaaatgaatataatattgtttgctttaaccatatcctatagataacattattgtgaaaataatataataactgtgaaagtgctttgaaataacatgtatttctaaacaatttgagaagactttatttcgtgaattggccagaccatgtggtacctagcacttaggcatatttttccatatcccatgacaatctatacccagtaagggacaccacagtacattcctgtagaagcagaagaatgctgctgccagaaaatttacacacaggtcccaaaatattccaacagacacttttgtcagaaatgatggtattcaggtggattcattgacaaagtttttttgggcaaacagttttcctcctaggcaactgattagtattcggtgctaaggtacagttctgcatggaaccttaaagctggagttgaggagagagttaagtgagcagttcaactgctaatgccaggcttcagagaagggaccaaaaaactggcaccagattattcatctggctacttttcagccagttgggacaatacaaaagaaaacaaatattatgtcataactgggctctatgttaaaattcacacacacacacacacacacacccacacccacacccacccacccacccaactatgtggtaaaagaggatgagaagtctgtttttttctgaggtaaagatttttagattgcaaaatgtgcgatttagctttctgcatctgggacttcatccttaggccctaaaatatgcagtaaactcttcaaaacaaatcttgagatt

SEQ ID NO: 51002 - DNA, 1906 bp, Bovine  19866881124549
  misc_feature (1)..(1): n is a, c, g, or t
ntagtacatcaaaactaatccataatctccaatcattttaaaattaatttttgttggagtatagctgctttacagtgttgtgctactttctactgaacagcaaattgaatcagccacatatatacacatatcccctctcttttgagcttccagctcattcaagttaccacgtgcattaagtagtctcctgtgctatacagtgggttctcgttagtcgtgtattttatatgtagtatcaataatgtatatgtgccaatctcccagttgctcccatccccctttcccccgtggtatccatatatttgttctctacatctgtatctttatttctgctttgcaaataagatcatctataccatttttatagattcaacatatatatgttaacatatgatatctattttgaatttagctggtgtctaaggcagtagggaagctctgtggttaggtttagaggccctgctgacctgcattcataggtgtctaatactggactagtaggatttggccttctttccattatgagtggtcttccagctcttctctacttagagatgcctgcaaagtcattataaggcagctttagcaccacaggccttaagaatatagcattattattagccaagtgcatagaattccagatattaataaatcaatcctcagggccaatctatagaacaatctgggaagtacaaaattttccattgagaagtttggtatacttcagtaaataaagtttccctgccaacagtttttctctctctccttttcagtgaggcctgaaatgaaacatctacacgttcttctggcaatttgtttccaccctatcccatgcccactggctccaaacacacatacacacacaaacacacatatacatacatgcacacacacacatatacacacacagttggaatttccaatagtaacgaagatgaattggccaaaatgacattgtttatgagtaaaccagatgtaaattgctccattagaaataaaagaattacaatccttgctccttgccaaaggtgtcataaccctgtataccatcttgatctctaagtcatgtccaggcacacacattgtttcccagatgcagatataacagtctattgcacagaagagagtggggtggagtttcaccacatcaagcaaattagtttgtgacatgaagaacatagtgtgggctgaaatgtcaaagatgcagggtcaacattcaccagcccagaccacaaaccagaggtgaacagagatgctcccagctgcccctggctcagtgttgccctggaagaaaggaatccactggatcctgacaaaggctgaagtcaggtggctgagtttgcattctctggctcagcagctggcttcctttgagaagacttgcatccctcccaaacaggtgaggcataaatttaatccttcattaaataaaggcaaaatctcaactttacctagttataatttccaaattatgtataaaattgtagatattcgtatttgtagttctatagcttgccaacacataggcatatctttctgtgcattctagaagcattgcctgggctacatctccattttactgataagagaaaccaagcacagagaagtagtataagtgccatacttgaacctcaagatctggctcagtcactcactaactgtgtgatactgaccagtcacttaaacattgtcactctaaaacaaaatactgcccccgcgtttgtaaggattctatggtaaaggttctgtagagactttaatgcaaacacaaatgtggtctatatgattactaaccatagttcaaaaaaattaagtagaggagtcaagaatggtctctgaactccttgctactctaagtgtggtctatggagcagcagtagcaacaacccccaggaagcttgttaaa

SEQ ID NO: 51003 - DNA, 1308 bp, Bovine  19866881155647
  misc_feature (1)..(1): n is a, c, g, or t
ntgccaggcacatgatgggtgttgtaaatgaatgctgaatgcatgagttaatgtaaaggggagtctgtttcaaactgttttaaagttttcaggtaatcttggaaaagtatcaagatgagagtgggcataatttgaatgtcagtattctatttaatttgtacaagagaaatgaaatattgcagtcaaatgtctagtggctttatattcccaattcaacagtcatgaagagggaacacagaaaatgaactttttttttttcaaacttatcttggaaattagcccaagagccaaatgttttattttaatggtatgtttcttctctcagaccacaactagtaaacatttcagatcacacatacacacaatgtttgtttgtatttactgtaattccctatgcaactccagatgcttggaccatttaagcatctaatacatgtttgatgaattaaagaataaatgaagggacccttgaataaaatgagcttcgattctgacatccattagcaagctgttaccagttttcatctgtctagtttaaatgtaggccatccatttggagagagggaatggaaaaacatggtacaaaggcctgatctgttcaatgcttttgaatcaataattaaattgtaatcacttataaaacatttgcacaacatgatggagaatactggattctgactttggctttgtccccatattgttatgtgagattaacttttttacctaacaagattgagcttggtttcacctacattaatatattcaaactttatgggacaaagatcatattttctttaaatctgatacagtctagtatgattctgatatgattatatatgtgattgggccatgacaatatgtgtacatcccagggagccttttaatttggtatctttggtagacagtttaaagaaataaaatattgtctctttgattaatttctagggaaagttgttggaaaaaattcaccctctgtgcctcaggcaacatacctctggctccatatttctattgcactctatattcaaaaggtctgtcattaagtgtagaccttcttagaggaaagttttattgaatatgatttgaaagtagaatatagctcttggaatgggaatggtaaaagatcttacctcctatctcatcaaatttctcttccaattatgtatcatactgccctgagaattctggcaaattaagcattctttacctccttacacttcccactcactttttaaattatttccctgattgatgtcagggtgacatgccatggtctgatcatgtatttataaacaagcttaaagctca

SEQ ID NO: 51004 - DNA, 1300 bp, Bovine  19866881183947
  misc_feature (1)..(1): n is a, c, g, or t
ntccctcagccactacagagaatatctgctattaatatcattgccccttggaggatctctactcaaatttcaatagccttgctttgtcatgtttttccctaaacataatcacacttaccaagaaaagcctttcagttttctctcactttttcaaacagtacttaaaactttgcctatttctggaacatatctattttgcttatataaatccatgtataaatatatatttgtattttactttctctattaatttcatcatatatatttcactctcctttataaccgcttatgaattcatattcccacaaccacttttacagctctatagtactatcacatgtcttcttcattctatcattatttcttcaccaatgattatgtcctatttatgtttatcccgctccctgtcctctagcatatttaatccagccctcttactacttgtgagtgctcagggtctcatcccagtctgtgttatatgttttagtttatgaagttacaaattaaaagatggaaactattcatgaatatatattcatagatctatagatgtagatatactggctattgattcctaggtggtaaagaatctgcctgccaattcaggagatgcaagagatccaggttcaacccctgggttgggaagataacaattcatacactatttttatgtgaacaagttttaatccttgccaggtagtgtagtggtaaagaatctgcctgctgatgcaagagacgtgggtttgatccctgggtgggcaagagctcctggaaaagaaaatgccaacctacttgcccggaaaattccaaggacagagaagcttggtggactaattgtgattgctcagtctcatcccagtctgtgttatatgttttactttatgtcagttacaaattaaaagaagggaactattcatgaatatgtattcatacatgtacagatgtagatatactgggtatagaattgtgctgggtatagaattccaggttgatagtatttttcttaacactttgaatgtcccatttgattttttcctttttttttttcccctggataattattttctcttgttttttcaaaattattcaactaaatttagctctagtaacttgaaaatgatgtgaaaaatgatacatatgtgtgtgtattctattttcacaaggtgaattatgaacaaaattctttaatattaaatattttctttgtttcactatgaagtttcatttcacaggctagagatttctttctttattaaaagtcatgattttttttttcctttatagatctatgaatatatat

SEQ ID NO: 51005 - DNA, 1704 bp, Bovine  19866881215044
  misc_feature (1)..(1): n is a, c, g, or t
ntatgtaactttcttttattctttcatgtgttttgagtttaataacatatgctgtttatatttggtttctatagagagttcctttttgtcttgtaaacagttgcaaagttttacctagagctgagtgggttttctctttctttctttatcctcccacctcccggcccttggaaagtctgaatagttctaaggattagcagcagcttaacttcagtcatgatttgtaatagataatgcagttattgttccatttcggctctttgggatagtctgaaattaaccagttgtcttatccttttcttcacagtctacatcttaatagtcactcctattcgagtttcattgacttgtcagaaagtactcgtaagtgaatcttcaatatgaaatgaggcccaaagttcatgttattcttccaaatgagttagatgcttctggtaagggtaatcaactcctttctcttaagagcttaatatgtgacagatactgaacttgtccaacaatacatggtattttttgtgtgtatttattaatatccccatttttcaagttatggcactgacactcaaagagattgtaagatttatcaaaaatctatagatgttcaggatcagtataaaggttaatccaaggtggctgtatactactgtcatttgataaaggctagtcctcataagatactacaggcctgtatacttgctgtcttctaggtaatattctgtccttgactctgacacttagaagtctattgtgagacaacatgatagctcccttgaactcaacatggagtgaaagtgaaagtgttagtctgtcagtggcatccgactctttgcgaccccatgggctgtagcctgccaggctcttctgtccatggaattctccaggcaagaatactggaatgggttgccattcccttctccaggggatcttcctgacccaaggattgaaccagatctcctgcatttcgggcagattctttaccatctgagccgccagggaagccttgttagcaataataccatatagtcatctgaatgcatttacattttcaccttagatttctcttagaaataatatactttattatcccttcatgctataggtctgtgctgtttagatttttgttaaaatttctgaaaattaaattaaaatgtagctgttcagttatattagccactttttgaggattcaatagccacatgtggccagcaaataccatcctggataatgcagatttataggacatttccatcctggcaacaacttctgggcaacactcttctagagccacagtgacactagttaaattctgggtgaattgctgggtatgctctggaaatttactcatttatttgtttacatatttatcttttcctggagtataactgctttataatattgcatacaataaagcgaatcggttatatgggtgattccatctctcttgtcctccctcccaccccaccccattccacccttctaggtcatcacagagcaccgagccctctgggctatatagcaacttctcactagttatctattttacacatgctagtcatcccagggacagaggagcctggtgggctgccgtctatggggtcgcagagagtctgacacgactgaagcgacttagcagcagcagcagcagtctgtatatgtcaatactattctcccagttcagcccacgcacccttccccggctacgtc

SEQ ID NO: 51006 - DNA, 1534 bp, Bovine  19866881263096
  misc_feature (1)..(1): n is a, c, g, or t
nctggacagaattaagtttgttttcttcccagcagtaaatgaggtcagggtctggagtaagatactatgcctggttatatttagtcaacctggtgaaatgcctccaaccgtatccccaaataccaggagtttgaagggctttaacagctcctcctccactaataaaactgcttgcctaataagaaggacatatactgactgaccatttgaaaatgtgggggtcttccagaaacagagttaaaacaataaatacatattgaaacaataacaacaaaagactttaaaaatgttggttcagtactttcatttgatagaggaggagtctgaggcacagagagtgattctaacatgagaactaagggtaggagacagttgaccttcagtatccgtggctctcatgtccagatttaaccactccacgtagttatcagttttcatataagaaacttgaacatctgtgaattttgatatccagaggagccctggaactaatcctccatggatactgaaggtcaactgactatatcttctaaattgcaacccaaagttttctccagaatattgctccttcacttcattacaaggaaaaactatggcgaagattatctgtatcttttattaggattgcagacatttctgttcatctactgtttggtggaaaattttgtggttgggagcaagcctggactgagagccatattacgtggcttaacagaaacctgaaaatatctttaattgtaccatttttaaggtaaacaattcattcaagtgtgattaaaaatcagagcaaatgattgcatcttgatgtacatctggctacaaaaggaaatgtttctctatatgggattagaaagaaaaccttctttcactcttttttttaaaataataaaatatttctctgcagaccagatgaagaaatgcacagagcctgtgattgctatgatttcagaataaaggagaaccctgacctttcagggagtagaccggatgtgagggaaactttgtggaaagaagctgatatttaaacccatatgaagtaattcttaattcagcctctaggggtattagaaataattttcaattagttatggtaatatctcacagagaaggttcagacaagaaagtgggaaagagaaggtcagaaaaagttttgagaaggattaaactcaaaggaaaatttgaagactgagtttaagtaggcttcagtgattataaatattacctacacaacagaggaacatagttttacaaaccagacacaaccttccgaaagggctatttagagaaattataatggacataaaaatataaaacataaggggaaaacttgataaatttaaccacattaaaattaaaagtgcaaactcttaatcatcaaaagataccacaaagagagtgataaagccacatccagttgacaaaaagctcctgttcagaatacacaaagaattcctatttgtgagaaagaaaggaatgaaaataaaatgagaaaagacacaaatggacagtcctttagaagtagaaacacaaatga

SEQ ID NO: 51007 - DNA, 1101 bp, Bovine  19866881298330
  misc_feature (1)..(1): n is a, c, g, or t
natgtgaagagtcgactcattggaaaagactctgatgctgggaggggttgggagcaggaggagaaggggacaacagaggatgagatggctggatggcatcactgactcaatggacatgagtctcaatgaactccgggagttggtgatggacagggaagcctggtgtgctgcgattcatgggtttgcaaagagtcagacacaactgagcaaccgaagtgaactgaactgatgactatgtaacaagccaccaaagaactcaatgtatttaaggaacaatgactatctttcctggttctaaaggttaggaggctcagctgcacatttctcatttggtatttttcatgcagttccaaggaagttgcaagtggagttgtggtcatgcagaaacttctttcacacacatctgctgcctgagcagggatgctaccacagctcgggcatgcaacatctctctatacttatggattctccacatttctagcatggtggtctcagggctccaagaaagaatgttgcaaggcaatggaagttgccaacttttaaggagttggcctagaaactggccttatgccatgtttacagtattctattggtcataacagtcacagaccttccccagattcaaaatgcgaagactgtcattacagttggattcccattggttcccagggcaatctgcaaatgaatggttactcattgtgtggagcacacattcagggaagggcaaaagctgacaattagcacctgatgaggttaagtatttggtaataccacctaagaaatcaatgaaatcttggtagataaattcccagaacttggaggaattatatttgaaactgaattgcaaaaacaaaagcatgtaaaacagaaatctatctgttgaaccttaatctaaaacctgacatctagagtctattagcttttaataagtttaattttcagaaatctaatcttggctgatatatggtggaagaaataaaatatagtgcttgatttgaagaggtcacttatcaaatactccccaggaaaaaaaccagcattcctgagttatattcatccagcactcttttctcttctcaaggtaattgaaaagatttgcaa

SEQ ID NO: 51008 - DNA, 1118 bp, Bovine  19866880587701
  misc_feature (1)..(1): n is a, c, g, or t
ntatggaaaacccaaattaactgtttagcctgcgcaatatccttgtatgaaatgcgaaagtagtgttgttggtggtttgctattagaaatttggcccttaagggttcccatagtaacttgttgctagcttttggggtggtgttagctgacggtgtttcttcctgtaataaaagattattgttgaggaatttcttattgctttagcatctaattctacccaacactctgtgttctctgtagcctttcctgataatcctacctttgaatctttttatggttgctacttctttcttttaaaagggttatttttttttttttttttaattgagaggtcagaattgtaccagttcatttaaggaatatgtagccctgtgcacagtctttacagagtaaccaccccttaaaaacatacttgtccttctttgaattcctgcagatagattatgtttgcatatttacgttttactccgtggcttcctctggaaaagaaatatggtcatgccactgcacagcttgcaaattcagcgttggatttctctgtggaatcctgcagatgcagagaaattaaatacggtagaattatataggcaatgaatgatctgtaaattcatttgaaatgctcataggcacccctttccaaactggggtactttgtgcgatatgctgcattgattttcttgtatgtcacatcacattgggtttgtatgtctcattatgcaatgttagcactttatggtgctttgcttttgtggtaacactgtgaacataatgtaatgtgatgtgccatggctgtgaaatgccattaaagtatgacactctggagactccgtgaatcatgcccatttcacttctgcagtgtcaggaagcagagagaactgcaggaggtctttgccttgcagggattatctgaatttatctatctcacttgagtcgtgggaagttaatgtattggtagatggctaatactgctaatactatgaccatttgaaacaccctctgtaataggaaactcacttatccctaaaatttgttgttgttacactttttcatttttagaattatggggcaataataaaagaaagtctctgtgtcatctgaccctctgctttcctcaagtt

SEQ ID NO: 51009 - DNA, 1665 bp, Bovine  19866880589410
  misc_feature (1)..(1): n is a, c, g, or t
ntctcactggttgcgtatctcaaaaatttgacttctcttttcgtggtctaatgttcttagacttgcctggtagctcaaatgattaagaatccacctgcaatgcaggagacccgagttccgtccctgggtcaggaagatcccctagagaagggaatggtaatgcagtccagtattcttgccttgagaatcctaaggacagaggagcctgatgggctgcagtctgtagggtcacagagggtcggacatgactgaagcaactcagtatgcagtgttcttgtagtacagaagttatgagaccaattatccacttctctctccatggagggattaattctctccacttttgcttaaaaatacatgtatacctgtggcggattcatttcgatatttggcaaaactaatacaattttgtaaagtttaaaaataaaattaaaattaaaaaaaataaagaagtgaaaaaaaaatacacacagatatcagcaagtaaacaagaggttaaagttagaaagacaaagaatatgtgtataaatctggggtaaaattctttacattttttcactaacagtcaactatgcataatggattagactatctatgccatggtcctaattggctgttaaaatggcttagaccattgatttcagtttgtgctaagtttgattttttttttttttttttggacttcttgaaattgcccaaggtgaaaagggctcaggtatacataatttatgaattgattatcatattatccagataaacggatctggcctccaggctatttgggtgttaccatatcaagtacacctcatttaaattcatcaactttctctctctaggtgcatggtttgccatgctgcatgaaacactttaaagtaaataaaaatcatgaaataaaggaagtaaagtgaaaaaatcagaatatgctaaatttcatgttgaaataattttgcttcactttttgtattataaaaacaaacatttttgataagtgattaaaatatattgatgccctctctaaaataaaagtaattataagagtaatgattattttaatctgatcggtgttttcctatgtaaaaataagaaataacacaaaagagacaatgtatttatagtgagaaatagacataaaattaacctaaaattttttgctttggggaagattcagtatgaaatgaaatctaatcccaactgggggagagagaagaatcactttttattctcttcccaactttttcctgagacagtgcttatgcaaatattttgttggactctcctgaatgtcaaaagaaaactcttggaaataggaagtagttatattgttacatgcttctgtaggctgacatcagcaagtgctttttaaagtacagaaaagcagcattaatagtccaactcattcacatgttggtctctagaatgtctgttgggagagtctaagatcatctgaaaaatctgtaaagaagggaaaataaacaaacagacaaaaaacaaaacaaaaccaaaaaaagcaaggctctgtaaaaaaaaaacaaaacaggattttgtaatggcacatgaattcatcattgctacaatgaatgactgatgaaagaattttgatttacctaaagatttcacgttcccctcatttttaatcatttttttggttgatctcatcattctatt

SEQ ID NO: 51010 - DNA, 1713 bp, Bovine  19866880668683
  misc_feature (1)..(1): n is a, c, g, or t
nattacatctccagttagagaaagtaatattttcaggaaaggcaaataaattcgagttatgtcttggagaaaggatggatttatggcatatttaagcagacaagagtgattatacaccccatggagcagctgtacttccaatgggcaagttctacgcagagatgcgagttagccagtattattataaatattttaaaggcgagggatttgagaaagagagaagctaggtaacctaagcacatgcctcagaagtttttcaaagctgagatttgaaaatgggcatccttgctctgaaattcattttctgaccattacatttttaacttaaccttgtggcagcatctcaataactgcttttaactcttcaggttggcaatgaaaaactcattggtgcagaggaaataatgccctaaagcctctgaaatttggaattttccttttgcttttccctccttatatatctgtcttgtccctaaataacagtaattctctgcagctggtcatgaaatttcaagcctagactttaaaatgcatatttgattccgacacacaggttttgcagccaaattttgtaaggagtcgttggaattcagattataaactgctgtttgtcacgtttaattattattttggttgtttccagactgtgtgggtgttgagggtgaagctgtggttttcttgggtgttctgagcatttcctaaaactatagaaagatgtggcaagcaagagctattttgggaggtgctgaagtgatttcgatgggaaggtgtcccaggcctcatatattaaagaaatgcctgaaatttcattcaatcacttgactgccattcctcacagttagtgtgcactgaagtggaaagccacatagcacacgtattttttggtttgtaagtgaacactcaaatgctcgaagttgataggtgggaatgcagatgtagacttttgctcattttagctctcctgatttctcaatgagaacaaagattgacttggcagaaagagcagggagtcacagtcttgcattttacttgtccacacacgttcctgtggtgagtggacccatgcataatggcctgagatccattctcttttctgatgattcctaatggtttatctccattcttcatttattcactgagttcacatatccagtgcctggtctgtgtctccacatggaagccttgtaaacatctctgactttgcttctgcaaagcagagcaattgatttatccccacactcccaaagacatctccttccccagtctctgcattcagcaaatgatgtcaccatcaaatgagtcctttaggccagaaacacaggacatatccttcatgtgtgcctttcttaaaggaacatctctccctttttaacaagtttctattttatattggagtacagtttattagcagtgttgtgtacgattcaggtgtacagcaaatacacgcatctattcttttcccaattcttttcccatttaggtatagtgagtagagtttcctgtgctctaagttaggtctttgttggtttgctgtttttctttagtcgctaagttgtgtctgactcttttgcaacgcagttgactgtagcccaccaggttcctctgtccttgggattctccaggcaagaatactggagtgggttgccatttcctttctttctccaggggatcttctagactcaggaactgatcccacacctcctgcattggtag

SEQ ID NO: 51011 - DNA, 1951 bp, Bovine  19866880825373
  misc_feature (1)..(1): n is a, c, g, or t
nttgcaggcagattcttaactgtctgagccgccagggaagccccattggatctgataatttcaccaaataccaggaaaactcaaatgacatattgtgagagtcaaacaattttttttctttgtttcttttttttttttttttttgcttttcaactctatttttaaaaatatgcagtatttgatatttaggttaatattttcccaagaaatgtaatgaaactattattttcatttgcataaagtatctagaatcccatatgaaaacattgtggtttccttttttacaatctaatatttcaaatgcattacaatttagctgtagatattaaataacatgaaaatctgcatagtaacatcaaaattctgtctgcattttcatttcacattcatgtgataccatgaaagacttttgtcaagagtgaggttgaaactgtttaaatatttcctgtttgggaaagagagctcttgaaattagacaatagtctatgcttactgacatcgatcaattagctgcagctgtaaggaaaagacagggtgtggatcatgagcaaggctaaacgtgtcactttccaaatttaaaatgatacaaaaccaggaggaataagcaatataacagttgatgacaagattgagattcaggttgtctcaaaagactggaatgctggatgaacaccaagaatatgaaatctgatcagatgaatctcaagccatgccttgggtttaaaataagagaaaaataaatgcaaagtagtggagagtgcagacagtagttcatggttatcagatctgacttggccatgactcaataatcaccagcagagccaagaggccagtgaaaacaaaagcatatgctgcgttagaagaagctgagcatacagaactgtgggtagcattgacttcactggaatgctacgtatacatatctgaaatactaggcttcatatgtgaaaaggaaattgatgagcaaaaatagaatttttatggtaaaacaactaaaagcattagattgttaacttggaaaaaaagactaattttgaagacaaaaagcacgatgactaatttcaagtggttaatggcttctctgcagaagcataaagagctacctttgttccaatacttcatagaacgggactaaaaattaattacaaagctagagaatacatttcagtactttgttgtcactgctgtttagtcctgagtcatgtcggactcttttgcaacccaatggactgacagtagcccaccaggctcctctgtccttgggatttcccaagcaagaatactggaatgggtttccatttccttctccaggggttcttcctgacccagggatcaaattcctgtctcttgcattgcaggcggattctttaccattgagccaccagagaagttcctggtgtgtggatcacaacaaactatgccaaattcttaaagagatggaaataccagaccaccttacctgcctcctgagaaacctgtatgtaggtcaagaagcaacagttagaactgaacatggaacaactgtctggtttaaaattgacaaaggagtatgacaaggctgtatgttgtcacctgcttatttaaactctatgcagagtacatcaggcaaaatgccaggctggatgaattacaagctggaataaagattgctaggagaaatattaacaacatctcagattttcagatgataccaccctaatagcagacagcgaagaggaactaaagagcctcttgatgaaggtcaaagaggagaatgaaaaaaactggcctaaagctcaacattcaaaaaactaagatcatagcatccattcccatcacttcttggcaaacagaaggggaaaagtggaagcagtgatggattttattttcttgggctcctaaatcattacggatggtgactgcaatcatgaaattaaaagatgcttgctccttggaagaaaagttatgacag

SEQ ID NO: 51012 - DNA, 1948 bp, Bovine  19866881060052
  misc_feature (1)..(1): n is a, c, g, or t
naagtgatgctttcaaattgtggtgttggagaagactcttgagagccccttgggctgcaaggaggtcaaaccagtcaatcctaaaggaaatcaagcctgaatattgtttggaagaactgatgctgaagctgaagctccaataccttggccacctgatgcgaagagtggatttattggaaaagaccctgatgctgggaaagactgaggtcagaaggagaagggggcaacagaggatgaggtggtcagatggcatcaccgattcaatggacgtgaatttgagaaaactccaagaaataccaaaagacaagggatcctggggtgctacagtccaagaggtcacagagttgcccacaactcagcggttgaacaacaacagaacagaagtagtctctgctggcaaatgtcaggaggggggtaatgactagaacaaaaggaacatgagcgcactggctgtatgcttgttcttggtgtactgggcatggctacacaggagaggcccctttgtgagcactcaagctaacatgtacttttttctgtatgtaattcaggaaaaaataagtacaagaatggagtgtggtaggaagaaatattactctggataatgtgcaaaacaataattacagccccatcatatttaatttttcaaaataattcttaaagctgtattttcctaccccctttcttagaaaattctatgaccaatatcaatatacttcccagagggaatctggcttgtggttgccctctctgacttgcagttttgtgctttgaaaaccttgttttcaaattgtcactaagttgagtgtgtttcaaggcatgcatttgaatgagaaagaggattcttatgtgaagtaacacttgtgttctcagaattcaccaagagctcttttgggaggcgagaagggaacattttgactttctttatctagggcacaggttgcatccatcactctcttcttaaactcacatttctgttctctatttttaaaagaaaaataaaagatttttaacagtagacaatgtgataaacaaattaacataggtaaatggataaaaaagaaacttctgcaagtgtgcatagagatggcttatctgatctataactcagagacgtctgttaatgtctgcatggaatatgatgtctttgactaggattaggatagaggcaaagactaaaacaaaatgagtgatgagaattctcaaagactgtggttccaaatcccatggaatctcagtgactctagcctatctcagaagctggatctttgtggtcaaacttatggatggatcagctgtgcatgctgcaactcagaacaacacacacactctctcaaggatacatttaatcaacctgtgatcagagctttctggataagcctaaccaggccaacttttccatttgattttggaaaacagccttcttaatttaaaggcatgctggcatttggaggttcacattcatttatgtattcgtgataaatgatttatttatccaaaacccattctggaaactaacatgtgctcaaattacaacttttgtattcttggcaaggcattaggttcatttgctttaacaaagaattacgatttagtgtttagaagtaaatgaatacctttttgacttactgtgtctgatgaaagattaggaaagaagaaaccaaataaaattaacatatatataaaaacaaatcaaactatatatatatatatatatatatatgcatatacaaacaagaacaaattaaattgctcataatgtccattatttatcactttccaaataagcctcatttgggaaagataagaaaagtaataagaactatttgtggaccatatggaactgcataatttatcgggaatgttgctagattcaaggaaagtgactacatttcacaagctggagagtccctttcacaagtaagattacagaatgaatatactcctcttc

SEQ ID NO: 51013 - DNA, 1402 bp, Bovine  19866881621477
  misc_feature (1)..(1): n is a, c, g, or t
natatattgagacttttaataaaatggcatgagcatacttgagaattccaaaagtctgagatgatggtagactgtttcccccagcaaaggaaaacacacaggcagacattttctgtaacccgcccactgagctggcagtgcccaagatgcccaataacctctgtttgacttgtcacttgcaagacaaatttgctcatatatcaaagcagtgagaatcccttttcagcaactgtatctgtaattggctatgccttgttagtgctcaaggtatgtgtatctgtcacatagataacaaaaagttcttttttttttttaatttcaaataacatgttggcctcctagcattataatgccaactaagagccacaatattgatcaaaccctcattgatgacctttaaaaatgcttacattattcaagaaaataagaaccagtgtgctctgccaccctgaagactatcaaaatctcagaagaaagtaaactctgtagttaatatttcaaatcactggagagcattttcttgaattctttggctaacttttctaatagaatcagccatgtgaattattttctgtacaattttctttgaaattttagctgattaagagtatccatatcttctttatcattgaaaattaagaggttattacaagagtttcagttctactctgggaggggagggggatcatttcagatgtttgtatgtagatcaaataaaaagcaggcatagatttacataaattagagattttcaattttagatcaccaacaaaaaatgcagtttttttcaatgaaaattcttgggcccaaacttactaaaacaaaatgtcttaagagaaaatataccataaaattctgaaaggcaagatatagtcttgagtaaacaattggaaaaaatatgtaaagtgatatttgatattattaacagttcagcagtgtttaagtaaaacagaaaagatgctgcaaattagtaagagactaatattaaaaatcaacatgttatatgaataagaaatgaacaataactacaaatggccaataaatatacaaaacaacactgaacatcatttatgatcaagataaatgaaaataaaataaaaatctcatttctccattgcccatcagatttgtaaaattaattaaaatttttacaattttacagatctccagtaactctgcccatggtgcaagtaaatagcagaagacgtgtctattgctacttgccacaatattgtaaagtaattatcctccaattaaaataaataaataaattaaaaaagaagtgtctaaaagaaagaataatctagacagattattttaagaaagagaccataaatttaaacctgtagcacatccaatttttctattcttttcagtttaaaagtatgtacaatttgtgttt

SEQ ID NO: 51014 - DNA, 1105 bp, Bovine  19866881892260
  misc_feature (1)..(1): n is a, c, g, or t
ntctattggatgaatgagtctatgtgaatatcattttaatatcttcatatgtttattccatatgttatcacaaagtaacaggatgatatgaatgttgctgcaaacttcgaagggtgacatttttgtagtgctgtatagtaataggccaggtgttttgatacagtcaataaaatactcagacatgaaacctactcaagatattcttcaacatataataagccagaaacaatatcgcaagttttaaaatgagccactgtgagaatcagtgtctctatctttaatcatgaagtggttagcctgaagccattcttagttttttcctttgtttctctctttcgctcaaacaatccccttgttgcccacccctgagtgccctctctgcccaaacctaggctggcttccctcttgtgaggatgggtgagcgcgaacggcctcctctcatcctgtgcttggactcattgctcccagagggcccacactgaaggtcctgtacccacccccgaggaccagtcagctgccccgtgtcttttgaagtgggtagcagattttattgctttaattaaactcgttgtacggtttgtttttctactccactgacgccatggcctctggccttgacgcgtcttccattcatagtacggctcctagcatcacttttgctgccccccggaccaccgacactggaaggagaactccaatcgcgcaggtctaactgttggacattaatgctgcagcctcctgaaaatcgactgtttccaaaggatgtaaaacgaattctccattggtttgtcccagaggctcctgaggcttttcttaattaagcctaaatggtttccagaaagtggctgtgtcttagaccagttcttttcttatattgattttctgacttcctgggtgaccctccctgtctttaatacaggccaaaccttcttcctggatggccagcagaaactcagcccttgttatacagcacagtcagctactccaccctgtccatgcagaagcagtttaacagctctcgttgatattcctgtctgagtggtggaaagatagtaactggaatcttgagctcttgagttgttttccacatgttcaaactgctaca

SEQ ID NO: 51015 - DNA, 1738 bp, Bovine  19866880362576
  misc_feature (1)..(1): n is a, c, g, or t
nctgctactgctgctgctaagtcgcttcagtcgtgtccgactctctacaatcccatagacggcagcccaccaggctcccccgtccctgggattctccaggcaagaacactggagtgggttgccatttccttctccaatgcgtgaaagtgaagtcactcagtcgtgtccgactcttagcgaccccatggactgcagcctaccaggctcttccatccatgggattttccaggtgagagtactggagtggggtgccattgccttctccatgagccaccagggaagctgttaaatgagttaatgttgcataaatgatcaggcaccatggttaccacatggtaggggttggggggagtacctgggtccgttgcctgtcttccttctttattcattttctctcctctctctcccacagaaaaaagtgagaggtgttagaagttactataaccacttctgaaaaaaacttttgtatttggagcataattgattaacaacgttgttagcttcagatatatagcagagtgattcaataatacacatacatatatctattcttttaaaattcttttcccatttaggaatgtaaccacttatggtttagttgaggactggcttgcagtggaacaactcttcctaaaatgcacagggaagcatggaagatatctaattttttttacacactaggctttgcacatcacaaaaacagttttaagaattagccaaattattatacacaaaccctaatatactgtacaagaaaaaagcactttggagtcagagacatctgaattcatacattgctagagtcatggtaaaactctttatcctctctgttccgatttcctcttctttaaactagagtaagagataagtgtgagatggtatgtgtgaatttaggcagcagagaatttggcacgaagtaggctgtcaatagattttgcttcttggggccccatcatcacaaataaaatggagctggttgaactgtgtcaaatattaatccagtaactgtcagccgaaagaattaaaaagttggtctgcgtgcaggtcctgcttggcatagccctgagttacagctgtcactgataattgcttaacagctcagttagcatggcaacaagttgttgctttcagacagcttgtatatttgggaagagacttcaaatcattgcagagaatgtacctgaatttcaactaattctgaaaaggagtctcaagcactttggtgaccttgggtttaaacgtttattcaaattatttgacgtaacctgctctctttttaaaaaaagtttatatggaatgtaatgagttattttgacagtcaaaactcagtggcaattgtattacatgttccatcagtcaggagagcaataagagtttattgctgcacttaaaatatctaatgctagacataaccactaaattagcttcaaatgttttaaattcagagtgtatgaaatatgattggccacgcttaaaaaacttagcggctgccagcaactgatatataaatttaacagtgggaaccaagtttggggattataggtgaggtggttaaaatatgcatttagaaaggagagcagcaatggctgtgaaattagctttggccatgatgtggcccattgcaggacttaatacctccctctctttccagtagctaaattttcaggatctctcatgaataattatattttggaggataaacttgtggcaaagatcacagttcctttaaacttcacat

SEQ ID NO: 51016 - DNA, 1597 bp, Bovine  19866880362581
  misc_feature (1)..(1): n is a, c, g, or t
nttttttctgtgggagagagaggagagaaaatgaataaagaaggaagacaggcaacggacccaggtactcccccaacccctaccatgtggtaaccatggtgcctgatcatttatgcaacattaactcatttaacagcttccctggtggctcatggagaaggcaatggcaccccactccagtactctcacctggaaaatcccatggatggaagagcctggtaggctgcagtccatggggtcgctaagagtcggacacgactgagtgacttcactttcacgcattggagaaggaaatggcaacccactccagtgttcttgcctggagaatcccagggacgggggagcctggtgggctgccgtctatgggattgtagagagtcggacacgactgaagcgacttagcagcagcagtagcagctggtggctcaggggtgaagaatctgcctgcaatgtgggagatgcaggagatacagatttaatccctgggtcaggaagatccccaggaggaggaaatggcaacccacttcggtattcttgcctggaaaatcccatggacagaggagcctggcaggctatgatccatggggtctcaaagagttggacatgcctgagtgactgaacacaactcatttaacattattctcctcactactgagcttccctggtggctcagatggtaaagaatctgccaacaatgcaggagatctgggttcgatcactgggttgggaagactccctggagaagggaatggcaacccactccagtattcttgcctggagaattccatgggtagaggagcctggtgggctacagtagtccatggggtcacaaagagtcaaacacaactgggagactaactttcacttttccccactactcagtgaaataaatatttgttccagtggtgaagctggatctttaattagtgagataatttgcccagacattacaggactactcagaggcacaacagggattaaaattgagttctgcatgattaaaagtagttgtgtttcctattacacatttaaggtatatgcactctctcttctctctcttcctgggataaaactaataaaagattccagacaacagagcaagtcccttattcccactatagacaaatgtctccctttagccaccctggcttggtcccaattaataccaaaaaaaaaccatatgactgcatcattcaaaaacttcatttgtagccaagctctagaagtgttattcttcctcttcgctactgagctctgtggtagagtttcactatctttgatttcccctgggcatcttcctgatggattcactgtgaattaagagttgaaaagaggaaagaagccaactgaggaagttcacagtactgtgattagaaaataaaatgcaactcccttacaaaaaatacatgttatttaaaatccaagtattcattacagattgatttactttaaatagtgcaaaggcattttcactagaaaactactgatttatacttattttgctgtaacaggaagttttcaaaatctaaggtgcttgaagggcctactttatataacaaagtaagaaatttttcattgaaatgttttccctcatttt

SEQ ID NO: 51017 - DNA, 1663 bp, Bovine  19866880368048
  misc_feature (1)..(1): n is a, c, g, or t
ntgaaaaaaaaaagtgaacggcctatgaaggttgatgaaagcagatagtttaaaatcatcagatacgattggcttctagtggtccctcttaatgtaataatcaaattggactatctttgaatacagcagtccccaaatttagtgagcctcagaatcagcttcttaaaaacagattgctggatcccactcctagatattctgattcgccgaccaaggtatggggctagataacttacatacctaacacatccccagttgatgccaatgctcttagtaagcagccacgttttaagacccctgttcttaagtgaattctttctattctctgacctatccccaataggagatctataaaataatttatgttgtttttttcatgcttaagaatgtggattgcatcttctctgaaaggcttacctgaaaatttattttcctttcctgagaggtagaaggtaggaaaaggtcagtttcttatgaagctaatcactgaggagagcaaataaaaccatgtcaaacacagaaggcatcacttccatgtacaggaaactttcaatcgtatttcaaatgcctctctattttgtatatctttctgcttctttgttgctgacaaatggatgatcaactttaatataaataaaagtgtttttaaaaataaatgtatcttaggaacagattcaacgatggctgctgaagtagtctatccattattttgaaagtcatatcacataaccaaacattctcacttttatttctatatttttgacaaaatgttcaggaggaattccacttttggctttccaagggtgcttcccaattttctcagaccactgtctcaggtactttcctgctataaaataacaccagtcaatttctgtagtgatcactgcttctgtcattgcaagtttctgttgcctagaggatagatatcaaactggagtgaaaatgacggagtgaagtgtgtatgtttagtctcaagtaataaatgtactcttcacttattgctgtaggctatagacatctcttttcatataaggataggcaaaaaatcattgcaatttaaaaggattttattaatctactctataatggtctaagagaaggcagtggcaacccactccagtactcttgcctggaaaatcccatggacggaggagcctggtaggctgcagtccatggggttgcaacgagtaggacacgactgagcagcttagcagcagcagcagcataatggtctaaactccaccaaccttatagattagagtttatattgtcagaggaattctggagtgatactatttcttttcatataaagaaatttgaaataatcataacattaaacttattttttaggagaaataaagtatgtttcatgtcatctcaaaatgttatgtttctaattggcttggggttagtgaaatctaaatgattagaaatttggattcattgcaggtatcttttacagagttccccatgacatattatacaaaggggaacagatttactccatctgtacgaataacactttatattttgattttgcccattggtcacatcaaagggtggagtctgtttctccactccttgactcagaacttggccacatgacttgttttggccaatggggcaatgtatcacaagcagatgctgaaaaatgttccacaat

SEQ ID NO: 51018 - DNA, 1819 bp, Bovine  19866880399526
  misc_feature (1)..(1): n is a, c, g, or t
natagatagtcatggcatagattcttcaactctgattcgctaaattcaaggactaaggggtttccttgctaccttgccatctatgcttctggaataacctctctcattcaggataggaagaaggaaggaatggcataggacatagttttggacacatcgttcatcagctagatgatcgtcaggcagataaccttggttgctagggaggctaagaaaacagagtgtttaaatttggcctctgtaataaaggaaggcaaggagaacaggtttataagttgagtgagcatccatttgctacagaaactcaacattagcatatttagaattaaattccaatcttctttcaaactctatttcttttcctatgttccctattttagtcattaatgcctgtttggtctcacatagaagccaaggagtcattcttcagtccttcttcccccttctcacctccacattaacttggtgcaaaacattattgagagtatgttcttatatttctctaattgtctccacttacttatcattattcatctgactctgattttgtgtgtcccacatttttttttcttggattttgaaaattccagtttcagtctattccactccactaatcactattatctgctatccaccggtttgtactttctaacatccaactatgaccaatctctactttatttaaatccctcagtaactctcattgccttcagaatggaattcagaatttttttttttttggtcatgacacaaggtcaccagtatcctgctcttacacaccagcccaaattctttcttcttaattcccccaagaatccccatattctgacccaaaagagctactcgtgagtccagtgttatctccttttttgcatatctttgcaaacattgctccctctgcttatttcataaaaattttctttgacctgtcctgctactagatatcctttcaaactgagtcagggtgtattttctgagaagtcttctcttacagaaaatgcccccacactccaagtccctgtacatacatacacacacagtattgatttgcctccacagctaaatgctgagaattgaataacagattgaacaaagagtatgtgaaattatttaaatatcaagtatttgggattttggatgaattcttctttctgccgagccacaagcatcattccataaaaagcagatttaaataaaatatcatgggaatatatttctttagcagtacttaaacttatgctaagaatattatattattttttaggttttgtttcagtatcaaaaataaagatatgtcttcaaaataatgagatttttatcaggatgaattaagcggaggcaaacatttgccatggtttagtagaaacattgtgttttctgtcattttacagcagatacatagcatctggaaatgagtccacttgaaagtgaatgctgtaataagtcttttggtggtcattttgatttatagaaatggttctgtttaagatatataggtttcctgacaagacttctctattttcttcttcagactagtgtgctttcaaaaatttgttcagattttttttttcttttgagacaagggaacaattctattaccgtgtttttattttctctgttttgatgctttgatacccggtgtcttgctgatcacagagggtccgtctcttccagagtgaaccaattcctagagacagtaaaccagctcgccttacagtgtatttttcaaaccgacagccacctctttaggctttcatactctgggtcactagatacctgccttaattaccccagggggagtgcatgttttctaaggcag

SEQ ID NO: 51019 - DNA, 1267 bp, Bovine  19866880509623
  misc_feature (1)..(1): n is a, c, g, or t
natatgaaagcagcaacggaattaagcagcactcaggtttagctcttcagtctcaggggcttgcctccaagggaaccagcataggaaaccgcagaaggcgtatctttcatgggcaggacataccacactgtactatttcgtaaatcaaatggaataacttctcagaaagaaactttgaagttgtgaaactgtacaaatatatttataattatttttgacattttctgggtagtttcataaagagaatctaagtaattacgcttcagatttagaagtgtgataaatgataacatatttttcaaagtattgtttactggctagagtagccttttagatgccttaagtatagctctcagttcaagttctgcttgaattatgcatagttgtatatacttcttatatagccactaacttcctgttttctaaccctttctactggttcatttaaaattaattacataaatgtatgtgaatattaggcttatggtttaaattgtgttgaaaaataaattcaaagaaaaacacttctacatgttagaaaaagacgataacatacaagaaagagaggaattatctttataatcaaaagatggagaaacggttatctcttaacatggaactgtaaattcaaccaccataaaatcatctctttcaattgatttttatgtacatacaaaacatgtaactgcagaacattttataaacatgaagcaaagataaatggctaggttttatgtgtgcttccaaacagcagagccttccagaaacttaccagtcatgcagttttcaaattcaatgtcatcaattgcagctcctcctcccagatcccgtgtacggagaccttgaaatatgacttcaaaattccttaactttcctagaaggatgactgccttttgccagcgatcaccagagttctgcttattttcttcccatactttcgatagtcctttctctgtctaaagataaagaagcttgcattaggcaaataatttaacacaaaagaaggaaaaaacaccaattatttagaacacaagcatttgaccagtgaaagctgattaaaaagctgataatagtcatggtatactttaccccattgaaacagaggtccattaatctactaaagtattcccaaaagaaatatgagcaagacttgtaaacttgtttgaatgttttcagagacatcattattagcaagtgaatactcacttaattccacttcttcttgcttgcatgcagagttctcaatggatagttgatggagtctgaa

SEQ ID NO: 51020 - DNA, 2039 bp, Bovine  19866880540350
  misc_feature (1)..(1): n is a, c, g, or t
ntgcacattgtgaagagctttaaaatttttctcacatcgacccttattctgtaacactttatgaaaccggctaatcgttattagatctccttcagaaccacattaatcacagtgaactcagatgacatcggtgctgttatacgagctgcaattccactgcaactccagtaaaatatgaaatactgacaaaccacgatagtatatggcagattgtaattagggctgagctttactatagcagaattaatcatgatgaattattttaatactcatgcaaatatgttgcacacttactaggaattctgctatataatgaagaacagtaagcaaactcaaaaaagcacattccctttttctactagtataggaatatatgtttctgtttcatttttcctcacaaatgctatatatggaaattgaaattttatttcattcttcaaattctatcctccattaaaagttgtttcatacattattcatgccctaaagaagataattaaaaaggtcaaattactgactgtaagcctcttgacatcttccaccagctttctagattttctccagaattactagaattttctccctgatatgtcactaaggaaattaatcaatttggaaaaggtttatgcattcaactaatgggcaaatatagtccacctaacactgcctgaataacaggaagtcgcctgctgtttcaaaatggatcactgcaaatataaaatgcacccttcttttcaccaccagcacgattaaaagaaaacattacagggggagaaaagaggaacacaattgtattctaataaacaaacaaaaagccagcagtcagaatttgacagaacacactgtaataaaatctctcttattttatagaaaataaaaagagcagttgggtgaacagtaagaaaaaaggtgtaaggactgattaataactatacattaattaattactaatacattcattggatcaatattattgcaatacaacagaggacatggtaacaagaggctcagaagatgtaagtaaaaggaaaaattaggataaataaaaataagcattactaacttggctacactgctcatgcttatcttgctttattcgtgagaaggaatagaaaattgatataatagaatctcaagtctatgataagcacaactgtacatataaatatctataagctaactatatcacacatagctccattcaagtgggtgggtgggctcaagtgtcccaaagcattccttttgttgtctttatatagtcacaaattcaagaattggccatttgagaaagtcacaaactctctcatttacagtccacaccaggtaagcagcatttgtgaatggatgctgtctatacaaggagtatttgcattagggttacttcacattacacaataagcattttgatattgtttctactagcactgtcagtgggaagacacagatataatccatggcagaggacagttgggtcttgctctaagacaaaaattaaccataatttttaccgaaatatcttcaatttcctaacctctaaatggtagcatccttgagaaagaatgaacaaaaatttcaagctgagatactaaaaaagtcaatttgcatatataactgcagtctcagcctcttttgaatatttaattaaggcagacatttaaaaagcttacttgataatcatatcttgagaaaaagtcatgaatgttaaagttcaattctacttctgtcctgtatttatttcagtcttgcaaaaagctttgcaaattatccttagaaactagtcacaagaaagagcaaacccaagtgtctctattctggaaaattcactttctctcttggtgtttttcccagaataaatggaaggctgttaaaacactaatgttattgtatgcaaggcagtattgccactctggacattagggaagccaaattttcctcctaagtttcattagcaccttactgaatgacttaaaaagcaactgaaaaattccagttcgatctgaatgacctgcattatctgcagaggccaattctacttacat

SEQ ID NO: 51021 - DNA, 1027 bp, Bovine  19866880549540
  misc_feature (1)..(1): n is a, c, g, or t
ngctggcgctgcaaagattatgaatcctgtctcatgctgaatggccaccccattagaaactcactcagcttttatccactgtgggttctacgttcatctcccccagatctctgcagtggggttgaacatagtaatagacaaaagccttaggaaggattcatcctctcaggtgtttctgctgctggggttcaaacagggctatttttctgtattcttttcttaaaactgcagcaaagcaggccgaaactatgatattattaagaacaaaaaagtattctcttttcccctcagattaaaccctgtggtgttgaattaaccccctggagatggctgaataaagatagtgtatctgttaaagaattagatgttttacagttaataagactgcacttgatgctatattattcccttgtcagaaccttataaatcatttcataattttgaaagaactgtaggaaattgtgataaaatttggcgatctcgttagcagccctttgttaccgacactcctctagctttagggacttaatctttttgatgatttatttaaggtgttcgagagtctctgagttgggcaaagagaagttagaatttaaaaaaaaaatcactaactgccctctttgtgaaatttatggttttcagccccactgctgtgaatttttaccaagcagatgaaaactattcagcaatatatgaggattttgctagattgccccagcagatatacaaaagaaccaggcaaaactgttctgattcattatcaaagatcaagtacagaattctatattcttttatcagttaactttccactagtggggaaattaaattcaattaaagttagactgaaatttgtgagcaaagaaatatatggcttgagtaagaggtagaagggtttcccaggtggcacagtggtaaagaatctgcctgtcaatgcaggttcgatccctgggtcaggaagatcccttggaggaggaaatggcaaaccactccagtattcttacctgagaaatcccatggacagaggagc

SEQ ID NO: 51022 - DNA, 2070 bp, Bovine  19866880585583
  misc_feature (1)..(1): n is a, c, g, or t
ncttttgttctgaatgagtatggatgtcatagtcaaggcctcaggttagggtgacatgagtcttatgtaagtttgaaaaggatcattctggctgctgttatgagaagagattatatggttcaagggtagaagcagagagatcatttaaaaagcaatcacaaaaatctatacagagacactggtgatttggaccaagaggagagaagcaaggaaaatgagaagtggagtatggatacacgtgcagctagtggttgatctaatttgttgatgaagtataagcaactagagataaattgtcattcactgagacaagaagggaagcaaaaattataggattgaggagacaatgggtcatcaaaattttacttttacacattgagggataaaagtaaacttgttgaattctgattttatctttactggccttccagagaggggtttgactctgcagagttccatggaaactgctacactgaggatgataattaaccctgccagaatcatgagccggaaaattggagctggggcatgtagctacagcagaaagcactggaatccagccctctgattatgtctggggaggggtagatactctgatggaccattgcacgtaaagttttcagcatatgaaaaggctctccttggattactgcaattgatttttaaactaccaaacctctgatcactctgaggaggagacggtgcttcttcttgtcatgcaattaaaaagtctacagtctcaatcccaaaatcaccttccaagagcttgatatctaccccactagatcactatgcactgctggaatcagtttcccttggggcgtgtttgttttaggttatttccctagttatctttgagatgctcattacatctaagtttggatactgaataggttgttagtatccaagtctggagtccagccttcttgggcttccctggcagctcagttggtaaataatccgcctgcaatgtgggagacctgggttagatctctgggttgggaagatcccctggagaagggaagagttactcactccagtattctggcctggagaattccatggactgtatagtccatggcgtctctaagagtcagacatgactaagtggctttcactttctttctggagttcggggtggtgggggcgaagtttgaggatggagatataaatctggaataaatatattagttttttaatggaaagaagtctataacttggaaaggaaatggctggcagcaatcctcaggaatgtttaaagtgcagcctgagagtaagacatcactgaaggtaactgaatggttactaaagtctccaaaacaatgtaattacaaagcaatcagttcagttattataattgctccccccccacccaatatgatagaattactgtttaacctcggacacattttcctaatactttgaatgggatgggatgtatacacaactgattcaaacctctttactatgtttgcaaagagtttgaagaattacaaagatttgcaaccttttccagggttaatatattaagagaatagagagaagtgcaaatacttttggaatatttctggaaatgaaatattgatttccttggaagttctattcaagtaaacaggcttgaaagcactcatacattgaaatatccttccttaccagggtagagagtgcagtccatgaatgacaaatcatcaattgcaatgtctccagtaaagccatctcccactgaagcctccactgaaatctaaggacaatataagaaacttgttgatattgtgaaggaaattcatttatggatacacatggttgaaaaagaattcagaatttacctaaagacaatctcctcttctgaaccattaaaatcatactttgtaaaactctccataagcaggcatcttggtctctctaccaaatacttccagtcataggaagcgccacaccttactgggcccattatatccacgaagcccactttcaccctgcttctggtcaaagttttgattttttgagatttcagtgtatcagactgatatctacttctttataactttccatcattaattctagacttgt

SEQ ID NO: 51023 - DNA, 882 bp, Bovine  19866880589140
  misc_feature (1)..(1): n is a, c, g, or t
nctgcactatttaatatgattcgccttttgggttcatctatgtagaaatatggatattgttcattttttccagcccaagacagcctttatacctgttttccctggtgcttaccatgtaaatcagcagagtgtggataatatgaaacaaggcttcacttaaaggcttcaatgatgactgtgtttcgtgaaatccattatgctacatatcttgttaataagatgcaaaaaaacccctcattttttgatgaaatttttttctttctcttttcttaatcttggtttagtcttttatccatcaaaattgtttgttcccgctggagaaagcatgcgaagggaaacattactcctgccgggtggatggcagtgcatatgggaggtgataaatcattttgtcatgttgaggaaatcagaaattcatctgcttccacaagagacaatattatgctatgaagtctatggctgtctattcttaatgctgcgcatgtcaggaagccactcagtacatcagtgataaccccgctcactgttaacaaagagcttcattaaactgttaaatgcaatatcacagttccacttagaattgaggatcatgtgtcagtggcaaagaaatgctcaaatctctccccatcaaggtttcaaaaaatagaggaaggataatgataaatgatattgatattttaggttcctgtctataatctagaagaatctttatctatttctattatcctagtttcataaatttaattaatcatctaattaattcctggactatgagagttgtaatggtgaaaaaaaagtaacatttatcttcacggttagttggtacttcagtgaactgagacatacagggtttaaaggaataacattatatttgtagactac

SEQ ID NO: 51024 - DNA, 971 bp, Bovine  19866880669376
  misc_feature (1)..(1): n is a, c, g, or t
ngggaggcctggcgtgctgcaattcatggggtcgcaaagattcagacacaactgagcgactgaactgaactgaactgatacactgtactgtctatacgttctaaatctttaatattatcaagacatttgagcaatattatggtaaattcacatataatcaatacttaataatgggcaaggaagggaaaaaattcacaagtgtttatttcttctgatcctgtgctttgcctattcagatgcagattaattttcctcctctcagtttgtatctctgactgagacattcactttcaagttaaataatttgcctagatccattttttaaaagtcatagattggtagatgccaagaaatggataccatctttcaacagtatatagctactgaagtgtccacatgtactaggattgattttcttattaaccctgcacatttgacatggtattcattgtatatgtgtattttgacaatggcaaaacttgaacagattcatcttatttgagggtattatgcttcttctctaaatatttccatttaatgatattgaagaataaagacaaaatgaagatgaatttaaaaagggctggtaaatgatagccctagaatcaaattaaggtcatgaaaacaagtattttgaatctaaaatattaaagacacttacctcttgttggacatgatagaagaatgtatgctgattcttctatcattttctatacaaaaaacttttatattaagaaactgctttaaaccaggttgaagacttctaactaggacattacaatactacttgagattacactagtgttttcttatctattttatggctatatttaatacaaaatttaggaattcacataccgcaggaggattcatctgattggtcagggcagtcatatctaaaatcacatttctggatattttcaacacactgaccatcagacctgcaaacaaattcactgtctgtacagttg

SEQ ID NO: 51025 - DNA, 1345 bp, Bovine  19866880754111
  misc_feature (1)..(1): n is a, c, g, or t
nacatttcaccagccaacagataaagttcaatataaagtattaggtttaatttaaagatatgaattggctctgacacacagaatatgtttaacaaattatatcaattcttggcagaaatttttagctttacacacaaaaggtgcattgcagtttaagaaaacctaaaataagaacagtcgtatataatcagataaagaaactgctgtgaattgaatctcattcaagtcctataacatttgttcacaaagtgtgtttccctccctcatcttactgaaaaatattctgaattcaaaataaaacaagtctgtaacaatgaagactggttgaacatgaaattttttaaaaaacaggatttataatgttgaaaatatttcaagtgttactaaaacacaccactgttaggagtacaagtgatatgtctgagactgcctttcttccaagagcatttgaaattattgacaaactagatgtggcaggtgtttgcacgactgcttttactcccgagtattcatcatgatattagtagtactctctgctgttatggttcaatatggttgtttctgtgccattaagcatcagtaaagaaatcaagctggttggaattatttagtataacctctggatccctcaattttccagagttgcagtgatgattaaattaaacataatggtgaggatttcaatgataatcatgtctaacatttactgagtagttatcacaaagagttactgttcaaagcttctggcacatattaacttgctaaattctcacaaattgccctataaagtaggtctgattttcattgccataaaaaactgaggtaaagagttgataagtgcttattcaaggtcacacagcaactaagtggcagagacaggatttaaactaggaaggctgactccagagtctgctcgcttcccctccgggctgtgagatgatcctagcacaaagcagctggggacaaagctctgcatcctgagggtcactgccatctccccacacttccttctgcttcaggaacgcattccctcccagtgagtctgccttactgtgcctgaggcccggagtgcttttccccagggtgttggtgtgattgcctttgttttttaatatttggccatgttgtgaggcatgtcagaacatagtttcctgaccagggattgaacccatggcccctgcatttgaaacagagtcttaaccactgaaccaccagggaaatcccatgtggttgacttagtacattcaagcctttgcccatctgtaactttcagagattactttgactactctaatctgggtaataattctcaaatactttctccctataccattcatagtaccca

SEQ ID NO: 51026 - DNA, 1189 bp, Bovine  19866880814407
  misc_feature (1)..(1): n is a, c, g, or t
ntcacctaactatctactaaattattttctttctcttctttagattcccatttgattttacaaaaggctgaaaattctgaacttcagtgattttatgacagatcaattaagaatatgtgccattcttatatcttatcattcaattttagtaatagaggtcttgttcattctctcatattccctcttagccactcaaaattcaatacaatttactctctttattaaggcaagtgctacatctatcacatatcagatgattttctatagaatgattctatagaataggatgattttctattctatatcaaaattataaaattattatattattctaataatagatgataaaggaaacctacctgggctaaattgagtcacaaaccaggtttaaaaagcctatttgttcagaataaaatgttttaagatcccttttttaacaggaaaattttgcttggctgcccaaaatgttaaagtatgcactatttttctaagaacttctataatacgtattagattataatttccatcatactctacgttttattaggctgcataaataaatgtcttttataggcttacattggctttaattctcaaaattattttggaagatgaaggctgtattgaataatttgagtttaaccatgaaatgaatgtgacaatgattccacttcagcagcatttggtattagtattgaaaacagtctatgttctcattacccaagacaatcctgttctctcaagaacttgagaaaattgtgaaacagaagcaattttttttaaattggaggataattgctttacaatgttgtgttggtttctgccacatagcactgtgaattggccagaagtatacatgtgtcccttccctcttgaacccctcctcccacccctctagattgtcacagagcaccaggttgagctccctgtgttacactgcaacttccccaaagctatctactttacaaatggttacgtatatttcaacgctactctctaaatgcattttgccctctcctaaccccacggtgcccacaggtctgttctctgtgtctgcatttccactgctccttacaaataggtttatcagtaccattgttctcgactccatatatacgcattaatatactatatttgtttttctctttctgacttacctcactctagattcagccacctcactagaagt

SEQ ID NO: 51027 - DNA, 1407 bp, Bovine  19866880817865
  misc_feature (1)..(1): n is a, c, g, or t
nccatgaaaagtatagagttatttgaaaatagattcgttgtaaatgcatttttatgagtctagagcaaacactaaaaaagtaaaaatggaagtataattgatatgatttttctttgctaccttcatcatcactgctttgatgttgttgaggtgcattttctaacacaggaatttctcttgcttttgtgcgcatccaggaagtttgcccagcagttgcttctgatacccagtcacacatgtcaaatgcaaatccacaggcttgacacactgaagagaggagagaaagatgctggcagactatcacagtctactggagtggctgcttaacaagggctagagctgcaatcaaggctaagcatatatacacacacaaatacacaaattcatacctataagccttagagtgaactcttctttttaaaagttcttaatttgatccagacaggcatcttcccaaatgagaaccattaccatacttccattgtggtttttttttcataagaaataccagactttacctactttatggaattcagttagcttaaaccacttactattcataatcacattaaaattttaaagaagatacattgtatttaatttcatgatttttagagcaactgtttttcaaaacattaccttaacttgatatatttactatcttccacttttttaataaaccacacacttccaattacaatccagctaaaaccccaatgatactcctggtaaaacgagaacattgatgacaacagagcttgtcaagtgagtacccctactagcggtttgatatttcttttggggtccgagtctcatggatggcaggcaggcatctcatttttacacttacacctcaatccttcatctgtagaatcaaatctgcagagacttctatctggatggcatagttccttctcggtatttgatgcctcttgacatggcaaaatgtcatctgttaaatgtaaagattggcaaaaagtgagctgtggtatcactagaaaggatcatggatttctcaaaaggttaacctttgttctacagagactgctgaacccaactcttctctatggcagcatcacaccattatatagacaaagaaacaaattcaggaagagaagagaagagagaataaaacaaccatgccagtacttctaaattttaatcagatctctgtggtgatttctaagaccccaagccaaatcatctaggtctccagtgaagtaggttacatgccttaatgtggaaacaaagagactgtcattaggctgataactgtacatgtatcaaatacaacatatggtaccctctttacctgggtccgtcctggatttactttccttgcagctctttcaaatggagcctatttcctcccactccccccacccccatagtcctcccaacacagga

SEQ ID NO: 51028 - DNA, 629 bp, Bovine  19866880902274
  misc_feature (1)..(1): n is a, c, g, or t
naaatgagtgggaaggtcatgtggacatttgggaaggaatcctggcagagagaggagcaagttcaaaggtccctagacatgagagtgctttataaaatgtgattttggattgcatgctttatcggctgatttcctttttctctccaccataaattggaaaatgttttccaggtgcctccagggggcgctgtgactttgagtttgatctttgttcctgggagcaggagcaggatgatgactttgactggaatctgaaggcgagcaatgtccctgctacaggcacagagccagcggctgaccacaccttgggaaattcatctggccattacatctttataaagagcttgttccctcagcagcccatgagggcagccagaatttcaagtccagtcataagctggagaagcaaaaactgtaaggtatggagaaaaaattaaaacagaaatgttataagcaacttctgatagagtcaaaaacagaaaacagaatggccagaaccagaccaaaaagtgactttgaatgcactcaacttggaattttgtgagcggcagaaagtgaagatgaaagggaaggtttgttagaactgttggaagaatttatcctatggataagttccatagacaaagaat

SEQ ID NO: 51029 - DNA, 1241 bp, Bovine  19866880967578
  misc_feature (1)..(1): n is a, c, g, or t
nacacgggagatgcgggttcaacccctaggttgggaaattcccacggagaaggaaatggcaactcacttcagtattcttgccccaaaactgccatggacaggggaaactggcaggctacagttcatgtggtcgcaaaaagctggacgcaactgcgcaactaggcacacattgaagacattatggaggttctagagacatgctctaaggaactgggcatggaacaccatggagtcttaacaaaaatagcatcgtatcttcaaaaccaaagagagaggattggaatggaaaggagacttccgaattgtgtatggtgggcatgaagggtggctcaccattctgctgagtcaaagaactaaacttaaaggatgcccaccaggaaacgggcagggtgtggggaacttgggtggacattctaagagcctcagccaccacctgcatagcctgccaaccagctaagcatgtgtaccaatgccacacagccataaaagactttttgtatttgggcattgaccattccttcaaatcagtgtaagatttgtattcatttaaatgaaggttggttatgtaaacttttcaaaaaaagaaaatgatattgggattccctttctgagttattagacaaaatcattaattcaaagatataatagcctctagttcttgagaatctgttaagatttgtattttcataaataatgtattattatactatattagtctaatcaactatcatatttaaacatgataaatggcaatcaaaatgtcatttctacatgtagatcagacaagaaagcaggattttttttttcagtaggacttactaaaattatcagatcatggtatttctattttttaaaaattcataaatgtgctcttttaagaaatagatcctagagaatggatgatttctgcagactttcatcgaagtgttttttttaaaggtcctagtttagttttcatgttttatgggaagagtataagaattttaaagaagtgaacaaccctggctaagtaacattgccagtaggaaaagggtgtgttcatggtctttgtaatctctgaacaataaaccttattttgcagtagggacttttgtctgttttgttcacagatggattccaagcactaagaactggtcttgataaaagaaaggcactcaaatattgagttgctaaatgaaatggagcttttaaggaaaaataatctaagtaagggatgttttatgctgtttccagctgtaagc

SEQ ID NO: 51030 - DNA, 812 bp, Bovine  19866880999597
  misc_feature (1)..(1): n is a, c, g, or t
natgtgctgttttagtcttggcatttaaagaattacagctaccgcttcagaaatatagatccattttgaaatcacatgtcacagtttgcttaacattttcagatagctaaatcatatggtactctgcaagtaaggtgtgggtgtgggtgtgtttgtgtgcacatgggctcagttgtgcgagtaacgtgaagaactttaaaagagaataaataaatgggggatgaggaagcaaagggggaataaagagacaatattttcatatccaccagttcaccaaattctcttaactgaatgaagtagattaaactttacagatgagggaactaaggttgagagagcttttaatttgccccggatcacacatcaattttggagaaggaaatggcaacccactctggtattcttgcctgaagaattccatggacggaggagcctggcatgctacagtccatagggtcacggggagtcggatatgactgagtgactaacacatacatcaatttaattgaatacttattaagcagctactttgtacctgatactgcaccgccacacaccaggaatacagtggtgacaggtttcacagagctcacaaagtcagagagaacagataagaaatcactgatggataagcaaggtaccatggcagctaagccagccttcctgggaaactagcagttaaactgaaacctggaaaactggtaggaattagctgggtaaaattagttagttttcatgcatgtaatactactttcatattttttgatgagaattttagggaatatccaatatgtacaattcatgtttcccat

SEQ ID NO: 51031 - DNA, 1447 bp, Bovine  19866881155854
  misc_feature (1)..(1): n is a, c, g, or t
ntgggagtgggttgccatttcctactccacattgtcctatgatgtagtatcatagaattttactgcttctctttttcttctcagacttgagcaaaggtaaactgaagtacagatctcccttgacttaagatgaagttatgtctcataagcccatcataagttaaaaatatcaaagtcatagcacagggaactctactcaatactctgtaatggcctatatggggaaagaaactaaaaaagagtggatatagacatatccactctgctatgtttaaagtggataaccaacagggacctactgtatacagcacagggaactctgctcagtgtcacgtggcagcctggatgggagggggtgtttgggggaagaatggatacatgtagatgtatggctgagtccttttgctgtccacctgaaactatcgcagcaatattaattggccatactccaatgtaaaatgaagtttttttttaatatgtgtattttaaaatacatacatcagatatgtgtataactgattcattttgctgtacacctgtaactaacacaacattgtaaatcaaccctatgtaaataaaaagtttttataaaaaaagaaaatattgaagttcaaaaggcatttgacctactgaacatcacagttggccttgcctcccttaaccacgcttagaccacttacattagcccacagttacacaaaatcatctaacacaaagcctatttcatactacagtgttgaatatttcatgtaatttattgaatgctctactggaagtaaaaaacagaacagctgtaactatatcgattgtgcatcatggtgatcatgtggctgcctgggagccgcatctctgcctcttcccagcatcagaagagagcatcacaggtgtatcattatcccagaaatggtcaaaattctaaatgtgatgtatagtttctattgaatgtgatctctttcacaccatcattaaactgacgaatcattaggtcaaaccattgttagctggggaaagtggggtaggttcgaagaacctctacaggcgtcttaccttgagatgtgttgtgagtgtgatcccaaggtggagcctgatcctcaaattcagcagagaggttacttctagagctccaggtccactcaaaatcatcaccacgggctgcttcaaaccaaccacagctatctgtttcaaagtcacattcggtaactgaaaaagaaaaatgcagcttttcggtagactcttgaaggtgatcacgtgtttaaaagggtagacagagctcaatgggaatcaccttgccacatttgcctaagtaaagttttatttgaggaagaaaaggatgatatctgatcccctcaaaaaaaaaaaaaaatcccctccaaaaaaactgaaaattgataggtagaatcaacaatttaagaatattttccaaatatttttctaagaaacagcattg

SEQ ID NO: 51032 - DNA, 2196 bp, Bovine  19866881234935
  misc_feature (1)..(1): n is a, c, g, or t
ntaggtttaaagctctgttttgaatatttacaaagttggaacatgctgaaactatagcagggatctaaaaatttaattgtggtaggggacccctgtagcctccctttccacagaatttaattaaacagttcccatttgactttatgtttcttggtttgcctcaagacctgagtgtaggtgagcttggtggtaaaatctgatatgaaatggatgatcagaaaggatgctttgaccaagtgatggcaattcggtagacactgaaaaaaaatgtgtaacacattgcaacagagaatgctagatgtttcaaacagttttttagaagacattacacattttttttcaactttcatctccacggaaattggtacccacaatgacataaatgggataataaataaataaataatgcatgtaataatgcctgtccatgcagcaaggtaaaagtccagtgatgaagggaaagaaaaaaaaagcaggaatttaaaatgtagtgaaactgaaaaggagtcactttgagtcgaaagagaatgatttcatttctcaggagcctcatctctgaacaatgctctgtctttgaaacatgaagcattagaactctatggcataatgagaggaagaaaaaattactgttgtgtctgaacctggttttgtggggtttttttcttgatatattttgtattatatcatccaaccactgaggcaattaattttcaacttgccttgtgtccagtccttagtaaatgatcagtaaatattggttgagttatgatagtgctgaattccatgttatagctgcagctgtcagcacctaaaataatcctctctgttttctccactacctcgttaacctgtcagtcctttagattgtgccaccattgatggtgagtaggaaacaaaatgatcaaatctgggctccctaacctcaaaaagaacattctctagttagattaaactattgataaacagtactatgtgatctcccaaggtttttgctaatgtcacaacaaagaaggaattaatgaaaaagtattccttgcagtcttcttttacttgaggaaattttgaagacatcaaagagaataaatagcagtatgtgattttgtaatttgagtcagatatagaatgtgtgtcttcctatattcataagaagcaggaaagcagagaaaagggtcctaaaattgttccctaatgatgtagacaaatatttgtcctcatgcttgtctgagcaggatgctggtgtcccatgtctttagacagctctatagcatgtgtttaaaataccagttaatgtaactgccttgagccttttcttaaggaggggccacaaaggctggcagaagatgtacttagcattttctgggtctacatatttggaggagaattaagatgatattgaacaccaaagtaattttgggtatttttaattatagatctactgggcataagtaaatggaatatttatatcactcaaacacacttttcaccaggtgcagttttggtatcatttgtctcagcattcacgtctctcgctttttacaagaacatctctgaatggggatttgcagaagcacagtgatctaatcggaatctctgaatctcaatggcgacaagcaaaaatcaatctcattgcaaaggctggagaatctactctcccttttcaggtaagcatgtaagagatgaatacaactcagaagaagatgcttatttaatgctgatcttcccggacaataggagaacacatatgtcccataagtttgtctgatgttgataaagcaagcatattcacagtcagagataagtagagaagttatcttgactaagtactcacaacttgtggaagcagagcgaaagtggaagtaaggattgaacagatggcagagacaagagaaatgtaatgggaaaatatttttcttaaataaggatggtggagtacatgaggtagtgaaaaaaatctgagctgcattcctatttgctgtccattaatactgagaatttttatcacacttttacgtcattttcttggttaaataatgaaagaaggaaactgtagcttatcagatgagtgccccagcttccacccttctggacatgactcccttctggatgatgtttggaaagagctagtttagtaactagattgggtggtggaattagaggaacacacactgccatcagtcagatggtctgagttcccat

SEQ ID NO: 51033 - DNA, 1971 bp, Bovine  19866881302459
  misc_feature (1)..(1): n is a, c, g, or t
nctgtattaaatggctgcagtactttgctttcacttactccccagttgcaaacaaataactttcagttgaatctggaattcaatgtttttaaagtaaaaagaggttagggaacaaagctccccaaagaaactacctttgtcgttgaatacagtaaaagagaaaatgacggagcatgaaagttgaagctgaaaatatccacatacaaaggggaatcaggaagtgactatccagagaattagaggcaagaaagaaatgtaaaagatagatgcagagtgtgtgctgggccccaggccttgaatatttatggctgtttcagcttgctgccccacctgctacataaaagttatatgaagacttgaggtgtttgccttttgtagagagtaaagaactgcaatttttttcctgtttatttaacaggaaggaatcagtccttctcctctgataataactttaaaataatcacagaattgatgtgaatctaaagattcatttttaaagagcaaaaaacatgatgtagttggtcgatattttgcactgtggtatgggataaaaacagcaagtgggaatttgtagacagaatgatgatgcaaaagctatagaagcttcatttgagatcaaaaagaaatctatgcctcagttggagggttgagtatggttctcctacagtcttctggtcaaattaattttaaaaatgaaattcaaattgaagaatttttaaatttctgcagtaagatgttgaagagtctgtttctaggagtttgccctttgtataagagaagagggaagtgatttcatagaccatttctggtcttgagttctccaatatttacttctctaggtatgactttcttcaatgtaactattgataatttgaagatacatttgatatcacagaacctagagatcccaagaagtcatatatgtttctggagacaggacaagtatatcatccacaattattcccattttacctgtgataaaactgattgcttggtgagatgtaatagctagacatatgacatatccattgttgaaaataacaccagtaggataaagacgattttttttaaagtaggtcgtgactctgatatgtgtgtgtgtgtgtgtgtgtgcgcacgcgcgcgctaagtcattcccattgtgtctgactctttgagaccccatgaaccatagcctgctagactctgtccacagaattctccaggcaagaatactggagtgggttgccatggcctcctccaggggatcttcccgactcaggaatcaaactggggtctcttgcattgcaggcatgtatacattttggtgtgctggcacagctgttcaaccacacttgatcatctaatccgatcatttttctctttaatctgtattcaaattttacattgttgactgatttatcttctatgctaactggatttttatttggcattgaacccatccccttcttccacatcctaataatgtgcattctcccacaaaatctttgggcctttgcttttgtctttcttgagaaggcagagttcagggtggctgctccagaaaaacccaaagaaagcatctcctagtatccatatgcaggacctctgtactggtagtttagataccaggtctcgaagaagccccacctagtcaccaagaaatgaccacaaggactaaaggagaattgtttttgcttcctttataaataaatgaattaagagagaagcatcaatactacagaatatatacacatttattcaataattggttaaatataccactactttgaaaatgtgcaagtcatgaatcattaaagccatcatgattcccatctaagagtttaggtgacacttgtcttcagctatttattgcttgtgagacttctataaacactgatttctccatctttaaagtgggatgacggtgtctgtcttcgctgtctcatagggcttttctgagaactggataaaacagtatggatagaagtt

SEQ ID NO: 51034 - DNA, 647 bp, Bovine  19866881389862
  misc_feature (1)..(1): n is a, c, g, or t
ntggttgaaatttgcacacatttttctgtagaaacaatattgtaaatcatggtttgtttcacaaactagtctatacaaccctgttgaaagcataatatattctacacctgaaatgaaaataataggtgtagaaaacatcttttttgttcttttaaacaacaaaattataattaagcacatggcacagacggaataatcattggtagatatgatgatttttaaatgtgttgagtcagagataacgcaaccaaagggaattcatgtcctaaataagataagattttagacttacttttgaatgttaacatgtgagaggaattaaactaatgtggggaatgatgaagtagatggagagtggatgaataataaagggacttcatgagcattctcagagtccttgaatgtttattgtgctcttctgtttatttaattgaatttcaacactttgtttttttccccttggtttttgtatatttcttgcacaattaggttcattttatttatttggattgtaattgaaggaaacatttttatttgaaaacacaaaactttcctaactaactgcctcctctaatccttcatatttaaaagtttcttcttcattctcccttagatttatttttctctgtcttttctaaagttaattt

SEQ ID NO: 51035 - DNA, 1732 bp, Bovine  19866880458322
  misc_feature (1)..(1): n is a, c, g, or t
natgctctcctgcccctgcaaagcccctctgggtggatgaaatcttcagagacagggcttcaggctgagcttgcaactggttcctgggaacttagggccttccagcctgggcaagagctcgaggcagggcccaccgatctctagttcatctgcctccaatttgttcacttgtctttcctgcttgtcacgcagcaaggtttccttcatcctaagaaaacctctgttcgtaacctgtatcccgtgcctctggcccttaccatggccagacctgcctctactgctccatctcgcacgtgatccacacccctgctccccacctctgcctccccactgggtgggaattgaagactgtcaccacccatgggttactgccacccccggcccaactcagtgccccccatctggcttcactgctctccatcttaggccattcccttcctaggctcccccacccctccccgccttcatcccagtgcctctgatggctcttcctgcctttctgagtcctccccacccttatccctgtcctgtcccctctgtctaccccagggtcagtccgtgccccacccgcctcccttgctgtgccgtctgcctgggccttcgcacccacctccaggacttctctttggttcctggtcaatgccaccagctgacctctgctgagctgcagacccacgagcagcctgcctgcggcaccccatgccccccagcacctcgtgcccagctgactcattgccctacctgttctctaggactgcccacctttgccaacaaccaaggtttcttctaccttgggaagcaatgtaaatggatcccaggggtttgagttgggaggggaggagtggggggcataatgagatttgtgtggatgtcagggatgaggcccacttcaaaggagctgtgctgtgcctagggctctcttcctcaagcccaaataggaacacactgccccgtgctcagccccccactctgctcccttctttcccgcccttggcctctcctccttcactcctggtttcctctgcttccgtctcacccacgtcatccctgtcgcccagtgagcgaggggttttgcctgtgctgtgcctttccttagcctattcttggtaccttgaatgtcctggggggttgatcaatgttgaagttgttgaaaagatgtcaaaggccaagctttgttgcttgaggcacacgaagcgatctaagcacagaaggtcctattgctggggcctgtcagtgtctctcgggggtccagtcaatgccagaaacctaagggccgtgttccatcccaatgcctccctcctaaacatcaaccaggaaaatgcttccctcacagcctgaaagtcctaacctgggtaagtccagttgaatctcacagtgaactctcgctcccggacaggcaggataacctctggggagcatgtattcgcagacagggtgaaggtaagaagaggaggctttttttttggccctaccaggggtggaggaatgggtaaactcttcctctctcacttggtgggggaggggatgcaggacgatcacagcagagcacccctgtcatccccataaagggctggaaaggactcgaggaaacctgcccatcttcccgggccaggcctgcagggggcggggccgggagtccccgcggcactcccatccatgccccatgttgtgcctctccccacagacggtaaatattggtgttgtgacttcattaataaaggcttctgtgagc

SEQ ID NO: 51036 - DNA, 932 bp, Bovine  19866880500455
  misc_feature (1)..(1): n is a, c, g, or t
nttctcccatctaaacctttggcccacgtctctctccgatgctccacacctggacagctctgcttggctggctcccgttcaccttagaccaaacatctccagaattgctgtcgtagctcctcagctctcgcttaattttgtgtgtcacaatttgggatccactttcccatagaaatatggagcaacagcctcctactggcctgaaagacctgcgtggttgacgaggcctgtgagagccagtcaggctgtggccacctcaacattgccatttccactgagaacgtactctgggtgccaaacagcccattcgcagcatttagctttcctaactggatctgcttgccccagccataagtgacctattttggcccttgctgttttctacttccagtcaaatgtctgccaaggacttttctagaataaggcagaagagcagtgggccctttggcgtctccctggacatagctgccccgtgtttccatgtgcggagctgtgctgagggaggcatggatccctttggctcccagaggccttccttttctcctgcccctcaggctactgggcgggaatgtccctcgtggctgaggctgtttgcaagggtgggagttttgggcaccctggggtcctgaaattctgtatctttcagccttcacctgcatccaagttcatccagggctacctgggagccgtcatcagtgccgtctccattgctgtgagtagcccccaccccgcgccatccacgccaccctgctgctctgtggctgtcccctcagcatttcggcccagaccttgtactgagggtcagggctgggcaagcagcgcgggaggcagaggtttctgcgtgggggctgtcaggcagaggaaagtagaccataggtagagaaggcgacgcttttgtagagggagagcacaggctggtgctccaggttccg

SEQ ID NO: 51037 - DNA, 1582 bp, Bovine  19866880507433
  misc_feature (1)..(1): n is a, c, g, or t
naacatactgataaatgttacggcttcttcaaacaaaagcaaactcaaccaatcattaatgatgctttgacctctaacacagagttatttgtttatgatatttatcagagaaactagtatagtaattgatgtgacatcttataagctacaaagaaaaaaggttaataaatattataaattatgtgattattggttattatacaaaactgtgtacaagttttgtacaggtaaaggatatgacaaggaaagatatcaggttatactaaacaagctattaatcctaggaatatcttcttttttttccctcttccatgaatttaagctatatgacttctaactagggctttggcaattctaaacctgactctaatacatttcattgtttcagaacatgctcatggctttctaggactcaaattacagttctgatttcatggggtgacagggggtgggcaggagggggaggagaaagacccagaaaggatgagtaaattgctgaaagtcacaaagaagacaagtagtagacatggcttgatgacttctactccctaagacaccatagctgtctatttttaaaaatcatcattgattctggataaagcacttgcctaaggctaggtcaaagttctgaccagactttcatttttttgcaatggtagctaggaaagactagcaaaattcaaatgagtcaaggtgcaagctagttcaaagccagacagtgagctaactggcagagtgtcgatagcatcataatagtagaacaaacgcaaacttctaggaaagaccgtagaaatgagatattaagataagcatgtcaacatacatacttgttcatgcatatcaacatacatacttctcccacagaacatgcagaagtgattcaaatggatgaattgttcatgggtaaaggagaattacaggttaatattcaagtaaatggtcctgagggtgctcctgtgttctcagaggcagaaaggattaccacctcgccccccaccaactcagaaagtaaaaatgaaaagatcagtgaaggacgccctgcatgttcccactgctgttgtttagggccaagtcgagtccagctctttgcgaccccatggactgcagcgcgccaggcttccctgtcctatctcccaaagtttgctagactagtattttttactaaaccagttcacatcatgcttactttggtgaggagaattattctatatattctcaccttcactgctaattcttgagatatgaatctcatctcccatgttgacggggagcttcacaaggatggagatcatgtttcctcctcctgactactccagaacatggaccagatagggctaggttaccagcaggtaatcagtaaaagcacattaaatagaattaagctaggtaaaaatgacattttataggaacaatattggggatggtgggacggacttataatttgtttttcagaacaaactttacaaagagaccaaacttagggtccctctgaccagcactagaaacaaggttgtctggggaagaaggacacatcaaacgggagcaataagagttggacagagaggggcacgaaggggaagat

SEQ ID NO: 51038 - DNA, 1481 bp, Bovine  19866880548308
  misc_feature (1)..(1): n is a, c, g, or t
ntggcagaatgtgcggtctgtgagttccctccaacctggcgccccaacccctggacaaacagcggccgtgtcggcctgtccacagcgggcctgtgttctccttccaggccaggagatcccaggggcaggcagccgtgcgggagacgtcactggcccactgggcccacgggggagaggccaggacagacttggtgatgacaggccagccacccgcccagccgcgccctcccaccccgtggcagggcggtcagaccgagggcagcccgaggaccaggctccttcacctctgctgccacacaggacattccaccgggagagatggaatttacactctgaaaaactactgccttccactggcacacttcctgagggaagctgggggtgtctgttgctgcttcttgctggccctggaggcctcagtctgagagagcccttgggtggggcctgtgctgttagggccaggtggtccccgttctggcacatgacatcctctgcttctgcatggttctgggaacatccctgctatgctgagactctgcttcagcttaaggaaacgggggatcaccttgctctcccctccccagggtggaggttagggcttggggagtacagatcggggtggggaagcaaagcaagggtgaagcagcctaccggtggcactgcccaggagatgctggtgatgcccctctgggtggcccggttctgtgacccaggttgtgagaggccctgtctgggctgaggttgggtctgactgattgtatcaaaaagaaacactgaagccacaaaacggcctttttcaggccagctcagtggggactttcactccccaggctctgaggaagggcctgggcacagacagggtctgggactggcctgagcactgtgaggcttggtgcttgccagggctgggccccccggtgcctggtgtagctccagggaccacggctttgctactcactgccctctctccctccccacccccagccccttgttctagggactgccctggacgttccttgtctggcactggacgatgtgtcttttgcagggtcatctctgggctctatgacagtcacagagtttgagaatgggcaaagaggacatggttttagtcatcaagtgggcttagggacccctgtagcctgtgagctcttcactgtccagccctcagcgtgcctgactctgtttaagcccttttgcaaactgatttggtcccagaatcaatgcgttcctgtgacacccatgaaatagccctgcagaagtgcctcatggagtgtgagacttggaagtcaggagaactgagttctgctctcctatttgtcgtgtggctgtgaacatccatgtcctcacttgtgtaaacaagctggactctgcagcactctggttgccaagacacctggcccagccacgcggccaggactcagctcccagtcattccatcccacatcaggcttctggggccaacgaccatccaagtacac

SEQ ID NO: 51039 - DNA, 696 bp, Bovine  19866880560076
  misc_feature (1)..(1): n is a, c, g, or t
ntccatttcaccccttgtgacactgaataaaaaacaactgcattattcttttgcttccgtcttcacatctcctccctctcattatctaatatcattgcatggtaaagtcacagttcataaaagcaaaagttgggggatcctgcttgttttggctgagagcacctattgttcgactaaacagagtgtttggttcattttgtgcttttgacacactagctggaatgaatgctcttgttggtttaataaacaaagaataataatccaaaatggggtttgattactatgtggaatttctcgttcatagaatgatctaattgttcacatctctgcgtagtgttaagcagtaaagtataagtaatatggaggtttttctatttgaaaagaagtttcagttaggacacacgtaaaaacactcttggccttcccaactccttttttagtaggagatgtcatcatatactcttctgtttcttacagaacacttaagtgaagtagaaagttcacaaagtactaaccagtaatccaggttcatatcaacttaatgggatttcacttggttgatgactaaggttcaatattggtaacagaccagaggaatctatctttttggaagtaagtgctttgtatttgcccagcatgtttcatctccatctaatgcacaaacttagaaatggactaaactccccacaatagtta

SEQ ID NO: 51040 - DNA, 1034 bp, Bovine  19866880592181
  misc_feature (1)..(1): n is a, c, g, or t
natttcttgggaaattgtcccctaaggtgggatgttcattctttaaggatgggtctgacatgtgaaagggctaagactttgactgagcaatggctagaagcagtttccttttgaatgaaaggctttgagttcaaagcaaaacaaaataaactgtatgaagaacatagaaacaaagttgtgattaaatttgttgtttaaaattaagtagaatgttcttaatatttttaaaggtatatacttctaaaaataactttataatcattaattctaaataaaaggaaaaagtttaattttccacacagatcaaagtaattttttaatgcgtttctgttcttgtctttttcatgtacacatgtaatttttaggtaatttaaatactattgtaaatataattttatgggaattttctgtatttcttcttttgaaattgtttttcacttagctacagttttcactagtaggctctgattttccggaaaaataaaataaatttccttgaaatctccacttcagaatcaaagaggagcgactgtaaaggtgcttaatgttgtagtcattttaaagaagagggcctgtaatgatcacctattgcccattgttgtgttaagatgaaaatgaaggtccatttgtatccttaaagttagaatttttacatgctttttaatcatacttttctttacctacatggtgcctgtccatgaaatgttttacttagtaatttggcagtgctcactaactcttctagatttttttttttttaagtaaaactgtgctttggccatggtataggatcttgagcaccttatcagtctttggagtcacaaaaacgtttgtttggagtgcttatagatacataatatattgagtgagattcccaaacatagaggtttaatttctgatctcatggatgcaaagcaaataaacagaatggccaataaatttgaaccaatacatagagacatgtgatggtttgaagggaaaagaaagtggatattgtactattaattaggataataggtttcattagaaacagc

SEQ ID NO: 51041 - DNA, 3162 bp, Bovine  19866880594836
  misc_feature (1)..(1): n is a, c, g, or t
ntccttccatgaacacccaggactgatctcctttatgatggactggtcttagggatagcttatacttgtgaatgagaaataagactgttatttagtttttaatcttttctatcaggagttgagaggcattggtgggtggaaagagtcattttcttggcttggattagtccatttggagcttcagtatactaaattatctgttttgggggacaaggtaatgtaatatatcagaagtaacttataatcaggaacggaagcctctccttggaatttaaggcttagttttgaactgttaacgattatgaagacgttttctttcctggagtttgtcaggaatatgaacacctatctgtgatcatagttcagcttctgctgtggtgtttggagcaaagttgaagaagtgatgcctacaatctactctgtgccttctttattagattctctctaattttaggaaggaaagagccccccccccaaaaaaaaaaaaaattcctgtttcttaatggtttttcgtctaagtaacttctgtcatttggttgtggaagtgtttatttgctttttggtgttttttttgtgtgtgtgtgtacagttttcatggaaatccccctttatgtgagatataaccagtatcttaatacattgttagttccatgttcttgaaacaataggacagtttagactgctgccagtgatatatttttaaaagagagtgggtagtatgggttaaaaatatcaaaggagctcaaactctgatggaagttgatataagaaattgcttcatttcacccttaagttcaaaataactcccaaagcatctggcttcacatttgtaaatgcccttttaaggattttggttagctgtcattcaggagtagagatcacttagacctcattaacagacaaatattccctttgaaaatgacatgatatctactgtaatcctagagtgttttaatagtctcttctgtgctcagcaatgaaacatttcaaaagtgactgacagccaattgatgtaattcatggtgatcttttgtgttgacagatctttaaaaaatcatgggaaattactactgtacccagtgaagccgcctccttttttttaaaactgccaatatcctgcaaaacatgacaattttctctttgactgccactgttttttatttctataacatgacacgattcctccttattattaggatttcttttgatagatagaatgtgttccctattggtaatgctcattttaaaatagaaaatttttggttccccaaattaactctgttacttttctagcttccacatcaagacaacctttccagtagccacattcccactcatgaagaagaatgatttaatgtataaaatttaaatttttaaagtgattttagtccttctctgaagaagaaacacattgaaaggaagagggtaagaaatcacttatttttgtgggtgtttttccctaaagcactctcaagttaaaaagctgatattttgggtaattttataggtgacagaattttttttccaaaattcgaagtgtccaaattcaaactatcgaataaatggaaaggacctgggtatgtgctaagttgcttcactcgtgtctaattctttgagaccccatggactgtagcccaccaggcttctctgtccttggggattctccagacaagaatactggagtgggttgtcattccataccccagggtatcttcctgacacaaggattgaacccatgtctcttatgtctcctgcatcggcagttgtgttctttaccactacccctacctgggaagcccaaccctgggatcgaacccaggtctcccacactgcaggcagattctttactatttgagccaccaggaaagcccagaaagagcctaatgattaatatgaacttgtctgatgagttttgggaaatagtaaaagacttagtcccattgttgccctaacttatctttcttggaactcagtcttttatctttgccattatatttcaaaagtagctgtttttggctgatccttagtgggtagaagttaccttttcccttacttgaatctattactaaagcattattatgagttgacatgtatttttggagaatgaattgtgtatttggccctgtgctgtgtgctgtttgaggaggttgttgttgttcagtcgtgaagtcatgtccgactctttgagactgcttggactgcaacacaccaggcttcctgtccttcgctatctcctggagtttgctcacattcgggtctgttgaatcagtgatgctagtatctaaccatttcactctctgccacccccttctcttttgccttcaagctttaccagcagcagggtcttttccaatgagaaggtttttcaatcaggtagctatagtattggagcttcatcttcagcatcagtccttccaatgaatattcagcattgatttcctttaggactgattggtttgatctccttgctgtccaaaggactctcaagaatcctctccagcaccacaatttgaaagcatcaattcttcagccttctttatggtccaactttcacatccatatatgactactggaaaaaccatagttttgactatatggacctttgtcagcaaagtgatgtctctgcttttgaatacactgtctaggtttgtcatagctttccttccaaggagcaagcgtcttttaatttcatggctgcactcaccatccacagtgattttggagcccaagaaaataaaatatctcactgtttccacttttccttcttctatttgccatgaagtaatgggatcagatgccatgatcttagttctttgaatgttgagttttaagtcagctttttcactctcttctttcaccttcaagaggctttctgctattagggtggtgtcatctgcatatctgaggttattgatatttctctgagcaatcttgattccagcttgtgcttcatccagcccggcatttcacatgatgcactctgcatataagttaaataagcagggtgacaatatacagccttgtactcctttcccaattttgaactagtcagtaatttgtgtagtaattcattacccaaagtctcagcctaagttgtcaaactccttttaacagtttcgcacattccagaacatcttcaagtttttccccagggaattcaca

SEQ ID NO: 51042 - DNA, 1397 bp, Bovine  19866880647647
  misc_feature (1)..(1): n is a, c, g, or t
naccacaaggttgcttgagggtttatacctggaacaatgccccacctcccacagagaaaacattataaagtgacaaagggcccaaagcaatgccccaaaatgtttgaatatttagaccttctccaaagacaagcactagagctaataataaacattcttgcttaaaaggaaattcaagttctagcagtgcaaataatttatacttcagctaaaatgcttaacagaaaaaggaggagttagaggaagaaaagaaggaacttaggaggttcaagaaaatctactatagaagagaagtgtctgggaataatgtatttccctgctgctgctgctgctaagtcgcttcagtcgtgtccaactctgtgcgaccccatagatggcagcccaccaggctcccccatccctgggattctccaggcaagaacactggagtgggttgccatttccttctccaatgcatgaaagtgaaaagtcaaagtgaagtcgctcagtcgtgtccgactcttcacgaccccatggactgcagcccaccaggctcctccgtccatgggattttctaggcaagagtactggagtggggtgccatcgccttctctgaatttatttccctagctttcctcaaactttctccggaagctaggagaaggaagacgattaaattgcaacaaaaccctggctctgaagggaacccgtgtttctagaccttgttgccagtagaggcggagggtgacagcagtccctaagggcttttagaaaaaaattgcttccaagtggaaattttttatggtaatctgcagcctggagccacttttttttttttttgctttctttcttaactactgatgattaaaccacggacaaccagatttcaacagtggaaatagttagatagctcccaaacatcatggttatatgctctaaattacaaagctaactctcaaaggagagaaaaatctgctgggaaagtctttcttttttgaaggaggaggggaggatagagtctgttaaagatttgtatctggtagaacataaaagtagtcaagaattctgtatcataatgctaaacatcagtctcatacccagaataggcactataatgtacaatcacagaaagctgaacagagcaatgctaaacatcctgctatttagcaatttttcattactctatttcgacctggataaagtgtctgattaaatggttatcatagtaatatgaagagaaatcctaccatacatcttaaggaacagctaaattgatttatgcctaattgtggttgtgaaaaaagtctaaggtatatgtcttagtttgtaatgatggctcaagaatgtgagtgaaaaaagtcacttacagtaccaactcataaagaaaattagaagccagtcattcaaccacccagcaa

SEQ ID NO: 51043 - DNA, 1846 bp, Bovine  19866880660789
  misc_feature (1)..(1): n is a, c, g, or t
ntaagaagaaggacaagctgactctggaacatgtttaaattctctttgtcctgtagcttgttttatattgtctgctagaggctttacttcatttatattcaagtttcaagtttactatgtattttgttcataatctacatgttgatttcttttcatatttttattatgcatatctgttgagtcttgtgcgcctgtcatattggccctctttttctagcaaacatgtatggttgaaatttgtatgtgtacattttcagcatcatgattgtattctcagagagaggcctgtatttggccgatgataaaactattgatcagaaataaaggaggacagcatctcagttataagctgcctgccatatagcacacgtgctttcctagtttggtctttgcatttactcatcctagtgatagagttaactttggaaaataactttccaaaagttattccaactgttaaaggaatgtaacagtttgcatctccactacttaacataatgcctggtcactcttaatgcactccataaatatttatgaatgaatgaattcatgaatgaactacctcgtagcctctacttagtactgatgcttccactcacttctttctctggtgcctttttctttttcaagcctacctttctaccttgaagtctcaggaaatactgactctctttagagtctatagctgtgtcatctgtctgtcctgcaagtagaaaatcattctggaagaaaagaaaaacttgattactacttctctgtgtctaaatatgagactagtcatctgctgttgacagtgatcagagacagcattgactttgccaaagagtagtggaatcacctgaaattgtctgggagaaattgagaccctttgtggtctccttaattttgatgtcactctttgcttacaattctataatacatctttttgcaccagatctggctaaatgacagttaaggcaaaaattaccagggaagtaactgcatctttcaagattcttctgctgagtcacagaaatctcaccactttgcctgtggaatagcatcactgattgattgagtcatcatgggccaaacatgtcaaacagttcaaaagacagggacaatgctggaatgcagtttccagggcctactgcagaacctaagaatatttgaatttattggtagctgtcttacaggaaagtgtgaggaaagttatattgtatttgaaaaccaaatatttagtgatttgagaagtctaaattcaagacagtactgacaagtcagtgccaggatctgatttacttccctttgccctcaaaatggtgtatccagaaagttactttccaagctcagaaaaaactaggattctgaatatttcaaatcacttcatctcctcttctggatggagtaccctagtattacagccctattttccaactgccatgtgcctgcaaacataaaacaataccagctatgctggtaagcaagcagtggtactgaaggaattagttactttgatttgccaagaggttgcttgatctggtcaggagagaagcattcttagttccctttaggttcagttcaagaatatgaggaaagtaagttggctattgtagatgttaattcatatatccatagaatgtgagtaggaatcccttcttcacgagaattatcagaatggttagatgttagcgtttgttaggtgtgttaagctctgtcatcagctggtatctgtatatatgatatctgtatgtatgtgtgcatctgtatggttgtgtttacaatcttcttgatatgggtggcaaaatatacctgtacaaagataagccaaaataaaaggtagtgtagatagttcagttcagtcgct

SEQ ID NO: 51044 - DNA, 3627 bp, Bovine  19866880712826
  misc_feature (1)..(1): n is a, c, g, or t
nagtggcttgaggacacctgaggcttgtagctgacatctgtagaggggcagtcttgtgggactgaacccttaatttgtagaatctctactaactccaggtagttactgttagaactggattgaattgtagaacacccagctgttgctgggattccctggtggctcagttggtaaagaatctgcctgcaatgtgggagacctgggtttgatacctgggttaggaacatcccctggagaagggaacggctacccactccagtattctggcctggagaattccatgggctgtatagtcagtggggttgcagagtcagacacaactgagcaactttactcctcactcagttggtgttgaagaattgctgttggaacacaagtttcaactcagatcatgtacaatacaacttgatatttggtacattttagtatctaggttatagccagatatgtcccagcataacaaatatgaaattaactggaaacggatataataaaataatgatatgctttttttttgcctacatggccacttcttcaataaatcaaaaaacttattaaagatattgcattaaactgagtgttcgttagaagagattatttttgacatagcaaaataaaaggtttcacatatctttttcagagaacaataacattttctacactttctagctttacttcatataattgttcaagtatttgttgggaatttcacctcctcaaatggaattataatgttaagtattaaaacaatgatccacttccacactaaatgtttgcattagatcagtatgaacataaatactggtctgccattatagttatacagactaatgaatttgttttcagaggtcaagatctacactcaggatctatcttactaaagaatataaacattgccactaagagctcagtttgaggtgtattttcccttttctttttttcccctaaaacaaacaatgaagcaaacaaaaacaaaagaaggtgaagaagagaatctctgtcagtgaaacctgagaccttaagctggtggttgtaagaccaaagacttgaaggcagacacaacggggaactccagaggcaatgttaggcgtttaacttggaggcgctggtaagaaagggggagattagtgttttaagagaatttaagtcagttggaaaaaaaggaaatggaagtaagtgtttctttaggtacataagcaacttctttccatgataaactggtgctttgaaaggaatatcctaacaaataggaagtataggagacaaatgagcatctcaagtattaaaagcacttctgtctttaaaatgtttaaaagctctcgaaatgcttttctacaggagagtacagaaacattctttcccctggttaattgtctggacaggagctgatgctacaccttgtttccatctattgacaggcagacagctgacaaagagattctgtgagccagacggaatggcaggcccttaagcctgactgctgggatttggtgaaaaactgaggaggcttgaatttcagaaaggcacatcattcaggaaaaaagagcagagaaagaagacaaagattactagggaaattttactgatactgacaaaataatttaagagttatttttcttttattcttggctacattatacaaaatatttgctgttatttacaattaaacagtcccaattatcaggcttaatggaggcaatgaaataaacaaccttttctctcctctctttcaatgtcaatttctgagagtcttttataagcactgattcaatttctttgtctttcattcatttctcaactcctagcaatctggtccatcatctacttccactgaaagtgtgctctctaaaatctgctttggctccaatagtaacaattatatttccatgtttctttctggataccccagttcatttcactatattttctagtcaaatgaactagctttatttccctaataggccatattctttatttcctcccagaattgatacaaatacttgcctttgtcagaacacccttcccagtctacctcatcctacttgaatggctaattcctagccacgttgtccaatggaatatcctagtccaaatcattcacatataacaaatgagtaaaaagattttgcaagagattaagtgtgctgtccaaattcacagctacttagtgatcaaacaaagacaaaaacacaggcctcaattcacccatccaaagtactggtaggtgtacattatcccaccagtgaccctaatatatactactttctcctcccaggaaaggagtagaaaatagaagcaaaatatagatcaactactattacagaacattataggtaagactttaaaaatgctattcattgtctcactagtttctgaaaacttcagcttttctaagtggaagtgttggcagtgacattttactcatattttctaaattccaatcttagaaaaaagaaactgggaatgctaagggaattgtggggtgccactctctcatacatatacacacacatagaacagaggaagagagaaaggataaatttctaaaatttgtaataaattttagaaaaactagatcagatagatggtttaattaaaatcatctcagaactcaaattagaactcaaatcagaatctgttaactcttaaaatgttacagcaggtgataatggaaaagaaagtttttttcttttaaaatgtttcataaaaattaggactttgatcaactttttgagatgtatatagtactattccacctaaaggcagtaggtggatgagaatgttacaggcattttttgtgggcccaagtctgtcaattttcaacaattaaaatgatttttaaatatacattgtatttaatatgatttcctggtttacaccctataaaatggcctaattaaaatatttggcaaaactaatacaattatgtaaagtttaaaaaaaaaaaacaaaaaactcaatattaaaaaaaaggaaaaaaaaaaataaataaatagtttactggcctcaacccccaaagacaggaagtaagggccaaagaaaatagaaaacgtacacaacgcctcagcataatcactcggagacaagtacagtaaatgcatcagatgttcttgggagagtctggtttagtacaaatattaggattttagcctatgtgaataaaagggaggtgcaaatgccttgatggaatgaggcagcgatgctgaagaagtaactcttcacctgaggtgatgtttgtagttgatatagttgatataggagaaagagatggccagccgtacatacaccgtcaagctcagtggctcattcgtgtccgattcttggcaacctcatggtctgtagcccaccaggctcctctgtccatgggattatcctagcaagaatactggagtgggttgctattttctcctccaagagatcttcccgaccgagggactgaacctactgatccccatctcctacattggcaggcaggttcctaccactgagtcacctgggaagcctcagccagacactgctctggtgctaatggtgaggtgaggtctctggtttgcaagattaagaaacactgttgtttcagtgggctcatttctccaggaaaatgtttctggggttttcaagcaaatt

SEQ ID NO: 51045 - DNA, 2179 bp, Bovine  19866880719124
  misc_feature (1)..(1): n is a, c, g, or t
nattcatcatactaatttatgctccaccagcactatttcttagtatttagaacacagcctgagtttgaattcttgtcaattcactttctaaccaagtagtcttaacctcctaattctgttttatcatctgtagatggggatgaatataaagtctttgagatggagattcccttataaattaaatgacataagtaaaatgtatatattatgcttggcacataagcagctgttactgtattttaaagattttctccttgtctttggttgtctgaggtttgaatacgatatggctagatataaactctttggtatttatcctagctgtgtttcatgaactgcttggattcatggtttagtttctggcattagttgtggaaaattctcagtcattgttatgtcaattattttttttctgcccctttctctccttctcttctgatattcccatcatgtgtatgttatatcttttacaattgtctcacagtctttggatactacgttcctttttttctctttgcatttcagttttgggagatttctattggcatatctttcagttcacttgttccttgcttgtccatggacagtttacttatgagctcatcaaaggcattcttcatttctgttatagtacttttgatttccatcatttccttttgattctttcttagagtttccatttctctgcttatgatactcatatgatcttgcatgttgtccattttttttccaatagagcctttagcatatcaatcacagttattctaaattcctgatctgatcattctgaagtctctaccatacttgagtttgattttgatgcttacttttgtctcttcacattgtggtttttcttgccttttaggttgtaattttttgttgaaagttggacatgatgtgttgaataataggaactgagataggctttacgttgatctgcctaggaattaggctctactcttttgtacctgtaggtgtcagaggctttaatttcctcaagtattctggttttgtttcatgttgtttcccttcctgtggtctttgtgtttccctaaaaactcctttttacagcctgaacatcagttacttcacttgtaatctactgtcattagccaggagctttattaatacagtgtgtgtggtggtggtggtggtggggggaaacagtctttaatcctatgatcagttcttaatttttcagtgtacctgtatccatgggatgtgaccctaacaagtgcttcttagcttttgttttaccctcaagcaagatacgcaggctaaagagggctgaaattgggtaatttcccatctttcaagtcagttaaagctctggtaaattttttttcccttgctggtgaggcttttgttgtaaagaatgttctgactttgttttaaaatacttacctttctcctgggttcatttcaaaattgttacttttgtattgcaaaatggtttctttccccctcttctgttcaagcactataggatttttctctgattttcaccatgagatatagtggaaatcctagagttgaaacacacgaaagtgtggggctcccagttacattgagtctccagtagtttttaactctcaagatagtcaatactctcaactattcactgaagttctagttcaatgaagttatactttatgtgttactaccagctactgggtccaatggcttacattttaggtaaactgatctttattttctatatctgtctctctctccagttttgaggatgggactttgtcctgtgatttcattttctgatggagcgacgtcattgatttttcagtttgttcagccttttacttgttaagagggcagaagtgatggcagctctttacatgcatgagtggaaaccagatgtttcttctgccaaaatattttaaatttatgaacaagttacactcttctcaactagagagatctacaaatctaaagatttagaaatccaattgtccaaatgtgtttctatcacggcactcaagtttctcacattatcaaccatatcttcttatatgaaacaaataagaaataggcaaatggctgctccttttttgtaagtacaaatgttactgcagttcattcagacaatattcttttaagtaatttaactggtaattaatgatctgaaaaaggaaagaaaaaagttctcttaactcacaggggg

SEQ ID NO: 51046 - DNA, 1524 bp, Bovine  19866880776668
  misc_feature (1)..(1): n is a, c, g, or t
nctttgaacttgaacccctgccctgtaaattacctaaagtcttgagtggggaggactaaattttcccagtgtctctctatattgtaaaatgtgtgaacttggagcaaatatctctttcttctgggaagaccacttccaaatggctgcctcacttttgcaaggacaaacaaaagactcaattcttaaatggagcagttagaggtcccatgactcagtgctctgcataacgatacaaacatctaataggatggtatctttgtagattactattattacagggaaatatttcttttcaacgtatggatctaggctgctctctccctgaaaattagaactccttcttaggagtatagatgtgctcttattcaaatacttcttctatggaattgaagggcaggggaggccatgcccttcgcctcccactgatagtgtggtcttgaccaaaagtgccagagcctaccccaagttattgactctgctgaatatcactcagaatgtcagtccagaaggaatatttttactttttattttaaaaacttgcaaacataccccaaagtagacaaaagtgtgcctatccatattccctgttgcttagattttatagccactcacatttttccattttgcttcatccttttttctctagagtattttagagtagattacaatcatcatgatatttcacctctaaatatctcactgtgaatctccttggggaattctttttgaaaaaccaaaactttttaccatatgaaatttcaaacataccttgtagagagaatgatatgatgaatctccacatgtttatcattcaacttcagttatcagtcttttgccaggcttaaaaacatctttttgaatgattgctgagttggcacaaaagtaaagaaaaataattgcccataaattctggaaacttgaattgagacaaggaagtacattttgaagttagagtttgtgttggaacaaatcctagctcactggtgatccagagtttgggctttaaagggccacaagttcgaaggacaggggacaaagaaggggacaggaagtcagatcaaagacttttttttttgaaaggtgacatcttagctgagtgaatgagaaaataattcacctgccacagaaggaggtggtggacatatgattctggcttagctttggctctgtgtggaagggaaaaaagaaaacatgttttcttgagagttcctaatcatagccccgctatacttggattaggggccagaaattttagcaagcctaaaagattccaagctgaaatttagtatccactggaagaagcaagcaagcttctttagaggaatacacttgaaagccaaacttaaaacaaactttttttaaattttatatttggagtatagttgataaacagtgttatgtcagtttcaggtgcacagcaaagtgatttagttatatacatacatatacatatagaaagcttattttgggttactacagagtattggagcagtttcctatgctatacagtaagtccttgttggt

SEQ ID NO: 51047 - DNA, 2013 bp, Bovine  19866880914299
  misc_feature (1)..(1): n is a, c, g, or t
naaggttgtatagccagcagtagattgtgtatagtgctcccatagttaactatttatttatttctgagcatctgaggaagaacattcccatcgattatttctttttggattattcataaaatgattttgagtaataaaaacatagcccaaaaaatgaaagttggggaaaaaactaaagatcttatgattttagtggcatgagatatatattctctatttgtgtagggtatttgtgctgggtatcattgtttgggatgtaagtactatatgtatgtattgtacaggtcctcttcttttatagtaggatgaaataagactatagcaagagtacttacttcctattgcttctggaaggtaaagaatctgcctgcaatgtaggagacctgggttcgatccctgggtcgggaagatccccagaagaagggaatggctacctacttcagtattcttgcctggagaattccatggatggacgagcctggtgagctacagtccttggagttgcaaagaattagacatgactgagagactttgggcttccctggtggctcagatggtgaagaatctacctacaaagcaggagacctgggtttgatcccttccattgggaaaatcccctagagaaaggaatggttacctactacagtatgcttgcctggagaattccatgggtagaggagcctggtgggctgcagtccatggggttgaaaagagctggacatgactgagtgactaacactttcactttccctatgagaagttcagtctttaaatataaataacttagaaaatttggttaattttaataaagaattaagaatcttgctatggttacacagaagtctccaaacagaacactaatccttcacttctgaaacctgtacttcttcagatactattccttggcaaaaaatctgtgccatagtcaatagttttacaatagatctatcagatcataattgtacattctaagattcctattgactagtgatttttccctaagagaatgtctttctcccatcacccatggtagagtctatcttattatatcttgaactgcattaattcagttaattttgtatgtagcatatttgttaagttaaagaattctgtgggtggtttttctatcatgactgttttgcctcttagacttaaaagcctgagcctacctaaggaaattcacttttcaaaactccagacttaacatatgatgaaacttaaaagaaaaactcttggctgagtttgaatgctgagagccagctaagtggttttctctgtctggagaaaattggaaaaagggaattattaagcccagcaaatgtagttgctgatggaaatgctgacatactggtcttgcttggtgccactgttgtaagaagtcgatcagtattagatgcattgtaagagctgctgcttatgtgcaagttgtgtcttgtagactgtcacacataaataaaccccttcaaaaaatgttaagtgattttcataaaaaacatttattttgttctctgtcgtaagccaaattcttgttgtttatggcttcctgtacccaacagttcctgattgtctcaaaaagcaaaacatatcctgcatggattaagctgctgaaatgcctctcaggcattgtttatgagtctgctctctttattttcagagagaaagcgaatactttaatgtcttccatattccataaatctgtcccatgctgcaattcaaagctgtgtgtgtttttgttagaaggtacttctggttgtacttagggaagaaaagctgcttaagaatgttagtgaatatttgggtgggtggtggcagactcccctaaaaaggatttgtactggttaaaagggctcttgattttttcgctcaggaaagaagtcaccaaaggtgctgttagagttagtagtagtgtagcagctctttgattgctttgcaccagtcagtttcctgtttggctcatcctttgagaccagttttccctccaggcaggcttgctgatttaccactttgactgta

SEQ ID NO: 51048 - DNA, 662 bp, Bovine  19866880962790
  misc_feature (1)..(1): n is a, c, g, or t
natagatgtttatctcttgcccgtgtatagttaagttccaggtgggcaggtggctctgctccacagggtcaatcaggaacccaggctccttccatcatgtttctccaccatctccttgggttcttccctctgcctggcccacgctgggctgcagccacattgttgttctggctcacaggcaggtaatagaaaatataggttgggaggagctagctagggaaaggcacatctcacctcctctcagatgccactaagggactcagtcacaaggataagcctaattgcaaaggaggctgggaaatgtagtacagcaggccaaccacctgccctgcaaaggaggctgggaaatgtagtgcagcaggtcagccacctgccctctacctttctattactatggcagaaaaggacataggttttgttggaccattaacagtctatgccatagaggaccataagagctgaaaagttgtgcatgttatttctatttttctaatgcttactctcaaatttttaagaattatttttgggtgggtaacacatgaacaagggcttccctcgtagctcaatcagtaaagaatctgcctgcaatgcaggagacctaaatttgatccctgggttggggaagatcccctggaggaggaaatggcaacccacaccagtat

SEQ ID NO: 51049 - DNA, 4019 bp, Bovine  19866881035953
  misc_feature (1)..(1): n is a, c, g, or t
naatgaatgtaaatccacaccaacatacacaatgatgaagtttcaaaatatttgggatagcgaagagatcacaaaaactttcagagagaaaaattaagtttcatacaaaggctcaagaattagaagggtttccaacttctccatagcaatgctggaaatcagaaggagtacatgttttcacaattttcagggaaaattatatccagtatggaatcctaagtccagctaatattcaaatgtgaataaacatagttttagacgtgcaagttgttaaaaatgtttacttcatatgcagcctatctcaggaagctattacaggtcgtacttgatcaaaccaagggagtaaaccaagaaagagaaaaaccttggatccaagaaaagggactcaggtaaaggagaggtgaaagaaatgtccagggtggttgtgaaggagaccccatgatcctgaggcgtgtgcctcagaagtatgagatgtgagtttagatatggcatcggcagctctgggagaaagctcctcctgaggatgacattgactgaactcccagatgaatcattttacaagaatgttgacatacctgggagagagctgggtgggggtagggtgaggcgtggttatgttgtgataagtacagagaaaacaaagcagatagggaacaagataattacagtctagcacttagagtacacttcaggtctcaactgagaggaacattttctttttttttataaaaacattttcttttatattggagtatagctgattaacactgttgtgttagcttcaggtgtatcacagagtgattcagttatacctatacatgtatttattctttttcaaattcttttcccatttagattgttacataatattgagcagaatttcctgtactatacaccaggtccttgctggttatccactttaaatacatcagagtatacatgccaatcccaaactccctaactagaatagcctctgctcaccacaactagaggggaaaaaaagcctgcacaaagccacggagacccagcgcagccaaaaataagtaataaataaataaatgatttttaaaaaaagaagaaatagagcacgagggacttccctggtggtccagtagttaagactccacactcccaaagcagggggaccaggttccatctctgatcagggaactagatctcaaacactgcaactaagagtttgcatgatgcaagtaaagatcccacatgatgcaacaaagatcttgtgggcttcaactaagacccagcacagccaaataaataaataacatttttagaaaagaaatagagaatgagtcacagaaagcagagggatctaggtcttcactgctctttgtgataagaaatacctgacaactgacttctgcccgtgatgcagaactcctgccctagcctgagacagaaatcactacgaggaatctcaaagacacaaagaatccacttccgagagacctgatcctcagtcttccgaggtgggctggctattccagccattggctgaaatgctcactgtggcttgtcccatgcgcccacccaccaggcttttcttcccacaggagaaaagataggcctagaagtagctctgggctgcctttatttaggtaagtggagaagttaacaaataaaaaatactgttgtcaagatatttttttctagattcttttatttttcattttatttttaaaaatttttactgaaatacatttgatttacaatggtgtactaatttcaggtgtgtagcaaagtgattcagttatatatatattcatgtagttatatatatattcatgtagttatatatatatatattcatgtagttatatatatatatatattcatgtagttatatatatatatatatatatatatatgtatatgtatatgtatattcatgtacggatgtgagaactggaccataaagaagatagagtgccaaagaactgatgctttcaaactgtggtgctgaagactcttgagagtcccttggacagcaaggagatccaaccagtccatcctaaaggaagtcaaccctgaatattcattggaaggactgatagtgaagctgaagctcctgattcaaagagccgcctcactggaaaagaccctgatactcggaaaggttgagggcaggaggagaaggaggcaacagaggatgagatggttgaatggcatcactgaatcaatggacatgagtttgagcaaactctgggagatagtgaaggacagggaagcctagcatgctgcagtccatggggtcataaagagtcagatacaacttaacgactgaataacaacaaaagaaaaggcaattctataaagaatagagagagactcccacaaagtggactgcaagtgagagtatgagggggaacggaggtctagctgttttggtaagtttttgagccaatgggtgtaaagacattgttagaataggctactagaatacttagatcgctgggtttagaggacattcaggttgcatttaccttttggaaatttaatattatggccaagtatgtgttttaattatggttacctaattgtgaattaaagtaatgtacctttctggccagctgctctgggctaaaattcttagagctgggaattggcataataaatgtgaatatgaaagttagcaggtgatacatttgaaagtttaaaatgggcaccatgagtttagcttttaattttaccttaatttacttttggaactacgacattactttgttgattttgacttgttttctcattggtgaaatagggatggttaatgttaatctatgatacagagtaataaggataatagcattaacccaaataatgtacagctttgactagataattttgtaaaactgcttggtaattttgggacccttatcacttattaccaagttattagctttataaaagacagtagaaaaggatcaagacagaacctccaagagacagtgttttacactgaataaaatagtgacacaaagtagctcaattatcataatgaatgtagcgaatgccgttgtgttttgttttatatccctttagacttaccctttcagtgtgtgcctactgaatctccaattccagcacctgcatttctttgcctaaaagttttctttggatgtcagaaatagggaattaattccactccgcacacactcaatcattgattaataactgatggaaattgatgtaaatacttcacctcccctgcccatcagggggtagggatggtataaaatacttctgaggcaggtattctatactatttctgtgtactctgtggaattgtctcagttgacctaatttgcttgataatagaccctttattataaggcttctttcttttcattgtctcacttacttcttcatgtccctaccagcccttcctggggtcttctccaaaatgaattctttggactgaaaagcttgtctctgggggaactgaagacaataattaatagcaatgaaaagtctggatcctgtttctatacctccttagcagtaaatgtgagtttcttgtggtccaagacaaagaatatgtacatagccacttaactccaactcccattgaagttataaccctccttctcttctcctacctgtgcagtgatctggatggacaattcctttggggagaaacttcctttgtcagtatcttttggtgattttttttttttttttgctgttcaaattattccagttaggagattctagaatccttcttgcttgccagcattttaagaagtctaagtagaaggaaaagactgggaattccagcatttagtaagtagactctaatgcttaatcccccattttcaaaatgatactcatattccccagttcagagacgttctatctttttgctgtggtgagggaaggataggtggtgcccagatgaagttagaaaggggaatctgagagcctaattgtttcttagacatactttcaacttagcttattcaagcttccttttctactctcccttccagaaatacctagta

SEQ ID NO: 51050 - DNA, 2622 bp, Bovine  19866881156419
  misc_feature (1)..(1): n is a, c, g, or t
naaatgtttaaaatatttttttattattgtgtaatacacatgcagaaaagtacataaatcaaaggtatacatttgtcaacattttttaatctggtagttttttaaattgttaatgagcagatgatatagatcactgacaaccaacataccacacgaagattataaatcaggcccacaaactaggggttatggttatatttacagatttgctcccctagtatcttaatgatacccaagatccttgttatggggcatatatacaccctttagtgagagaaaggtgagtgagcaacgaatctgaagaagagtcagaaagatggaatagtacatagaaaagcttgaagtatgtacaaatctttgtccaagttgattggaattcaaggcttgaagcccataaacatggcagacatccctggattgatgagatgttttttaaaaatctgcaagacagatttgtttctgtcttcattagacaactatccatcttttaaactaaaactacacaatgtacaagaatctcagattattcttcatcatttcccttccagttaaatttttagtttatgctattttctcccttcctaaaaaattatccttaatgactgtgagatgtcttatatcctatcccttacctgcccatttctcaactgtacaggaagatttaaacacttgaagctctttaaaacaattctataaaatatacctacctctgctttgtacacttccatttgccttacgtacaccagggaccaagtctcaattaaccactatctgacccttgttcactttcttccctcccctcctcctgccaaagtttgcccttcctgccaaagttcagcacttcctagaaaagtctcacagcctgtttgatattgtacttcactttagtcaccaaaggaagaatttacaggtgcttggccccatctataagaccatgaccgaaatctgacctcctgttacaatacgtgaactcctgccctactgataaggctggcagatataagtaggatttttcaaataatcctttgggaatttataagcagcacagccataaaaggggggtgaatggaaggtcggtttcactaaaaataataaatattgccatgtttattcaaagtgtgccttgttatcctccaggccaaaagttcagataaacactattgtaaatgacaaatattagaactttttgttacttctgttatgatccttccgttggacaccaatagaactgttttcccttgtataagccccagctctgatattgtataacactgaccgagactaggatactggattcatttgcaggtcaaaaggagggtagttatatttcaaaataaaaaaacttgtatttagcattatattctactaatactaagaattaagtgctatagtattataagtattaagactaagtgttatagtctactgcagaaaaagaatgcctattgagaatacaatgagataatatagtaagcactaatgtaaatatgcaccaggttctatagtagtgcaaagagaaacagcatccactgtgcttaacctgaaacatcaggaaaatttgctagaggacttgagtagcaaataaatatgaatctgtaaaatagaatgggaatagtaattcaagcagaagcactagcatgaagacaggatgagctgcgtgaaacagcatggtatattcaatgaaccggaagcatttcagtatcagtaaaggaaggtgggaaccacaggaaaaacagcagactggacatggaaaacctactatgctttcatatgctgggtcttcttctatacctctacattttactccacagatgaccaattagagcattttacacagacatcattgatcagatttatatgatagattattaacacactacagtgagaagtgagtgaggggttaagatacaaggtagggagaacagttaggagacagttttcagtaatcttgatgagaatctaaactagagcaatcattttaggaaaggagaaggtgaagtaaaacgacacctaagaggtaacacttggaagatctgagatctgaatacgttattgaaataggaagggattaagcagttaacttagttttagattgtaaactatcaaagtcataaactgctaaaaagtccagtaacatacagattcagggtagtggtataaacagaagataaatacactaggttgatgaaagaatgaaaagtgaagaagtcgagacaagtatagaaatggaaaagaatgagaaagagaaggtttactttctcctcactcctcatttctctattcctaaatcttttcttcaagcctaactcttgaaagtcccttggactgcaaggagatcaaagcagtcaatcctaaaagaaattaacccaaaatattcattagaaggactgatgctgaagccgaaactccaaaattttgtccacctcatgtgaagaaccaactcactggaaaagaccttgatgctgggcaagattgaaggcaggaagagaaaggggcaacagaggatgagatggttgaatagtatcaccaactcaacggacatgattttgagcaaactctgggagatagtgaaagacagggaagcctggcatgctgcagttcatggggttacaaagagccaga

SEQ ID NO: 51051 - DNA, 1416 bp, Bovine  19866881159390
  misc_feature (1)..(1): n is a, c, g, or t
ngcccaaaaccatcccaggaggcatccgtaattgccaacactcaaaatgccagtggcaggagctattcctcctccatcccctgaccgctcattttccaccaaatcacttgacaagtcgcacgtaccctcctcctcggctctcgctgcagcgctccccacagccacctcaagccaccacggccgagggagggctgccttctgctctcacctcccctggcttccatctggtccccacacccctgagctgggctaagcagacagtggcatagaggcgggaagggacttcagggacacctttccaagggcaaagggaagggtcaagggagggatgacggaggccctggctccccgtcagaagaacccgtatccttctccatactcaccagccagagtggggggcaccgcggtggacagtgaccacgtgggagccggcagcagcccccagggcccctgtgctagaggtttccgccagagcaggcggggaggcagtgcgccatctccccatctcccctggggacaaaagcagacccactggatctcacctcgggggtgaggctccgaggttgagcccacagaaggtctggtgcctggggggctgctcgacccttggccagtgggggtaggggctgggggttggccacttgcagaagtcctgcctgggacagctgggatggaagccaggggatggcagaatgcttgttccagtcccagtaacaccaagagtcggttatatcagtgaataaatatggggggtggggtacgggggtcagcccatgggcagagggccttgggcgtgggtgtacagggagcagggtgggctctgagccgcctggtggaaaggtgggggtgtcagtgcgcgtgcccagggccaccagggaggatgctgggaggacagggcctggggctcctctgccccaaggtcagaagagagaaaaagtagcagcaacaggtaatttcaaacgtcccagatggcaaggggtgggcctccaggctggtgacaacccatccccgctctgccaagggtgactggcattctattacccacaatgctgttccccgcgggcacgggtggccacgccgggaggggcactcgcctgtctgagccggggcagcgggggcgggtgctgaagagagggccacagggggaacctctttttctccctccccatggcaatcacctgacctcaaactaagagtccaaaagaaaagggaggggagagaccaggtcagaacatcacaagcaaaggctgcagcacagccgacggttaacactgtgacgggcatgcggggccccggggggccgggccctttcccgggggactaagctgttgggaaccagagagactggagagaggcagggtccgggggagggccccaccccagaggctggcccccttttgacttggggcaggtttg

SEQ ID NO: 51052 - DNA, 2694 bp, Bovine  19866881170979
  misc_feature (1)..(1): n is a, c, g, or t
nttctatatgccaatctctgggtattttcctatgtaaaacacagccttttataggggttctacttttctgtgctgtgtctggatagtgcccttagacagaaaacaagagcaaatgtcaaggttaccttgtgcacttcctcctttgaaggatcatagtcgtgtgctgtctgctgtctaatgcatgaaaaaggttgcttcatacagttaatccagttttagagctgtttatggcaaaagggtgactttgatagctgttacaccatgatgctggaactggaagtcttatttaattaactaaaaatagcatagccttaatttctagccatcaaaagtcaaccaagaggtggaattcccaggcagtccagtggtcaggactccacgcttccactgcagggaacccaggtgcaatacctggttggagaactaagatcctgtggttgcgtggtacattaaaaaaaaaaatgtccacaaaaggaaaccaattagcagtagaaaaataaaaaggtgaggcagaagtattagtacacttatgtaatttttcactattttaatttttctagaaacagaagtttccagaagtcatatcattttagttcattttcatttctcaccgatggcacagtgagatgtgcactgatggcacacacttttcatcccttccttctttgctaaccaaagcctgatttcatgtttaattccaagtagatgattcatgataaatgaactatgtcaggaatgatgctcctctttcactctgccagatactcaatcccccagcctccctgagagctggaggtgatcatacacctatacacctatatatatatacatattttgcatgtaatgaataatttatttatttatgaaactagattagaatctggactgtgataaatctactaattacacacgaaaataagactcattcacttcttcaatattatacaactatattttgatcaacgagacatacaggaaagtttgttaggggtttactgaaaagattttaattttttaaataaaaaagactaggtgatcttggcaccttttttgtccattgaatgtgagtcctttctgactataatatagatgagaaggaaaattctatattcctaagtgtgacagaggagagggaacaaaagagcctgggtccttgatgacatcactgaacaactaaattagtacagcaacccacggtctctgagaaaatcaaaacctatttaactactctgcctaaggttttctgttttgacctgtcatagaaagcatttctgactgataaatgcatactccatttattctttagactaagaagagtttgcacataagatgaaaaaataattttaaattacaagataaaaagcaaatggttgagaactgcattcttttgaagtctatgaactaatcaggtttcctttgctgtgtatgaaatgcatgtctgccttgtattccccctagacttccatgcagccaggggtctttttcctatatgtgggcctatgcacttttgggtgttcaaattagcttgctgacagagtcttacttttagacctacaaattatttctgtcacttaggtattttttgactccattaggaccaaaaccccacagacctaaagcttttttcctgcagtagtgagcaggcaggtaaaacaaacaaacaaagagatggtttcctgtcttacgttcacattctctgacatccaggttgaactgctgtaatgctcccaaggtgagctgccttacttcagcttccagcaaaagttgcatcaaagatgtggctaaatgcttgcaagctgacatacatgctgtctgggccacctttccctgaaatacaagaaagcaaatcataaggttgatggattaaaatgaaattccaacaaaaattaaaatcatttatttttcaattaggaatttctttaaaggttttctccatcatgataacccttcctttcaaataattttgaaattaatagcacctgatggcaaacatcttaaatattagctccatcaccatttagttatgtcactataatactcagctaaaattcataaatcccagctcttcattcacaaaatgttttttcccctaaatcaacaatagataaacaatactcaaaatcttaattaaactgagaaggaatgtttccagagagaataaatttcagcaatcccttcaaaactactgtagttcttaaagagcaaatgaaaacaatttcctaacttatctagaaaccaaagtgtttactactttatgatttaacacatataaaatgcttgaggctggtgcactgggacgacccagagggagggtatgaggagggaggagggaggagggctcaggatggggaacacagatatacctgtggcggattcatttcgatatttggcaaaactaatacaatattgtaaagtttaaaaataaaataaaattaaaaaaataaaaaataaaaaaataaatgaaaagaatggtttaaaacaaaagagttttctgaaaaaattaataaaagggtaaattttctcagaaaataagcactgaagtttataagcacatactctaagctaatttttaaaacactgatatcaaaattagtaatttgctatttctttgaaagattcatttttacactagtgaattatattttagtcccaggtctgagttatacagtatggaggacatatccatttcttccc

SEQ ID NO: 51053 - DNA, 1672 bp, Bovine  19866881178520
  misc_feature (1)..(1): n is a, c, g, or t
nggcggggctgaggttactggagccttgcaagcatggccaggtggtcaggtagggccgtgtggggcttaaatgcagtgaaaccactgagagacttacgtgtgttgattccactctggctgctgtggattagaagggtcaagagtgcaaattgggagcccagttaggaggtgggcagttgtccagggagaagtgatgggtgtttgagctaaatggtgggagcgaggagagagaaatagctgtacttaagacacccagcagacagagctgggtgtcgggtagcagaggctcctgtctaggtagacccctaagattctggcttgaagagctgagctgggaatgggagaagcagacaggatgtgggtgaggaagatcaagatgaccctcatttgctgtgtgtgcaggtggagtgcctgaagctcatggagatagaggcatcctgcagggggtcagctatgtgggctggagtggaggacacaggcattgttccaatccctccggtgtctcatctctggccttgcagaagctaggctggtgttggcctggaagccccctcctactcaaggagacagttatcagctgtgttccccgaagacactgaaggtcttgggacgcgggtctcccacccctccccagttcttggtgccggtcagcatttatctccactgtgggggtttgccagacttccctccttcccctcctgcgctctcagctgcccatggcaaatccagcctcctgggagcagagcttggagagaggtaggtcccctgctctctcagcccaacctgctgtccacgggtcctgggctctggcttctcccaggccccctgcggctggccccatggggaattcttatacaaaatcccccatcctatttgtgctcccctccaccaaaatggagcccctgtttggttaatttctattttgtggtttatctggaggctgttaaaacaaaccctgggggaccctcagcagtgactgttccatatctcattatctttcccaaacccgattattagctcagatttttctgatcgctagctgctgttcgtgatgagttgtgtgccattaatgccagctggttcccttaaacaggacccaccatgccagggaaagtgagctggcattcagagccatcagccacttggctttttaattttaatgggctctaccaaatgttccaggccaaagggtccccgaggaaccagaacagacgggctcccaacccctagtctgcagcccaccctggttccttcccagactgtggccatcctgattgctgggacaataaggtctgggtcgaggcctcacctgtattcatgccttcttgccaccaggcccatcctcgatgagtggtcagagtgacttcatgggttcctagcgagcttgcaactacatataccaaagctctctggtcccagccccctccctgggggagacaggctgggtcaccattctgagctgtgctaatcctagcctctgggaagcaccgtcagctggtcagccaagtgtggggaagggtttgagggagcaggcaagtctgagtgtttgctccagccagtggcccctattccttcctgccctcccccaccgccagcccggcctgtccccagaaggctgcctcgggaagggctccagctccctgctggcttctcctgctccccattcctccag

SEQ ID NO: 51054 - DNA, 1636 bp, Bovine  19866881180849
  misc_feature (1)..(1): n is a, c, g, or t
ncttctctctctcccgatccgtcggctggtgaccacaccatctgcgtctcccacctcagagcctttgcccgtgctggtccctgtgccccgaactccctccttcctctgctcagtccccgcctgtcctgtaaggcccacctctgcactccacctcccgtgtcactgacactgggagtcatttaacctttgtctgcctcggcttccttgtctgtaaaaagggatgataacatctgacagcacccagggctgctgtgagaacgtacgcatagtgcctggcatgagcctggcacataagaggcctcagtgaaagaatctaggtaggagtgacgtcacctctcccagcagaaagtcgctccctcgcacatcactcctctcgtccccagcactcactaccctgtgagtctgtgagcctggcgccccggccagactgagggggagggactgcaccttccttaccttcggatgtctgggcacataatacaggctcagcaaagcagtggctgaggaataaatgcaagaaaccaacaaacaagtggatggatggagagaccagcaacagctggaggaggagcatcctggagaaggggggattgggctggggaggactccggtgggaagacaagcatgagcacagacaccgggagacaaaagaggagcctgtggcctagatgaagggtgtgtagaagcctctgctcccccaaactgaggccacagccaggcctcccctgggggcctcctggcctgacaggaccacggacagcctgctctctggtacacccggtggctcagcaggccaccctgcacccgcagccctggctctggcctccaccttctgggttgttggggagaggcagagccttgggaaggcctccagggcatcagggtggatgccacagcaatcaaatcaagccatggcctggtgcaaatggcccagaccaggctgcaactgtaagacctgggaagagagcaagtgccagcccaccagccgtgggcagcccgagaccccacaccaggagccagagtgctgccaggcaaacccagcttgggctctcgggggcctggcttccatttgaagcctccagctggtggtcagagtccaattcttgtcctctctgtctgctcaaggagaggcagggagacgcacggcagcttggacgcacttagcgggcagggcagtgcaggtgggtaggctgaggggatgccagcccaccctgggccccgcaaccctgctacacagagggaactcaccaaggccaggtctccccactctcaaacagcaagtgactattttggtgactcagaaatggtcacccccaagccctccaaaataccaggggatatgttcttacagaatgccagtctagaaggaggacacaggcagacataagcgatgagtaagaaggaggaaaggggcaagtggagataccaggccaagtgctgagcgcatcacatgaaacatcttactccaatccccactgccagccttagagacagggcatgttgctcttgaaaggattcagggaagttcaggcagattcagagaggtgaagtaactttgctcaaagatgtcctaggtaaccgctaggcctcaaatccacagtctgctaattccaaagctttgctcttggccacggtg

SEQ ID NO: 51055 - DNA, 1698 bp, Bovine  19866881192399
  misc_feature (1)..(1): n is a, c, g, or t
ngagaaatcatgaaaatctgcaaagtgaatatcggggcttcagccttgctcctctagttggcttccagaatgcagaggtgagaagatactgtatttacaaaataggaagaggatcctgctgaaaggaataaagaaaagaaacaaccaaatagctctcagaaattaaaatttgtactagctgaagttaaaaatctgatagacacgttgaaaataaactgaaggaaatttcctgtaaatccagacagaaggaaaaagtgaaagaataaaagagaagaaaaggataagaaaatctgagtatcaatctaagatgttgaatatttgactaataggaattccagaatgagaagaaattatcaaagaaatagtataagaaaaattgccagaactgagagacaggagtcttcagattgaaagaggtcaccagaaacccaaaataatgaattttaaaagacatagcattgtggaatttcagaaataaaccatatacatagagaggagatcctaaacattcccaaagagagaaaacaggtcacttgcaaagaatcaggaataaaacagcactggatttttcaaaagctagactagaagccagaagagcaatgtcttcaaaattctaaaggaaaatgttgtcaacctaaaaattggaattttctcctcagccaaactgtcagttaaagctgagtacagaattacaattacaaattacatttttttcagatataaaaggactccaaattttctttccacttaccctttttcagggagctaccagaagaggtcttccactgaaatgaaggtgtacaccaagaggagctgagggaactgtgccccagaattgaaaatttcaggggaaaatatggaagtgaaaagggcttcccttgtagctcagctggtacataatctgcctgccgtgcaggagacctgggttcaattcctgggttgggagatcccctggagaaggaaatggcaagcactccaatattcaggttcctctggcctgggaaatcccatgagactggctggctacagtccatggggtcacagagttacatacaactgagcgagtaaaccaccaccaccattaaaaatatcaaaaagctgctagaagatacagtaagaattagagatggtacaaagaaaactctgtcagggagaaaaatgaggtaattattaaatccagataaaacataaagtcaaaaaggagaggaaacataatcatatacaacaaagttgtagtattgctcatataattgtcataacgtgaatattgaatatccatagaccccaaaactatgataactattttgggagggtgatgagggtaggggagagaaatgtgtttttggaggtaaataataagagagatggatcctcaactaccacacaaaagaactagttgagaaatagcagtacagatacgcttagtttgaaatacagatttctatctgaagaaacagctaacagcatttgcttctggggaagagaaatgggaactggggagagatggggcaatacactatttttcctcacaagtgttttcgtgctatttgactttttgaactttgaaaaaaaaaaactgtgagattaatttttaatagcttttaaaataaagcttatgaacaaaaagaaaaacttcagcacattaaccatctgtctctacaatcactagagctgccctatactacatctccctacctt

SEQ ID NO: 51056 - DNA, 663 bp, Bovine  19866881201417
  misc_feature (1)..(1): n is a, c, g, or t
naactttctttgcccctgttagagtacatctcctagtgctcacgtcactctgcatctgttatttactagactgagtttctcaaagtagaagtgtctgcttcatcctttcatgtgcctagaagagtagctgagactttgttggtactcggtttgtgtttgttaaagtgactgctgctttccctttcctgtgtttgcccagatttctgtgtcaggaagcatgggaggcagacaggtggtctgtgaatgagagtggcccagcaccaaggacaaggagttggggggaccttgggcaataaacacaatgagtccttagtcaagtccgtgctttttggtggactttctacagttgttctcttcatctgccctcagctattgataggagctcttgtgtttccatatccaaatgagaaaaacagatttggtgacttacctggagtcacactgtcagttgggggacctacagcctgagggtcttttattgtgttaaactgccttttaaaaggcacctgggcattggatgtttatgaaaaatactttatagtgatatgattggtttcatcctgttagaggctagaagtcgaccaaaaaaaaaaaccctggcttagtgttctatatgtttgaaaaatgaaagtgaaagtgttagttgctcagttgtgtctgact

SEQ ID NO: 51057 - DNA, 1279 bp, Bovine  19866881204882
  misc_feature (1)..(1): n is a, c, g, or t
nctcggccagatccgagcgcggtggcccaaatttcacctcgcccctcccaggcaaggcccagcaacctctgtcacaaggtgcccccagccgcctgcgcctgcttgcggtgcccttaaagcaacctgcagcaggggaggctacgtgtgattttagaatgagccgtttctagtcctcgggattccaaggggcgataaggaggagcgctggccaccgtccgccctctctttttgtccaggtttgtggagcacggcgaggacaggctttggacgcccctatcgccgcatgttcaagttgtccaaaccaactcccaatgaccctccctttgggcctggtagcgcgcacggtgcggtgggtcagcaaaagggcagacccggaggaggcctgtgcaggccctggatctggggtcgcagctgtataggcagggagcttcgggattctcccgcatggtgtgcgaatacgggtgcggattctggtggggacgtcaccggggccccaagaactccttactccgagggggtgcacgcgagaagaggatcagagcacggttgcggagctcttaccttgcgcttgttccggtggatatcgccgatggagttggacaccgtgttcgggcccagcagcatgcgtgtgctacgtggccactcggtgctcacgaggtggtgctcgcccatgaggatcttgcgtacattctctgcgcccgtcacacggattagcggccgcccgagcaagtgcgtcttgaacacgttgccatacttctccctccgcgacgactggaagccagaaccctacaggggccacgcaagaactttctcagggcccacagcgctagatgggacgtccaggaggcccagcctcgagggccgcgggggaggggcggaggacccccacctcgggcaccagttccctgccctcccctatcccactcatacacatacgcacgcacgcacgtaggttttatttttcatagcatgcacgagaactgggaagtggggcctagaggataataaataatgcaagggggcgagaggcccagggcaccccgcgggaggctttttagtaatgacttgcgggagggaaaaggtatcacggaccggaccgcgagaccctaaactagagcctccgcctcccccctccctcgcctcgcgctcgggagactctcggaataaatatttccaggctcgcggccacgggctggcgagaccccgcggggtggccgcaggccaaagattatttatagcggcgagcggtcggtgccccgaggcaatcactacagatggg

SEQ ID NO: 51058 - DNA, 891 bp, Bovine  19866881210079
  misc_feature (1)..(1): n is a, c, g, or t
ncagtgtgtaaatcagttgaaccctctccagttcgtcccgggatgtcgtttcagttctcagataacttgaattcgagtgcaatgtgggtgtttggggtccaacgaatagatttctcctgagaacttgctcccctggccgctaggaccctcgggatcttccatcgtccgtctcctgggacgcagtctgaagccgcggccttgttcctgaggtttctcgttttctgggtggtaagggggacagcttcggaaagcagacgcgcagttattttcagaagaggccaggccagggagagcgctggaggagctggcggagtggtcacccagacgtctcaagctgcagttctccgggattggaagcaggaccttggcccagctacgggcatcgcgaccggcccgcagggccatctgctttcttcgtcttctctgattgtggagctcaggtgcaggcggtccaggacaggccggggccttgaagacactgtcttacgttggaggtggccgaacagtccacaaccaacgcctaagaccctccaagaagacacacagaccatccggggaacgtagcggccacctagcctcctccgaccctcaccttccactcgcgaacgcggagcagcggactactctactccagccagtttccacttcgtgcactaattcgtcggggatgagagggcagttgggaaggagaacaaatactcagcaaacttttccaccggggccttccaatatccaggcctaagaggacactaggcggtgatggggaggctgggacccgcaccctgccagtgcactgcgagaagccgacctgcttcctcgctgctgcccggcttagtcagagcggcctggccgcggcccgggtgcgcggattcaggcagtgcgtcccggcgc

SEQ ID NO: 51059 - DNA, 1168 bp, Bovine  19866881233256
  misc_feature (1)..(1): n is a, c, g, or t
nagcctcactggccacggccgccatcaggacggaaatccttgactctctggacagacgcaaatccctcctgggagctgtttgttgtttttagctagttcgggggctcatcttctgcccagcccagagatcattgacactccaggaatgtggcttcccctggccccatccccacccactggcccctagggcctccctcctcccactcaggccacggttaggaggagagtcagagtgccagcggaggaaagcagtgatgagtgacagtttcccaaggcgctggggagcccaacctcattttcaggatggagcttccctcccgccatctcacccatcccactgcccttgattagctccccaaacaggaaagactcagagttccctgaaaggcctcatgctccaggaccttgcttccctcagcatcaggtgtgtctcttaggcaatagcccaagtgtttgcgtttcactccgaggaagctgccggcagcctgtccaaggtcagagcctggcttcttctcgacaaggacagctcctcaaccggagctagaatctggagaccccaccttgctccagttccctgggccttgcagaggggagaagagaaggaaggagaggcaccagacaccccttgaagacccccacacaaatccagcggggaaatgaggaaagggcgctgccatcagcccccggccgcccgggctggctctcagcctcttcacgtgtgtgcacgcagagggacggacagtacagcagggccctcactctcttccagaggctagttgcaggaagacactggagctgtcagtgagccggcagctgtaatgctgaagacagctggagccactagaggctttaagtagggaaatggatattcagccgtcaacagagcagagggtagtgtgaacaggcaagactgctggggagactggggaagagacctctgtggcagtcaaggtgagggaagatggaccctggaccaagtgatgggatggggatggagagaagtgaggaggttcaggactgcttagctcctgctgattcacgtggaaaggatggcagaggacagtccaagatggccctggattcctggctttgtcagttgaggacatagatggtggtgccatttctcagagctaagggcagagaaggatgaacatacttgcagagacaa

SEQ ID NO: 51060 - DNA, 815 bp, Bovine  19866881243316
  misc_feature (1)..(1): n is a, c, g, or t
ncctctgaccccactgggaaagtaagtgtccgtgcacggcttgtgaggggcaaggagctcgagggtgctggcatccacaccacatcctctgctttctgcacaggctctgggtgcctgaccccccccccccccacatccttacacctgttcaggagactgaagggaccctctcccaggccttcctgcagctgatgatgaagaacccaggttcctgggagaaatattcagcccccggcccctcatcagaggggagttagcctcaacttcccacctgaccctaacctcctatccagccctattctctttcctgacttcctgagagggtggccaatagtgacagctccttcacgtggtccaaacagcagggacccccaactcttctgcagccctgggctgcccttgtcttgaggctgccggccccttgccattctggagaaagactccagggacccacgtgttacaagcattccttgagccttctctgagagccaggagcctgcatcacagcgaccatcaggatgcagagatgccactgagctatacctcgacagccgccactgcccggggatcctgagggaaccccccgggccaggccccaggcagaccccttatggggaccacagacactcagcagaagcctttcccactacaaagttgacctcttgtcgctaagaaagactctcctccagagccaggagatgctttaagggcccaaaaaagaaagtcagtcccggaacctctgttctcactgggcacgaggaacctcaggcagctcagcaggtcccagcagtttgttctggtccttccagcgcctg

SEQ ID NO: 51061 - DNA, 1699 bp, Bovine  19866881263626
  misc_feature (1)..(1): n is a, c, g, or t
nacgctagaaagagtcaaaggaaacttagaaataagaacactgtaacagaaacgaagattgccgttgatggccttatcaatagaccagacatgcccaaagaaagaatcagtaatcttgaagatatgtgaatagagatctccacaacagaaatgcaaaagaataaaggaatgagaaatacggaagagaatagccaagaagtatgggccagttacacaagatgtaaggcagacacagtaagaataccggaagaagaaagcgagaaaggaaaagagggaatgtttgaaataataatggctaagaattttggaaaattaatgacagatatcaagctacagatctaggaagctcatagaacacctaacaagattaattccaaaaatctatacctaggcatatgatattcaaacttcagaaaattaagacaaggagaaaatttttgaaagaaggcagagggaagaaaaaaaaaaattctatactctatacactggactcctcttcagaaaccatggaagcaagaaaaaacttgggtgtaacattttaaacattcagagaaaaaaaaacaaaacaactttcagcatatccaggaaaatcataaattaaaagtgaaggaaaaataaagattttcacagaaaaattaaaactgagggaacttatttccaacaaacttgctttataagtaaaatgaaaagtttttgaaagagaaaaaattttgtaggtttgtacaaccactatggagaacagtgtggagattccttaaaaaactggaaatagaactgccgtacattttaaaagaaacagcattaaataaagaataaataagataaaatgttttatttcttatttttaattcattaaacagataacgggttttttttccaattataatatcaacaatgtgtccgtgattgtagcgtataaagtgaagtgaaagtcacttagtcatgttcgactctttggaccccatgaactatacaatccatggaattctccaggccagaatactggaatgggtagctgtacacttctccagggcatctttctgacccagggattgaacccaggtctcccacattgcaggcaaattgtttaccagctgagctactagggaagccccttgtagcatatgggcaagtgaaatgagtaacagcagtgttgcaaggatgggggaagggattagaattctatgttacaaggtcttgcactaaacatgaagcagcatagtgttatttgaaagtgacttggattatctgtaattgtatattgcaaacacaaagacaatcactcaaaaagttaaaaaggaggtatagctgacttgctaatagaataaagaaaaccagatcatataaaacactcagtaaaaatcagagaaggcagaaaaagaggaaaagtcaaaaaacaaagaaaaaatacaatgaacagaaagcatctacaaatatagtagatattcatgtaaatatataaatgatcagttttcaacgttaatgatataaatatatcaatcaaaacacaaaaactttcagaatagtacaaaaacaagaaccaactattgtttataagaaatccactttaaatataaagacacagattgattcaaaggaaagagatggaaaagggtacatcatgttaatactaatcaaaagaaaaaatagaaattttatattaacttcagacaaagcaaacttcagagcaaggaaaatt

SEQ ID NO: 51062 - DNA, 964 bp, Bovine  19866881327298
  misc_feature (1)..(1): n is a, c, g, or t
ntcggcagattggctataacaaggcaggggccgacgccccctgtgaattattttatttcctaaattctcggccaaaagcgtagaccaccgctgcagttaaccctttaagtgtgttggcacaggagaggctctggggatttcttcacagcggtgggggcggggtatgtaggtctcactggttgatatgaaccccaccttgctgcacgaaccccaaagagatgagtttgattcgggacttgggaagaccactggggagaggaagctcgcgtacccctcccgccccagctctgctgtcaattggctccgggcggggcggggctgcgctgggtgtctgtgtgtgcacgcgcggattgcacgcgtctgttaatttcaagccaagctttcgcacttctaaacccacaggtctctgccttcacctcccgcctcagctttcctgggcctggactgtctgtttcagtacagccatccttctaattctcatcagcatctgccagacaaacccgcgtgcacacgcgcacgcaacacacctcccgcggttaacccagaggacccccatcccaaagaaaaacctgctgtttaacacattgcaaaagcggttgtctagcgcttgaggaggttaattccagattaatttccccattacctacctgggtctggtccccgacaggcccacccccattatcgccgtcagtgtggtcgtgcggcgtctaacaacaaacacaaacgctctcaatggatctcacacacctctcccaagttcctctcccctgctaaactgtccccacctagtaagtaaatagacccttttctccgaaagtcgagaaacctcgggtctcaggcttctcattttccttgggttacctccttcttcccccaccacaaaacacacacactttctcgaaccgggaccagggcagtagtaccggctggccagtacgggacgcggcgggaacagagcccgggt

SEQ ID NO: 51063 - DNA, 840 bp, Bovine  19866881331062
  misc_feature (1)..(1): n is a, c, g, or t
ntttgagaaactctttaacgtcataattaatggaacttactcatatttattctgccctggttattgtgagcacttatcccagccatccagtagtaagtttgttactgtttccatttattttcctgatttatactagactgaatttttattggtcctttttgtttcttaagtagtttggaaggggagcatcttgatcctctctagttaccattcacctgtaatgtgttatagagagatttcattgtatttgccttatcaatatcaataactgaataggaaataggacctccccaatcctactcatagaggaagagatttttagcacaccatcttaccctgttttataccatttcattcatatacacttgcccagattttgtatatagtctggaatctcaccagctttttgaacccttccttaacacctatattaaacttcacaagtatttaggctgcatgtgtgtgtgtgtgcgtgagttctctatgcttggctagagtacttttttgaataatattaagagtgtgtgggcaatactttctgagtccttgcatatctgaaatgattttttttccgtcttatacatgaacaatagttggcctgattctctttttctttataggtaaacctcccccattccctttgggatcttttggtattttttctctttatctttggagtgcagaaatatacttaggattaaaaaaatcttctccatatattttataaaattatacaagtaatacatgaatatgttctttggaattcaaaatatcactaagaattttttaaagaatatttttaaaggtatacaagtaatacatgaaatatggttctctcaa

SEQ ID NO: 51064 - DNA, 1043 bp, Bovine  19866881372582
  misc_feature (1)..(1): n is a, c, g, or t
ncctcttttctttcccacagagtttgccagatccggcccggtgcctgggttccaggaggacacgctgcagttggccttcatcgacttgagacaagtaagtctttgtgtttttgttttttgtttttcttttaagatgtgtgactgaagaccatcaggtcttaaggaaaaggagaggggaggggcattggcattggcgattcacactggagacctaagggcttttccctgtgtttgaggccacctcttttatttagctatctgggatccttagctatggtggagttaaaggttttgtggatggaaggaaagggaggaggtggaaggagggccccagaatgtagtgggactcaagtgaccctcaagtgatgtgacccattgtgctatagttggcttttgcagacacagcagaaaagataactcagcaaactgatgctaagcaggtgcactgatgcagactgcctgcttagagaacttctgtttgcagataatgagggcagtaacagttaataaaaatgaaatattttacattctggattgttgatttggtttgttgacttttttttctgttcccttaagtcttctcatccccacctttgtagaatgtggtcagccatgagtgactgagtggtcattgtagatgactagtaaaggccctgaacagtcatgataacctgacaggtaaccctactgaagtagtgtgatgaaagcgggtacttaggtatacctgaggtttgcaagcccatcagacagagtcattctgtagagctgttgcttgcagattgaaaagggtgggtcggtgggtcttggtggatttggtacagaggagcagtatgggtgggggccgacagagggagagggttaactgggctctgtcatctcttcactctgaagatggatggggttggatagaaagtgtgaatgaagtaagaatcaatgactgatgcttctctcctattaaaacaatctttttttttttgtctgtttttaaaagggtgctggctttgtttctcctgccataatgatgcagtgcctctgttttcaga

SEQ ID NO: 51065 - DNA, 1201 bp, Bovine  19866881375656
  misc_feature (1)..(1): n is a, c, g, or t
nggcagccgcttccattcctcccagtctgagtcactggcccggggagtgggttccctctccggctcttccagcttctgaggctgcccatctttctctgcatccatccagttgtgaaggggcagttatctggctgagtgggtcagcagagggctctgggggcctggggatctactcccctaccagggtgagatgtggggaggggggcctcggggtgtgagggagacatttgcagaaacaatcacagggaatttgagccttgacaagccccctggtggttaccccagcccccactgtggaatccacttttattccagggagaggaagaaccagggatgaggggtcttgagccaactgcattgctgggaaagccagtagaggtagggggagggtttccaagcatgtcatccttcaaggccggagcccatcctgctctggcgtctgtgcctgaagttcccaggtctcccgcgccctgccctcccagcaccaaccccatggggcgttccctacctgctgctctctctgctgtgctctttggagccgggctggttcccagtgacctttgtccagcattcttggctcacttgtgggaattcccagggaagccccagagggaaacaaagcagtcctggctcccgctgcgactgcggtcaggccatgggctctggggccacggggacaccccttcccctcctcacccagagctgctccgccggcgccttccccagtgcccgagtgctgaccctggcccgcccccatagccccggccttcctctgccctggccagcacctcccggcctcctcctgggctttgtggtgggcggtggtttctgggctgccccagctttgggaagcgcccgcgttgttaaccctgggcacggtcccagggatgaggccctggagtttcccggcgcctgggaggccccgatgcctgtggaacggctgagcaggaggcaagagcgtggtcttcatgaccacggaagcaaagccccttgagcttggagtgcccgcaacctgcctttgctttgcttctcgtttgggtggtttttccccctcaggggccctctaaggagaatcatgggactgccaggaggaaagggatcccagagcatccagttagactcctggatgggtcaagataagggcccggttggggctgccgttctttcagaagccccacctcaacgagcctgcagattcagg

SEQ ID NO: 51066 - DNA, 1388 bp, Bovine  19866881438368
  misc_feature (1)..(1): n is a, c, g, or t
ntggtagacgtcattatggtattacctttgtgaaggtgggtgggggtgttgacttggagagggcatgaggaaccctctggaataatggaaatgctcaaagttttgatctgactggtagttacacagtataaacgtgtgtcaaaatccattaggtcatacactttggatttatgtattttgctgtatgtatggtatatcctttttttaaaaaaaatcaataataaatagacaacagtgagagaaggcagcctatgtccaggtcagatgaggaacggtcatcagggatgctcatgatgagggaagaaacccagggaagccaccctgttccactttgaccaagggacaaagttggctaaggatgggagtgcagagagacctccacagaagtccctggtccagaggcaggatgcagctccagggcgggttgccccatggggcgtcttctgagcaggccgacagtggtcgcataggatgggaaaggaacagccacctcccgcactaaaacagcaggactaaccccagcccagacaagccaattgggctgtcaggaggccaggagaacttcttacttgggacagcccgactgctgtaaagtactgcctcttccctttcaaatatatgtctatcaatttctgaattccagagtccttccccagaatctctttgctttcaaagtagagacaactttgagttggtgttttttccaggtgtaatccactctgtttagaaaaaatgtcagaaaaatcgaaagcactcacaaaaatgttgtaatcacctgtaaacataccacagagataaccactgcaaaagttattattttccttctagacttaatacatttgcttttcatgttggttgattgctctaacttgcttaagttcaacagaaagtgagcaggtcagtatttgaggccagagtttagtcagacccttgctaactagtctctgcaactgccccccaaatcctcctggtgatacgacaagctgcccgctccaagcctgcttcctgccagcctcagccttggccccacaataagtgctctactttccaccctgaatggtgaatgaccctgtgttctcattatgttcccactccagggattcagttcctctaacaacctggccagattccatctcattccacacagtcatcaaagggaggcctcttgccacaggattaagttccaaagagccctgatcttggcgctcattgagaaagaaccaaatccaaagcttccggagataggcctgctaatgcaggactgggacaagctagcatgtgcttgtctgcctctgggccttgctaagcctcagcttggcctcctagctcagagactgagggatagcgctcccagcgcctctgtgggacaggaaaggcctcgggccttg

SEQ ID NO: 51067 - DNA, 1277 bp, Bovine  19866881453379
  misc_feature (1)..(1): n is a, c, g, or t
ntgttgaagtaataagaataatttaccgacgaggagctactgtctttctaggtcggcttccctcatgactctcactgtaggaagtgaagctcttcctattttgggtcacagggactaccggtgacgctccctttccctatatttggtcctaccttcctcagggctgtgacctctgcacttcatttaacaggactaaagtaaagtgaaaatgaagagcatggtgtgggaggaaaataatgaatactatttatttaagggagtttgagtacaaatattatcagaaattcaatctaattccatttacttctaaaatggcacaaaacaatattaagtcaatgcattcagaaagcagttatgaaagcataatacctcataggaactacgttacccactggagcaggggaaatttgaggataaataaaaacagagatcctgcccttggtgaactcagaatctaatggagaaggcagatgattaaacaagtaattacaaaggaattagtaatgaagggatatacaaaatgtcagggacccaaagggggaacaattaaatctgtctgaggaggttgggaagaatttataaaggagatgacatttgagccaaactgtgaaggaagggaaggagtttgtcactttatcaagagagcagtctgtgacaggcagagggggcctaaagcttgtccagtttttggatcagggaggtgtaaagagtggtcccattagaggttacatggggaaaagacagggaaaggagactagagagacaagctgggaccagacttgctttgctgggagtttttcatttgttctctgggcaacagagctcttaggctttataagcaagcaaatgacctaacaataactgtagtttttaaaaatagtaggtagcagaatgaaaaaaaagaaataagaaatttttaatggtagcagcataagacaggtcaagagaagaagtgacaataaaatagtttcatacttaacagaaagtatcatgaacataaccactatccacttatgttccaagtcaatcattacctcctccaatgaaactgtcttctttcactaccatttaatcaatcagacagtgaaggaaaagaggttcacacagatagacataggaagttggaaagaacttcctacgttcttccaagaaaacacaagaaaaaccactttctctcttttaatgatttctatcagaggttataatggaaggaaaaattaaattaacagcatcatatggaactctatgttcaaaaaagatccagatgaactggatga

SEQ ID NO: 51068 - DNA, 793 bp, Bovine  19866881507632
  misc_feature (1)..(1): n is a, c, g, or t
ncatttctgaagaaattaattggatcagtcaatctcaactgctaactgtcaaaacatttcatgcagtgctctgcattcttggtgggttagggtactagtatgtgtcactgcatgggaatccatggatggtgtcagggcctgtttccagtcttgttggcatgtgcaaccaaggcagaggttgtgtgagggcctagtggggggattccttgagactggggctgtggatggaagcttgttccagcttttgtagttcctgaccctactacctcagccctattcagcccaatgtcagccctcgtcctgcatgtagcagctgagtccccatgatggccaacatttgccaagggactgttacattctaggagaaaaagacagtagggaggctggagcatatatttacatacgcccatgcagaaaccaatatatctatatctattaggaagaaagatgacatctagttatttatacacatctcttcagcacaagattattcagggatgaagcacggtctttttccaccagagagcagtaagtctgcaggaagaggattttatctgatgacctggggggagagaggtgggatattgggaagaagtaacctaactggagacctccagatgctgtctggattttgacctggcccctggcctatttttaccacttgcaaggcagagtctccgcttgttggcaggaattttctatgggctagtagcctgagcatttagctgcaaggctgatttaagcaggtgtgaagggagagttcctaagaataccctcagttcttgaatctgcg

SEQ ID NO: 51069 - DNA, 632 bp, Bovine  19866881861316
  misc_feature (1)..(1): n is a, c, g, or t
natattcaaagtgctaaatgaaaaaaaaaagtcaaccgagtcccatatctggcaaaactgtccttcaaaggtcagggtggaattaagagatgtcaagctaaacaaaaattgagggcgctccttaccactagttgttccttgcaagtaacactcaagggaggtgtgcaaggtgaaaggaaaggacactagacagtaacttgaaagcttatggagaaatgaagatctcaatcaaggtaaatacatgggcagttataaaagctggtgttatcataacagtggttggtaactgtaccttttgtttcctgatgatttgagagactggtacatttaaaggaaaaaaaaaacaattattaatctataagctagtattttctaacttttgcaattccatatcttattttctacataatttaatacatttaaaagaattactagtttatattttgggacacatgtatataaagatgtaattttgtgacatcaatgatggaaagagatggggaaagttgtaaaggagcagtttttgtatactattgaagttaagctaaattgaaattaagagtgttggtactttaggatgttaaatgtaattgccatgtttggtggttggatagtcactaagtcatgtctga

SEQ ID NO: 51070 - DNA, 1143 bp, Bovine  19866880489632
  misc_feature (1)..(1): n is a, c, g, or t
naaatatgatttaatgtggttagtccagtaatattgggaaacagataattcttttttttaatttctttgctttataaagtttattgttttttcttcatagatacttcatagctgtggaagatgacaaaattttcccattaaattcagctgaaaggtaaagtttatctctgggtaactctttgttcatcagtagatttagcaaaactttgccactggtaaagttaaactatgcaaaagtaactgtgtgttaacctgagcttctgggttttttctgtcatccaggaaacctggtgtgaagcatgcaccatatataaggtaacttgatcattctcttctgatctgctgtatcttaggcaacgttagcagggtgtattagttctgactattaggacaaagtagcctagactgggtggcttacaaacatcagaaatctatttctcacatctctgcaggcggaagtccaagatcagggtgcaagcgtggtcagggtctgatgagaacctcttccggtttcagcctgctgcgttctcattgtgtccacacatggcggaaagaggactagagagctccctggggcccttttataagggcactaaccccattcactggggctctactttcatcacttaatcacctcccaaaggccccgcctcctaataccatcacgtgggatgttaggatgtcagcatatgaattttgaggggacatagacattcagtcctttgcaaacagtcatagattttactatcgaaataataaaacatttcatatttttcaagtattgcaggtgatgaacctcctgcaagctgtgtgtttagtcaagttatgaacatggcagcattcctaggtaagaagaacatgaagaatgctttatgtgctttgggatatttcttttttattttaaattctccaaaaactcatatcaaaagtatggtgggcttagtggataatttagtgtcatatcatgtcagtatgctaaagagggctttttttgttttgagggtcattttttttttcataaatccctttcacctgcttaccttccgttttcttttccctttaccatcttcaatcattatagcaaattcttgactttatttcttttgctgcatgaaataatgtatttcatgtgccataaaaatc

SEQ ID NO: 51071 - DNA, 993 bp, Bovine  19866880541449
  misc_feature (1)..(1): n is a, c, g, or t
natccaaagggatttttcatacacacaaaagcatgcacagcggatagcccctgtgggcagagtctttaggcttctctgggcctcggccaggtgggacacggctgtccctctgagctggccgtgctagtccttatttcctggtctcctggacagacgtacagccctcccagcggtgtccctctcctggtctttccttccctgatgctggcttctcacctgtttcccagggttcccatgcatccctctgacttatcccagccaccttcatcagacccacctcaagccccctctgctctgaatttgggctgtcagatttagcaaataaggttacagggtacccagttaaatctgaatttcagataaacaatgagttttgttttttagtgtaagcgtgcaatgattgtgcatgcctgcttgctcggttgcttcagtcgtgtctgagtctacaacccccatggactgtagcccaccaggctcctctgaccatgggattctccaggcaagagtactggagtgggcagccatgccctcccccagggagacttcccaacccagggattgaacccgcttctgttacggctcctgctttaagcaggcgggttctttaccactagcaccaccaggcggattcttttacccactgagccacctgggaagcccattgcagcgattgggacatacttacagtagaaaattgttgattgcttatccaagatttacctgtttgtcctgtactttctctggcaaccctcctgaggtctgcgtggtgttggtttgaggtttatcctgcagcctatttagtcgtgggccaccaatcgcttcttgacctttctgctaagatccagggtcagggggagccctcgtgaaccttcaggaaggtggagcgaggtggttctgctggggactttgaaacctgccttcagtctggcctccactcactcttgtccccagtgagaaccctcccttctacctggcagctctcctcacccctca

SEQ ID NO: 51072 - DNA, 855 bp, Bovine  19866880618920
  misc_feature (1)..(1): n is a, c, g, or t
nttttttttcttttgctgcttatgttctataattatgaagttaaaaataaatatgaatgccacgctttgcctggagaagataccactattttaagtacacacgtatcaatactagtctgctaaagcatggagaccaaatggaaaaccatactttgtctagaaatcttagaattggccaactaaatgtctaagaaagcatccgagtagcatgcactttgggaacccattgattcaagtgtaagagacttccaaattgttagtaatatgagtaggtctggtattgacatctgccaatgaataagatatcatccagttgtccgtggagtgcaaattgcaggtatcaaatagagatgataaatgcaggcgttattcctttaagtggttcttagcttttgactgcatttgaccatttgtcaaagctaactggcctctgtttagtgatattgagagtgaaacacacgtacacagacacatgtgtgcaactgatacttgaaataaaatttcataacattaccatctatcttagagattcggtttctgaattccttagtttttataatccaatacttcagcaatgatctctgcttgccccccactttgttccaatttaatcgagtaagtgtcatctgtgtgctgttttaaaaatataaatcttggttatggacgttacacggcagaagttggctcagtagaggcagagtatatctatttctaaacctaatttagtgggaataaaacaacattgtaataattctcagaggcaaactctcccttaaaaaggagaatagaacatatggagtctcttttcagtactcaatcactttgcaaaacacacccagcagtagaatagggtag

SEQ ID NO: 51073 - DNA, 912 bp, Bovine  19866880650223
  misc_feature (1)..(1): n is a, c, g, or t
ntgttatgtaaaaagattacaataaaaatgttaagttgtttgacatgataaataaggttgatctgttatgacagggactttggttgtccttggggaggactgactgtcttaagtgcaaactcgtgattcagatttacagatgtttaatctcacaaacgttaagtctagatgtaaaaaattattgtatttcccaggatttttaatgtaatttgaagcaggaagagctgctttttgaaatggattcatctctgatatgttaatatttttcatggtgcattcttaggcaactgctatgagtcgctagcattgagtttctctgacagctttcacgtggtaatcagagtaatgtattttgttagctgactcattggaaaagaccttgatgctgggaaagactgacggcaggaaaagaagagggtgatagaggatgagatggttgaatggcatcacctactcaatggatatgagtttaagcaaattcgggagatggtgaaggttggggaagcctggcatgctgcagtccatggggccacaaagagtcggacacgactgagtgactgaacaacaacattttcttggcaaatcctgatccagtggacctttagatgctagggtatttccaagatagggagggctgtgataaagtcacagagaagtgataggggagcctgttcgcatctcttcttggccacattttattattattattgttattagttttacacattttggccttgccatgcagcatgtgggatcttagtccctgaccagggatcaaacctgtgcccgctgcactggaattgtggactgttaaccactggaccaccggggaagttgtcagtcacattttacagctgaaccattggttggctcaaccccctcccatcattcacttcctctgcttcacctttt

SEQ ID NO: 51074 - DNA, 2377 bp, Bovine  19866880673857
  misc_feature (1)..(1): n is a, c, g, or t
nctgtgcaaatgggttcatctgtaccgttttttctggattccagatatatgtgttaataggcgatacttgtttttcgctttctgacctgacttcactctatggcaggctaggtccatccacatttctgcatgtggcccagtgagcactgtcacttgaccactgcgagactgatttctagctttcctgcaccttgctcttcttccccttccagtttgcttctaacccgttttgtggattagttccccacaggaccctgagttgctcatgtgcaggattctgcaaacattttcaaggctgcgttttcaaggcaaatcttagcagtcccctgctgcattctgctgaatctgtttctgagcttgttcttgttccaaaatacagtgctgactttgcaaatggcccgtaaagcacgtgtgcgttgaaatcacagccatctgtgtgcagcagagctggaaatgtggcatcaagcagccagctgtttacaagaccacctcccttgccttgtccattcaaaggagagacaacatcaggatacgtgtgtagctgttttgttgttgctgttttatcggtcagttgtgtctgaccctgcaaacccatggactgtagcccacaaggcttctctgtccatgagatttcccaggcaagaatacttgagtgggttgctatttccttctctaggagatctttctgacccagggattgaacctgtgtctcctgcaagtctcctgcattgcaggtggattctttgccgctgagccaccagggaagcagtaagctgaattcaaaacctgaaaaattaggggcgaaaaattgaagagggatttcttaaagtcccacctgatgcactggaaagcaacggggactacgggaaatatgtggccatagagcagtctggctgttaccgactgtgggacggaagtgtcctttaccagcgaagatacagacggttggtccaagagaagatgccctggactgcagggcctctgccttgccctgcttcgtgtctgcctgaggaccatgcatgcagcccagactcacagattggaagaaaataattgtcaaaatcagcagaatgttctttgtgatcacagaataacactgactctctaattaaggaaaaatgatccacctctttgtttcagtatgttttagcaccttcgctggtggtatcttttattcttggaaggaaaaaaaatattgcacttcttttttgctctggcttatcagaatctgtcttcactaccatataaattcacagaatttgtgaatatatctttaaatttagttcacaatttccctaattatagattttctttcttgtgtatttattttccaggcttttgcctagacattttagttgcttcgttctttctggctgagtggcacagggacaatgctggcataaaacaaacattagcagactagaatccaagatcaatctcttatcttcctaattaccacccattcccgctgacaaagtcttcaggtcttaaagagaaaacaaacagtctacctgaaaggcagaggcagtctgtgtgtgcagtttcacctggctgggtgcgttctgctggaggaattttcagtgctgactttcgggttgtgcgtgcatgctaagtcgcttcagacacgtctggccctgtgggaccctatgggctgtagcctgccaggctcctctgcccatgagattttccaggcaagaatactggagtgggttgccatgtccttctccaggcaatcttcccaacccagggatcgaacccatgtctcttatgtctcctgcattggcaggggggctctttacccctagtgccaccttcgggctggtactacttaaacagcgactgcagtaacaaggtcacctctggccttgcatctctcagctagtaaattaaatctcaatttccccatctgtgaaactggaataatcatagctgcttcatagtgtttgaagatcaaatgagttaatgccttgtgaactttaaagtattgtaagagttttagcgtttagctcagtcggtaaagaatctgtctgcaatgcaggagacccaggttcagttcttgggatgggaagatcccctggagaaggaaatggctacccactccagtattcttacctgggaaatcccatgaacagaggagcctggtgggccatagactgtggggtcacaaagattcagacacaaccgagcaactaaaccaaaccacaggagctttagctgtggccaggtgatgatgattgctatgaattttgggagttaaagagttttctacagtcaattttaagttactctttacctttttttgtcctgttaatgaatgaacttgttcatcggtagtgcactcagaacacacacccacgcatacacacacacacaccat

SEQ ID NO: 51075 - DNA, 1768 bp, Bovine  19866880741907
  misc_feature (1)..(1): n is a, c, g, or t
ncagcagaagcagcagcagcagggcatatatatgtaaaagactttggatataaaatagaaaatgaaagaaagccgaaaagattacagaatgatcttacatgcattgaatcagtagttttcttctttcagatgtttatttctataaaaccttactttatttttcatagcctccacaaagttctctatgaagtagacctacagggaatatttcttgagtggatgaagtgactatgattgttgagtatttcaaagaaaagggatgagaaccagaggggctgggttgcacatgtgctcataggcatccttctttcccctcctgtgtgttcaggcttgtggatggtcactttgataccaagattggacacaaagtggagagtgagagttaccaaaagatcgccagcagcattggctgttcaaccaacaacatcttatttctgacggatgtttcccgaggtgagtaacctgacttcttggatagtacactccaggctgggagctgagcctggcactggaaacactttgccttcataaagaaggtttccatggggagccgtgagaaatgagacaggtatctaaaggaaacagtgcaaatagatgtttatagacaaaacttgcctggtgctgatcttggtaagagatctaatgctaaacggttattagccagtgtcaagtcccacgtggacagtgatgactcagcttggttgagaatctgggttgctggtcaagaggactgtgcttgaggcaggggtgcttgggaactgtgcttgaaaactcggggtgcatggaaggcagcgcctctgctgctgagtgagtgaatctgagcagggggggtgtggagcactctttttctgggaggtgacagtcctttcacagaaggtgggaacatagaagagacagttctgccccatttacttttagtactcagagtgaaagtttgctagtcgcttagtcgtgtccagctctttacgaccccatggactgtagcctgccaggctcctctctgtccatggggattcttcaggcaagaatattggagtgggttgccattcccttctccagaggattttcccgacccacggatcaaacccagatctcttgcattgcaggcagatttttcaccatctgagccatgagggaagcctgtcacccttaaattaatgcattctgttgctctgtttcccacaggttgagaaactactggggattcttattacagcagatctgaatccacagagtgtgttttcagactcttgccctgtctgccccgtctctggccgcagacctgagtcccgtctccggtcctccgctgtttgcgcgtggattttatgtcgcttgcagtgcctcctctcttgccagttttccttccttgaaatttcctcccactctgtgcacaggagtcatttgttacattgcgggtcctaatgcagtagttgcgcactgaggacctgagtcactgcatttttaacaagcttctaggtgattgccacactgctggtccagggaccactcagagcagtggtgctccagagcaggagttgatagtagtgttctgtaaagggccagacagtaagtattttaggctctgcaggccatgcagctactcaactctgtcttcgaagtgcagaagcagccatagacagtacagaagtgagtgggcctggctgtttccagtaaaactctgtttacgataacaagcggtaggccatcatttgctgaccttcgttctagagcatatagagtctgacacacgatttcaactgagctctac

SEQ ID NO: 51076 - DNA, 800 bp, Bovine  19866880742748
  misc_feature (1)..(1): n is a, c, g, or t
ntgatgtagtagtgtcttactggttttttaataaatccttttgtataaaaatgtattggctcttttatcctcagaatagggaaaaaaaatgaggaattataaactgtcatgaagttaagcagaagtttggaaaatagtaaaacttgtcaaaattgaggccatggttaagattgcagtgaaattttacatgtttttagttaagatctagtttttggcacagtgtgacctccctgtcctaattggaaatgacttaatgtagttaatttgtttgttggatgttttaaaagtacttccatatgtagccattaagctttataatactttcccagtttttgcttaatatgtattgtgctttttagaacaaatctggataaacgtgcaagaacccttttgcacagataatgttttgtgcttccattaaataaaaaatctggttatcataatacaaatgcagctagtttagagatttttagggttgtgggtttgtattcagtagatatccaagtgttgagggaggattaaagaaatgtgtactgtgttgatgtgtgcgctcatttgtttggatgatttttattgccatttcttaaagtcttagtttttttggcgggggaacgggggtgttcagggctttaaaacatcccagactgggattttaagacacctagcagttctgagtcattctaagaaagtaactgggagtttagttgatggctttaggattaagttggaaggtttctttttttctgtcatttgtaaaatgtagaaataggtaaactttcagttggaaggcttttggtata

SEQ ID NO: 51077 - DNA, 1903 bp, Bovine  19866880779605
  misc_feature (1)..(1): n is a, c, g, or t
nacgaggagccgtaaagaaattgttagaaagcagataccatcaaactggttctgggaagtgtgaaatcaaagttgcacaacccaaagaggtatatagccagcaacagcagcaacaaaagggaggaagaggtgctgcagctggtgggcgaggtggtactagggctcgaggccgaggtcagggccaaaactggaaccaaggatttaataactatcatgatcaaggatatggaaattacaatggtgcctatggtggtgatcaaaactgtagtggctatggcggctatgattatactgggtataactatgggaactatggatatggacggggatatgcagactacagtggccaacagagcacttacggcaaggcatcccgagggggtggcaatcaccaaaacaattaccagccgtattaaaggggacactgccaaaaacaggaaggaatcccttcctaaagtaaccatcttgcaggaagacactgaaggttggtcttctgttgatctaagatgattattttgtaaaagactttctagtgtacaagacacaatttgtgtccaattgtatatagccgccaattagttttcttggtttttactttgtcttttgctatctgtgttatgactctgtggatttgtgtttatacagactttgtttgtatgattacatgttaaaccccaaataaatgcttccttatgtgattgtttttctatatcaggtactaaataactctgtaaaagtgtaattttaaataagcaatgataaatgcacagtttattttgtagggagtcttgctccataggaagagaaaactgtggtcctttatgaataggcagctacagtgtctgctctgttgcccttgtttgttagatgtattctgtgctcttaagggagaaggaaatggcaacccactccagtgttcttgcctggagaatcccagggacgggggagcctggtgggctgccgtctatggggtcacatagagtcggacacgactgaagcaacttagcagtagcatgctcttaagacttcattttcctctctaaccgaggcttccatcataacctataatgttgtttcccctctgcctatctggagacattgtcatgaaagcttctgtggcattgttatactgttgtgattagtgggagctttctagtagaccatgagtctctggttatattttgaaaagtacatttttaatggcacaaagcatgctggtagctccttttatgaagaaaatgttttgctttgttcttgtcttcggaaaggcatttttcaatggattgttgtattcagtggtctgctagaaagagctttgactaatcataatatcataactttgttttcttgatttaaatgtccagatatacccattgcggagtcgggggcctaaagctgtgttataagagctacaggttaagaatagcagatatggttagattttacacaacaattttggcaaataggtatgaagttattaaagtttgaacaaaacttagattaaaagatttgaagtagtagctaagtcaattaattgtattctattctgttggtttaatgtcacagcaagcaccaaactgaacaaaatgttttctcttggggccttgttaggaagctgtactgggtgttaactgttagatggtgtgagttcttagaaggcatgggtagtgggtttcagtcatttttttatgtggttagtgcatgagctgagtagctgagcataatcacactcagacataaaagaataatggagaaggctaacccttgattctcatgtaaatgcaagtttagtgtgaccaagtcatgtcattacaacacatcttcctggtgcattaaaaagaaagccttttagctctagatttgggaggatatcctagataagttcaagtctgaattttacatt

SEQ ID NO: 51078 - DNA, 938 bp, Bovine  19866880947242
  misc_feature (1)..(1): n is a, c, g, or t
natcaaccctgaatattcattggaaggactgatgctgaagctgaagctccaatactttggccacctgatgcaaagagctgactcattggaaaagaccctgatgctgggaaagattgaaggcgggaggagaaggggatgatagaggatgagatggttggatggcatcaccgactccatggacttgagtttgaacaaactccaggagatggtgatggacaggcaagcctggtgtgctgcagtccatgggctttgcaaagagtcagacatcactgagcgactgaacaacaatggctgcacaaccttatgaggtttttttttttttctgagaaatagtgaattgctcaccttaaatgggtgaagtgaatggcatgtgaattgtatcaatagaactgtttatggggagggaggtgggagcggggttcaggattgggaacacatgtacacccgtggcagattcatgttgatgtatggcaaaacaatattgtaaagtaattagcctctaattaaaataaataaatttaaatttaaaaaataaaaacttcaaaaaaattacagtgaaaaaatggaaataaaatatgtatcaggatagtaaatgacattatactgcatcctgttgatggaacatgatgtaatcactaaatattataagccctagaactacataacaacacagaacatacataatgtgatgttcagagtaaagcaaagtgatgctgtagctaaatatacattcatctggataaaggctggcaggaatcagagagaggagactgtggtgagggggatgtgccactttctttcaaaagtctcattaatgttgttgagcattttgaaggcacttgttttaatgtgttttgtaatggcagccttgtggtaagtacaggtggtactgaagatgcataaatcataggaaaggaaggcaaaagcacaagggacat

SEQ ID NO: 51079 - DNA, 1700 bp, Bovine  19866880969018
  misc_feature (1)..(1): n is a, c, g, or t
ncacgacgtgtgaaagaaaggacgcagagatgagactgctgaattaggtacagaactagttgatgtccccagagcaagaaaaaagggcagaaaccatctattagttgtctgtcagtgggtatataatgtcccagtgtgatgacagaatgccagaagtataccaaaccgggttacatttcttacagccgcaggtgacccttaggcctgtcagacaatgatcctgttaggggaaacacactgactgaaatcaacccccggccccacccagccaagcaccatagtaactatttgcctgagttattttacaacaggaggtcctggtaaggaacacagaactaataagccaccaccaaccagaagagtttggaaaaggtcaaaaggagataccacgtgtctggccacctcccagaatccttcttgtaggcatccatcttggctgagtgatgtatgtgccaccaggaaggactctagagtcagaatgattggctaaagacaacccgaaactgactccaactgccataaaacctgaggctgcatgccacatggcagagcagttctcctgggttcccttaccctactgttctccgggcgcccctgcccaagaaagtctcttgctttgtcaacacgtgtgtctgctcggaaaattcatttccaagggttagacaagagtccacttttgggccctggaaggggtccctcttcctgcaacaatcccataggagtttgaaggggcatgcagtcatcttttgcccgtattttaaaatagttcatgcttttagagatggtccctgaagggtagcagaatacgctattcccaaataggctcctttggcataaggattattgggagctgattattttggagaaaaggcagatacagaagcagctctaaaagcagagtagaggacttccctggtggcccagaggttgagactctgcacttccagtgcaggggacctgtgttccatccctggtcagggcactaagatcccacatgagccctgcacacccagaagtgttttaaaaaaattttttttaatgaaaatcagagtagaatgtgctgtttgtactgttttgtccattgatgggggaaatctccatttgtaagaatgtccccctctctgtatcaggaagagaaagactaaatcacaagaagctcttaccagtgtgacttaaatctgcaaacaaccttacccatgtttgctgtgtttttcctaggaacctcccataactggtcttctacccaccaacatgtttcttttgtcggtagctgaagatggtattaaggtggtggtttgggccatttcagggagttttcccagttttcttgggtatacccattatacagtcaatatccatgttattaaacttcagtttgtttttctcttgttactctgtccttcattacagggagggatgtctcagaacctagaaaggaagacgaaaaattgcttttctcccctacatccccacccccagggcagccccaggacctgcgtgaagctgtcttcataacccatccttgcaactggtgttgcctccagccctgcaggccacacgctcctcctcctgggccttcctgttcccaagccctagtaaagcagtccttctgacaatgatggtcccctttatcaaatgttactaaggttcctgtaagccctcttctcaactaggcctcgaccccggccttcgagtccttc

SEQ ID NO: 51080 - DNA, 703 bp, Bovine  19866881067685
  misc_feature (1)..(1): n is a, c, g, or t
ngaaaaactttggaaggactttttgtgattagaagtggggccattaccaattaaaacagaaagtctatgagaagagaatttgtgaaaagcttacagtaaaaatagagtgtctgcctatatctctcataaacattttgtatcttaactgtgaaaaatgtggaccaccctcactggtcctctcattatttcctgagccaaaatgatgttccatgctgcaaaagtcatttccaaatattctgaaacatgacttcaccattgttcacatgtatccccagggaccactgacagttctaggcctggaagaagagaagttctaataacacactgaggaaatgtcctagtttaaacctcaattgcctgggcttccctggtggctcagacagtaaagaatccacctgcaatgcgggagacctatgttctatccctgggtttgggaagatcccatggaggcaggcatggcaacccactccaaaattcttgcctggagaatccccaaggacagaggagcctggcgggctacagtccatgaggtcacaaagagtcagacatgactgaatgacttagtacagaagaaacctcagtcctctatctccttcactgatctttgttttttcatttttcttagctcaaaataataagtccatttttttaagggacaaagacctataaagagccctgttaagtaatattacaactgtaattg

SEQ ID NO: 51081 - DNA, 1306 bp, Bovine  19866881157137
  misc_feature (1)..(1): n is a, c, g, or t
nttatcctgtgcggaacattggttcccttgggtgcacaggaatatagaaaagagaagaaacacatcgtgatgttagtattgggagctttcagaccatccaaggctgatcaatagagacactatattggatacaaagttgttccctccctgccaagcttttgcttgtggtgtttttagtccgtgtatcgtgttcacctattattaattctcaaagattcttttttaattatggaggatcaagcctttcaaaaaataattaattacaaaacctacttaatattcagaggtgtcatgcaagcctataactggcattctctgttggtggtttaattagacaaggaaatgcaaaaagctgtcacttgagggtgggtggctgcaggggaggggagccccagcactaccagttggccatctgtaccagacacaaaagcacgactcttcagctggcctccctcacaggaagctccccatttttaccagctcatccactgacaattcctttctgcagcgtgtagctggaaggcagaagatactcgggtgctatcatttcaaatgcaataattcatggatgtggaaaaacaattaaaaacacagggtgcctcagtttctccatctgaaaaatacaattcagaatgtcatccatccatatgcctcccagaacaacagctgctcaacatttttttttttttttttacaaatggccagaaacatgccaagtaacaaaactggccccatgttacacattttcatctaaatatgctggcaagaaataggaaagcttcttaattttactcagtaatcaaatgtggcttgtttttgagtgagtttttccagtttgtggcttttccatgccatttctcctcccccaatttttaaaatcatctttgaccatctgctctctagataattctcttttctttaatattgtcattagatggtaagtaagagtaacaccaagaatcatcatagttcactgtatactcacatttagtccttataactcagtgaggtaggcattatttttttatcattattaataccatattactgatgaaactgaagtttagagagtttagatgacctgactggtaccccaaaaaattaagtagaaaattaagaattaaaactcaggccagtgtgactctggatcccataggattatttttgctattctcccaaagaagaggggggcgaaatccataaacatacacacaagcatggtcaggatttctactagtcagcaattattataaaatatgggaataacaaaaattactttataaaagaaaatgcattcgaaagaaaa

SEQ ID NO: 51082 - DNA, 743 bp, Bovine  19866881191685
  misc_feature (1)..(1): n is a, c, g, or t
ntgagcagaaaggagacaaggggagggagggtgaaaatcccaggtactccccccatctgcccacccccccacccccatctgagatctggctaccttcccactctcggttctaggatctattcctgcattctaacaaataatcattttttgtttggcctgcttgaattgctttctgttacttgcaatcaagagggcaagttcataccgtagagatctattctgaaagacagaaggaaagataacctggtgcctttgcagacagataaattcactataagcattacttcttttcaggggagccttctgagccaacttcagcacttggtgtttcagttacccacacactccaccactgtcctcacctccgggcttcttaaagttgaaatccagtagccctgaagtgtgaaagcattctgggcagcacattctttcccctccagtctagcagatgcacagctgccctctgagactgtgctcctgttccacaggccataaaaggatcttcattactcttggtgggatcacacgtactctcagtgggaagagccaaacatcatgaatgtgtaaaaggaaacttagcattaacacatgttaccctcctgtgcctgttaactttttacttcctctattttcattgctgttttctttattcatcctcagtcatctacaccaagaattctcactggcctatcacctatttctacaattcagtacacattcatttccatttttctaccatcctc

SEQ ID NO: 51083 - DNA, 1476 bp, Bovine  19866881220654
  misc_feature (1)..(1): n is a, c, g, or t
nacccatctgttaccaatgacccctaaatccacagcttgaacctggatctcttccctgaactcgagtgatttttttttcaactaccttcctcaaatctcacttggatatctgaaattcaaactcctgtttctagcccttaatcctgctcctcccacactgtcccatttcagccaactggcagctccatcattccaagatgctcaagccaaaagccttgaagtcctctttgactcctcttgctctcatactccacatcccaccaattcatcagcaaatgctgtcagccctatcttcaaaatacatccagaatcgaatcacttctcaccatctgccactgctcccaagcactccaaatctactcaatacattgattaatgaataacctgaatcacatcatttcaatcctcaaaataaccctatgaaacaagtgctcttatttcctccatttcacaaaggcacataaaggttaaatataaactaagaaactatagtttatcaatcaggtctttttccttttttggttcaaagagtcagatccccagagcctgatcttcttggtcaaagggatctgactagcttacagacttacaacgagttggtcccagccaaggcccagggcaggagtcagtcagcctcctggagcacggcagcaccaacactagtctgcccacgagctcctctctgaaatcccacccaggttccactgccaggactgccactagttttcaaactacatgtgttagtctctttttattcagtatcagctctccacacttttttaagacttaagaaaaggaacttgttggaaggtcacataatgaatcactgaaaatcaagttaagaaatgaagccctcacatgcatacccagaagacaaagaacccttttctgtattaaagaattctgtctttgaaaagcaatccgtgtttttgaaagtggagtcccctgggaagggtccagtgaggttccagaagggcctctgaggacaatattactgactttccacgtgacggaggaccggatacagcaagataagggtgggctggccaccacccttcttctgacctctacctccaccaaaaccaataatgaaaattaaatgagttaataaatgtgaaaatcaaaagctgtatacaaaaataagcctttattgtaaaaagaatagcttttttgtgcatatgaaggagttacatggggtgagctttaaggatagaaaatttaagaaccatcaaagaagggaggtcttttcagagctaaacacaggatagccttaaaaagtttatctgagcaaaagaaaggcttacctatctatgtattttcaaaacaggggttatatattagaattgggacttttggggaattgatctgactacatatacttcaaggatctaagtgactttaagcataggaaaaaaaaaaatcagaaagaatattcaccaaactcttaatgattactgcttggtggggggagcaaaa

SEQ ID NO: 51084 - DNA, 763 bp, Bovine  19866881292207
  misc_feature (1)..(1): n is a, c, g, or t
nctcaccaattgagaatcactgtgcataaaaatagaaattaatagggaaaaaattcagaatccttaccaagaaaataagagcactaaataaaatgatctctcgcctgggaaatgactttccatttcaagcaaagcagaaagctctcagatatacaaaagataacagagccagaaagcaaacacttctgaaaacaatttaactcagttgctttcttctcaagatatgatttatgacacaggatgccctgaacagtcttacggatgccactcacctggcgtcagtagcactctttttgctggtatacgggaagtaattctgtttgtgtttatttggatacaaacagagatgctcttctcctaaacatgttagcagaagcgctgtaaagactgatgacggttactaatgggagtgcactgatgtgcacctgcctgttaaaaccttacaaaaatcctgcttatctctttccagatgcaattctcccaacaaaaaggattctttaatgatgtaggatgaacagattctttctcagctcttaagcattcaggagagcctggacagaattaatccttccacagaagaaatacataatagatcttaggaaaattctatttaatccccaacctgtgttctaaggaggatgcattctattaaagaagagaatgggtggcccctttgctcagtcaagcagcttgggttggtgttggatatgcaaaggtgggcctggggatgagtctggggagttggtgggggcggggcaatgag

SEQ ID NO: 51085 - DNA, 1011 bp, Bovine  19866881294236
  misc_feature (1)..(1): n is a, c, g, or t
nccaaccagtttgtttgcatatttttgtctggctgaaaaatatcccttgtattttcactggcctagttcttggcaacagtgtctcttgtggctggagcagaggctcatgaggcagagagagagcccttgaacacggaccatttgagtctctatcctcatggaccactgaggactttgggttggggtgcctgggagggggccaggcaagtgcagtgaccaggacagacttcagcgaggaatggcctgggaccctgtgctggctggctgactcagctcagattcgcataagtgaaaaacagatactcatagaaggctgggtcgcaatctgaatatacccgtaaggacagcctgccgtgccgaggaacgggggcctggtgaattgtccgccaaggaccccacaaaagatgtgagggctttccagcttgaaagccaaagccctgagggcttgcaggccaagacagatgaccatcccagtccaacccagtcaacatcagggctctgctttctcctgcaccccaccaaacccgcccccgcgtctgcggtctcttccgcttctcttccacttccttttattctcggtgctttttcaagtttgggctcattagtctgactggaggaaacagaccaaatatgttttattttcaagatttagagattatcctctagctgtaaagttcctttaataagtaaacactggtctaatgttacagtctttagacctatttcttactttccttatttttttaaatttattttaattggaggatgattgctttacaatgctgtgtttgtttctgccatacaagaatgtgaatcagcggtgccttttcagtcgtttcagttatgtctgaccttttgcgaccctatggactgtagcccaccaggctcttctgcccatgtgattctccaggcaagaataccagagtgggttgccatgctctcctccaggggatcttcctgattcagggattgaaccccagtctcctgtggctcctgcactgcagggggatt

SEQ ID NO: 51086 - DNA, 1664 bp, Bovine  19866881376332
  misc_feature (1)..(1): n is a, c, g, or t
nccttataaaagttgttcctctagtctcatttcttgtccatttctcccttctgtcagctctcagtcactataactagcagcttgttttaataatggtgggactacattttcttactctattgggtgctaggtgctcttttttctttaatcaattccctctcctttgatcaattcagtttcctaatctgtaaaaagggataagaaaagtgtcaccttagctatgaggatagacatcttactatgaggatagacaatttatgtaaaacacttagaatggggtcaaacaatgttaattgttgttgtatataatatgttgttggcttggaaaaagaaaaagggttaaagaatggagggggtgaagaaaagggagaccacagcaaaacttcaaatttctcctttataagtacagagatcccttagtatctgaggggacagatgttcaagccccttatatgaaatggcatcatcttttcataaaacctgcaagaatactagagtgggttaccctttccttctccaggggatcttcccaacccagggattgaacccggatctcccgcactgtaggcagacactttaacctctgagccaccagggaagcccctttcatacacattgtcttatattctttaaattatctctagattacttataatacctaatgcaatgtaaatactatgcaaatatctgcaactattgatacaatgtaaatgctatataaatagttgccagtgtgtggcaaattcaagttagtttttttggaattttctggaagtttcaaaaaaaatattttctatcccgtggttggttgaatctgcagatgaaaaccacatccagctgtctaatccataattttgctggatgagaagttcaaattccaagacatgtattttggattagttcctcataagggtattaatcacatggttatttgtccacattttagtagttttcaatttcctgcatttaagctggagagtcatgccttgtaatttagacccctgagcttagtgattcctttggggatgctcaacactgcaccagcattgaaggaggtttctccacctcttgaatgctgtgcgtgtctactgacccaccaacgtcagaagggtccactgacactctgggtggatgtctgactctacttattaaagagaccttgtattagtcctagaaccttctgaaatgtgctcctttaatccttttccatcctcatgattacggtctgtccacagccaccctggcactgagtgctttcctgtcccttctcttgggctaaggcttcatttttcagaagatttttttccgtctactctgatgaccagctgccctctgccagctggccccagagggctgttatgcgaacacctggctgttttgatctgcacacattttttctagggcttgtaataaagcatttcaaaaaatagtggtcagatgttccttttcattttctcttctcaattgctaagccaattgccccctttttttgtgtcccttgggaaaatcaaacccacaaagaaccatcctcaacctcaaagaagactagactactgatcacactggaggtatccaacgttctggatttttttccccatcttaatttaagtgaacttattctccagcctacaatcttctattaagtgaatatcacattttctcag

SEQ ID NO: 51087 - DNA, 770 bp, Bovine  19866881412967
  misc_feature (1)..(1): n is a, c, g, or t
naatctgctataaatatacatgtatcccctccctcttgagagctccagcccccaacccctcatcccacccatctaggtcaccacagagcaacgagctgagttccctgtgctacacaggtgcttcccactagctaggtattttacacagtcacctccttttcaagagctattttagtaagtgcagattatgctgctgcacaagtaaatcataatttaactttgcatattcccttactgatggatagtcaggtttaaaaaatttttttttgccaagtttttattgttatcgactctgtggcagacaggcttatttgttctcctagtattttacagatttagattttagttttaaatctttaatccacatggaatttgttttgtgcaggaagtgaggtgggaattagagccatttcttgacttgcctcatccaaatgattacccacctgaagagattctgtctccaggcaccccagtaatcacgctgcatctattaggggaatacttgggaaattgtaataaggagaatctctgtggtggaaaatatttgatagtgtgtgttggggagaggaagcagaaacagcaggctctgccaatgtggacgagaggccggagctccgctttcaggttggaatgctgcattttaattagcaatattactcccaaatgtttagctgcaacagtaggggattagagacccctgcttgctcatcataattcagaacctgagcatcagagtgtctaattagatctgcttacttttaaaaggtcag

SEQ ID NO: 51088 - DNA, 630 bp, Bovine  19866881587742
  misc_feature (1)..(1): n is a, c, g, or t
ntgcagggatattttatatttattcaaaagctgggagagcctagtctacaaatgatttttaaaaagctcttgcaattaatatgttatagctaatataaggaaaggcagttactacttcctaaggcaatttattttgacattaaggtttagcagggaagatgattaggaattcaggaattatcctatttatagagcaattcagtaggtaattatttgctaaaagtctaccttgattactggccaatatagtagccattaataagaaaccatccacaaatttgcatttctcaagtctgccgaatttaacagtttcaagctacgaagttagttcatcgaattgactttcagttccaagtacctctggtgaaagagtggtatacaacttggataacacttggatttgggaagcaaaatagaaataaaccataatttatgaaatcgtaaattgtttggctctgatttagcttttagtatatttatacttagcccatgatttatcatcagattaatagattatacttcagttgataatagtgttttaacctaatggtttgagggatccagttaggagctacagtggaatattttcagaagtctattaacagtgacaacagttctccttgttgttta

SEQ ID NO: 51089 - DNA, 853 bp, Bovine  19866881628904
  misc_feature (1)..(1): n is a, c, g, or t
ncccagttagtgacagaatctgagtgatttgtaggcatttgtgtgctgattgtcttgccctctaggcatgaactgtgttgtatcaggagggcaagagggttccaaatagatttaatatgccttgtatgagcttcaaccatctgcccgccagctctcagtgtgagcataatatatgtttccagaatcaaacacaaagagtctgttttttttccctctttctttttcctttttttcagaggcttttagttcagatcatctgtcttttccttgtcttttgggggtaggctaccagggtcaccctttctacaattatattggctttcagtttgttttctgattcctctggcatatttaattaaatgggtttccctttcctgcttgccatgtacccccaacagaaacatatccttgaaattggtacatatccatgaaatcttgtgatgcatctatgaagtggttggaattgaactgcaggcattcccagtgagtacagattagaccctggacatctgaaaattcttcccaggctaaatccgaatgctgttcttctgaataatgcaacttgaacctcttctcttctttcagtggaaatcgtgtgactgttgatgggcctgttctagtagctataactggttgtaggactcaagttattcccggtgttgagtgtccttgccctggaacccttgtatcattatagggatcttaagctctgaaagagatgaaagtaagttaagccaatcatagagttcttaacttcaattctcacctaagttacaggaatttagcagaagattcaggaagctctttacatgaaagttggggggggaacacgattagaactctcctagcatca

SEQ ID NO: 51090 - DNA, 1333 bp, Bovine  19866881707136
  misc_feature (1)..(1): n is a, c, g, or t
ncagacttgaaaaattccttgaggggacaaaaacccgtttagtcataaaagcaaagattaatttacctcattttgcaagatgactgacgctaacttgatctgggtcacttcttgcttatgcctctggaaacaataagtaaaactaaaactgtttccctaaactgatatgagatcatcatgagccaatttctttcatttaaggaaattctaatattgtcatgaaacactgtgaagaataagcaatcactgcctccacattgtataagctactttatattaataacaatatacctcggagcctcattccaagtcttggtttgtgtgctcgtgtcttgcaaactatatttttgtggtgtgtacacaataaacatgctaatgactgcttcagtgattcattggttttacttctgtttttttcccgcctgaactttggacagttccctttaccatacgtagaccaagtctcttcccaaccgtggtttgactgctcagtttctggacaagtactgttctgtcttttaggatgcgccacttgcctgtgttacttttccttttgctatggtatctacaaaattctccttggaaggttctgcagcacttggccctcttagaaaaaacagattgaaaaaaatagttttcttttagaaagagctcatcagcgaatagacaatctattctctctttatataactaatttatagcatattattcacattttcaagtcagttatatgtcccttaataccttgaattgttccttgcctggtgtaaattaaggacagattctttaactgagcaacttgaaccattagaattctcagtatgtctcagtacgtcaaagtttctttgattctaaaagtgattagttttctggggagaaacagcttgacagaaaaaaatagcaatttgccaaagtagtctttttggatagaaatatcctcacatctcttgttctaaatctatatttaccaagtcacattgcggcttagaatatggtattctgaatggagttacactttcaccgcactgtccatacatttagaaacgtttccaggtttgagcactttctggtgaatgatgaaggaaacctgcaaagctgagagcttagaccttggtctgacggccctaccttatctgtctttgctgttcgccttctcacatgcactgatggaggggccacgtcatgcattttgtgctcctcatatcgctggatttgtggattatatgcacatgaaaaatagaaggtgaattccccaataatgccacatcctaatcagttaattggtggctcttaaacatatgttttcccaggctccccacctccatacgtctaa

SEQ ID NO: 51091 - DNA, 1007 bp, Bovine  19866881819890
  misc_feature (1)..(1): n is a, c, g, or t
ncgatccctgatccaggaagatcccacaggcctctgagcaactaagccctcaagccacaactactgagcctgtgctctaaagcccaggaactgcaaggtactgagcccacgtgccaccactgctgaagctcacagccccggagcctgtgctctgcaacaagacaagctacacaatgagaagctagcatactgcaactggagagtagctcctattcgccacaactagagaaaagtgtgagcacaaagaagacccatcccaggccaaaataaaaatacataaaagtaaatttttttaaaaaagattccctcgttcaaaattctcaggtaagacagtaaagaaacatggccagtcttgggcagtgaaacggaagtgctcagcccttggagagattcttactggtagaatggaatctttcatcatgaggttttcacagtgtcttcctcttttttttttttttttttccatagtaattctatgtactaatatgtacctacatagatctgtcttctgaaaaaacaatatgttaatttgtaatgcaagctgatgagatactaacttgtaaatttagtgggtggggaggagaggagggggaaggtcaagaaagaaagacattctcataattactagctgttacatataatttaaatggacacacaacaagaatggaggttgcagggctcagtgggctgggttcctgtttaaaagcccggcactgtcattaatcaatgaatggtgatgtggcattatctcaagcactctaagggatggtttgacaggaaatcaatggctacacaatttttactgcacactagaaataaaaataaaagatctagcttgccataagcacctttcataattacagtactgacagatgtagtccttaccctagttccaaattgctgcatcttcatttctccagtttattttgagatccacctgcacaagctctccatgtgaaaggctaataagagatgattaaagtgtcccccagggcttggggaaatcc

SEQ ID NO: 51092 - DNA, 3467 bp, Bovine  19866880511595
  misc_feature (1)..(1): n is a, c, g, or t
ngccctgtgcacggagttgagttacaccctgagacagagttgggcccagagcttcaggctctgcatccataattggagcagggcatcaaaaacgaagctacagcctgatgcagaggaacaggccagttggctgatcttttctaaaacatcatctatataataagggagcagctgctcctgaaccatttcccaggctgaagggttgagtaagaatgatttaattctgcaaatatttatcgatgaccactacatcttgggtcctgccctacatgctattgaaaaacacacagtatgattcctacccttggcaagctcaaagtctgccggggggacagatgtgtaaacagggaggtagtgcacaaaaggctgggccttctccctgcataatgagcagaatgtgatgggaacggaagtggaggagagacgaccagcagagatgaggtctgagaagtggttgaaggcatgaatcggattagggagagagatagagagggtcactaagagagagggagaggaaatgagagcaaggtgcgcagcaaggaccagcctggaggagaagagtggggtgggagccacgtcccttagggcgggatgtccacagggtaggggaagtgatgatataaaaaggaacttgggagacaagaacttgtacatttgaaattaagagagtttcctctaggtcaagccccactgttccaaaaagaaagtatgttcccagctgcctatgaccttgccctaaatccttaggataagagcatacaatgcttaacttctggaatcaattaacagatagcagtggctgctttgcttttgtttcaggctaatgatacctggtaacagcattgtttgttttaacatgttctgtggtgttttaaccaggggattgatggtgaaaaccacggaaaccgagagacaggaccagccctggacgtgcttttctaggcccctggggggaagggtctcttgaccccttcccttgcttgactccttcagcctggctccagtctgtccctcagtttagtaagctttatccaggggtctgctttcatttcccactgtccaaaagggcaaatactcggcagatttctgtcgacacctgattcatcctgtacttatagaacagaaagagctgtcaccaggggctgtgggaatgtagacacagtggagacccagagacacagggcatggggtgaggcaggcctgcatcaagacagtgggcctcctttctctgcaaaatgctgtgtaattgccactgccctctatcagctgaagggaactcctttcagaagctgctgggactgagaatggcctagagctcccagaatctaaactgctcatgtgataagtaggaaaactgaggcctgaagaagtacaaagtcgattatgtttatctaatctagacatctggggaaaaaagtgtggtgaagtcacgggagggactagatgagccaaaggggcttggagaggaattctgcctcttacagcagatttttattaacatggttgtgagagactaatggatatattaggaaagtgaggaattgggatgccagaggccagagtgctagcatcctcagattgtatattttaatctgtgtagtcaagagacacagaaggaagccatcagggctttgaaagtggtatttcactcaggcaggattccgtccactactcaccggcctctctctagttacttccaacgcacccaccgcagtgccatccaaatggtattctgtaggaagccttctggaatgctcctacctaggtcagcttgctttattattggtgttacatagccaagtccctcttcttcagagaatgtatctgaattataatttccccctaattatttgagtcatgtttgtatcctcccttaaactgtaggctccatgagagcttgaaccgtgccttcttttgctcactgttgagctcccaatacaagagtttctggcaactgatttgttgaattaatgaataaaatcatgaataacagtgcttgagaatgagtggttggtaagagacttaatttgaaactaaaagtttgaagtaactactgagaataacaagagaagaagcatgtcaaaagcaaacaaaacaagttataatcaaatgcaaggcactgagtaaaatggagaacatgttatggtgagtctatagttgtgagattgtgctagtcattcaatagacacttactgagagttgataacgtgttcagcttcatgtgcattactgggggaattggatggctatgcctctcatggaatttccagtctaatcatgatctgtagccctggggtaagctgagaggagagagagagaaaaaaaagaagaggagagagaaaaagaaagagatagagagaacgtctaattgggagaacatggagagaaaaacaacccttgggttctctgtgaatttaaacaatagttgtaataaggtgtgggagaaggagagtaagaaggatacaaacgtgagcctgcatttaaggtttcagccgtgaggcatttctcgttgtttgtcagggttggcccttggtacagatgtctggagttggatacagctgagcggcaagacgattgtgagttccatgagttggatcaccccctccaaacagtccctggggtcacccaggatacaaaagccaaaacgtctcaaacaactttaagtccaatactcagtgacaagacatcctgatacacatcaaaatataagtgagtggagacaaaccatcagttgtaacaagattctcacggtcttaaatgtcataggagacagtggagggaggccaaaggggtatttggctacactgataagttgtgttgtttagtctctaagtcgtgtctgactctttgtgaccccatggactgtaaccctccagcctcgtctgtccatgggatttcccaggcaaaatactggagtgggttgccatttccttctccaggggatcttcccgacccagaaatcaagcccacatctcctgcatcagcaggtggattctttaccactgacccaccagggaaggccacgtttataagtagagaatctctaaagtatcaacagttacaactgatcatctaataggttattatgaagccaccaggcatcactgaaagggtcttttgcaggctttaacctgaggatgagtatgctgctgctgctgctaagtcgcttcagtcgtgtccgactctgtgcgaccccatagacggcagcccactaggctcccccgtccctgggattctccaggcaagagtactggagtgggttgccattgtataggggccatgatagtgtcagatggtttgtggagggttctgggccctgttgattctcaagacaaccccaaaagactcatttctgggatgaaacttttctgaaagaaagtgaaatttgcttagtcgtgtctgactctttgtgaccccatggactgtagcctactaggcttctccgaccatgggattttccaggaaag

SEQ ID NO: 51093 - DNA, 1704 bp, Bovine  19866880601012
  misc_feature (1)..(1): n is a, c, g, or t
nactgtgagaaaagaaatttctggtgtgttaagctgcctgatttgtgataatttgtgatgatagccccaggacactaatacacctactcaggagtgagaagggacatccccctgttgaaacagctgaggtgacatttgcagagacctctcatttcctattcgtttgatgaccagacgtgagaaactgtctctgcgtcttggcatgtgaaatgcaaatgaagcaaatcctaggtctgaggtcgcttctcagcacgtttggttctggctgggataaggttctcaggtgtctggcatgcggtagactctacgtattcatatttgcgaatggatggattgacttatgagtgatggctgtgggaggtagaagagatcgttctacttctttgtggaagtcaggcttcttcatattttcctttgattcagtcatctgtaaaggatggtctggtttgctgaagtggtagagaatgggcttgaaatcaaacttggagtcactttctgtgtgactttgagccaataacttagcctcagtgagcctttctttccttatctgtgagtaaagatgacaatgcttgcctcagagggttgctgagaggattggtcatatgagtgcctagcctaccatagggcttccctggtggagctggtggtaaagaatccacctgccaatgccagagacgaaagggacgtaggtttgatccctgggctggaaagatcccctggagtaagaagcggcaaccgctccagaattcttgcctggaaaattccatggatggaggaacctgatgggccacaaggagtgggacatgtctgagcgtgcatgctaaagcctatcctgcatgtagtcacagggctatgctgttgatccacctgcccttctcaagtgggaggtgcctgaaggtcatacttgcaatggccctttgaatttggaaggtgcgtgtacacattttatggtgtctctgtgttatatgtattcttaggtgtgagatgtgtacgaagtagcgtgtgtccatcgaatggctattcttaaataaacctggaaatctgtgaccacccgaaattgttgcttctcagctctagaaaaatccaagttttccaagaagccctcctctgagagtggagcatctaagaattgagtcacttggtcacacattttaaatctctgttaacgttttcctcatttatcccaggactgtcaacacagctgttacgcagcgtaggtgtagacagctttctaaacggaatggtaagtccattggttttgctttaatagacacagtagtagatgttttccacttttggctactgtactcaataaatcatcttctctggaggaaatacaaaggaataaaaaagaagaaagaaaagagaaaaggcatcaatcttgactgatgatgatccccagagcttgtctcctagggaggagtttaggaagagtgtgtgaatgcgagcaccatcactggacacgattaacctgtcctggatcggaatgtcagcactgctaacacggtgctgtgcagtggggaacacactcccaggataagagggaggcgagggagcaggggaaaacctgaccactgaagacagggcctccaggtacctttgaagcagatgctggcaaacaattactctgcacgacctggtccccagccaatttcttaagcttcaccagatcctataaccagagcaaagtggcttcaatcccca

SEQ ID NO: 51094 - DNA, 1077 bp, Bovine  19866880658375
  misc_feature (1)..(1): n is a, c, g, or t
ntaactgctctgacactgactcaaggaattcagtacctagtggaggaatcctactgtaccttggcttttctgaaactgcccagagctaaagactctagataattaaaagtccccaagaatgagaaaaaaaaaaaaaaaagaaagtgacaatgtatgcccagagaaaggctcaggaaaaacctgaggagatttaagcttatgcttcaactgattctcagcacagagattctacaacaaccaaaaaacaacaacagcaaaaaataagagaaaactgaaaaacttggggaaggttaagaatcttatttccagatttaacatattattagactcagatatctagtgattaaccacaaattacaacacacacaaagttacagaaaagaattgcccatttaaagaaaaaataaatcaacaataaatcaactttgtccctgaaaaagacctaatggcagctatactagacaaagactataaaacatctggcttaaaaatactcaaagaaatataggaaagatgtggagaaagtcaagaaaacaatgcataaacaaaacggaaatatgaaaaaagagaaaacctaaagataaaagaaattctggaactgaaaattacaataactgaaatgaaaaattcactagagggattcaagtacagatttaagcaggcaaagagagtcgtgaacttgaagatagggcaatggaaaatttcaaatttgaagaacaagagagaaaaagggttgaagaaaagcaaacagagcctaaaggacttgtaggaaattagtaagagggttcagtatatacatcatgagaggccctgaaggccaagagttggagaaggggcagagaggatatctgaagtaataatgactgaaagctttccaaatgtggtgtcaagacatgaatatacacattcaagaatctcaatgaattccaagtaagataaactcaaagagatccagactgagacacattataattaagttttcaaaaggcagaggcaaagagagagtctttaaaaatagcaggagaaaaacaaagaattccctgccagtccagtggttgggactctgcactttcactg

SEQ ID NO: 51095 - DNA, 1557 bp, Bovine  19866880692120
  misc_feature (1)..(1): n is a, c, g, or t
ntgagagtatgcaacatatataaaagatgcccccaaatccacaggcaattagaaaattctggagccactggagcgaaaacttgacatcaaccacaggcccagttggtcaagtaaagagtgtcaggaggtgcagcccagagcccatttactcatttttcttttccctgaagcttttaccaaacacctcatttattacaaactgaactcttcaggccagaaatcacagaacagtcaccatgtcctccttcaagggggttatgacccaacagctgccaaactcagttcgtaagaaagccctgaggcagtggggggcgggaagggacaagtacaagcagttctggggagtcctgagctgttagcatttgtgtgattcctgaggaactggacgtggaacaacagactggctccaaatgggaaaaggagtacgtcaaggctgtatactgtcaccctgcttatttaacttctatgctaagtacatcatgagaaacgctgggctggaagaagcacaagctggaatcaagattgccaggagaaatatcaataacctcagatatgcagatgccactacccttatggcagaaagtgaagaggaactcgttcgaagaaaagttatgacctacctagatagtatattcaaaagcagagacattactttgccaacaaaggtccatctagtcaaggctatggtttttccagtggtcatgtatggatgtgagagttggactgtgaagaaagctgagcaccaaagaattgatacttttgaactgtggtgttggataagactcttgagagtcccttggactgcaaggagatccaaccagtccatcctaaaggagatcagtcctgggtgttcattggaaggactgatgctaaagctgaaactccaatactttggccacctcatgcgaagagctgactcattggaaaagacgctgatgctaggaggtgttgggggcaggagaaggggacgacagaggatgagatggctggatggcatcaccaactcaatggacatgctgctgctgctgctgctgctaagtcacttcagtcatgtccgactctgtgcgaccccatagatgacagcccaccaggctcccccgtccctgggattctccaggcaagaacactggagtgggttgccatttccttctccaatgcatgaaagtgaaaagtggaagtaaagtcgctcagtcatgtccgactcttagcgaccccatggactgcagcccaccaggctcctccatccatgggactttccaggcaagagtactggagtggggtgccattgccttgtccgaccaaagatctagctttggtaaattaggcagagctgtatttgacagcagacaggtaaactgtgatatcaaggagcaccattttaatctagggcccagctaggttctaaaataatggggcccaggactatggagaaatggccaccaagttcaacaccgtgcacgtggcactggtttctgtgtagactgtttcaaactcagttctttatgacatggaccagattagtcaagtgcccaaggcacagttaatctttaagctagg

SEQ ID NO: 51096 - DNA, 2865 bp, Bovine  19866880916229
  misc_feature (1)..(1): n is a, c, g, or t
nggagtgtttatgtgaagggacccaggcaaaggtgaagactggaggccaaattgcaaccaggtacacggagacgtacttgtgaggcctcgggcaggagaccacggagacgtacttgtgaggcctcgggcaggagaccacggaagacgtacttgtgaggcctcgggcaggagacgggctatagtctggggcagaggcacgcgtcttaggaacactgcctccaggtggggccaagcaaaagccattcaaggctagtcaagtaagatcacccatcagaaggaggctagagaaagaaagtcaggcctcagatgcaggctgagaagaaagggagttcagagtgaaggatgagaagcaggacctgaacagtgctagaggccagaaggacacagcagcttttctcgaatgtttagccatgggcgcagccagaggagtgtgacccgcagctggcaagcaggcatcaacatacatcacagtagtagcaccaacagcctgccctggggagagtgtcaccatttacaacaggctttgcgcagctcactcattagtggtattaattacccagcagcagtgtgctatgctgcttgaggcaccggcttgttctgaacttagctggtgagttctggctttgctagttacaaaaaaagatggtcttaagctagctactgatttctcagattttgtttttctgccaagacattaaatgtaatgttagcctatgttgtaatatcattgtgaggattacataagatcatggcttatcagattgccaggtgcagaacaaataataattacttacagttattactacaattaccactacactattattattattccttgactcaataatccctgaaatgtcttcaactgcatctacagtgcaaggtgagctttcccagatcaggccattaatcctgtgaatccctccagataaatcagggagctgaaaagccaggctttgatgccggacacattgcagagaacattccaaactctgcagtgcaggatctggggctggcaagatctatctgtttctggtggaagctgttctttccctcagcctttttatgggcttgggtacaagtcaagtccttcatccttgtttcctcctgtagccccttcctcactctttggaagtgagatgccataaagagacatccccccaggctcactgaattacaaaaagaaaggcatttcacaaattggagaacatcctttgattttttccaggaccacattttttccctagttggctttgtctcctggttgaaggattaaaaaaaaaccacacaaaaggctccacgtatcttttgaaaggtgaaataaagccagctgagcctaatcaatgcacaaaggtgccataaatacctgccaggtcataaaagcacgatctctctgatatggcaaaggagaagtgagagttacagtgggaatatggcccccgattggaggataaacacttcccaaacttgctttgtgttcttgcctgtcagagcctagtggctgggctgaggattagaaagagagccttgcattagaggcttagaaagagccttgctcctagagagcccacgccttggtcaggtgctgtctgaggactggagctgccattgcatacgatggaggggaatgacagcctatcaaaccaggcagccaagtgtaggcgtgttgagggtgatgccatggaaggttatttccttttctgcttggacaataaaggtcttagttacctgtctggtctcatcttcattaatttaagccaactgtggtgactcactgggtcctgcttgtcttcattatagttcaagaacattctttggcctccaagcaaacacacttctgtttagtgtgctgggcatcactttagtctgctgggcatcaacagatatgttgagaattaaagtcaggctgcaacccccaaacgtggaaataataacttgaaaaacagtggaaagtttggtcttgatgtgaatgtgctgaggtgtggaccttcctggacggcgggtggtgtgatgggcgtgcagttggcatcccttgcaatctctgaatagctagcatcttgggagaggaactagatgctgatggtaatcatgtaagtacttagaattctcatttttattttcaagaggtaattttcacactcaaacaaagtgacttgccccaaatcaaacagcttataaacgctgacgtttgaatcttatttcaagccctttcccaacctccttaacgaatatagaaagtaacaatctcttgctgtaagcctgacggcgtgggtcccagcatggcccactgatttgccctgtgagttggggcttcctctctcttcctaaacctttcatcagaaacagcatgccaagtgctgctcacttgttcatagcatgtccatggccaggaacacggtgagtggttagagtcagctctagtggggttaaatcttagctcatcacttattagctgtgtatttttgagcaagtttttcaaactctctaagatgtcatatcttcagctgtaaaatgatctctgagaagaccaatcttaagaatctgtggtaaagattataagcaatgattacacagcagaggggacacacagagccggtacaccactagagaaaggacttgtttcacagcttgaagccaggagcaagactaatcttctgatttcctttctccactgtgagttggaagattgcagaactcagccattaagtctaggagccatttggaagagaagcccatggatgcgtgtggagtcctgggtctctgtcagctcacagaaggggattctaagcgaacctgcagactgtgaacattgacacatgctaagagatgtcctccgtggtgagcacactctttaggattatggga

SEQ ID NO: 51097 - DNA, 1817 bp, Bovine  19866880935075
  misc_feature (1)..(1): n is a, c, g, or t
ncttctaagaaacccagtgtctaacacttactagatctgtagcatgggatgtttttccaaagcctaacttaaaggacaaataatatgttaagtgtgtgtgcccatttaaggagaaagaaggctctcacatggcaaaatcaatgaaattcacgtccatctgtagaatatattctcattctcagcctgcctctggaatgggttgcagagtttcatatattaacctgaagttattactcatatgctaacaaatggagttaatgaaaactatttcatataggaaagaaatgtagatggtatacaaattatctgagacattgtctgaaaactggcaaatcctgttgcacattaatgggatgacgttgctactcaaggattcgaccaacggaatagtacaagaagtatccagtaagtggaatcatcctgctaatgggttcaatgaaacagaacccactaaagtaaagaaaatctacctgaaactagatattactgatctcaatcaagtacaatcatccagttgttttccaaagatatgcattcaaaatctgcagaatttttgaaaacttgctttaaaaactcacttgtccagaatcttctgtcagagaacgtaaaagggaaaaatcatacaaagtcacccacaaaaagccttaggaaattacccagtaattttaattcaaactccactttactgttttaaaagaatggccttgacaatcatcttcattgttaatattttatgttaaaatatatgtatattttctttcaagactcaaagaaatctaaactgaatcttaacagcatgtgattatacccaggcattttcatgacttgcctctcaaaacaccagagggaagaaggtaatttctccgccttcttggaatggtgccaagaagcttcaaggaaagccaagcagagtgcagtgccccaggagcagctttatctgatgcaagaaatcacatgtgtttgatcagacttgggctcctttatgtttccacacttacaagtcaaacgtaagtttattctctgtggctccttcttggctaaaaatgttgggttgtgagtgcttccctccaacactttatggatcttacaagtcagtctggactgttcacaaaataaaggtttttttccctaacgattttctgaagcaggaatgctataaaaaatgagactgcccaagataacaggataatgccctatttccttattgactcccaaaggccccctttattgggacaactccctgggggaagaagtcttccagaaaattctgtggcccctgcttccctgagcccaatcttccaatagaggtacatgcttattcgctcagtttcttcacccactgagtcatcagggaagccccctacagaggcagatattgttctactctcgttctctgggggcacaaatacgaccatcagggcaattaggaggcagactcagattctacgactttactcactctgtccccttggatggggtaatgagcctccttatgtgtgttttcttacctgaatttgacagtcaggaaaaaaaaaatcaatcctataccaaatgttgattaaacaccttcacattacaggcagagttagcatctaaggaaacagataagatctccctctcaaggatctcctgataaagacatgaaatgcacagcatgccagagagtagtgtgtgcaggccagggactggccttctggacagtgggcaagggaaggctgcagagaggagcagctgtgtgtacaacctgaaggaggcgaaggagcgagtcctgcagatacgtgggagaagagcctgccaggctgcgggaacagcaaggg

SEQ ID NO: 51098 - DNA, 686 bp, Bovine  19866881034013
  misc_feature (1)..(1): n is a, c, g, or t
ntgccctgccccaggcatacccttcctcccccgcacctctgcccttttatctcattcaggtttagctttcctcgggtgggtctagtggaaagtccgttttggttgttgtgcttacttgtttaaagctttgtccaggtattcctgaatccacttcaatttcgggtcaatgcacacttgcctattgttgttcttcagccttgccctgtcaaaacagaagaggcgacagtatgcagctgagcagaagggggcacggctgtgacccgggccactgctcacctgatacccaggtgtggaccccactggagcctcccagccggctcaggcacagaaggaactctaggtgtgctagggagacaatgctagccacgctgcaggtttcaccccagagacactgggaagagaaggaaggtctttaaggagtccagagagaactcacacatggaacacttgagctggcttttgaaggataagtaggagtgggcaagtaaagggggagagaaaagtaagcgcaaatactccaggggggtgacagtgcagagagaatgtggagggattggagagacgggaccctgaagaagcctgcggccaggtgtaaggagcaaagaagaggggctttatctgcaattttgtttgtgatgggaactcgtggggactttgaaccagagggtggcagaagcagatttgta

SEQ ID NO: 51099 - DNA, 1648 bp, Bovine  19866881061493
  misc_feature (1)..(1): n is a, c, g, or t
ncttggatagtctgtgtattaagaaaggaggctggtggagtgctttaggacaacacaatctcatctatatttcactagtggaataaatacctggcagccttttttgtagctttaatgtttccaggagtgaaatggagagaaggcacccattttgatgtgttcctttattagccttggacagaataattgttccctccttttttttccccctacaagcagccccagtgagaatctcatctaacttgggtggtggaaaaacatttacaaatgttttccttttgcccctgaggagatactctgggctatttccatattccttcacaggagtttggctggaggaggagagggaaggcttttcacacgtagcgttgacttgtgtgttaaattgtctgcaggaatggagagtgcttgggtcacctgtaaagcacttcaagaactccaagccaagcagcccagtagttctgctgttcctaaatattctctttccaaaaaccttgcactgaagtttgccaatgcatagaatttattatgtattctggagctcactaaagttgcaaattgctttctggataatttcatttcatactacttagaggcacactgatgtctaatttgaagttcatctcttttgaaagtgtcttttgccctgtacattttcattgctctcggtagtccctgaaggacattggagggaaagtgacttgtggtgccaggcatgtgtgttctccgcatgggagcgattgttggagtcaaggcagatacagcaaagtgcagtgcaactatattccgtattttgctgaatcaccacctcatggtttgggatatttatgtttcgtgttcatattttatgaggcagtggcagaacaagaggtgaccaggagaaagaacacattttcctcacagagacagctagaaagcagtcatgtacagcgattgcctgatgtatgcaactctttagactgttcctgttaaagaaagattatcatgacacttgctaaagatagcaagaaagactttatttaaggggtgttacaatggtagagttttgtgttaggggaaagagatcagactcaactgtgaatacagtacggaaaagtggggatttatagctaaggatcaaggtggaggcagtgtccatggatggagtcgaaggaggaaacggacagaacaggctccatcttgaaagcacgacgccatgttgggccagactgtggactttgagctatgtgccgagtatctatggaaacgacgtaccaactggaaagccaggccccctgaaggaagagccccaaggcttgtacctagactttcctttgcctaaaagaaacccctaattatgtgtgtaactgaatagaatcatacattctattatgcttattggggtatgaccacaggcatatgaatcacgggttaactttgattgtatctttcttttcctttgttcagactagtttcagggaatttggggaggtgggtttgggcatgtacacttagggtatataatgttttcacaaaacttggccggggtccttggttaagaggagactctgcctcgggcccgctggtgtagtaaactgattaagcaagattcttgctaaagttggaataaactggccaagaacagagcccaaggtaaaacaggcaggca

SEQ ID NO: 51100 - DNA, 727 bp, Bovine  19866881157681
  misc_feature (1)..(1): n is a, c, g, or t
nactttaatgcctctgactcattcctcaaagacatgcgttttttattgttttggttttttttttcattattgaaaaattgcaggccacgcaaagctagagacttcttggtccagggaatgtgtcagcttgctttcatttagcacaaaaggaaggcttttaagagagatttagagaagccagaggccttcttgggaatggtcccaaagatgatgaagaggctggaaagatggagctcagataaaaaaaaaaacaggagagtttttggtgacttcactggggacaatgggaaaagttactttccctccagaaaactgagaattaaaacacaaattgtgttcctctgcccagagatttcattaaggctgcctggtttgtttggggatacagggacctggggcatgcaggcaggatgtaaagctgaatcttgcaggtctttatttttaaacttttatttgtttatttattttttggccatgccatgccacatgcaggaacttagttgcctggccagggattgaacccgtgtcttctgcagtctgagctcagaatcttaactaccagatggtcagggaagtccctttcaggttgttaaagctaagaacaatatgcatcctttgacctggtttaagtattaactacttcacagacaatatgggttgctggtgcctgacttctggggatgggagtctgaggattatagagacataagaatgagaggcaaaagct

SEQ ID NO: 51101 - DNA, 735 bp, Bovine  19866881181313
  misc_feature (1)..(1): n is a, c, g, or t
ntttcttcttcaaagctttctatgaaagaaaagtaaataaattctgtggaaatatttattaccccaataagttctttagattataggcagtttgtttgtgtgtgaagatttgaagactacctgagaacttcatcatctagacatttaacagatgattagaataattttaaacagttttttgattcagcacttcatgattgatttgaaaaaatacttgtattaatatctatagatgtatgacagaggctgattcatgcaataaaggagattttggatgaattaatttgaagacaaccttgttcactcataactgctgagctagtgccctgctaggaaacatatatttattgtataatatgaatctgtgttttctgtctttggattctatgcatatgtgatcatatttgacattgaagtgggtagagcaactgtcctgagagcaagagaggctgaagggattttatgtcggatcgcttgaatcgtgtggagagaggtgactatcagtctgcatgtcttggcttcctcatctatctcatggagagacaacatacacaacagtgccgtctgcttctgagaaatatggagggcattaaatcactcatgagagcgaggtgtgtggagccttaatgaaaatcaagtgtataataggaaaataaggcgcagcacattttattccgctctcccgtgtggccgtatggatggattcttcccaggagagagcatatcgtagagcat

SEQ ID NO: 51102 - DNA, 1039 bp, Bovine  19866881449990
  misc_feature (1)..(1): n is a, c, g, or t
nttagatttcaggagacaaataaaccattttttccttgaattaccctggcatatttggtatttacaattgcaaaggtctgagccttgctatttgtgcaatttggcctggaaatagagacctcaagcactttctagggtcagctgtgtgtaagcgtcgtggctctgcatacctcatttcttcctggtcttcataaatttcactgctgtcagctcagttttattcatgggagctaacacagccagcggccaggaagagcggagtgagccaaagtgtccatttgaatctatttagcatctaatactgagaagtaaagaaactgagggaaggggggaaggaagatgagatgctctggtggaaacctgctaaacactgagagtgtttggcaggagaacctcaaataaatcatcagtggtctgcacctcacaaggagatactttggtccctggaaacttggtgggggggtgagatatagggtagaaaagcaagtcagttctcagggaatgtggtgaaagcacaggcatccccagagtccttacacaaaccaccattccatgcagcactcaagtcagcaatccacaaatctctcatctgcagactggctgcagcactgcagagttagcgggggtcatataggacgccattgctggatccaggcagatgctccacagccctacggctggccatgctgcctccaggaccagccagctctaccaccattctccctcatgcagtgcacaccactgaatccagagacacatcagctacgtgagtaggttagacgattgccgattttcctgaagcacaggtaaccatacttccttgcaattaatattagttattagtataataacactactgctatattaattattatactaataacactactgctatattatactaataacactactactatattaatgaattctatattctcctcttcatataaccaaatataaattactttattaaatactcattaaaaacccttattttctagaacctgtccttgaggttctaaactgattgggaagg

SEQ ID NO: 51103 - DNA, 1136 bp, Bovine  19866881457302
  misc_feature (1)..(1): n is a, c, g, or t
ncctaattttgcttcttacttgtttaaaaaaagtcttttcttggcgagcccttgttttctgtacctggtggctttttcaggtagctgtcttctctggcacctagtctagaatacatgaattcaaaagaaaatccaaggaactcaccaccacatcctggcttgggttctgaggtccctggtcagtctgccttttcctctctacttttcagcaggaggaataagaaatatatttcctccatcattgtggaggttgtggtcctccataattttgcttttgatgtcagtttttgttttctagatggtttgatgcacaattttaatcttatgctatctggatatctttacatttggataaggaaattcagcccatatacactgacttcaaatgtagatactgagcaattaatttcttccattttgtttaccacctttgtaataaaaatcacttggtctagattttttccttccttagtttgttgatctagtcaggtacaatttcatttcccttcccagtgctctggtttgtccaatgtggatattctattctgcattaccattgcattcaagtggcttctcattttaaggttcccgcagctaataagtgcagagttctttctattgttcctctgagtattttgaggtcctggggcagatttcatctaggaacacagaagctgtgttttctcaatcggctccttggagcaggccccatcattatgcctctctgaaaggacattggaaaactaggttgtggaggccagacgccgaggaggtggccatgttgactctagggatatctgaatatagctctctcctctgggtaggatgataatccctatcatttaagggaatggcagcactaaaacctcacaccatcatcatttgcttttgcttcatattaagtgaatagcccaacaggagcctgcagagtccacttgggacagggaacagaatttcaaagaaggtcctcctgcttcaagctgcttctttttaaaaggtgacatgagggcatgacctagaatctcagagaatctcaaatgtctgtctttgggggcctggccttctttatccatcataatggtttggggaatggagatggagtgtctaggccagagccaccgggcggatagaattgg

SEQ ID NO: 51104 - DNA, 1625 bp, Bovine  19866880371266
  misc_feature (1)..(1): n is a, c, g, or t
ngtcaggaagatcccctggagaagggaatggctacctactccagtattcttgcctggagaatcccatggacagaggagcctggcagactatggtccatagggttgcaaaacattggacaaaactgaagtaacttagcgcacacacgtaaagttgcatgtacaccttatgcttatatttttgttagatgatgctgctccagagcaaggcacagtgaaaagtctagatctaatcaagctagaaatgctgaaatttaccagagtcttccaaactccagaagttgaattccctcacaatagtttcataagaaaatatatcttagggcactagagtagaagtgagcaaactgcaaccaaggggccaaatccagccttccactggcttttgtaaataaagttttattggaatcacgattattcattcacgtattgtctaaggttgttttcatgctacagtggtagagttgagtagttgcaacagagaccatctggcctgcatggcttgaaatatttaccatttaaccctttattttaaaaaaagttggccaaatcctggtctaaggcaaaaaaggtaggtattgcggctctggaaggcagagaggccagtgattgggcgccaactccactgctcattagttggagtctctgggcacattactgcagacccctgagctttggtgttgtcatctgtaagatggaatagttgtaatagttatttcatgggttgctatgagaaagaattaagggagaggatgcagctgaagaggctggtagctaaacaataactattataactgatatgtctctatgtctttattatttgtttgttttgatgagttagcagccctgctctgtgcctccatggatccctgcagggttctctctctgtaagatatttgtctgctcccctgagtgtctccttaccccagactatgtattctctaggggcagatgagtctgaattttcttgctttttgtagtcagagaaccagagtagggaagtgctggctggctccctctgctcaatgcccctcgctcctcttgttctacagacagttgagaggacccttctttgagggaactgggtgggaaggtggtcttcccacaccgacttctcctcagtggtctgggggcaacggaaccctgagggctgggtccctgcagtgtttagtcagacctgtcgggtcgagcagtctccaccccagttccttgtagggtgcctctgagtcattgagggacccagagcaggcatccagatgggatggaagcctatttttatccactattgatctctcttgctcagaaaccatcattatcctggtgtaaaatggcagctcccaatgcaggaggctcacggtgtctctggccaatggatacccagcaaattgctccaagccacaccagctggagaaaccaaaataacttcatgagacagccgtccggcctggccccactgggctgtcagaaaagggctaactttgaccctttctaacattatccacagcttttcttgtcttgtctttgggaaaacaaagatgaagctagtctctaattgacctggtgtctgcagttcttggccgtgcctggcggctaacagaggtagaggcctgcgccagcatcaagcccag

SEQ ID NO: 51105 - DNA, 1717 bp, Bovine  19866880532933
  misc_feature (1)..(1): n is a, c, g, or t
ntctaagttgattcctctggaaaccagccccagcctctctttaccttagggctttcctaaagtaatatcattaacattacaaaagacatcttttattgctctcctctcttagagaattttgatggttttaaggattctgccagaaactggaagatcacgtatgtatttctttttataaatcagtatcacagcattgtgtaatttaatttgatctttataacatcctttgaaataaatagtacagtctccatttcatagatatataaaatgagattcagcaagtttaagtcatttgcttgatatcacctaacttgtaagtagtagaaaatagaacaagatttgcctgattccaaaccctaacagagtgattgctctattctactctgaagcatttataattgcgtgtgacacctccaacgatagactcttacagtggaagaatgaaatatttatgctgagaggttgggattatttgatttattcagtaaaatttaaaataattcaatattagaagtcctttatattctggtcttttctatctatcaacctgtctgacaactgttttctccaaaatctcccaggtcaccccaggtggaggggaactcatgaccttttgtgcaagccatatgaattttctttcttttgcttttacttcatggcaccaccctgcccttctaatccctcagagtacacttacctgtcttttccacttatttgatgcttgatctgctcagatatcttcacaccatgaattcttcttgcttctattgacttgcaatgaaatctacattctgtataatcctggtggaagaatcattttggtgcttttttacacagcacctgataacgatatttaaatgtctatatgcgtcttttctttctccttactgaaatgtttaagcaccaagttgtcatatcttctgtttctccatcataacaaatagtacatttaaaaataaatggctatttaactgagttgaagataccaataataaataatgctgtaaaatacatgattaaattttttaaaaactgtgcttggtaaattgatgtattcctgtaatctcctggaggcatacatttaaagagatggaagaggctatggaagtacaatggaacaggaatgcttaacacaagagtcaactaagtataaaaaagaatctcaggaccaggattcattttctgctttttgtatattaaatgaaaaagttcagtagtaaaataagtaattgagttatatcactgctttagagatccaaacaccaagatacaaagcatgaattcattgttcactcataaaactgttatttagcagtcgtcccagccagaactgaatcaattaatattaagatctccttgtgcatatggcactgtgctaggcatttataagggggctggaagtgcttgtttgtatttaatttctgttcttaggaagcttacagttaagataaatgcattgaaagaggcatacatttccatgtattaatgagaggtctaaatgataggatacagaatgtgggggaagagaagtacaaagcacttgaaagtgttttcttagtattctgtattttgatgccactttgaattgatttgtagaaaggagagaagatgagtgggactggaaaagctgaaaagaggagaatagaatgtaaatgtccttggtaggagggctcagatctgaacttcttttgtattcttttgcatcaccagcacatac

SEQ ID NO: 51106 - DNA, 602 bp, Bovine  19866880652922
  misc_feature (1)..(1): n is a, c, g, or t
nggatggggtataatcctctaaattattttcgataatatcaggagactcataaaagtcaataaatgtgattaatttttctttttttttttttactaaatgggatttccaaaattctcatgtattctactcaagcacaaagatttatagggcttcaaaaagatttccacagaattgggcagatgctcgcatttatttatgtgcatctttaaataaatatactttattgtactctatctgttttgtactttaaactctttctggaaatgacatctcaaagactttaggagccttacatgcaagcatacacaataatacttcagatttctctcacggtgaaataaaagcatagttgcctaggcagtacagcttaaaatgtgtcttttattaagattaaaacgttttgtagaataacaccataatgtatttaggagcatttttcttgtttacttgtgttgttctgtctttctcgatgtctttggttataaaaatgtcctattatgttttaaatattacaggcatcagaggggaaaacaacaatgatttgtgcttattgctaaacaaagtccagtaaaggttaatgaacttctgctactacatgaat

SEQ ID NO: 51107 - DNA, 2383 bp, Bovine  19866880792181
  misc_feature (1)..(1): n is a, c, g, or t
nttacgttccttcttgtgtcattctcaacttattttcccctacaccagataattccttcctcctattactgaacaatcactgtttgtctctgtcttctctctcttacactcacagacatacaaacacacacacacacacatacacacacacacttagtttctcaaatacacacgtacatgaacacacaggtttattgagagtttgactttttatcctatcaacaaattaagtgctgttttcttacagggttcaccacacaggagagcaaaaagcagttattatttatacctttagacacgtaatactcaggggaactccagcatagtaaaaaaaaatggtgtcatagttggaatattgaatggtatttatggtaactcacctgtctagactacaaagtatgaaaccttggcatctgaaggtactattaatatcatcaaacccaaacttctcatttaaagatagtaaagctgaagcccacaaaggtcacagaacacaactagggtgatgatatttcattacatattgtggagagattcgaattctgccatattcctttagcaaaggattaactgcatgcccttgagccatctcttatggatggctcagtccaagaaagactatctttttggattttcagtgctattagagttattctttggattgggttaatacatcttccaaatggtggttcctggagcaagaaatccccaaatcactataatgacatcaccataagtaacacactaagttctgctcagctaaatttggatctggatttgtggaaattttcaagaataataattagttgggatattattagcacatctcagagaggttgtgtatgaaacaaatcattgggagtacactgttgtaaagcttgtacagcctttacagttaccagaacaggctggacctttctttacatttaaaaaatttttcaatcatgatactagaagagtatgtaaccttttccacttcctcactttgggtaagagaaaggatatgcaaacgtttcaagaatagaataatgttgtaaagaaacattttaaattagattggaaaatataaactccaggcctgttcatttggataattgttttaaattaatacatatcttaccaatataaaaataaaaataatatagagcctaagaaaagctggacaggtatggtcagggtctcaagtttgagagaaaaaacagtgcctcaaagcagacagcggagaaggcaatggcaccccactccagtactcttgcctggaaactcccatggacagaggagcctggtaggctgcagtccatggggtcactaagagtcagacatgactgagcgacttcactttctcttttcactttcatgcattggagaaggaaatggcaacccactccagcattctcgcctggagaatcccagggacggcggagcctggtagggctgcggtctatggggtcgcatagagtcggtcacgactgaagagacttagcagacagatggttcagaaccctggacagttgcccagctgctgctcctgctgctgctgctgctgctgctgctgtagctgtaccttttctctcagaccccgcccccacccctcacccttaccaacgtggttcccttggctgaacgaatacttagcagtctgcagcacattaggactgctataaacgtcaccttagtggtcccaagagagacaagacatactgtcaaatgtgtgttatctttacaaacattccaaaaaccaagatttggacatttgtatactatcttgtttctatttccataatattttatatgacagcctaaagagagagagattggctatattttcagagtacataacagcaacaccagaaaaatatagttgttaaaaaaactgaaaattctcctctccacagaaaaacagtattcttaattgaaataatcagtttctcatcttcatacttttactctgcaaagtctttgcaagaagcatttcgtaatagccagcattgaactcttaattgaaaggcgaaaaatattcaaatatatttgtttaaattgcatattatagactattttaggaaaacctacatcatctttttgggaatatatgagaaaccacttcaatttgccaactggttttggtggtagcggtacagattacattcatgacagagcttgaactttgaaagaaataaaagatttcagtaatctcaggtaacatttataaatcttttgcaaaattcagcaactaaacacatgtcaggagctatattttctttttctattttaaaatcgggatgccttgtatacttaactaacaaatacagtatatgaatgaccttctgaacatacagcttcaatcataatagagttgccatttcagtcaatatgtcccttatct

SEQ ID NO: 51108 - DNA, 1181 bp, Bovine  19866880815316
  misc_feature (1)..(1): n is a, c, g, or t
nttagctaaaatttccaaaatcatgtcaaataattgattgtctttaattgtctttcctttttattttcatccaggataaattttctggtttgtaacattttctggtctttaaaaattgctaatggaaaaggagtacaaaatatttatgtaattaggacagttcaacactttaaaaaaaaggcaaaaataaacagcagttatgggacacctgcttaacagatactggaaataactgctttgtgcttcattaaccagtaaaaacacatttactgaattcagaatttctaattatcactagaatcgtattaacttggcaaggaaagaaattcctgggtaaagaatttcagaatttctataaagcctgcaaacaaatatttattaaaactaaatgtgatttaatttaataaacaattttagactaattgttttgcatattttatttacctttgagtggcattactacagtgcctcacatatggttgtttcaagggccaaagtggaaagaaagaaagagaaagagagagaactctactcaaataaacccaaaccatgaccctgatgcagatttgctaagaatgataaggcagtgattatctgagtcaaatcaaaatagaaaattgtaaagttaatgcaaaattattagaaaataaaacaaaataaacacaaacatgtcaagcttttacattcgatagtcagggagttggctcaaaatgacctctttagctgccttcataaatgctataagactccttcaatgcgatggcgacaaccattacaatttgcattttccttaactttgaagtatctattttctaataatcttattcgtgttttctaaggaggtaatgcactggaaaaggcacacaagattcagatgaccagaattccaaatatggttacaaaactaagtaattttaacgagtttaagtaaataatttaatattttcagcatagtcagtaaaatgaagaaacaaatctgggttgttcatttagatcatgattaaaatcaaacacaatatgcagcagtagtctggaaaccatataccaaaaatatatgtgatccttacatccagcatgtgaagactatgtaacatctttagtgagcaccaagggttcatgatgctggggacacagcttatgaaacaaaatatataagaacaaaacatagcaatccatgccca

SEQ ID NO: 51109 - DNA, 1132 bp, Bovine  19866880844238
  misc_feature (1)..(1): n is a, c, g, or t
naaaaatgtttattgtttgagaaactaatcagtccattctctgcataaaaggaaaagcccattcagaaacctgttagctatgaggagctagcctgaatgtactcacaccaagcttggtattacaactttatgttggaatttggaattgcttttgtttagtattaaattaattattggaaaaataaattcaaattgatagattaaagatagtcagctaacagactttaccacactatatcaaaacaatgtcactgagcattagtgcagtttttttttttaagggtttttttctgtctcttgaaatcttttgactacctcaaaaagttctttgtaatatgtgataaatgtgtttaaatatatgctttcagatactctttaaaagctgaattaagtatgtttcttttaatggggacaacagaaccatattactgatgaaaagtataatccccagggagtcaacaatcagtttagttgcaaacctggccccatgggctagatgtaaaccacagctctgtccattgtagaacttgaagggctgaaatgaaatcaacacatgccatcaatgcatttctgttttgataaatactgtttaaatttccgctggcatttaaaaaaaatatgtattaaaaagaagaatgtgcacaacgccggctgagcttcctcaaatatgaatgtgttcgatttcatatttttagttctgtgtctgttgagaaaaagccatttttgctcaaccccagtctataaatttctgtgtgcttattgacataatatgtaaatgtccttgaccagataaaaagacaaaaagaaaactgcctgcctgcttgcacaagccatgaagcactgcaaaccctctcaaagacctctctcttatcaaaacaattctccaaggctgagcgatgatctgaaaaaaaactaagagaaaataataaagagaaaaaatcaagcttgcatattttgacttacattttttgaaatataagcaaaaatatgaagttttgctaaaataatttcaatgatgcttatttctaaaaaaaagaaaaaaaaccaattatgagataaatattgctaggggaacaaaagctatatatttaccacaaacttgttctttatttcattttaaaagacagatggg

SEQ ID NO: 51110 - DNA, 949 bp, Bovine  19866880902079
  misc_feature (1)..(1): n is a, c, g, or t
ntgagacagattaacaagagaaaatcaaacaaaaattttgtaacatgtatacatgggagagacccagagaaactgaataactcgcccaaatggctaaagcgctcaacttaagcagcatcttcagctaaagacaaaggaagatgttgagggtaagagagtcagttttaggaggttattaggaaaagcttagtaaacaaagtgattgtgatgcagatttaaggcactactttctccactgataaaatacttggttatcctcttccaggcacagaaataaagacacccttattaaaatggacattcctcttataaatatgtttcttacaaaagggcacctacctggttttcgagcccttttcatgtctgctgtttctcagaaaataaccaatttaaaataatatgccaaagagacatattttggggtggcaaattctgctctccaacactaccaaataattgttctcttgcattctgcaaattggatgcaatttttttttaaagtataatctgataacattttcaatagatggagaagaaactactcaggatacccgccccccccccaaaaaaaaaaaaaaaaaaaactaatgaaattctttgaatgtttaagacatgaaataagaaaatgaacaatattttcaaatgtactgaaaagactactctaggtactttacacattgactatatttatcaaatgttgccaagtaagttgctaaggcaagaatgagaacaggaaacatgtttcagagtaagctactagcttggagtttctgtgattgccatacatgataaatttcaacttttaaatgtttaacgatgtaattgggcaagtgctactggaaaaataaacatgctgattttcaacccatttattccttcgatcaacacatatctgggtacacctacttatttctacacactatataagctaaggattcaatggttaaca

SEQ ID NO: 51111 - DNA, 1240 bp, Bovine  19866881082148
  misc_feature (1)..(1): n is a, c, g, or t
ncttctgcacaaaaccaactattgaaacattcttattgactccatacatatcaatgcacctgagagggtggtaccagcccagaggatcatttagacacaatcttactttatgttctgtcagaacactatgcttaaatggagagtgttcttcaacaaaaaggagcactagaaaagatggcaaaagggaaatcagtctacctgttattcctttttttctgtccagtcaggaagcaacaacttccttccaaaaatatttaagggattgtgatgcttgtgtctgctctgaagataacggtcacagctggaaccattacccagacatctcttatgactgaatcactgtttagtgcaggtctgtttccctactcctaatgaatcctggctttagaattgcagaaattcatccaacagaagagaggagtgcactaatgtgttattttcccatgagtgaatcaccttcgatagagtctaaattccataattttgtacgatggatgcctgagtgttttgtgagtgggccctgaaaatcaggatccaatttgaaaacattggtaaggaccctgcaaatgactattgtgttactaagcacacatttgtatacttaaagcatctcaattacaaaggatggcacatgtaggataaagtgataactggcaaaatgacaaacaccaagccttaattcattcaggattacattaaataattgaaatagtatgttttctagaataaggttgcagagatttctatgaaaagcaccttagtaagtagggtaattttctcaccatcaaagcatctgtggcatggatgcccttgttttctgaatagaggatcaaaaatcatgtatcttggaatgctttgagactagttttcttcaaggcagagtcctttgttctccgatcactattgaaatcaaggatagccaagtcaaatggcaaccagacagaggtcataaaccagtggaaacaataagaagaagacactctagtaacttaaatggagtcccaaatacacctaacatctcagggtgcatttaagaaaaaaaggatgaaaagattatgaaagtccagataaacacaactgcaggccccatctcaggggtgctgccagcctacggggagccttcctacaccacaatccgaggccttgtgctactccgttgctacacctgtttgcaacttctaaattaaattcattcctatttcctttttccaaaccagagatactctctaaaaggcagggt

SEQ ID NO: 51112 - DNA, 2230 bp, Bovine  19866881157744
  misc_feature (1)..(1): n is a, c, g, or t
nccatcatgtgcatcaaaatctttatatttatataagctgtagagttcaaactatttatctctatattgccaatacctggccacctcacagtagatactcaacaagtagttgtcaagaatgaagatttcagggccagtaaggtcccagagaggtcccttaaaccaggccttcttgagtctttttttttgattcatggtccacatgcttctacttaattttgtaaaaatagacaaaccaaaatctacacacaactcgtcagcattgactgagattaatggcacttttttgccaaaacagggaaaactctaagtaaaatacaaatgtatgtgaagtgtcatcaccaacagattacaaacaatatttctgtagcagatgagcccataggccacctgcaagctcattaacgtctcagtttgagaaccactaatggaaaacactttcttttagacactcatttctttatttaaagactctctttccctatccaggtgtaataatcttcctcattgtcatggtttctaacagtaagtgttaaagaaacagccatgattcaactccagcatgagccaagttagcttcaagagtttaaaaacaaaacaaaacaaaccccctcaagctgtcccgtaactgcagatacttctcctgaccttctgctaaataaccattataacaggtgagaggacaggaatggagtcgcatcagtctgtcttaattcctagaaagatgactaaagtagagccctcaccatcagctaaatacacttacttattatttttgcagtttaaactttttattttatattggggaatagccaattaacagtgttgtgatagcttcaggtgaacagtgaagggacccagccatacatatacctgtatccattctcccccgaactcccctcccacccaggctgccacgtaacattgagcagagtcccctgggctatacagtagtcctttgttgcttttctattttacatatagcagtgtgtacatgaccattccaaattccctaaccatcccttctcccatccttcctccttgcaaccataagtttgtgctctaaacagtgaagctctttctgttttgtaaataagttcatttgtataatttcttttccgattccacacataagggatgccataggatatcacttatcctctatctgacttacttcactcagtatgacactctctaggtcagagaaggaaatggcaacccactccagtgttcttgcctggagaatcccagggacgggggagcctggtgggctgccgtctatggggtcacacagagtcagacgcgactgaagtgacttagcagcagcagcagcagttttagctataatttctgcctcttttgttttaattacacctgagttttcaaagcatttcttatggagtattttttttattaaattaatttagggacttccctggtagtctagtggttaatacttcaccttccaatcctgggggtgcgggttcagtccctggtcaggagctaaaatcccacaggcctcatggttaaaaacccaaaacataaaacagaagcaatagactgacaaattcgataaacactttacaaatggtccacatcaaaaaaaacttttacaaaattaacttagaaagtttgacctacttttaagttctccttttatttttctctggaaattaaaattagatgtttggatctctgtttaataaacacaaacattcaggagtgtggtttgtacatgagcaacaacttctgtttggtaattggcatttatcctctttctggtgaatcacatttgtacagctcaatttagaaacacttcactagaaacactgccaatcctaatattataattttaatatttttaaaagccactgattttaaatagcagaaagaaaaaagtcatgacagctaaaaatgacatggaggtgaaatagctagaatacctcacctttctcttaaaaagatagtaaaacgacagtgggatcagagacgtttcttcattcacatttgataagctctagaccttacaggatgttccaaatgcattgccatttatttctgatagaatgactataaagtagaagttcaataaatatttttagaataaaagaaggggagaagagagtctctctatatatatacataatatttttacagtggaagtgtacagattgagttttccttttaaagacatgaaattcagaaaactaaaatgaaagctttgtcaggt

SEQ ID NO: 51113 - DNA, 1540 bp, Bovine  19866881275860
  misc_feature (1)..(1): n is a, c, g, or t
ncacataaaaatattcctatgcaagagattgtgctgggcatttggaatctagaagtgaacagaccagatatagcctcctttggcttatatacacattagcgtgtcttttcatttctctgagcttcactttcttcacatgtgaaattgagataacattagccacctctcagagttgctttgaaaattatgtgaaaaaatgtttgtgaaaactaaacattattcaacatgtttaacttccttctttagcattctttcttttttcagcctgaattttcaaatcatgaacatttattgagcatctgttgaattcaaaacactgttctaggtgctggaggtgagggaattaacaaagaaagaaaaaggaaaaatgaatagaaaagtgcttacaaaattctaagaaaggaaaataaccattttcatgaagataataaaatgcagcaagtagccaggacaaaatgaatttcccagatattaaatactataggagcttagagtgggagaaataactgcagtggtggtgagttcaaacaaggcattagggggtctctgcattgttgaaaggagcaaagaggtggaagaacagattaggagaatggaatggcataagcacattcatggagatgagaactgttgggtgttttcaagggagagagaatagatgaatataattatagtggataaatgtgggcaaggtagattataaacctgggtgtgtcaactgagacctgagagtgaaatgctttgaatgccagactgaagcttgtgcactttatctcattaagtaaacagaagccattagagatttttaaggcagggaagtgacataacaaagtaatatttccagtcaaataatatggcagttgtgtgcaaggacttagggtcaaaagggaaattttaacaatgaaaactttcccgctgatatacttctaaaaacattttggagagtgcatacctacctgaaaatctgattatccttagacattcagcattgtccatagaaagtgcccaaaaggggattgtctgcacatatctttccaagttattcctcccttcacttggcaggtgggtgatcactcactggtttccctttctgtcttctgcaccaaagctcagtgtctttgcatgagtgcactgacattccccagacccctctctttcttctcctaatagcatgagctgccctttcttcagtaaaagggacataccacttggcatcgttagagaaaattcttctatttccgtaatgaaaccatctatcctttgagaccctgctcattttgaaacacagaccaccaaatgctactcctgggacataattcttaaaattggagaagatagggtcatatcctcctttcccctcatgttacccctcctggtggaagggttcttattgcattgccaagatttggaagtggtgtaacaactccccagcccagacattatcagaggctgagacttcctccaagctgatgaggttgcaatgaggaaaatgattagatttaaaataaaaaaggcatctactagccatccttttcaaatt

SEQ ID NO: 51114 - DNA, 714 bp, Bovine  19866881285400
  misc_feature (1)..(1): n is a, c, g, or t
nttctcctggcaatcttgattccagcttgtgcttcctccaccccagcatttctcatgatgtactctgcatataagttaaataatcagagtgacaatctacagccttgacgtactcctttttctatttggaaccagtctgttgttccatgttcagttctaactgttgtttcctgacctgcatacaggtttttcaagaggcaggtcaggtggtctggtattcccatctctttcagaattttccacagtttattataaatggcagatcataccaacagtgccccacaggtccattgtgattgcacagcagaccccacacatcaacaacttgagtgattttgacactctggctctgaaaaaggtaaatacaattaagactgggctgtgaaataaatctaagtattcatttggggatgctaatcagattcagagactgaccccaaagtattcacggtattgtgtttttcttttaaaaatctataaaattttattaaaagtgagaaatattgaaactaccaaataaacatgacgaatatattaagtggcctgtctcctgatattaactgtagaatttactgcagaaaaaagagctagtgcaaaatcagcattctgtctggtatccttactctttgaagagcaccaaatgtttgacattattagaactggcttggaatcaagtcaaaatttaaacagagctactaatcttattggtatgaa

SEQ ID NO: 51115 - DNA, 1675 bp, Bovine  19866881330549
  misc_feature (1)..(1): n is a, c, g, or t
naagtgatggtgatagatatattaaagtgattaatgatattgtcagcttgatgactcatctgtatcatatgaaaaatagattgtttatttatccaagactatgctctttcttatcattctaatattaaatgtaatcatgggatgaaagcactaacattgccaaaaatgaaaagtgattgatttaagggctcatcttataccagatgctccatggaaaaatgagtcaccattaaaggccaagcggactagccctcacctctatctcatggacccaccagtttaacactgtgattaacacacagcctttttgtcacactagtgtgtacaaatcccagctctcccgcttgctagctgtgtgaccttgaacaagtaattaaacttcattgcctcagtttccgcatttataaaacttattattattcctcatttataaaaatgagaagaaaagcatcacctacttcatagagttgtcatgaagtttcaagtgactcagtgtgtgctccataaactattattttgatcatccatctgatgtgtcagttattttgtatttagaaagcttctgatggtatataccatgatgggaaaacatgatctgcctgatcccatttctctgataattcaatcaattcatcacccaggatataggctgataccagggtagagaaaaagtgagtcaagctgtgttgaagcaggagtatgagtcactgactacaaggactttgctgtatagaaagcagtgtggtgtgggaaagaagcatgggtgtcagaccaacaggcatttgagaatcagctctgcctcttgagaggagatcttcaacaacgtatccaatctctctaattctcaattcaccctaaagtaaaaggtaggaaagatttaagtgtgatcacaagtgtgaaatacttagctacctgttatgctaactcattattaacactattactgtttttaatcttgggagagaaggtggaggagagacaccgggttcctagagtgggggagagatcaggagccatgggatgagggtagggggagagtagtttggggacagtttacaaaaagggaagtagtcagggcctttaacacatgctgtgtccttccagctcgttctccctcctggtaaatgtccaactgccatattcattcatttagtcaacacatattaatgagtccctgctatgggctgggcacttttctaggtgtcaaaggcaatggtctgattcttagggagcttatattcctggtggggggtgggctataataagaaggtaaataaataaatgggacagataatctcatattgtaaaaagataacagattaggcaaagaatgctgtgggagaggctatcttagctaaaaaaggccagttgaagaggtaaaatttaagtggactagaagaaagaggaaccaagctacattaagctctgggaaaagagcaatctgctcagagggtcctgcacacaaaagaccttgaagcggaaatgatcttggcatattcccaggctagtgtgactgtggcccatattggatcccactggaggaagcagcagagcccccactgtagagagccatgcaagggaggccttgcaaggaggctgtgtacccagtgctatgtgaagctgtgagaggcttccatgtttccactggaagcagaagaataaggtgatggattta

SEQ ID NO: 51116 - DNA, 833 bp, Bovine  19866881423692
  misc_feature (1)..(1): n is a, c, g, or t
naatgcttggtcttgccaagttttgacaggttgcaaattgtgtaattcaagttcttgaatttcctattagttagcttgactgaagagtgggagccacatcctcttctctttgctgacatggtcacatgggtgatggggattaatatgttctctatctgttcagctccagtagtaacatattcgcttgcagttttacaaggtggccagctcagtgtttcctttgcttatcactacacttacaacacaaaagactataccaagtaaaagtatttgcaatgtgagaagcaaagagtatatcaaaaatagttattggaagatatacaaattccatggaaaagagaagagtttatgaccacctgctaaatttacccatgccatcataattttacttggtatgtctaattttcaccctgaatcattaagaaagtgcaaaggttagggaatggcattcatgccagtttcctttggccaatttttagtgaagaggcatgtaaatattgtttccttaaggaacaacagaaaatttccaatttgcataatctcaatttctttgttatctactgcagtgaaatatctctatattttttgcatgatttgctacatagattaaagtgaaatcactaggagaggcacagtatatattgtaatagaatgaacaaatatagccgtgaacactgggcaaggactcttggcagctctttcctgaaagctgtggaggacctgctgtgcggagccctaaggcattctgacagtgaaaaagcacactgataaataatgttttaaaacatttaattaataactaaggccacagtatgtatcccttcaagcacaga

SEQ ID NO: 51117 - DNA, 1555 bp, Bovine  19866881849224
  misc_feature (1)..(1): n is a, c, g, or t
ntaagaccggttagtgtgaaacaatagatatgagaatgctctgtaaaatataaaaccatgtacagattttacttttagttattttactatgcaaacaatgtgcagtataatccttttacaactatactacatcatgctaaatggattaatcatttctcaagaatataatacaattaaaccaatttacaaatcaacggcttccctggtggctccgtggtataagaatctgctgcaatgcaggagacaaaggagatgagggttcgatccctgggtcaggaagattccctggaggcggaaatggcaacccaccccagtattcttgcctggagaatctcatgtacagaggaacctggcgggctacagtctatgggtcgtaaagagtcagacatgatggagcaactgaacacacacacattagggtgtgtggacaaggcccatattttcataccttcttttgtctcctaaacaactttgtgcaaattaaaagggggcaacagtgtataaggtgtatactccatccaatttatttattttattatcactgccatatgtaacctttcacttcatatcccttaagcctgcatgtctatcggagaagaacatatgttcttaagaacacaagcattggaagatagctacgtgcacagctagctcactcactcattaacaaccaccacatgaaaattactgagcagccactgcgtgctaggcactgtgctaggcactaggcaagcaacactgcctgttctttcagagctcacagactggaaggaaaaacaagacaagaaaaaatgcaattgtcacagggtgcggttccatgatatgagaaatacagggtgatttgggagcacacaggagggacaccaagccaagactttggtggtcagaaaggctttcttgaggaaactgactggatttaaaagtccacacttaactatcctataaacaaaaggttataaaccaatgttacctactttatatattaagaaacaaaagagaataaatgaataagtgaaaagaaatcaccatctgaaagaacaaggaagagggtacccactgtggaatttataagcaaatgggcatgttagcaggatgagcaggacttaagaatgtctagttttctactgtctctgtttctctctctctctccctcccactctctgtctcttaacaatcccaagggatcagtgaggaaactgtgaagagctttagtgaccatgaatctcctgtaagttcctctttggataccagcgctacagaattttctgccccagagaatatttaatagttcagaactgaaaacattccttgtatttgtacatagcacacttgatcactctttcattcaggatgaactatataaaataccaacacttgtagttatgcttaagatatactgagtatttaatatacgttaggcactaagtattttacatatattatctattttaaccctaacagcagggtgtgtttggtccaataaatatccctattttacagagaggcacaggacggttacctacttttcttaaggtcactcattggcagagttata

SEQ ID NO: 51118 - DNA, 1521 bp, Bovine  19866882007975
  misc_feature (1)..(1): n is a, c, g, or t
ntagtgtgcactagtgtaacagtaaaaatataatgtgtggagacctcctagacctgctagcatgtgaattacatagcagtaaatacaaagtttaatttggaatagttggcatatggtgttactgagaacaaatatgtaggtttgatttctcagttgggccagttgatgcaattcaaggaaagggggtgttccagagcttcatgacaatcccagtcagtcagttttaaagatacgtgaccacaaaggaatttaggttacagaatactactaggtcaatggagaagaggacagaagtcagccattctgcagatcaacttctaagtgtcagtattctcttttgttttttctaactgtttacagattactttggcctgtaggtattagaataattttataatgcaaatttaagcacttgaagatttctacttcttgaattccaagttccatgattaatggtgacatcaccaaattcacactagatcttttcctcaatgaatgagcatcagaatcctgaagataaaatgaatcatggttcatagcttgtttctaacatcacattttgcatgtttcttgaaatttcatagttaactgtgacaacattacagattaaaatgtctttaatcatgcaaaattaatgccagaaaatttggaaagaagaaactgccactaattcttgacctaatgttaatcttagtttctcagatgaattgtgataatccatttatcacttcacagccttcaattatctaactcagcttttgctctgaaccatgctaattcatatagctcttgcaaactattctgccctgggcttgaaagaggtcacatttctgcacttgatatatcaaccagaaaagtcaggaaaatacaattctggacacggggatagtaggccttctataactttaaaggtttattacttatatcttgtctttctgtagggaacctcttcttaaatctagtaattcttatactcttacttatgtaattcttcctgctgttggatatcaaggaatctcaaaccttttcatctcctaccttgtatgaacatataggcttcctgctatctagaattagaaaccaatttctaagactctgagcaccttctgaatatgtcactgtgctttgtggaaatctgtgcccagcttaactgtacctgcaggaaaaacttcctttgtaactgatatccttggtaccacaatcaaatgtttaaatcctttatgctttggggatgactgagctatccacaaaaaaacccttgatgctgtctttccaagaattaccttggactaatcaactagtagtatcaagtgaaaccaaagaaaagagaagcaaagttgtttttttttttttaatgccttctatattattcagtattctcagagaactctgtgccatcctttattatctaaacttggctaatattaatttaagactttatcacttagctctatttctgaaatacagaattcacataaagacgttttctgtgtaaagaacacttgtctttccaaaacaaaa

SEQ ID NO: 51119 - DNA, 1789 bp, Bovine  19866880513405
  misc_feature (1)..(1): n is a, c, g, or t
ncttctggccataagaaaagttctaggaagagtagaagatgcccaccaaccaaacagagctgattcagtgccacatcaaggatggaagctaacacactgaggcagatgcatgattgaggctgctggctattaaaggagttggtacaagtgtaagaaaagcggctgctggctattaaaggagttggtacaagtgtaagaaaagctagtttcttagggacgaagaaagggaacctaccattaaccaacaagaagaggactggagaaaagtctgattctggtcatccattgttgggtgacttatgtccttcaacttctctggaagtcagtttcttcatgtatagtaatgagtagggttggattatttattttatctgtagatgtctcttccaactctgataatttatgatccacagaacagcaaatcctaacttgtctgatcctttcaatgactccttgaatcctccctcacccattccagaaaagcacagaaaatgagatgacctctggttaccagacagatgttggcaagccacttgggattccatggcctctgtagctactgtggtgatcatgcccagttgcagctaaaatctgttgctggcaagatttgtaccctgtttgctgagcctggactctagctgctgcctcttacttcctctcattaaggcaaagcaccatcttattttgttttgttttccctgcatgttttgagtttgctgcttcccagctcttgttattagaacagacataattaataactcctggcacatggagcagccagattggacaatctgccttttgctttctcgaactgtcttcttatgaacaatctgcaagctcgaatttatagcctggaccccaaagaatcaggaactcaccacattgccagcttgaaaaaataaaattttctttgtagttcatagtgggagttttattcagttaagaactgaaagtgacatgtggtctcatcctttcttaaacctctgctgaaaatatgattctgtggactttggtcagcattctagaattttccttctgggatcatcaggagttggttcctaaggtctaatccactcaatttctgtggcagcccagacccatttacctttaaagaaagtgttagtcgctcagctgtgtctctgagatcccatggactgtagcctgccaaactcctctgtttacggaattctccaggtaagaatactagagtgggtagccattcccttctccagaggatcttcctgacccagggatcgaacccaggtctcctgcattgcaggcagattctctatcatctgagccaccagggaatcccatttctttagtagagattaaaaacagagtagcctgtggcggattcattttgatatttagcaaaactaatacaattatgtaaagtttaaaaataaaataaaatttaaaaaaaaaaaaaaaacagagtagccattcttattttattttttattgtgattggaaaaaaattattaaataccttgtcagagtcctctatttgccatcacagttcgttggccttttccacttcaggaaacattccaaaacatcaggcatatccaatcctgccatttggtctttggttaatttgtccatgtttgtttaaattaatagaacctgaattggacagatgcaatcatttaataatatttattgagctactacttttatcttggtggtgtggaagacacaaatttgaataaaataagatttctgctctccagtagcttacagtttataatcatagtaattataatgcagggctgagctatactga

SEQ ID NO: 51120 - DNA, 1242 bp, Bovine  19866880556490
  misc_feature (1)..(1): n is a, c, g, or t
ntcaggtttggtccaacaccccagtgattcccaaacctcatgctataagtgcaagaggtgggaggggacggatgagtctgtgactctgtagaattcctgccatgtttttctatagccagacagagcaagaaattccatttagccatgaccccaaagccatgatcccactctgtggttgaacaaacttgtgcttcattgacaggttcaatgctgacaggctgagaataactgaaacaattaattctaaaattatccccaagacaaatctctttttgtccaaaaattctaggctgctttaatgtctggagtgtgtggtatttgggtttttctttcaacattaaatgacaaattccagtcccagggctctagagtctccagaaatggagggtcctaacttgtgtgtgcccccctttccaggtgtgagtgccccaatgtgatgaggcagcagacttgcagacttcagtcccctcacacgctctgacaagggtggcttggttcgcaggtcacatcaggataatgcaaactgagctatgcatttactgtaattctaatcagatgactctataattggaagaaccccagtggcattctgtctttggaatcttctccattaagtgactgaacgagggccaggggacctttgcttgccccaaatgtaggtcctgatggagatgttggaatctgggtactgtgttccattctccttttgttggtaagatgctaaatcagtctggaattggcacatcatgtgtatcgcaatcatttcccctcttctcttagtaatgtctggccagttgcatttctaacagtaaagaacaagtgggatgcccatagtgtgtatatggcaggacagtgggggcaatacctgtgtataagcttcatgacagtgactgaatatttttggtgaacatttccaagtttagactgtgctcaggtttggtcatggttgtctaagatcataagaataataatctgaatttcttaatctttctggatacatctgtcagaaacaataaagacaaatgtattgaggaagcagattgtagtaggaacttcacaaagtattggatcatttggggaaatacagaaatgagtcagatctaaaccctgaccttgaagagctcatatttggagagagctataagtcaagctcataacaattataatccaagatagaaagtacgagttctgtggcattgcgatttagaggaaggaaagatcattcttaatgggaatatctgg

SEQ ID NO: 51121 - DNA, 2913 bp, Bovine  19866880620013
  misc_feature (1)..(1): n is a, c, g, or t
nttgtcagggaagactccacctgtgtgtgtacgctgtgctcagttgtgttcaactctttgagaccccatggactgtggcccaccaggctcctctgtccatgggatttcccaggcaagaatattggagtggcttgccgtttccttctccaggggatcttcccaacccagggattgaacccaggtctcctgcattgcagacagattctttactgctgagccataagggaagcccaagactctgcctaggagttggcatttgaaggtactaagcacacagagtggaaaagcattccaggcaaaaggaacagagagagctaaggcaaggggatgaagagagaacacagcatgcgctgagagtttcatacacactgttgcaaagagcaggagggtttgtaccagctgcttcaggataatctcggacaatgttaacagtctcagctgctatcctccacctcattcggcacgctccctggggcagaggcctgtgtccacctaatgggccagtatgacacctggcccagtgctgatggcattgtggggcttaataaattccctttgaagatgagaggactgtacaggagaaaagaatttgccactctagtgagtcagccggaacggcaggcgtgtcctggctcctcgggccaagcactagggccgatgggccagacatgctgggtcacttccccctggggccactggattccacctgggaacatcgagtcttttttcagcaagtcgttcctaagccacgacactcctggctcatccctagcctttgtagcttcaccagcgtaattgatcccagagctcagcttcctccatgcccattggtttcctagggagtgatggggtatcaggtgcccttagagcacctgcgcagcctggcctcctggggcagagatggagcgacatgtgagaggcagacataaatagtcctgagttctgtagtcatccttttgggtgctctgagcttcctgtcctgagctaaggttttctcctggggttagctgaggcatggagagataaacaaagcttgaaaatgactctccccactggaaagctaaaggcactttcaagacactgctttctcctaccttctgatgaatgcgtcccagacttcccaccatcacaccctggtgaaggctctccaaggtgtgtaggtggagaggagagacccctgaggacgaaacttctttcaggcgtcctcccacatatgctggggctgcataatgtccggagagccagacgaatcttgccaggattcaccatggcaggagaacctgtcaccccagtgttcatcactgagcagcccaaacaagccttagtgactaaggttttttttccacttacacctggttcttttgctttcaccacagaattatattagcaaatgagatccttgagtaagcaaaacaggtccttcacagattcttttgtaagaacacattcctgagcctacgacagatatttagagtcaaggaacatttactcacacaggcctttcaaaattcacctccaagctgttttcaccatgtcattgccatgatctgaaaaattaagtgtgtccagaagaaggcagccagtggcttgcaacaactgagaactgggcagcaaaaaaaaaattaaaagcaagtcacagatgcacattcaacatatgtgactgacaaagaattaataccctgaatatagcagagaaatcctatacatccataagaagaattaaaagcaatcgagatacattggcagactgtatgaacatgcaaagtgtggaaagagaaatgattctcggcatatggtaaaatgcttaacttcactaataaagaaatgcagatttaaaaattaagagatgccatctcatatccatcagattagctaaaattcttaaagtctgacaatatgaagtgaaggaatagaaattttaaagcccattattaagaaaatgggcttaataaattgtaacacatttaagaaaaagaaaagcaatgtagaagttaaattgaataaactatgtaccaatatcaatatatttaaaataataatattgaatgaaaaaagcaatttgcagaataagtcagtattattacatcatttatgtaaagaaaacatgaatcaatactatatattgtcttggacacatgtttatggaataaacgtacccaacatgaataggacaaaggcatcccatctttgggtggtggttgtttgggggggtcaaggaaaagggctgggaaaaggtaagttagaaagagactcagttgttttgggtaatgtttgtttcttttaaaagctgaagcatgccttcaaagtcagggaggtgggaagatgaacataaaggtcaggataggttaggttttgctacagtaacaaaagtctgaatcagacacttcagacaacagagatttggctttttttgctcattcatggtaggttggcaaaggggctctgactattgttgtcattcatggaccaaggcagacagagcagccaccaccctcttgctggcagccatgtcaaggaaaagaaagaacaattacatgctccggactagaagtgacatggtcacctcttctcacaactagttagccagaactaattgtacaatcctccctggctcaaggggaccactgctaagtcacttcagtcgtgtccgactctgtgcaaccccatagacggcagcccaccaggctcccccgtccctgggattctccaggcaagaacactggagtgggttgccattgccttctccaatgcatgaaagtgaaaagtgaaaatgaagtcgctcagtcatgtctgaccctcagcgaccccatggactgcagcccctcaggctcctccgtccatgggattttccaggcaagagtactggagtgggtgccattgtcttaaagtacacaattccactataagctcaga

SEQ ID NO: 51122 - DNA, 1948 bp, Bovine  19866880663295
  misc_feature (1)..(1): n is a, c, g, or t
ntaaaatgaatccctttaactctaaaaaaggaagtagatactgttctgtcaggagcattcaagccttccccaggtgtgagcccacagccacaggtctaccttttgggcctggggtcgcgtcactgaaagtgaagctgggggagaagcaatctggtgacttgtgaggagcccgactgacacccagagaccagggttcaaggacagacgggccatccaacagcaggactggaaccttgaacaagttactcccttgcatggggcctcagtttttccatcagtaaaaagcaggagctagacaggactggcatatttcaatttttttaacagcaaaagtcctctttaaagatgaaatctcctgcagggctccaatgctatctaaaagcagataaaagtggaacctctgtctttagagaccctcccccatcctcacctggaaagaaggttcagtcttagctcactggagtgagccttttctaattatttgtatagttcaatatcatgagagtaactagtcagatccaggaaaaaaaaaaacaacaacaaacacctaacccaaatagggtggtaggtctagagagacagtaaggggaggtggggccagagtgcagaaggtttgggccctgatggagttctgagactcccgcctgctttttcacctcaaattccccaagaggaaactgaggccagatggctgaggtataaactttgtaactttttgacccaggaagttttgagaatcataataaggaaatgattatagcatgctttgagctctttggagacaagcagtatttaaatacaaggtattattacctccacagagctctcttttgattaccactgtgcttgaaaatgtgggcagaccacttttattttttaaaactcaggtgtttaaaaaaatattcacatgtacaatacctaccctagccccctcacaagttaattctcagcttccttgtcacaagataatttaaatgttcaaagatatattatactagctttatcagctaaattggcagtccctgattcaagacgtctttcccttccagctcattcccctcccattatttgaaggactgttaaattaagagtgaaacaatattatgttgggagttttaaatgtcagtaccaaatatctttcaacagaggcacaaagtaggaacttatttaccatagactctgaatatatcaggtgaacctcgggatatttcattccttggtacagggcctgctgtggaacttcagaagtcaacttcccaaaattcagaatgtttttctttcagaattgagaagcttgaactctcagcttatactgtgctcacaggacttaaaaatcaagtcctggttttactgtgcctgggtgggttgacctctgcaaatcgtttcacttctctggtcctcagttttctcctctgtaaactgggatcatctccctgccctgcctaattcacaaggctgctctgaggagcaaaatgatatgacaccgtgtgaccagcctgagtggaggctcagacgcataggcaccgagtggggccagatcagaccttgatgcaaatcctgctccttctccttactagctgtgtgatcttaaataagttgcttgtctgctctgaacctcattaaagaggctatttatagcattttcttcatctgttcttttccagacttaaagcctccatcggagtgcaacctcaatcagtgtgggcatttattaaaaagctgtaactctccctgtgcccaaggggttactgttgtttctctctagagctgctttcagtgcactgcagacctaaagataaccatacacctattgtctctgaaccgcctcagtgctcttgctcgaaggaaaggaaaaaggaaatacactgtggcccagaatggggctccagagaaatccaaaatgagctgggtctaaaagtgactgctctccaagcctatttttaaccag

SEQ ID NO: 51123 - DNA, 1852 bp, Bovine  19866880712219
  misc_feature (1)..(1): n is a, c, g, or t
naacaaaagagtgtgttctgtgagtcctcagccagtttcaagagatcaaagtagaggtggatcagagagtaacagggtcgggggaggggggaggtaggaagaaggggaggttccttgcatcttctaacagaagccagagcgcagactccatttcactccaaggagcctcctgcaatggcttgacccaggtcaatatgagaatgaaagctgcagagtgttttgcctcagccaggccaatgtggccactggtggtcatgctcttccttccaaacagctgctgtggaatctcaaacagcagctcggagtgggatttccaggcctcatcatcccagcaaggaaagcagttgacatgacaatgagagacaggggaactagacataaatggggcttcccaggtggcgctaatggtaaagaacctactcgccagtgcaagagatgtaagagattcgagtttgatccctgggtcgggaggagggcgtggcaaccctctccaatattcttgcctggagaatcccttggacagaggagccgagtggactatagttcatgctgtcacagagagtcagacacgactgaagcaacttagcatacaggcaagcagacgtaagttaatccaacctatgtgtgcccagagtggcctgtgactcactgtcactcagtcacctgtcttcccagtttgttttacagacctgcgttgctgatgtggcaggcactgttctaagcacttcatgagttattaacttactcagttctcataacattccataagttacgaacctctaccctgtctgactgatgaagaaagtgaggtgcagagacacgaagcaacttgaccagggcctcacagtaattcacaaagtcaggattgagcccgagcagttccaacaactacagggtctgaactctgaagccctgaactctgttgctctttattctgatttccactcagcctctagcactcctacaaaagagggagatcagagcaaatcatttctaaagttgcaccgagctctaacactttgtgattcagtggaatcagtaagtggttagggctcaggctgtgagttttcagtgagctgttaaatatgctttggtgtgacacaaatacccatgtgtgcatttcaccgagttctggccattggctggccaccaccccggctgtgctcagtggatctgctggcctattgcagggccccaaatcttcacgtcagggactcagagattctgcacctcttcgcaaagctctagccaatggaattgtgaaaacagcactcaatctaggcaaataagtgcgatgaggaagtaactagagattagggctgcaggggtacagtgattcagtgagataaggccggaaggaaacacttggccctgagtgctcgccagggaggtagaccagaggcttcggtttaataaggcaggtgattagttgctggccacggggttacttgagtggaagaaatatgacctttctagtggcccaaatgagaaaggttctgtatggtaatacaatctcaatttcccagtttgtttaaacattcaaatgggattatcacgaaattcacattgtggatattcccgtgggggaggtactaggtagaatggaaagagcactggcctggtgttgagacatctgagttccagccctgcatctgcccctagctaggtgagaggccatagatgagtcacatcccatcttagcctcagtttacctataaaaactctcagcgagtagggacttccctggaggtccaagggttaagaatctgccttccaaagcaggggatgcgggtttgatccctggttaaagaaataagcccatgtgcggaggggcaactaagccccccatggg

SEQ ID NO: 51124 - DNA, 1223 bp, Bovine  19866880776451
  misc_feature (1)..(1): n is a, c, g, or t
ncccaagtttcctctttcctttctctctcctctcccccacaaaacccttcatcacaaaaggtcaactgcctgaaagcctgttgttttgatgactggcgtgagattctattggttaaaaatgtgagaaagctggctacctaccctcccccaacttcaaaccaactgtatgtgtgtgtgacagtgtgtgtgtaaatttgggccaaaaaaaaagaactgtggttaattcttcttgttgtgtgcttcctgccgctgacatttgccgctgctgctgtgtaatgaggttgaggctgggtaggaaaatcagatgcaaatgacctatttatttattccccaattatgactgctcttctcaacccttgttcttggaaaacctggaaagtagaaagaagaggtcatgaaagccagctgaacaaggcattaccctgaagcaacccctaggacttcgggtcattttagttgataagaaatttgaggatttttgattctgtttaataaaatggcatatatttttaaaaattataaatcatgaatgatggctttttcatagagactttatggttgaagtcaaggactaggatttatgtttcactgggttcagttcatcagctttatttcccccatcctcatccatccactccattttccacaatttagtggtgtaattgaaaaatatattcaccagatcatgtctctttcatgtctaaaatccttcagtgggttcccattccactgcttagaataaaattcaaagttctcactatggcttagaaagccctctgacataagtgccccctgccttgccctctgaccttttctttctctctaccctccttgtgacactggctgcttaccttccagccccagggactttgcacaggtggtttctgctgcctgcttgccccttggttcctgtcctggctcacagaagagtgccacctctttagacagggcttccctcatgtttccctatgtgttttccttgcgtttgtgaattctaagttgcttcagtcatgcctgactttttgcaaccatatgaactgtagcccgccaggctcttctgtccatgggattctccacacaagaatacttgagtgggttaccatgccctcctccaggggatcttcttgacccaaggactgaactagcgtctcctgcattgcaggcgattctttaccactgagccaccagggaagacttcccctcgcattactctatactagttt

SEQ ID NO: 51125 - DNA, 1331 bp, Bovine  19866880830329
  misc_feature (1)..(1): n is a, c, g, or t
naaactcaagtaggttggagccttgacgtgatcaataaaaaaaaactcggccacaaagtgtcctcaagctactggagcataaacctgaacgggtattgtgtcagttgcaatttgctctcatttatccatcagcatcctctccaactaaatataagtgagtatgaagaacagttgtagatatagacaggcatcagtgtctctaaaattattaagaatcactgacttgtgaaatatcagtattcaaaagttctgatttctcccgtgaggtacttttcatatcttattttgatagctgaatgcaaatgagcgtgagtaaacccttcttcacctgggttctttgcatgatggtgcaactgtgtctgtttattacagacaattaacaaatacatatcccagattagatttatacaaatcaactattaggtgagttaccaaaaaatatatttgaaggtgaaaacaagcctatctttaattacagctctgttgattcttggctttctataattattatgatttgcaacagtgcatgggtctgttcactgctaacaactccaaaccaagaatggagagtctgagaccaggcccgatcttggtaaaataggaataagcatccttttggcgcctatcttacgggcttgctcagcggcttagataacgggatcgttgtgatagctcgcgatgagattatccaaacatggaaggaggagcatgactctgcttagaagagccctagcaaaccaggggcacatctgcttgtgtcctaggagatgcacagacacagagagctcttcggaaaaatgacttttcgctgttgttgctttcgtcattttcatcgtttagcagccatgaccagatgtgatagtaatcccacctccccctcttaggtgcctcatacatcttgcatagattgaatttgatgagcactgatgaagagcctactgtgtaccagggactgttgcaggggatgcagagttgggtaggaagccattctcatcgcacccagtaattctaatggaaggcagaagtgcggacaggcttctgtggcagcacaaactctttgttgaagggagtttcattcccacgggtgtgggttgggagggagtgctcatcagaaaagtgggatttcagcaggtccctcaagggcctgatacaagtgtctgctagatagcttcctgaagaatgggcccaaaaaaaaaaaaaaaatcacttttagcagtcaggctagttgattccatccctgtgtgacagacttgctgtggtcttctttcctcttcttcatggctgaatggccagggttagcagaggaccagtgcagagtgctgctgctgcta

SEQ ID NO: 51126 - DNA, 2152 bp, Bovine  19866880859659
  misc_feature (1)..(1): n is a, c, g, or t
nttttcactaatgcaaaaggcctctctttctcttaattttccttaagggaagaaatgatgccttatgttcctttttcattgcttcacagcacccagcatagccctgagcacaagagaagctctcagtaaatatgtattcttctaagtgtgagtcacagatttgaaattatgaaggaagatattggattatggagtgaggaagggaccacacaaatggcctggggatgtaaagaaaagcctggcatatgtgtggtaaagtcttaggaatgagcctttgaggtcccccagcagatgctaacagtaaagccccaatctccttttctcttcattgcatagatcagatggtagaggccctgaaggaaaatggtcttgataaaggtgacaaagccactaagttctagaactgggtttagctttctagggcttttctgggttggcccatctttgttttcaagatttttttttttttcctccaaattcatgtcaccataaacataacaaaaagaatcctatgcatttttggacattcaaattcacactgtgtttcttcctcagaaaatgaatgcatgagtacatataaagtagtgggaacaaagccatatattgaaatttcaaggcttgaaaatgtgactccttttggcaaaggaacaaaaacagtaaaattggggcgttctcccaacccatcaggacatccaggtgttatctgctcagcctctccctctcagtggagtgagagtgtacaagtcaggcaggcagattccttaaagaaaaccgagtggaaaatacctatctccatggggctatgtgaggatggagagtgaggcaaggagggagatgaaggaaccatgctggtgtggtcaaggacgacgtggatggagccagtccttgtcaggtgtctaagaaatggagacaactgccagttcctgatacgagcagctgtaaatgatacactccaacccttcttacatattagcaacaggatacatttatacggaaaactttttatggaggaggcatcatgctagagtgagaaccaagttctggtccaaacttggtaacttttctgtaacttggacagtttctctctgccctgagtctcattttcttcatggacaaactgggatctcttctacatctagtgacttgtttctctttcacatgttaaggtactaatacttacatttctgagagaacttcaacttttatggttgcaatatactctaccatgaacttctgtagagctctgagaattattttctttttcatcatcacttaactggctaagatattcagctcacaacctatttagtgattcaagttatagaaaaaccaagagaagtgatatggaatgttactttattttccaaagttggaaggggaaattgcctatatacttaccaaagataatgcttatttgcattaccctagagaaatagaaaaaggcaatggcaccccactctagtactcctgtctggaaaatcccacagacagaggagcctggtaggctccagtccatggggacgcgaagagtcggacacgactgagcgacttcactttcacttttcactttaatgcattggagaaggaaatgaaaacccattccagtattcttacctggagaatcccacggacggaggagcctggtgggctgccgtctatggggtcgcacagagttggacacaactgaagcgacttagcagtagcagagaagtagaattagtcacataactttaagtggagtttaaagtttcctgtactctctcccatggctcaagtctttaaagataaattatccttaagtttggcccagagatttctctttatttggggccagcaggaaagcctactgtggtccaaggcacaatcattttaggcttaatctcttgacatagcctacatatctatctcccttctccccaccatacccacctctcaagtccttttccacatagcagccagggtgatctatttgaaagccaagtcaaatggtgtaacacctctgcttaaagtgctcccgtgacttccagccttactcagagtaagagccatacttccattcaggccctgccggacacaactgcccatcagatttccactcctacccattccccctcacaaactctgctgtagctacagtggcctccttgctgtt

SEQ ID NO: 51127 - DNA, 672 bp, Bovine  19866880934252
  misc_feature (1)..(1): n is a, c, g, or t
natcctactaaacacccatcccaggggagatgcccgaacactggtgactctgcccttagggaatctgggactaatgaggatcttagaacaagtacataaataactaattaaaggtagagagtgatgtgtcatgaatcattatcttcatcattattggaagtcatttttatggaattgcatatatttactatatcatcctttttttccaaaaagaattttgaatgacttataacattacagaagttagacactgaggtataaaaagatagaactagatatttatattgaagccataagaaatgccaaaagctaatacagttgttagatctagcattagatttaactctgagcttactggaagtcaggacaaaatgggaaacacattgttataatttactacttctcaaatactaacactctcttaagcaatatacagaaaagtaggcaaggtctaatccactaaccttgcattttctattcatttgacaaatgcaaaacgcatgcctggctgtggaattttgagacattcaggttggcgtggaccattatcagcctttaggactattctttttttaaaaaaaaaatctatatgcgttattaaactattttgtttatcatttctgttaaagctgtttctcagctagaacacaagctgtctcacttcttgtattt

SEQ ID NO: 51128 - DNA, 788 bp, Bovine  19866880936944
  misc_feature (1)..(1): n is a, c, g, or t
ntactgaactatcctgccctcccttcatgcacataagcacatcctattttcattttcagcccaagggtaacatggaacagcccctgggacttggattccctctggggcagactcaacccttggtgtgtggtttggtctagggccccaacaaaactagctcatggaatgcaagctgcacaccctacaaaaatgagaataccagggatggggaggtaaggggcagccatggcccatgcaggtaggctgctctagtctcacccttgcttctttcaacctctgcacacgtaacttgtagtacaaagaaaggagccctaaagagaaaatggccaacgccccttctctatccatttaccacatggggaaactgaggctcaagcagtgacttgcccaaggtcacagctcaacacaggtctacagcttgggtctttgacttaccagactttgctcctggagcccaacaggatacaataaatgtatagacattctcatgccaacaccaccaattcaggccatgatttgagtcaagatgtgtttcctctatgccttgattttctcactacaaaaaaggctggtaataactatccttcctctcccccagcagaactaagtgtgtgtgtgtgtgtgtgtgtgtgtgtgtttatatatgcttcaagttcactgggaggcaaggagctatttaaatatgtgtgtgtgtttgtacttacacttttttcttcctgacctagttgaagtggtgaaccattttgggactaggtgaaaatggcacgtgctaattctccccgcttttt

SEQ ID NO: 51129 - DNA, 1598 bp, Bovine  19866880999514
  misc_feature (1)..(1): n is a, c, g, or t
nttgcctgaagtttggcaagagctggtggaacaagttggtggcagagcccaaggtgtcttgcagagacttaattgataagaagcagaaaagccgatggccaagagcccagtccttacctggcttatcagcatgcccctttcacaatcattgaaactatgtctcatggacacttttgtagatggggaattccttgaagccagacgatagatttgtgaagtgatgaagcttcagggagaaaaattaccactgcaacttatttgtgtaaaaatatgggaaccagaggttcattttcagaaagagcaaatatgagggactctgtgaatcagtaagatgtaaaaaggtacagactgggaaactgattcggtgacttggtgaactagtaaggtagttttcctaaatgagagaagaagaccatgattaaaaataaatgctttggaggaagaaaccatcaaaaatttcaacaagttcccatcgctttaggctcaactgttgcactgttggagatttattctaagaaaataatccaagtctaggaaaagggatggtaggaaagtgcctatagaggtattattgaggtgaaatggagataacataaatatcccagttatttgaagaatcatttcaaaatgctgatataaatgacaatatattcactaaagttctattttgaaggtgaagctccaatcctttggccacctgatgtgaagagcagactcattggaaaagaccctgacactgggaaatgttgaaggcaaaaggagaagggggtggcagaggatgagatggttagatagcatccctgaatcaatgaacatgaatttgagcaatctctgggagatggtgaaggacagggaagcctggtatgctgcagtctgtggggtcacaaagagtcagacacaacttagtgactgaacatattttgaagcattcaaataggttgttctaaagaccacattggaattgctcattgtgtggtgcttatgaaaaagattagaatgcaaaagtatatttgtgctacatgtccaacgctgtgagaaaatatgcttttttggaaaagacaggaaagaatggaaatagatgatttataaagatagtaagcttgtgggtggctttttatttccataatcatggtatattatgtatttgtataatataaaaaaattatgttaatcagatgctgggaagaaaagcaccttaacacaaggtatgttgcacccagcagtatttcagtgatgctaaacattagatatgatcctttccattccctcatcttcaaacacaggtccagattagatttatttcactggtgacaagtttgaaattgtgcacttgaaaaattcagaaagactttgaacccacagctattaatacagatatagatatacatataggtatggatagatagacatcatgagtcctctcatgagtatcagatgcctcatgcaaagtaatacctgtatatgaagagtggaagagattacaaatgtgtggatttcagtgccctgcaaaaagcaagagaaagtaaaaattaagggagaccattcttcaagagatgggaataccagaccacctgatctgcctcttgagaaatttgtat

SEQ ID NO: 51130 - DNA, 1133 bp, Bovine  19866881158224
  misc_feature (1)..(1): n is a, c, g, or t
ncgccttatgaaagagggctctctttctccttcctccatctgaggacagtgggttgtcagcagaaggccaccatgctgactgcacccagaccttcctaaactgtgagaaatgagtttctgttcttcagaagccactcagcctgtggtgttaagttatagtagcctgaatagactcaaacacgtgaatccctctagatttgcaaaaggctttttttctttcatgcattagtctaccggccactctccacgtcaggcaatgcacccatgaacatgtgagagaagtcaggctcatcaagtccaggtgacatcatgcccaaggtcacactgctggaaagagcaggggcagagctgagaggagagctgaggttttctagctccgtggtgagcactagctcttctgcccagtgctgcccattgaaaacctgattccccctcctctgctcttaccatggttgcagccgaggccaagagtgaccctctgatgatgtgaggctggcagctgccttgcccaggccaggatgctctgggaacagctgtgagcagctctgcacatgctgtgagtcactgcgttctcgccttttccgtacacgtgctctcttcactcagcgcctctgccctttgaccgcagcagcgatgtggagacaggctgccagcctgggactgaccaaccgcaaggtcctcaggcgccctcggccctgtggctgagatgccatctggcactcgccacagctgcagggcctccagcctggccccaggaagggggaggaggggaacaagatgaaggtgtacggagagactgcctgactttggtccagatgggacaagatactgatcccctacagactcagcgtcttcacctgtaaaatgaggagaataaacagttccgacatcgatcataatttcttgattctgaggttgtctcagtccatgatttttcttcaaggaataagtctcaagccctgatcccctaatagtaaaactttgccaggcacggggacctgtcagtagaaataaaagggcaagaaacatcagaaggacagagatcagatgtagaagctgctatcaggattaaatgagttagtgtagtattttctaggtcagaaagcctttgtattaatagggtagaacatcag

SEQ ID NO: 51131 - DNA, 1085 bp, Bovine  19866881442215
  misc_feature (1)..(1): n is a, c, g, or t
ncttcaaatttgttttcatctgcacttctcggtttaagagcaaagtttaatgtttttcatgtgtttttgtttttgtctagatcatattattaaaattaaaagtaagctgccataaattttgagagttttttaaaaaactctccccaagcatcccccaaaatatttattaaggaattcaactttccaaattaatccgatataattaatcaaagagcagtgtcaaactaatttgtcttttctttagctggttaagtgtctttcatgtgcaattcaagttctattaggaatgttttaaaggatcttaaaaataagacatggctattaactccccaaagtttacattccagtaccgttattaccatatgactgatcgggattcaaaaattgttcagtattataagaagagaacagaacaagggttatgaggaaagaatggggaaattatttctgactttagaggtggagtatgaggagtcagagaaggcttcttggaggaaattgcatctgagttgaatgaaaagggtctctgaaatagggacctgtttcagggcagtgggggaagtgtgttggtgagaatattttactcattttacatagggagcttctgagattgttttcttaatattttaattgtattgattacagttgatttacaatgttgtgttaatttcaggtgtagagcaaagtgactcagttatacatatacatatattcattctgtgtgtgtgtgtgtgtgtgtgtgtgtgtgtatacactttgagtcttctaaggcatagctactctccttcttgtgggaaaatggagccaggcagggatgaccaattcatggccagcaggtcacatgaaagggacaggtttccctgtaagtttcattttaaaaacaaacatgaagacaaaaatcgaccggtttcgattgtctccacaacagtaaaattatattatgtattttgaaaggcctgaaatttacagtgaagctcagggcttcccagtcccttccgagacatggtacacaaagaaactgatagtatttctttgttcttctggagtaacagacccacatgttattcgggacaactagctcagag

SEQ ID NO: 51132 - DNA, 2459 bp, Bovine  19866880172380
  misc_feature (1)..(1): n is a, c, g, or t
natggtaactgcagccatgaaattaaaagatgcttactctttggaaggaaagttatgaccaacctagatagcatattcaaaaccagagacattactttgccaacaaaggttcgtctagtcaaggctatggtttttcctgtggtcatgtatggatgtgagagttggactgtgaagaaggctgagtgccgaagaattgatggttttgaactgtggtgttggagaagactcttgagagtcccttggactgcaaggagatccaaccagtccattctgaaggagatcagccctgggatttctttggaaggaatgatgctaaagctgaaactccagtactttggccacctcatgcgaagagttgactcattggaaaagactctgatgctgggagggattgggggcaagaggagaaggggacgacagaggatgagatggctggatggcatcactgactcgatggacgtgagtctcagtgaactccgggaattggtgatggacagagaggcctggcgtgctgctattcatggggtcgaaaagagtcggacaccactgagcgactgatctgatctgaagctacatctgcagtctcatcttccagagtatcctgaacatgctccagccacagtgactttgtgccattccctgtctgcatccctgagcttcctcccacacccagtgtcattgcctgtagagaccagtgtccacatgcctccttctccacaaagcctttcccaatatccaggcaaatgttatctttttaccatctgaccactcatgtagcattaggcactgacctttgacagattattttatatcacacttatttgtatatggaacatattcactattaaattataagcttttttgaaataggaattcattatatttcacctttgttcctcatcattaccatatcttacaaaatgaatgaatgatgaatgcgagtagcttcttttgattttctgattatttgtaagcccaaagaaagactcaacctataaagcaatcacatacaaccactcctaaattgtttttgaagaattttgattagagcatttggcctgaatcttccaagatcaatcctggcacattgacagggccctgagtttcctgagacttaataacaatgtaatcactggtgtagtcagtgatatgtataaaaatggtactacaagaatgacaagaggtaaacttctgccaagaaaacctccataggtgaacagctggatgaatctatacacatcataacctaatagaactaagatcagatttgagtctaacattgtattaatctttcttcttaaagtattgtcagactgaatctcagtctctgaaaaccacactatcatgcagacacacaccatcacaactaattagtccagttgcagctcacagcatgctgtatgtggacattctctaaatcatcccccttgcactgaggtttaccgtggtgactaatgaaagccacttaaagaagcaccttgcaaacctctcctggatgatagaaggttgaaatgataacattttctttgaggagagaagcagttgccttacagcgctccttcaaaatacaatggattcaataagaggccctatcttttgattttatagtgcgaggtcacaggcctttaggcctttgacgctataaacatgtacctccaaaaccaactctttcagaagttatacaggagacaatcacaagaagcatccatttatctctcaaggagaaagaaaaggtttgtgcagactttgtagtcagttttatgctatcttacatgcatgtaactcagataatgcttcctttaaaatgaattgtcttctctctctctcatctataatgctatagaggggtttttttgtttgcaagagtgctattttcacaatagtatctgcacaaggaagacagatggattatagaagcacttagctaagagtgtagtagttttgtcatatgcatttctttatcaacaaaagcacaatttctaagatatacaatgttcccactgatctagacaatttaaaccaagcatcacaaatttaggggggaaaagcagaattaggtgagaaggaagaaggagaagtggaggacagaaaaggaaagagaagtggaggacagaaggaggagaagagaaagtaggtgagagaggaagcagaagaggaacagatagagaaggaaagaaagaagagaaagaaaaagtaaggcactagaaagagatcagttactagcagcaagattgacttaaacagcatcaaagaaagcaactccagttccaagttatgcagctcacccttattggatcataacaactgaaatagcaaaaatacatgcaaagatgttaaaattacaatttaatcaggtaacgtggttgattatcctgcatctatgtatcagaggggaaatgttaatcgccagaggaagtaatttgtcttatgtgtaacaggttagcaaacttatttaaaaa

SEQ ID NO: 51133 - DNA, 1299 bp, Bovine  19866880375964
  misc_feature (1)..(1): n is a, c, g, or t
naaggctgagtgctgaaaaattgatgcttttgaactgtggtgttggagaagactcttgagagtcccttggacagcaaggagatcaaaccagtcaatcctaaaggaaatcaaccctgaatattcattagaaggactgaggctgaacctccaatcctttggccacctgatgtgaagagctgactcactggaaaagaccctgatgctgggaaagattgaaggcaggaggagaaggggaaacagaggatgacatggttggaatacatcaccaactcaatgggcatgagtttgagcaaacacagagagaagaactttcttgtttataattccatgactagtgaagtcagcaccaagacctaaaaatcgttatagctctagatccaaaattccctgctgtcattctgcctattatgctgtctccctctgcttagtggtctggatgcctttttgtggccctccatcgcacagctggttaacactgcctcctcataaatatccagcccacatagtttaaagataagggtgcatttcttcaaaggcataagcttgttttcttcattgataccatacaaaataaaatataaacaaaatattttctgtgctattttccttggctagaaataagaagcagctcatcaggtcacaactgagcattctgctttctagagtgtctggttggggggactagtgaacttctgtggagcatcaggacaaaactgttgtcagtaaattaaacctttgaactagctctactggatcagaattccagtctcagcaacataattttgaagaactctgtgatcctgctcaagaaaattaaccaaatgtctcattagtaaaaattagtcctaatatacttactgcttttaggattgttgagaggaataaataaggtaacacatgtgagtgtgttatcagtaaatagtttaatataagtttggacaattcaaattatgatcttcacacagcccctgttgtatatggctaaccatgttttgcaagagttaaattcactgaggtttgatcaagattctctccagaggcagcaagcactgatggaccaaaataattaccttaatcattctcctgctaaaagtctttcaaagatctcatcacctgcaggataaaatctgaactgaaatatggcatgaaaccaatttgttgtctaccttctgggaatttttccaacatacctaagtctctcttccatacacacactatagcccatccacactcaggatatttgcacatgctattccttcttctagaatgccctctgctctttgttcttaagactgctga

SEQ ID NO: 51134 - DNA, 769 bp, Bovine  19866880432485
  misc_feature (1)..(1): n is a, c, g, or t
naatgacatattcctgtgttctttgtctccaacacatgctgcaggagagcacggacagttattatgctttaaaaggttgaaaagaaaatgctgagacctgtaggccaaataccagagagcacagagaacacaaatcagctttctgtgtcacctgggtcttgcagaaagtagagggaagaaaggactggcttcgtgtcctgttgctattaacaagctctccactgttatttcttatccctgggtcagagggatattgaaacaagatcggtgcactcctgggcggatttgcctttccttcttccatctcactcagctctgccctgacttcaccccccacttctccacccctgtcccctgccctcgtttctgccctggttctatgctctggtacttagatccctttctcagtcccctgagctgttcttggcacaggtacagctgccgagaggtgctagtgaaagggctcccaaatgaccagcagtggccgggaccaggaaggctttggaggcatgtgactacttaggaagagcagtctcatggcctaaaacggcactgctttctctcaagacacaaactgacaagtggttctgctccacggcagtctctgcttttaactacagttgttgcttctccatcaggcctcacccacaatggccagaggcacagagaattttcttcatcagcaagagtggtattcacagctggtgtttttcccatccagcaccacaccgggacaataccattatcaaacaaacactcatgtaacaca

SEQ ID NO: 51135 - DNA, 2573 bp, Bovine  19866880481187
  misc_feature (1)..(1): n is a, c, g, or t
ntatctctgtgtttttattaacaaaaaaaacatgggttttacaggaaggaggctgatagcaaattcgaatatttctatgagggatttactaaagccaggctggctatctggctgggaaaggaacatatttgcagaaacatttacattttctgagaaagtatctcatgccatgtttcctgagctgctgatccactacccaggaattctgttagaactgcttttctttggtaaaagaaagatctttcttcacatcgcatctcacccctccctcatctattgaatctcctccatgaaacatcagaagtcagtccacttattcacagactttccatgtggcaggcagcatgctaaccaccaataatgatgtatgaattgcagcactgatgtcttttgggagaatagcaaaaagagccttatgtttccaccatgagaatttcatcttcctgcacaaggaactctcgtctttaagtaacagtgtgtgagtcagcaccaccccgccccaggatagagctcctgcattacttgaaggctgatccctggagaaacaagcctagttcctttttcatcctgcttcatagcaggaaggaacagggatgcctctactaaggctttcttagccctcaccccttgctggaaacagcgtttgtggcatggttcactgcttaacaaatacaaacactgacattcagctccattttcccatgactctgtgtaaatcaaaattgggtcataaacgctgcctcctataaaaagcaataggtcaagaaaaccatttcataacttaatgtgaagaagtagtcagacccacgttaccatggcatttatgagaaagggagacagaaagaaaacagcataaaaagtgtaaggcaagattctttttcaaactgaagagattcttgtgccaatatgtttttataggaaaatatctggtattcagatatatttttgcccgacagaaggaagcattgtcacttctctatgtgaatactccccagagagaggatgtatctacttaagggtaatcgtaatttgtaggggcaaagttcttaccctccaaaagtttatctgggtaaaatcaggttgaaacaaatatctgagcgagccttgaagagtaaagtatataggaaaatacctttatttgtagcttgctgaagcaaaggcgtaccatgtgatttgactaggtcaagctttgcaaattgattaaatgcttccaggggccataaatgaataatgcaaagtgggaagggacttgtagagacactggcctaaaaggcagaatgtgtgcccaaattcaacttcatatacctacatggatggtagatgcttcacctgaggcactagtttagaattatttgagtacatgattttctgcagaggaggataaatgggtttaaatttgcagtcttttctgaacaagctgaaaagtaacctactttttttacagcataccttcctgagtggatctccataagctctggtacctctaaaatcctgggctcccgtgaactttttgcaccaatttgctttccaccacagagagaaggctttctcctggcattgcccctgccatcctacaagtgttacaaatacccagatcttaagtaccactgggtaccaatattcctcagctcagtctataaaggctgagctcactgtgctcactgcagtctcatctcagggggctgtttagatgcattctctgctgtaggtaagactcctggggccccagctggcacatgaacatgtgactagtctcaggaggcacagacaagaaggtatctatggatctgagtgaagagttttctttcagtcctcattctagactttaggctacattttggtcctcattacagcctccttaaaactctgctctgttgggtttcttttgttttctagatatcttcgtacttcttggtccttctgtgaatccctcatgagatgtttctccgttaactacctcttgcaccttatggttccttagggttctgtcctcaggccatcgctattataaagactctccccacatgaaaggagggaaggaaatgatgtgtctgtataaggggaaaacattagtttccaggaagacagagagagggctaacgagaatcaaagcttgtaataggaaatcttccaaatggtatgagaaggaaaggcatgagcttcctagacgtagcacagcaactaggaacatgaaggctgtgcattccaacatcattataaagttacaattataacatcatggattgagttccactttacatgcatttacatgcattattacatcatgtaattgccagttcaactctaccagatattattcctgcttcaactcaacagaaaaacctgagactcttaagaggttaagaaattttactaagccccttggatgcagaggttgagagggattcatatcatggcctgactacatccaaagttggttctccacattatactatgacaatatacctctgatggtaagaattaatctttctgccttagcaggtgaaatctctggtgagtgacatctctgagactctagggaacttcatcactcagattgggggaaaagcatt

SEQ ID NO: 51136 - DNA, 2031 bp, Bovine  19866880569605
  misc_feature (1)..(1): n is a, c, g, or t
ncattgcaggtggattctttaccagctaagccacaagggaagcccaagaatactggagtgggtagcctatcccttctcccagtgaatcttcccaatccaggaatcgaactggggtctcctatattgcaggaggatttaccaaccgagctatcagagaagccccaaaagtttcttggttgattctaatcagcagtcagatcttgactacttccaaaattttctctattccccaagttttatgattccaagaatctcccatattctcttgtttcaaagcccaaactatacatatattcccaggaggaccaaacatctgagtcttaaaacttcccaaaactaaaataaaactttacctgagtgttttggaggttttgaggtgttttcgtttttttttttttttaattgggcaaagtgaaaaattataccatctgcttctgagtctctggtggatttatccaaggtaattcaatcatatcagaaaaaaatgagtaactgactggctgattcttctgacaagtgacacaactctgtcctgttctcaagcctgtagcaagacactggctctgacaccggagacagtggtgaatgcttcagcagctgtcttgccctcagggaaattgagacatgcacgtgatttataccagggcacacagcaagccagggggcagtgccagaaataggagctcccactccctcctggcagaccatgctccatgtcgtacaccctgaggatatgaaagcgatgtctctcatctgagcaaagaagcggatagagagatttccatttagaggttcataaatgctactctgaaaggaggaagaaaattcccctttcaggctcaatcaagcctaaaccaaggtgagagaatggggaaatgttatttatttttgtaagatgaaagagtgttgtatttattcacttcttgtcagaatcacagaggggcttcttttccctatcattcttcatgcctggtctcacgcagtgctgcttgggaggcacaatggggccaaacagataggggtgatgcctatagctggcctagaaaaaaagagattttttttgttttctttataaggccatatcatagttgagttgattatatttctaagtgcctggctcaatgcagaaacttcaaaaatataacaagggaagtgctaaatgtcactggagaagctgaaaaaaaagataaatttcttttcccaacaattttaacctattcctaagaaatgaatcaatctctttaggctgaaactatgtgtagttatacatttctatttaaaatatttccatctttttcacatgtctttctgacatgcagttaattgatccctcaaggataagaatgaagcttacttttacatacatgcatgcaggtgtacacacacacacacacacacacaacttcatagaacccactacagtgtttcacactcagggtatttaattcatatcttataattattcaattatagaaataaatgaatatactaaataacatatatttaactatattaaaagaaatatgggttggatggcagtaaataagtgttgagggcatggcagaggagggaaatgtttaaaacttactctttacatttcaaacttggataaaaataatggtagaattattggtggggttttctatgtttttctgtattcttaacatgtatataaaggacatttgtttgcttcatcatgcaaaaaagaaacaaatgtttataaaactggcaagtactaatcacagcacacaagtatacaagaaatatgtagtactatattttctataactaagcttaccttctgatgccatagtccctttttactggacagatggaaactttatcctcaaccatttccctgctaccagggaaatgggggaagtgaggggacatcagtccacaccagttggacattgattcttgcagtacagtagtgatctctctctaccaagtcagggctgagacttaaagatagggttgagattctaggggtgagatgggcatgaaataaacaaggcagggacatgggtg

SEQ ID NO: 51137 - DNA, 1554 bp, Bovine  19866880581964
  misc_feature (1)..(1): n is a, c, g, or t
ncaagcatgggacttgatgtacagaagataataaaggtccaaattaatgaatgaataggtgaatgaccaacacctgtaaaataatttatcaatatttctactcatatttaagactatataccctgggtaagtgaggtactggaggatgcagtgagtagctatagaagggaagagaaaatggaaggagaaatggaagcccagcctcaaacagaatgcagggctggaaaacgatgtcagcaaccaagatactttatatacagcaatccaaaatgacatttcaacaaagacagaagtaattcctattgtcttggaaccagacaaaatcactggcctctgcaaatatcaatggcatgcccacagtcaagaacacattttgcttatgtgtgtgcggttggtgttttgggtttatgactgttagccaaccagctgggcttttctcaggcagacttcagcacagcatccggcattttattctttccatagattagacaaattcaaatactagaaccaaatctctagtgaacaaatcctctattgccactacttgtatgttcaatttaggaaaagctgtaacatcaacccagatctagagaagtatacatcctaagtgaacattttatgtttgaataattttcagtcttttccaattaatgatttcttaatattaaaatcttgctattttgtgctctcttgaatagcaaccatttaatctattctctcttaagatgcttccacattttcatctggaaatcttttcctcattttacatatgagaaaactgagtatttgaaagccaaagaaacttgtccaagaacttcacccactattcgtgatggggcagagattcaaggccaggtctttttggctcagtgtcttggcttcatggtcttggtctcctcatgaccaatgtatagcaaatttccactccttagacaaatttctccgtaggaggccttcacattttctatttttagttgttcaccataaaacatatttgaacatgaaagttttagaattattcataaatttcttcatgctatatgaccttctgctagactgtgaacaatgtgaaagaaaaatggtatttttcttaagaatcaattttattcctttcatgaatgtattggacaaatacaaatacacctcatttgataatcagcctagagctttccttaagaaatgttattttaaatttcaagtaaaatgtggatatagtcttatgaaagattcaaacaacaaagaaaaagcaaagccctcctcaaacttcagtcccacgtccagggtgtagccacctgaactagttattatctagattcctcagcaacaaattcaccttaccttcttatgtttgtgacactgctgctggggctgttcattgccaactggtatttcccagactactctaccagatggctttctgggaggttttatcaatagggggtagaaggagacagaaaagacttctcagtttttttccaataccattcagtattagtcccagcagtgggaatttgccccttccgtctctgtgtcttttgacaattctgagaccag

SEQ ID NO: 51138 - DNA, 1901 bp, Bovine  19866880585282
  misc_feature (1)..(1): n is a, c, g, or t
ntcaaagctatggtttttccagtagtcatgtatggatatgagaaattggactataaagaaagctgagcactgaagaattgatgcttttgaactgtggtgttggagaagactcttgagagtcccttggactgcagggagatccaaccagtgaatcctaaaggaaatcagtcctgaatattcattggaaggactgatgttgaagctgaaactccaatactttggccacctgatgtgaagaactgactcactagaaaagaccctgatgttgggaaagactgaaggttggaggagaaggggatgacagaggatgagatggtcggatggcatcactgactcaatagacatgagtttgagtaagctctgggagttggtgatagataaggaaacctggtgtactgcattccatgcagttgcaaagagaggggcatgacggagtgactgaactgagataatgactataatttccatcaaattttttatgttttatttatctgcctttagtaatattgtttttgtggttttacttttccccctgcattggatattaaaaagtaattatgatttaaaagtaccttttcaactgttctgttactgatgattcttcagcttctgctggccactcttggcaatgtattcgtgtattttcttacatgctttataattttgtcagctcacttttttctaaagcaatcccatttattaatagatatattaaaaccataataaaatattaggaaaacaaatgtaccaatgtatttttaagaatgtactttaataaagtagggtttattctgtgaatgtgcgaatggcttgacatgaagaaatttatggtcataatttacattaatttaataaagggaaaaactatatcatttacctcacatgtaactaattattgagataacctcaaatcacaaaattcaaattgatgcattaaattaaatatctatctaacaaaattcttcaaaatgttagctcacttttgatgaagttacttattgttggtatttcatctttgatttatgtaagtgactccattgatagtttagtggttatctctgatatagtctaatatattcactcattctggacatgtttttatgttagacttttagcacagtgtctccatggaagcagtagaagaatttgaatctcacacattgatagatataggctagggaatcttatttcttgagataaaatttttccctttcaagcctcagaatagatagctcatattcatgtcatgtccttagtaggtggagctttgcgaatggaattttcctgacttcccacattattcagagattgtaatttcagtttcctataggagtactaatcctcaaacttcaaggattccattacactcatctgatttcaatatcctgttaccactgtgtattcccttttcatttgtggtacctgcagaattacactccttgctttgaatctttactatttatttacattaaaaactattttcttctgaatagttttctgtatttcggaagtagtaggaggtattcgttttttatgtcggttcagcctgccgttttgactagaagttccactttaacctttctaaacttcagtttatctgcaacattggaataaagataacagctacattgtaggggttgttgtggggagtaaatgagataatgaacataaaacttttatttactggacacatagtaattgctcagtgtacactattagcatgtgaatcagctactgcacttcctgccaaatttcagatactcaataatttatcactttaatctataattatgggtatttgtatatatcctcatctcagatccattcatgattgggaaccatatcaagaattgaaatagtcctagcaaatagtgtcagaactattcaaatatttctacact

SEQ ID NO: 51139 - DNA, 879 bp, Bovine  19866880662854
  misc_feature (1)..(1): n is a, c, g, or t
nggagaaggaaatggcaacccactccgtgttcttgcctggagaatcccagagacagaggagcctggtgggctgccgtctatggggtcgcacagagtcggatacgactgaagcgacttagcagcagcagcagcaagaggcttccctggtggctcagaggttaaagcatctgcctgcaatgcaggagacccaggttcaatccctgggtcgggaaggtcccctggagaaggaaatggtaacccactccagtattcttgcctggagaatcccatggatggagaagccttgtaggctacagtccaccaggtcgcaaagagtcagacacgactaagcgacttcactcttcactcactcaagaggcttatggtccacattagaacttagaggctctgagaagtcctgcactaaagaaatctatgaacctctgctgaacccagtagcttcaaaactttttaactacataatcttttttcctgagaacacttattaatgtctgctaggactctcatttctacctgggaaattctgtgaatttacttcaaggttaattttcatttcacaggaggttaaaaatgaagtttgacctataaagtgagttagaggtagtttgtttaaattataaagaacttaggaggcaattgcaaatgtccccaagagcacacattttcttcgggctcccaatccattaattttagttgcccattatctgttcattcttctcaaggtaccttgaggttgatgatttttgatgaatctgagaatataaaataacatttacagataatcaacccatttccagaacacaacttctgggtataaccatttattctaccagttgcttcaagtaatcccacattgccacaaaggaagacaaaaaggta

SEQ ID NO: 51140 - DNA, 959 bp, Bovine  19866880667053
  misc_feature (1)..(1): n is a, c, g, or t
ntaaagaaagagggaaaagtcatctctccctaaaaaatttttatagttccagaggttaggaaaactgccataggtcaaaaagtgacttaggatggaaacccggatgcaaaccagttgctttctcttcctggactccctttagtcctgtgatctgagtctttaatgtgcttttcatttatatgtagatttcttttagcatgtagatttctacttccagtgggttttacaacaaccccatattttgagatatttggaatcccagacagacttttgctgctttctggatatttttgaatccaggcttttcaataaccaagattgaaaagtgtttgagaacctcaaagtttctatacaacagtaacatattgttattattctatataaacaccaagagtgaaatttaacaaactaaataattcatccacaattttaacagggaagaacaaaatctgactccatgttggatctatttcttttactttaacctttgctttccattgcttttgttactataattactaaaagggtgatgtttatagctattgctgttcagtctctaagtcatctccaactctttatgacaccatgaactgcagcaaaccagacttccctgtccttcactatctcccagagtttgatcaaactcatgtccactgagtcagtgatgccatccaaccatctcatcctctgtcgccccattctcttcctgccctcaatcttccccagcatcaggggcttttccagtaagtcacatcagtggccacttcacatcagtggccaaactattggagcttcagcattagttcttccaatgaatattcagggctgatttcctttaggactaactgatttgatctccttgctgtctaggggactctgaagagtcttcttcagcactacacttgaaagcatcttcagtactcagccatctttaggtccaactctcacatccatacaga

SEQ ID NO: 51141 - DNA, 1288 bp, Bovine  19866880778343
  misc_feature (1)..(1): n is a, c, g, or t
ncttcattttctggggtttttaatatatttctaactgcaaaaaattgtaaaaaaaaaaaaatatccagcctcaaattttaaaggttaaaaatacatacagtctccagtagaagagctgagtagaaaaatgatgtctgtggaagattctggctttttgattttatggtttcagataataagttccctgaagtttcttgaagtatgtacccatttgactgtagtgattaaaatcagtttacattcatcacttgggaattgatgtgtcattgggaaggaggcaaaggtgagcaaaaataccttgctgccccatcaattgcattttgaaacaatgtgacagctactctcccagggaatttcaggtacttgtggtgtagagtacacctcaagtctgtgatagattgatattggaaaggactttgtaaatttagaggtaaaaattatagccaaattaatttgtaaatgtaattttgcataagtagggagttttatgaaatttacacatatatctgctttagaggttaatgttataaggctgtgctgtagtatttttctgcttaccatcatctgtaggacagattttcttcctttatcacaatgcttggaaaagtagtccttgatgtttttgttaaagttaaaacagatatatttataaatataatatgtgatatcaaggactcacatttctaaacaacttattttattctgtgactgtcactcatcaggttcatgattcttgatggacaaaaataggctaaatcacacactttattactgttaaacttaagactcaatcttaggcaagacaactggaagggctcaatttaaccaacagagggttagatttactctattcctcccacccccagtataatggctaagcctatgatctaacattctaatggtgatgaaaaattaagttttgatgtgacagccagcaaacagaggagttcaagaacgttaatattagatgaagatggacactgtgaacactcgtcactgacgaccaggccctaaactcagtcttctttctgtagccctgtggaaggaagaacatccagggagaatgcctgtcacatagaatctgactttcacttggtgccatcaaaatccccccaccctgccccttgcagttgtgatctaataaaatatcagcaaataagacacatgtctcaaatctctccccttctgtgtgagcaaatttgaggtgggagttagcaaagagaactggaagcattgcttatctcatctcctttgctctgtaatcagaatgagcaaatttaacagacag

SEQ ID NO: 51142 - DNA, 2639 bp, Bovine  19866880870774
  misc_feature (1)..(1): n is a, c, g, or t
nagagaggaaacttgttaattttatagtgggtgttggggggatggtgtcttaggaatttgatgaagcagaaccttgatgagaaaagccagtagatactttggacaggtcctgtcattctgtcctgaataatggagggggtggtggttgtattagctttctattgttgcctaacaaattaacacaagtttagcagcttgcatgattgattgggttctctgcctaggctgaaatgagtatgggttggtttgggttcttatctggagaattcggggcaagaatccaaaatcattcaggttgcggcagaatctagttcctgtggttgtaggactaaagtccccactttcttgctggttgttgggtggtcagctttctggtccttgcctgtggctttttccatcttcaaagccagtacttgtcaaatccctctagtgcttcaaatctctctgacttgctcttctgccatcaatcacagaatactctctgcctttaaagggctcatgtggttgcactaggctcatccgaacagtctccttttgattaactcaaagccaactgtttggaaataattaaattatatctgtaaaatctcttgccagataatataatcagggacatgatatcttattatatttatagtcctggagatttaggtgggaaatcttcgatggtcagtttagaattctgcctataacagtaatcaagtgttgttttctcaaattaactcttcattgaagccaagcttctgtggtttccctttattacttttatgtacttgtgaactttgcagtttgttgcttgtgctttgtcttatcaatggaatttttccattggttcaaagagggtgccagtctcccagggcactgattcccgggactcatctgttggttttggactttgaggtttgatgttccaagtgcccatcttggtttggaccacacaggaagagccatgagaagcagacagcagtcaacagaaccagggctaaccttcaaacccgtgtgtttttagtgttagagggaaaaaagaaattgctgctgtattcacagactgataattatctcattaaataacttctcagaccttgatttagccattatgaaagatgttttgatcaagaacatctggtgttgttttcaattaaatattgtaccactaaactttgattaaaaactgatttaaaattttaatagccccttctttagaagatggttaaatgcaaaaaagaaaaatgtcgcttatttaaattgttttccccccttcttcgttgctctattttagccagattcccattaatgactgtttaaaacccacacagttttggatgcagtaaatccagatgcataaataagattaccataccaatactgctgttcttactcttttactattgatacctcattttatttttatgctttaattaaattgagtatattttatgttttcagtttgctttaaaacaactgcagtgcatataattgacactatttcatccttgttagaaagtgctgagttgaattaaacataccagttccatttccttacgtttaatctgtggaaaaactaagacagaaataatacgaactatatttcttttccaagttgccttgataggtgaaaataattaaccacttagtaattactaataaagactgaagtgaaatctttactcttatcataactcctacctatataaaaatacttagtggtataaggtagttttacttagtaatttttctcagctaatatgtaacaaataaatacattattgctattttgatgtactccatataaagcataaatcttcaagcacatattttaatatatttttacttaagatatcatgtctaacctaagaattttgggtggggaaatgacattatgccatgcttgtgaagagcaggcttggtaaactttttggttaagggctgcataggaagtagggcttcccaggtggcactagtggtaaagaatccaccagctagaacaggagaggtaagagatgcaggtttgaccctggaggcaggaagattccttggaggaggacatggtaacccacttcagtattcttgcctagagcatcccgatggacagaggatcgtggcaggctacagcccatagggtagcaaggagtcagacatgactgaagcaacttagcatgcacgccctaggaaatattttcagctttgtgggcagtatgatcttgaaactatacagatctgttgttgtagcatgaacacagccagagatgataggtaaacaaatgaatgtggctgtgttccaacaaacccttattcacagaaacaggcagtgagtccgggctttgacccatgcgctgtagtttgctgagcctactattgatgattataaccaagcgctggctaagtccacagttgagaaaaacaattggtcaattgatcggttaggggctgattggggtcctaatttttgttatcatagatttttttttgcttgccttttgcaatagttcgttgtaacttaattgattgagtctcacattggaatttcctcccacatcttgcattttaaaatgggcgtctatgatacttttagaccatcacatttttgcacctggtcttatatccctggatataagtgtctcctagtttatagtctagaa

SEQ ID NO: 51143 - DNA, 1436 bp, Bovine  19866880885979
  misc_feature (1)..(1): n is a, c, g, or t
naaaccctttattcatgtgaattttatagagctggattagggagcaggtcagctgagctacttcctagggaggcaactataatggattctggaataaatcagaaatagggtacttttaaactcaggtttccacttgctgttatcttcagaagcttcaaaatgttcattgttcctaatcctagtgaagtagaggccttcatgtggaaacaaaaacaaaagcacaaaaaatacttttggatggtgatggccaattttgtttttgtgacctcagcgcacatgaagttcactcggcccccaccgagcctggctggccagccagcaactggccaaaattctgaaacccaacgacatgtcactgagtcctgcttactgaggacaaatgctttattttatcacatgaattttaagcccttgaatgtctcctaaaatgtgactgacttggctacatccagatttgcatcctaaataagaaacaaacatttcagaaaaatagaacgttttgttaacagaatgacaaaacaaaacaggataaaagctcactgaaaaagccacataagctgcttttatcccagtgagtctgagggctgggtctgagggcataatactttagcaattaggaataatggaaaatcagtgcaaagaaagacaactgcaaataagttgaagtattatgttaatgataagtatatggggtcatctgttgttccgaacataaaaaatatatataatttttatcaacagaagtcagttcatttctttttactctgactatatactttcactcaatatttaaagaattggcatgaaccattcaccagaccagagagcccatctgtcctcgagtagcctgaccaggtggaatcctcatatgtgtagaatgagagtaaggtctctctggttgaagtgggagccagaagacccacaaccaactttctcctcctgtcctgaagctgctctgtttggtcattgtctgatggttcctaatcttcatctctttctctatactctctgctactgctgctgctgttagattgcttctaatctgcaccaacttcattcttgtactttccaccacttctcagctggtggtccccaaatcccagtgctcagagcagccctggaccccaaaaaagtccatactacatggcaagtggtaagagaaaacatgaatcaccctgcagtgagtttttgcaaagccaaattaattaataatacaaaccattttttttcatcatgggatatctaccctacttgtatagttgttaaaaaattcttccttttatgaaatagtgaggatagcagattaaataaatcttttgggaggctaaatataaaattattaaccctgtgttagttctcaggattttcagtaaaattgtacgtgtctgtaaaattctaaaatctgggcaccactgtcttaaggtacattttaaaga

SEQ ID NO: 51144 - DNA, 1273 bp, Bovine  19866880921873
  misc_feature (1)..(1): n is a, c, g, or t
natgggcttcacaagagatcgtcactaattctctaaattagaaaatgtgaacatgttggcagattaataatcagagtggacagagtaactgagccactcagaggaaagactgaaagagcaatgacaacatctaggtaatcacacaaggactcgggggaaacggaatggatcagtcaaaagcaaaaagaaactgtctgtgattttgaagattttctattgaaaaagaataggtgccacaagtcagcaaactaaagcagtaaggccgctgcaaagcaaatccctaacttctttgctttacaattcataaaccaaatgttaggcggataagaaatagaatatgtttgaggcatatgttaaaggtgttaaacacatggattttgacatatttaatttggaactaaaacaattactgctcataatacacccaatttctgaaactactaaattcagtgtgacaatttctgtgtttgtattcattttccttaatgtcttgagttttttttttttcagctatccaaacatttttactaatccacaaagcataaccaaaacttcccagacccactgttatgaatgaaatgacaaagcaacaatacaagcaactgttaataatttaaggcatatagtaacattttttaaagtcatcttcgggcagtatttactaaaactcaattaattttctgctgaatctcttcgaacttgttggccagtgctaatttacttggatgagtacatgtttctctgcccaaacatctttccagaaaccaactcctcctcttgactgcccaatacatcctttcagtcacccttgaattctctttgattctttcctgttttgctacattcagtctgaagcaaaagagtacaagacttttctagcacctttcccttttcatcacattcctgcaatactttacaaactggctttccctttcatgtcactaaatggagaaattattttacaaacttctagacagtttcccacatataatagaagtccaataatgttagttcccttactctgcttttctttcatctttctggtctaaactctaaaccgcctgaagcacaattctgaacagattattccatagctcagaagcctctaaagcacttctttcttgaaggataacccgctcagctcagcattcagagatctctgcttcctattcacatttttcagttttctctcactgctgtcttataaacaacgcttatgctttagacactaaaccattacccaatggcacacacatatacctccgagcttcca

SEQ ID NO: 51145 - DNA, 1184 bp, Bovine  19866880950653
  misc_feature (1)..(1): n is a, c, g, or t
ntctctggtgctcctatgtcatttattatacacatcccaagtactctctggccttcagggggttccactaatattacaccccctaggatcccatcccaccttcatttctcattacctgtcactgcaatctctctgctcccacaagcaaaatatgcatgccatctcctacatgtgatttgctcattttcatctgatatcttttctcattcaaactacccacccactgacctacaaattcattcctgctctctccatcaatatcctgttaaccttcaaaattctgctcatccctcatctctttggaaagtccttcttccttaattgcaaacaaatatgagatttcttttgtcctttattccctcaaaaaagggcgatcctctggttgttattgaaggtggggacatggtaagataaagagattcaaggcaatgcattagtttgggtatcaaactgcaaacagtttcgtctaaattaacaacaaataaaatatctcacaaataaagaaaatggttaaaggttcacataaagctttcttactcattttataagggaaataaccatgtataataaaaattgttgttgttgtctagtcattaagttgtgtctgactcttttacgaccccatggactgtaatcctcctggttactctgtttgtggaatttcctaggcaagaatactgtagtggggttgtcatttccttcttcagggaatttcctgaccccaggtgtctcctgcatcggcaggtggattctttaccactgggccatcagagaagcctcaatagctgtcatttataagggatttattttacttcctcaaaggactttatacatactaacatttcatttttaagtaagttatgtgtcatagtcatggtacaggcaagaaagctgagggtcagagaagtaaaagtaacttgcctgaagtcacagagctagaaataaaggcagaatttgaactcagatttgtccttactccaaaatctgtgtcctaaccacctaagctactgtcacaaattcttaacagcattcataacattcagttttggcagtttctgaaaaagaaattcacaacttacttgacagatttcattttatcaattggcacttgatagtatcaaatttttgtcccctttgtatacaattcctcctctttctgccaccctgtctcctggtgagattgc

SEQ ID NO: 51146 - DNA, 747 bp, Bovine  19866880966656
  misc_feature (1)..(1): n is a, c, g, or t
nccttgggaagggaatggaatggaatgaagtgggcaggagaaatcacaatgcattgcacacagtaaaagcacacattagtttctgaaacttacattttgatcatgtaggcacgtgtgcctggaaaatggtttttgctgctaaagttgctgctgttgttactttggctctgctccctcgctgatcagtctctttcatttatacaagtactttgatgttagacaccaacagacatagatcacggaaatgcccaaatttctgttcaggactttggcccagtgtttatttcagccttacaactgctgctgccacttcacttcactcactactattgagactgtgattccttcagggaagcttcgagagacttctttatgaatacttgaggcactactgggctcactccaggacagaagtttacatgattcatgagagttgtgcctgcagttgacaaagacaaggcaaactgcacaagagcaactcatctcttccctaactttacgtgaccatttgacaatgcaggcagctatcatggaattcagcatcatgaaaaaataaataaatagaattttttaaatgtaggtgcaccagagaagtcaagacaaatatttaaagaacagttatacccaaaagtaatgtcaatgtgatagcgaccaggtgataaaaataaaataggtacaacattttttagccaagtttagaaatagtcccttcaagcaccagaccattttcatgttcaagaggataca

SEQ ID NO: 51147 - DNA, 2177 bp, Bovine  19866881055129
  misc_feature (1)..(1): n is a, c, g, or t
nagatccctagtctttcccattctgttgttttcctctatttctttgctttgattgctgaagaaggcttcttatctcttcttgctattctttggaactctgcattcagatgtttatagctttccttttctcccttgctttttgcttctcttcttttcacagctatttgtaaggcctccccagacagccattttgcttttttgcatttcttttctatgggaatggtcttgatccctgtctcctgtacaatgtcacgaacctcgttccatagttcatcaggcactctatctatcagatctaggcccttaaatctatttctcacttccactgtataatcataagggatttgatttaggtcatacctgaatggtctagtggttttccctactttcttcaatttaagtctgaatttggcaataaggagttcatggtctgagccacagtcagctcctggtcttgtttttgctgactgtatgatccagcaattgtgattcttggtatttatccataggagttgaaaacttatgtccacataaaaactatacacaggcatttatagcaactttattcataattccccaaacttagatgggcaagatggtaggtgagtggataaagaaactgtggtctatccagataatggaatattattcagcattattattatgttattcaccataacatattattaaaaataaatgttatcaaaccatgaaaagacagaggaaacttaaatgcatattactaagtgaaagaagccaatctgaaaagactacatactgcttaatttcaatgatatgacattctggaaaaggtaacgctttggtgacaaagattagtggttcctaaggatgggacggtgagagagggatgcatacgtccaccaaaaagaattttcaacgcaatgaaattattctgtatgatatgttaaaataatatgtatctgttattacacagctcaaaactatgaatggcctcatggaggagatccctattgcccagcatgaacacccaccttgaacagttcaatgaatgagaaacatacaaacctctattgtgtttgaactcattgtgtattttgtgtctacttgtcacaggagcttgtgttacctgaatacagatagcatattcaggcaaagatgaatagagatgtattcagggaaatatactgggagttaactggaatcctaaacagtggcttggagaaggaaatggcaacccactccagtactcttgcctggagaattccgtggacagaggaacccggtgggctgcacagacagtggggtcgcacagagtcaaacatgactgaggcgatttagcaaatggtggctaggttgaggtaggtcacattaaagagctgagtttccttctgttagcagcaaatcaaagcaaatccatactctgacaaaattaaacagtatgcaggtacaatatattttgaagactacccataagagcatgtgacattcaaaactgaactttggacattcacatgagtatcttcttataccatcagtcttttattttgcaaagaagtaagcctcttgaaatgatgtccatgcttcaagttttgcacttgccattccattagtgagcactcactggttcattaatgtgtgttagtttcagttccactgacaaatgctgtaattagcccctgacaatggaaaaggacacccaagtcaggaatacagaagtgttcctactctaagaaaaactgaagaacaaacaaaaacaaagattgcagctggcattatgctatcagagaaaacggaatgttatcaaagatattactaggctctttcaggcatacttttccccaggccagaaatgtggaacacagcccaagaaagattggagataacaagtatataaaagcaatactgaaggaaggaacaaaacagaaattaacttgaagcagaaagcaagcacttagtgcaacctcgcttttctgaatcaacagtttctctctaaagggcaacctgcaagataaatgttggacatggtcagaaattgtaatagggttagaagaagcaaaggaaaaaaactgtctttcaattgagaagaagcatgagatagattttgagaacccagattttactagactccaagggaagtttggagtctaggacttccctgtagctcaaacggtaaagaatctgcctgcaatgcagga

SEQ ID NO: 51148 - DNA, 1112 bp, Bovine  19866881080707
  misc_feature (1)..(1): n is a, c, g, or t
ntcatgtaaaaaattatagaaaatgtgctctgtgctccctgtgaatatttgcttgggaaactggagctatgtaaggcaccatcatcccttgtcaactctaatattaaagtccttatttaattagctgtgtctggcctttatgatttccaggtttgaaaggaaaatgaaggaaaggataagagcattgaactgcttaccatggatgatgggaataaatgattgtgaaaaatgctaatctttaatttgaactattttgagtattttaaaaagaattagttatataagatgatttgtgtcctcccctccttttctttctcttttccttctttaaatttttaaagtgttcctttttgtttggtttgcacactcctaagcatcaaatccatcaaccccagcctgacaaattggatagcctctgcaggcaggactgatatgcgccagttcccactgatagacataacagctggcatccattctgagttgtcagtccctgtaccatactggttgttaaagatttgactatcacccatcccttgccatgcatgatatggactggctgcatatttgggttctcaactattacagtgttcttgctgtatctttctcttcagttctatctggggttttcaaagttgaagatgaacaatatgtaatgggcttttattatttttaccttcccagcatgtgttggccctgttttaacagcccccagatatttttgggggctcatccctctccatatcaatcaaagaggttccagtagaactgcctccattccaaacatacgttccagatctggccacattgattgggaaggatgatgtcatctcatcatacttcttaaatgtcctgaattatttcctaggaccactagcctagaagcatatcttcatttctactggtagggatggagagtctgggacagccatcatggtacaagtggagtctgagaatggagttagcacagaggcagtagaatgaggacatggagagtaagggaaatctggtcttaggacttcggttgaaactttgaggttttaacattttcttaattaaaacgttaatagttttttagagtagtgtgagtttcacaacagattgagcagaaagta

SEQ ID NO: 51149 - DNA, 1027 bp, Bovine  19866881082961
  misc_feature (1)..(1): n is a, c, g, or t
ntagtagaacagaatgaagcccactgatagagacaagtgccatagacagaatcttgaccatgtcccagggtaagtcctgtggtaaaaacggcaaattcttcctgctatcctttctcccattcttccttttggtaatagagccctccaatttgagtggggaacatggtttaccagctgggtaatatacttctcagcctctcttgcagcaacatgactaagttcagacacagacatgtgagcagaagtgacataagcaacttccgtgtcaccttctgataaggaaacagcttgttcccccattttccccaatcccatcagctggagcttagacctaacaggaagtgatccagaataaatcacgcagaaaatataacatgcttaggtatgatggaacaatcaggtagaacaaaccttggactgtggatcacatagatcagatgaccacctgcttctagaccgtctgctcactcatgtttttacacaaaacataaataaagctgtcttgtttaagctatactattaaaaatagctaaactgatttcctaactaataaaacccttgaggagctttccaaaattcctgccttccaaaccttgatcgttttttaattccaatgattctcaaaattttatcaggatctttccaataagtcatctttttgcttaagtgagttccacttaggtttctgtcattcacaaccaaaatattcctgaataatacaaaaggtaatgctagtaatattcagttgttcctcccatgaagatatttttttaatgcttcattgtcagtcttataagtttaggtttgtattaaatcaataaatgtggcaatatcttcataaatatatttagcaaactaagaataactgtcccaattccaatggaagatcatgtcaaagccaataaactcttgaaaatagaggagtaagataattctagaagacttttaaacaagtacatttccgaaaacaacaattttcagattattcacagaaattcttactaagcattttcaaggacttccttca

SEQ ID NO: 51150 - DNA, 1832 bp, Bovine  19866881116523
  misc_feature (1)..(1): n is a, c, g, or t
naatgtattctgataacacaattgccttctcacttcccatttccgcactgcagaatgattttttcaggcctggctgtgaaactagtcagactggaatagggagccgatagaaagggtctgtctcaggcctcagcaaaggacattaaattacaagaaatgcagcatattataatgttataaggctacattacagattacattgcagcttcatagacagctttctgtagatcttctctttcctggtttctcaacagattttctgaataactctaattcaaaatctcttctcaattaactagagtcctttttttcctggatggttgagtcacttcttccattctatcctgagattacacagaaataagtgtttgactcatttttaagtagtgtgtttagaatgccatatttaaaaaacaagctagaaattagagataacaagggtctttgtcccctaaagctgatccccaaaagctcaaaatagttcagacattatctaattccctgtcacaacaaagctgccattatcttttccattttgtacatggagaaactgaaataagaaaattatagcctgactttgacactgttaagaggtgcttctattaaccctcttgcaggaggtagctaggggaagcctggaaaggagcctgcctcgcagtgctatagactggttttcacgccaactttatcaaacacgactcaaaacagggaaggtaaaaggatggctaggtgagccagaccctcttcaagcagaggagctcagctttacatagatttttatcagctttatagatcagggttttaagaaggattttcttaagggatcaactttttaaaatctgataaacattgccattaatctggcaatatttaggttgtgccaccttaaaaaaaaagtttaattatattcagtggttattcaaaagcccaattgattatatgtgcgtgctcagtcctgtccaactctttgcaactccatggactgtagtccaccaggctcctctgtccacatgatttcctaagaacactagagcgggttgccattttcttctccaggggagcttcccaaccaggtatcaaaccctcatatcctgcttgacagacagattctttaccactgagcttccagagaggccctcaaaatcccaaaagtaatcattaatggcaaacctgagcttttcctatgtgcccacccctacggtaagcacatgacaagcattaacttattgcatggtggtaaattaccattttacagataaggaaattgaagcttagaaaagataagcaacttgcccaagatcatcaagctggtgaatggtggaaccaagataaaaccaatcagcctacactcccttttttccttagaggctataggcaggctgctggggtgccaatcccacatctgccaaggtccaaagccacagcgactcaaaacacgccatttctttgttgcagggtcacctgtcccagcagggcctggcagcagccagagcccacaagtcatcccaggagaccatcactaccaatacctggcccctctccactgctgaacagccacagagcattgctctctctttctgatccagcccaagtgccagcacactatgatggggcagggttcttcgccaagcccctcagttaggaatgctttcttctgggggcctggtgtaagtaggtgaaatgtgggatttcccacaaagagaagcagagcatgatggagcctccagggtacactttgtggctacaggagatgatatggaaagcatggctgagtccagacatggaagcacgaagaagatggtagtggataaagtaaaggtgggaaaacaagg

SEQ ID NO: 51151 - DNA, 1854 bp, Bovine  19866881135630
  misc_feature (1)..(1): n is a, c, g, or t
naggcttctttagagacctcttgtttattcttaattcttagtttagcctttcttgctcttgggtttcatcatactcatttaaatacttcagttaatttttgagtcattctttcatccagccatttatttcaacaagatttaattgaacacctatcatattagtcaggataagtcatgctaactattgaaacaaacatctccatagcttagcacagtggtttactgtggactttcatgctcacctaaagtccagtgtgaatgttcctcctgagaccgctcatctcataactatcatccagacatttgatcgcttctatgctgtggtcctgccatattaagggatataagaattctttgcctccaaccacacaaataaaaaatctttgaaaaattgcttaggatgtattatggctaagtttggtagtgctgtatattacatgcactcatgctccattggatagaactcagtcacatggttatctgtggcaggctggcagtgggtagattcaagatgcatttgggaaatgtattttaattgtgtatacaggaaggagaggataatcaacacaatgccagacattttgcttagtattgggaagtttaaaaaaatgaataaggaatagtgctaattgttgggagctcacagtccagggaaccagacacacacaaatggaaaattaatataatatgttattagcagttactgagtgatatcttcctccatgcactactttaagcccttaatatagtggcctttaattaatatattcctttcaacagtccccaaaagtaagtacttttgttatcctcatttcatagataaggaaactgagtcatagtacttaagaaatttgcccagggtcactttgcaaatgagtggctgagctaggattcagacctacgtagtctgttggcaaaggttgcacacttaattatattgttctacaatgatgaagagatgctcagggtgttggtggactgtgcagggacccagctggttgtaggattctgcagcaggccatctctgaatttaggtataatgactgagctgaaattagtccagtttggtggcagggaaaattccaacaatggaaatgaggatggataagggtaaagaagtgacagttatcttggcatattccaggatctgtgtgcaatctgatgccatgagtcaggttccaggctagaaataggagagactagctatagaggtagataaggccaggtcatggaaggcattttatgcgttgctgtggaactcagaacttatcctaagtaatggaagcctttgaaaagcttcaattaggggatttaaaaagtcaactttacgttttacctaaattctgctggtggttatctgaaggatggattggagtggaccaagaacactgactgaaagattagttaagaggctttcaaagtagtccaggatggccaaatgttaaaatatcttgttttatttcttattacacagagaatataaaatggtagcaaatgattattacttatcatagcactcatttgtcttcacaaccatgtgtaagaggtactgttaaccccattttacagatgaggaaactgagtccctgggtgtgtcaatggctagtaatcattgtcactaagacccagcctctgcagtctgtttccagagggtgtacagttaacccctagtgtatacggtctttccatgtgaggagtgttacattttatcgaagatgcaaaaagtggatgggttatgtgggtgagggggatgaggagggattgggcagcaggatcagtaagaggtgaaccaatcagggggtacagggccctcctcctcaaggtcaaggaagtggggagtctggaggcaggtaa

SEQ ID NO: 51152 - DNA, 783 bp, Bovine  19866881149196
  misc_feature (1)..(1): n is a, c, g, or t
ncaagaatactcaagtgggtcgccattctcatttccaggggatcttcccccgacctagagatcaaaccccacatcttctgcatcgcctgcactgagggcagattctttaccactgaacccactggtatgagtgtctatatctataactgaagctggaaagctgctacagagcccaaaagacctagacttcgccagcaatgacagtaagggttggagtaggagaaatggacctgaataggaagatttggaaactgaagaacataggtgggaaataaggcagggggcaggaagggaggggtactgtggcaggtggggatgagtttgactaaataggaagcatgattctaaggaaagtcactaagtttaaacattgttgattgtaagaccaatatgggttaaagaaagtttatggtcttttgtgagcacggcttacccctaaaatatttgtattggcataaactaaattaataatgttagactgcttttaatagcaataatctctgctgctgctgctaagtcacatcagtcatgtccaactctgttgtagagcttaaaacaaagaaagaaaaaacatagcaatgtgtgcaagaggaaatatgtgtaaaggcaagcagattcccagaaaatgtcagcaccttgtatgatgagctctggcagccatttgagtgttgacaatatgctagagaggctcggaacataaatcaatctacatttgttctcacagggactaggagctggaattactgtttctgaaacttgagccaatatgtcacggcaatataa

SEQ ID NO: 51153 - DNA, 1836 bp, Bovine  19866881154763
  misc_feature (1)..(1): n is a, c, g, or t
naactatttccacttggtggtgttgaatattctctaaagtgtgttttatatgtctagtctaaaacatgcccttctctctatagccagtgaaaagacgaagactgaatttttcttctcatatccaatttttgcttctggttacttaattttctgtacagaggttctcttgatgttaattcaaatctcattttatttctataaaagtatatagtttctttcctagtggccccaaaagacctaccctctccaaattttcaggaatgaatactccaaaacagaaaaagtctattgcagttttcactctcaaagagtacttgctatcatcattatccacaaacttctatcaacaacccattctgcatagtaataatagttacaataatagaggttctgacactgggagtattcatgcaactttcatagttaccatgaaggagaggcaagaacagcatcggttgtacaaattcagtgttgaactatatcaaaatgattgcttgacaatcatctatatttagcacttctctcagaaagacaggttttgatgacatcaattcctctgatcagaggaagggaaagttttcccccacaagtgagagtcggaggtatgactgggtgtggatgcaggtacatgtgtcgaggttgcatgcatggctatgtgggagagggtgagtagaaaataactttagctgaatgacattgacattattgtctctaaagtagaagttaaagttttctactgagagtgggcaaaaaaggagcttaaagagtgtggttattattcagactaggctataggttatcagatgtgtcttcaaatcacaattgtaaatttcagtaagttaaagaatttaattttattctccatcattattatcatgatcaatcctctaggtctgtgacttcatcagacagcatatatgcttatagaactatgatgtactctccgaattgagatgttatttcgaaggcaacaataatgtagcaccaggacacacgggttctaatattgcctgtagttgtaaagttgtggacaaagatctcctgagttgtggtaaattctcattaactcagaagccagatggaagacaggagaggctgacaccgcctactgcacctctgagggtttacacatcattcttctttgtccagttgctccataagaattggtgcatgcatgctaagttgcttcagttgtgtccgactctgtgtgacactatgaactgcagcccaccaggctcctctgtctatggaattctccaggtaagaatactggagtgggtgccatgctcaccttctgggggatcttcttgactcagggattgaacccgtgtctcttatgtctacctacattggcaggttggctccttatgctggcaccccctgggaagccctctaaggaattgagcagggcactgtttctaagtacttcaaggactttgtggatgattgcatcagtatgaaactttttttttttttaactttttaattttgtcgtattttcttccttggaaagatttgcattgaaagaactctgtagatagcttatctgttcacaattttagcaatttgtctgcatttctactctgaattcaactattacctttttgaagcttttcatgtcatgttaaggaaaaaaaaaacacttctttttgaagccataagaagaacagaagtagatattgctattcagtaaggagtgggtatcattagcttagtacatcagaaatcctctgagtatagggaggatttcttctgaaatgatataaaaattatttagcaaagaataccattgtcataagcaattcatcttcccaaagaattctaaccctttaattt

SEQ ID NO: 51154 - DNA, 4066 bp, Bovine  19866881158704
  misc_feature (1)..(1): n is a, c, g, or t
nttgtcttgggctgtttaaagagtgaaggctcaggattagttttagtgataattcatctcaataaataccaagattttgtcatgtaacaagaattatgctaaatgctagaaacacacaggtaaatgtggcaggtccctggccttcaaagagtttataatacagcagaaaaaaataagaaatatcctgttagttaaaagaaaatttaatatgggcataatagcaatatggctggcagtttcaaccctgaatattcattgaaaggactgatgctaaagctgaaactccaacactttggccacatgatgcgaagagcctactcactggaaaagcccttgatgctgggaaagattgaagcaaaaggagaaggaggaggcagaggatgagatggttagatagcatcaccaattaaatggacattaatttgagcaaactccagaagatagtggagaacagagaagcctgccatgctactatacatggggtcccaaagagtcagacacaacttagcaactgaacaacaacaatagcagaaatgagtatagaaaaggtgaaaaagttaagctacgccagtttttagagagccttgaattcttgtcaaaaatttatattttattctgaaggtgctggagattaagaacatttttttcaggtaggaagatcactcatgcatcaactagacatgaaagtgtaaaaaaagtgttcgttgctcagccgtgtccaactttttgtgaccccgtagactgtagccctctagtatcctctgtccatggaattttgcaggtaagaaaactggagtgggttgccattcccttctccaggagaatcttcctgacccagggatagaacctgggtctcctgcactgcaggcagattctttaatatctgggccaccacattcaaaaggtaccagatgagaggcagggagctgggttaatggatgattgcctaaattaggaaggtggtaaagaaaatgaggaggatcaaagaaatataaaaactatttcttcaacagaatttgatgtttttgtatcagataggaggggggtgattcctaagcttgggcaactgggtggattctagtattgtacagttttatcactttgctaccatattacatgcaaccttcagacaccagttatgggatccatatgccagtttttccttctctcactgatggaaagataaccacacctgtgttcttttctataagaaaggtgaatggatactgcatttatacaaagtctggttgtaagtattttctcacaggttttttaaaccaaggggttaaaaaaaaaaaaaaagcaaagaaattcaacaacaaaatcttcaaaatcttggtttttaaagccctgggattcatttgaatttactgttgccatggtttcaagagtctgaaatcaacatttcaaggtaatccaaagatctagatatggtcacagtgttcaggtatcaaggaacaatcaaagcgttataccccattagtgaccgaacccagttaatgctgtgcaaatgcctcaaattggtattcagcttaatcactgatgctgtattactaattatagcatgacactatgcaaaagtgggacttttcaaaggctgcaaaatggcattattttaataagtcattaggaaattgctctttgaggatgcaatgaaagtataagtatctttattagtggaattttgtgaaattgatgagagatttgagcatgcatgatgtgcagcgaacaatccatttgaaacagaccaagccattgggagggctggctaatgacaaagaggatgatctgattcactgtatgagaaaaatgataatggaggctataaacgaagggcgttgaaagactaagcagtgtctcccaacgacacccacccaagtcctactggcccttcatcttgtatttagagctgaaataaagatatcaagatggactctaatctttgagagaattaacaagcctcctctaacttgtctaccaatacttgtgggcaagaaatatatatgattattagttaattggacaacacaaaaatattgatgttctgtttgaggcttatttgtaaattgggaaagaatcatttgagacaggaagccagatgagagaagatgacaagtacaagaatattaataaaatatctttgagttctttcaatgccagataaaatatttttattctgaaactctcatccagggaaattcatacctaaactttaaagagcattatgcggactctacatgtgtgtgggtaggtggggaaggagggaggaggagggagagaaagtggtgagagagaaactatattttcttctttattttcagttcaacaaagtattcatgttacagctcaaattacaggtttcagcatttggaaaggctcaggaatgttttccttagccattcttgaaacatcctctgagaaactgcctgctttctaaggctcagttattgaccattctcagaaatgggtttctatatttaataacctaacacattcctataatattaaatttttcacatggaaattggtagccctacttgaattcgtctaggctcaatgagcccattgtttgcaatgattatcactctcagcagattcggaaatgcttgcacaattcatgtccaaagaattcttcaaaatatttttttatgatctttacttttggctttgtaaaagaacttgggtttgacaaatgtgttccaaattcccccaatttgtcatctgtaggaaagattatttgaagctaagtaggaacaagactgattaacaaactgggatctgataacaacttttagagtggagggagtttcatataaatgtatatatgcacaaaatagcataattatgaaaatttcttagaaggaaaatatctggtgacattaacaggaaaacataaatggctcagggcctgtataccaaacttttactctctaaaatttgtttttaggacaaattttgattaccaaagacccagagttcaactctgctttattaggaattaagctatgaaataagattcttaaaaataaaaaagaccttaaagctgctagccattctgttagatttttgacataatttgtagtctgaagatactgcacctttggtcctgtatcagagcaaaattcatagaatgacttggctgttctcagcatgaagcagaacagacacatttttcaaaagaagcaattgacttgttaaaggtttgacatatcacaaacattttgattttgtgatcagactggatggtgatttacttatcctctgactttactgttgggtaatttataattttagttctcagccaaaaactgtggaaaatcttaggaggaattggtagggcaaacaggagaaaaacataaagctataataaagctatagtggtggctaaacatgactagaaaaacaaatgaaaatatttgatttgtgctgcacctgtgagagaaaaaaattatggcctctttttgcatctgaatctcacggtctattttgagagttgagatgtgtatgaggtaccttactcactcttctcaaacagcctttactttaagagaactcagctgtgaaatttatcgaaattctttctgaagctaaaataaagttcaaattctttagcttttgacaatttttgcattacttctctagaatttagagatacaatgtggtgtggcatgaataagatttctcaatacataggctgccataataattagaaccttggttatacagcacttccatccaaggaaaaggatctctctatcagtctcgtttcatttaccttcctttgtttgctagaagattctaagatttgaggcggtaaaaggcaaagtgagccagttagaacaatggcagagggaccagtactaatggctcttggtaatacctgttgagttcttaccaaaagccatgtgcttcagttagggtagggcattactagttcacacttgcaatggcaccccactccagtactcttgcctggagaatcccatggatggaggagcctggtgggctgccgtccatggggtcgctaagagtcagacacgactaacaacatcactttcacttttca

SEQ ID NO: 51155 - DNA, 852 bp, Bovine  19866881220447
  misc_feature (1)..(1): n is a, c, g, or t
nctttgccccctagaactcttgataactaatattcttagggcctctagtttagaatcaaatataccatatttttttaagaaaaaacttttattttgtattggtgatatagccagttaacaatgttgtgatagtttcagtggacagcaaagggactcagctatacaaaaacatgtatccatcttcccccaactcctcttgcatccaggctgccacataacagagttccatatgctcttcactaggtccttactgtttatccattttaaatatagcaaaacaccgtattttgtttggttgcaataatcattgaccctgtctttttttttttttttgaagtttaccacttcaaatatttatttaataaatttgaaggtaaatatggaaaagctacaaaatacagaaatttagtttattaaattcctttcaattataagaaaaatatgaagcgtgcttcacatctgtattttttattttgaaaatattgtgctaataaatcctaaaacgagatgccagtccaggttcaatgccagaccctgtcttatagagttgaattgttatatcgtcatttgtaaggttatcatttggaatgtgttaattgttatcacactggtataaactataaagctttggttttgtaatgttttagtatttggctgtttaggaagttttcactgtccagtcacgaaaattagtacagatgccttccagtttcccaattaaaactgctttggtctccttttccaggtaattacctacctaccaagctgggcacaggaaatagattaatgaccgtatcttacaaatatacaactccaaaaaactatttaaaggaagctgtaggctttattgat

SEQ ID NO: 51156 - DNA, 1285 bp, Bovine  19866881279432
  misc_feature (1)..(1): n is a, c, g, or t
ncactgtggtgttggagaagactcttgaagtcccttagactgcaagggagatccaacaagtccattctgaaggagatctgccctgggatttctttggaaggaatgatgctaaagctgaaactccagtgctttggccacttcatgcgaagtgttgactcattggaaaagactgatgctgggagggattgggggcaggagaagaaggggacgacagaggataaggtggctggatggcgtcactgacttgatggacgtgagtctgggtgaactctgggagttggtgatggacagggaggcctggcggtggtgcgattcacggggtcacaaagagtcggacaggactgagcgactgaactgaactgagctgaactgggccacactgtttttgtttaattttgcctatggatctaaacaaaggaaaacaaaagaaagatagtgagttaagttatgtattccttggatccatgtttctaattctcagtcttctctctactgtgtcacccttgaacacaggcatttcaggactggggatatgaaaagggagtttgccatgagatttgatagtgcaatacctcggaacttctaccagcctctctgcagcttgggagtgcaagatgtttgagagttggaatttgttgaggagatgtcttagaggccactgatgctatgggactaaagtctctaatgactgacatgggatgagcacttagcatgccaagcactgtgcttggtcctttgaggatgtatttcatagtcatcagttacacatggctctctttgcaatctatgcaaataatgcagtctgtgttagaagtaaaatctttttcctatgctcctgtgaatatcttagtttgaaatgtctttctcaacttttcctgtgcataaggataggaaagactgtgcccttttaagattgatcaaatcacagaattactgttatctttaacacatttaaggtaactttaactgtgaagtaaagtgtaaattagcaggaaaacatgtttggtttcttggctaagatggggaagttttagcagttgacatccagctggtttttgtgtttgggttgtaagcattctgtgtttttaatagtgctgacaaaatttaaaaaaataggaatatgtagtgaatgtaaaacccaagtcctctcttaaagaatctcacctgactgattttgtattagatgtgcatatcttattttcctatataatttattatgtattatgaatcttatataccttttgcccacaatagaggtacatgtatgtcttcataatgtctgcat

SEQ ID NO: 51157 - DNA, 905 bp, Bovine  19866881618989
  misc_feature (1)..(1): n is a, c, g, or t
naactattgaaatgaacattggaagctcctataatttgtagaaaccctagcatgatgctcagtggaagctaacaagaaaaactatgttaggcaactgaattatttttacaggttaataaggttgccagaaagcaacagagaaagtactttcaagaggggaattatttaacataatgacatttcttttcatccaaaccaaattaatttctgaaagtacattagaatactctcaccccacccccttttacaagttttcaagctaatttgtgttagatctacaaaaacactgaagagcccccctgcctatcttcaggggcctttaaaatgaaaatgtgtgggaatgagagtagaaagagcgatgacacaaaccaagagagctagaaagtcgatccgtatcaaggagcaagcataaggtctgcactgtcagtaattagcattcatactgggaaagaaattacatattaatatactgtgtgttcttttattaggtggctcattttttagcagtgacacgcctgtggacagaaatgtaattcttcagagagatttaaaaggttgggactacatgcaactcaccacattaatcatgtgttagatcaaataaacacccattgtgggctttttgtattcatcaagagttcagaagcagtaacatgttctgtttcaaaattgtgaaaaaataaaatctgagctgaaaaataaggggagaaatgaaagacctggagaatcaaggaatgtttcttatttccaaaatccatcttctctttctataatcaaggtgaaacttcagactaatcttagagtcatctagtcatctatctggctgatatgagcactttgtattaattcgtgtatgagataggataaatcaaaatgtgtaacaatcgtgggaaataattgtaggg

SEQ ID NO: 51158 - DNA, 1043 bp, Bovine  19866881635009
  misc_feature (1)..(1): n is a, c, g, or t
ngcagacacgactgaagtgacttagtagtagtagtagtaatctctacttgaacctctcttggagaaactagggagaacaccctgggagaatatggagaaagttacatggtgcttggtaagtcagccttcctgatatttccacaattgatttatccttggaccaacagcatttttagcctattcctattgtaagcagaattaacctacccaggtttgagagcattcccattttccttacacaagaaattatcctgtaataaccaaaataatttttatcaaggaaactaagactttagaaaggataaaaagaacattatttaaaactaagaaaagattttaaaggctgttgattaaaggtttgtaaatcactgctaaccatttcttattaagcaaagtgttagaaaaaaaaattttggagagtagcagcaaaaatcttcaaaacaggaaagacttcactcaccacaaaaattgttgaacacagaaatatcctcccaaatgtagccagttgagtacatttccattttatctatgaatgtgcctcaaacgggtaaacaaaatcatgaacgtaaagaatttctgatttcctctctcctcttggtaatttgtttttataggaaacacctttatgattgtctaaatacaaaataataattgcaacaatagaagaaaatggtcatctcaacgtgccatttctctgatatagtacaggcacgacaaactgtccggccagctctggagagcagccgccagctgccaacaaccctaaaataggacagacactgccctcattacagaacacagcgataattcagaaagcattcaagtgatggaaaataaaatctttgaaatgcagaaagcggtagatttaatcatgagtgatcctgcacaattgggcagttctgacatctcataaaatagtccaccataaaaggcttgcctgatcctaaagtagaggtaagaattggccacgaattataaaatcaaaatggctgctgcctttgctgcctcacagtcagaaccttgtataatcaaatcatcacaaa

SEQ ID NO: 51159 - DNA, 1946 bp, Bovine  19866881877199
  misc_feature (1)..(1): n is a, c, g, or t
natttgctggcatattgagtgcagccctttgacaacatcatctttcaggatttggaatagctcaactagaattccatcacctctactagttttgctcatagtgatgctttctaaggcccacttgacttcacattccaggatgtctggctctaggtgagtgatcacaccttcgtgagtatctgggtcatgaagatcttttttgtacagttcttctgtgtattcttgccacctcttcttaatatcttctgcttctgttaggtccataccatttctgtcctttattgtgcccatctttgcatgaaatgtccccttggtatctctaattttcttgaagagatctctagtctttcccattctgttgttttcctctatttctttggattgatcactgaggaaggctttcttatctcttcttccccatactaagtcagtatctatacccaactgaatcctgacctcaggctacccttagatttttcatgctaagaagtgtgtagtaatggttaggagtctgactccacctatcaaaggtgagatagatcaaagtctgaaatctacctgcctcttacaaactgggtgatatcaccaagcatctttctagacctctcccaagcctcagtttcctcatctgtctactggggataatagtagtatttacctcagctcatgcatgtaaaaggctttgcccaaatgctagggaaatatcaagtatggaatacatttaaattattgttttttcttctctctcttttcctcttatctctatttttccttgttattatcttgctctgataattaattcttgcctagatgttaaagatttaatatcagatatccaaagccattttcaagtaaagaaatgctttatggttgatgatgccttaacccattaattgttctgagccttaagtgcagaggtttggtttaactataatattcaatttattatacatgcaagttctctctaatttacttatttgtttggttgctttctgttttcattcctcacactccaatagtaaccactctaatgtatttaatgcatatctttctgtttatatttttgtcaaatatgtatttttattttatttgcaagtattttattaataattcatgtaaacagtatactatctactagttctcatttgttttcatgtcttttcacttatgggatgttctttactgctgctgctactgctaagtcacttcagttgtgtccgactctctgcgaccccatagatggcagcccaccaggctcccccgtccctgggattctccgggcaagaacactggagtggggtgccattgccttctcctgggatgttctttaagattcagccaaatctggtgcctcatctttaagtgctgtatagtactcagaggtggacattaattcaaatcttttccaaaaaaaaattttttttttaaccaagaactgcttaagatttaggaaagtgaacttatacccctatagcctcttaaagtggagcccaaagttctaggctcaagctccatatttctttgaaacaatttgatttatcatatagaaagaaatcatggattttgcagtctatttcatagtatgtccattgtttactacaaaaataatattttttatggttaagttgtttaattttaatcttcactaaatcaatgaacttggccctctgtaagatgcactattttccccccatgagtttccatgctgtctgcatactgctgggcagaacaagtttgagaaatgtggtcttaatctaaatataaacacgcttctaaaaagtgggatttcaggcaaaaatttgcttaagtgacagagagtaatacttaaatcccttcttattatgaaaggcagccctgataaatatacttagcactgaaaactcaaagtatgtcatttcccacagtaaacagctaaagccataacttcaaaggataactaactgtgt

SEQ ID NO: 51160 - DNA, 937 bp, Bovine  19866881911998
  misc_feature (1)..(1): n is a, c, g, or t
ncctcagatggccctctcctgggatctccctgcctgaagagtcccaatatagaattcctcccaagaggacttcagcatgtcagctgtcaccagcacctgccaagagagagaaaggacatagtgcaggagtgaggatccaatcaccatgggcccatagagcacaatctccacctcgactccttgaatcgcatccccaagcagatgggaagccagcagcgaacccggagcacagatgtcgcaagttcacaccgagcatgagtgaactgtgcggttcttcactttaatttcttatctgataacaagtttccagtccccagatcaatactgccagcacgctgctgtgcaccccactggccacacgttgttgtctctattactctttttaggggaatcattatctgtacacactcccatgtaaaaattatagtttgttctttctctccccaaatgaaacaattaaaaagcatatttttaagaggtttgcctctgcctttcacagtagaagcttactgaaaaaagctgcagttttgtaaaagtaaggtctgatcccctaggatctgtaaacaaaggctgtgaaagtagaaaagatgtggcagagagggtgtaagtcagtcattttcacccacaacataatgacctaaggacaaaatacatcatcacacgtccaaacaaccttcagaatggccggctttagcaaaagcacagcttgatctgcctcttggctaccagaagaggcagaatcaacaggaatgccagagcacttgacagtcctctaggagtgtcaactgtaaagtggctccttgacacgctttcccacgcggatggggggctgactattccagtgctggccaccagtaaggactgtctcccctgctatgcattacttgtagtgtctctcaggggtgcgtgtgagtgattcttgcagtatccttgcctg

SEQ ID NO: 51161 - DNA, 3414 bp, Bovine  19866880168104
  misc_feature (1)..(1): n is a, c, g, or t
ntgatgccatccagcctctcatcctctgtcatccccttttcctcctgccccaatccctcccagcatcagagtcttttccaatgagtcaattctttgcatcaggtggccaaagttctggagtttcagctttagcatcagtccttccaaagaaatcccagggctgatctccttcagaatggactggttggatctccttgcagtccaagggactctcaagagtcttctccaacaccacagttcaaaagcatcaattcttcggcactcagctttcttcacagtccagctctcacatccatacatgaccactggaaaaaccatagccttgactagatggacctttattggcaaagcaatgcctctgcttttgaatatgctatctaggttggtcataactttccttccaaggagtaagcatcttttaatttcatggctgcagtcactatctgcagtgattttggagcccaaaaagataaagtctgacactgtttccactgtttcccaatctattgcccatgaagctgatctcaactagcaggatgtgaaatctttccttctagtccctgtctccattttaaatgaggtttctatttattaattttcatatccttactgtgaaattgacattttaggatcaaaacttttaatttctattctacaacctcatatggactttctaatttcatagtatataataaaattattattttggaggataaaaaatagacttacttaaaaaaatactttttttgaacatatatacagtacacaatataaaagctgctatgaaatataaacttaaaagtcaaggctgcttcttaactctctgtcttcacctagttttcttctgagaggcagagtcctcctgtgtaactttctaaaaatactacattcatttacaaacacatgcatagagaaatgtatatatacattatcaaattctaggaaaatatgtacactgtcctacaattgactttttaaaattttttttacttagcaatatattctggaaaattttctatcaacgcatagaaagctaatgcattcttttcaagagctgcatattatattctatggttgtacattttcccaaacttttcactattatcaattacatggcaagaatatttttgtatatatgtcattttataaatgggtaagtgtagctaaaggataaatacctagaaatagaactgttgcataaagacagtgacaaattgcgctctgccaactttctctccagccaagttacaatgtatgcagtgactgttttccttgacatgccctgtgatacccaagaaagtcacattattaatggcaaacacttacatagcatttagcctgtgccaggagctggtttatgtgctttacatatattagctcaagtgagactcaccacaaccttgtgagggaggtactttcatcatcttcaatatacagatgagataagacactttgcctcaggtcacgcagctagtaaatagtagatgacatctatgcccaggctgtctggctccaggaattagctcttgtaagcataaccctaaactgtgctaatcatgacaattcttaaaaaaatattctgtatgagatataaaaggaatttctcaagaaataaaagttcaactgttgaatgatttctgcatcaggccctgtacgctccttgttgctagtcttccacagcaccctgagttcctcctcaccatttcttgaaggcattagttcctggtttactagcacattctggtcataatttgccagaatatcaatgcacacatagatgaacctttttattattctcatctattaatttcttggtctcttcttcctgaataaccttaccctccaccttacctctgctctctttcctgctattataaccaagaatctaatcatcaccaataactgcatctcatttatttatttattttggtcattaactatttttttctaatttttaaaaatttatttttaattggaggataatttctttacaattttgtattggtttctgctgtacaataatatgaatcagttatgtgtatacatacatctcctctctctaaagcctccttcccacccatgctgccccatctcaactgtctaggtcatcacagagaactgagctgagttccttgtgctagacagccgcttatagagactgtgtgtatcagtctctcagtcatgtctgactctgtgacccatggactgtagcccagcatgctcctctgtccatggaattctctaggcaagaataccggagggggttgccattcccttctccgggggatcttcccgatgcagggattgaacctgggtttcctgcattgcaggcagattctttaccacctgagccaccagggcttaccactagctgtctgtttcacacatggtggtgtatatgtcaatactgccctcttaattcatcccgctctctccttccccagctgtgtccacagttccattctctaaatctgcatctttattcctgccctgcaaataggttcatcagtaccatttttctggattccatgtatatttgttaatatatgatatctgtttttccctttctgacttcactctgtgtaacaggctctaggtttatcctcaatcaactgactcaaatttgtttctttttatggctgagtaatattccattgtatgtatgtaccacaacttctttatccattcatctgtcaatggccatctagggctgcatcttgattataatgccactttcaagcatcctgcattcagaccagtggttccaatgtttctaaaccattcttctaatacttcactggggtctacattctgttgatactgtgaataaagaacaaagaacactgctcatcactcaattatatcagagttaaatcataatttatggcagttgttcaccaacaaagtatccagaaaggaactcaggataaaaaagaggatgaggcactctttgctttggataaatagcccttagataattaaatgtgtatctcaggaagaatttcaatgactccagattcttgcactttcccatatatagaaaaacattgaaatcattaacttgagatattggttggttgttattagcagtaatcttctaccaagatatatgcttgacttcatgtatttcctagcctatatacatatatatatgtatgtatgtatgtatatatatatactgctcctcccctacctctttggaccaactcctcagagctgtctcctgggctatagtcctcaataagaccctaaaaaaaaagaacaacaacaacaaaaaaacttatgactcttatgttgtgtgtttttctttaagtcaatagtactgtcatttatctttcatgtcatctgcacattggtgctctctttttcccttacacaatagcttatatttcacagttcattgctacaatcaat

SEQ ID NO: 51162 - DNA, 2017 bp, Bovine  19866880401040
  misc_feature (1)..(1): n is a, c, g, or t
naacgaacctcttagagtctggccctgcagggctctggacatgctgtttacagacttttccagaaaaacagaattgtgttaataatgactgaatggcatttttccatagttggctgttggtaatgactgaaaggtatttaaaacgcagtttactagtctgatgtgcatcttgtcattaccacttaacttaggtgctggtactctacattgatttttaaagttttacatatgctttgcatttatattgttcataaaaagctttttgtccaaaaacattaccagttggcaatttaattctttccaaaaatgtctcttgtttaaatatgaaattacagcttgcacttttatcaaagaactgcttatcttgaacataattattttgaatttttaaattgtagataaacctagtcacataaaattgtaaatactatatacttcaaaatattaccaccttctattagcaaaatctaatattagcaatgctagtgacctgtatttttttaataaaaagaagtattttgtttataaaagcttttctcctaaagataaagattccattaatgctagctcaaagggatcagcttagcagctggtgagtggcatgcggtatgtaaacacttttcatataaaaatgtcacaaatctaatacaattattcaggtgtttgtaattttaagtgcaattaaatcaatgcatctatgtacatatgatatttaaaaatttttctcttcatttgtagcctaatcttgagttacttagcttgtttattttgagtctctgactactaaccttaatcccatttttccagcattttgttcagcactagtccttatatgttgggcttccctggtgtctcacaggttaaagcatctgcctccaatgtgggagacctgggtttgatacctgggtcaggaagatcccctggagaaggaaatggtaacccactccagcactcttgcctggagaatcccatggacagaggagcctggcgggctacagtccatggggtcgcaaagagtcggacacaactgagcgacttcacttcacttcagtccttaaattatcaggaggttgttggcatactgaaagtttagaattcactttgaaatttcaggaatttttcctgctcctaatgctatagaaaaatgtgcatatgtgaaaaaaagattttaaatttctattcagggcttacacggcaattgtttacctgagcacttaggagagagaggaagccctcagggtgtggatgaacaaattcagtgtttaggaagaaataatgtctgtattgtctattacatgtgagggggcacagtttgagagctgctgatatagatgacagtgtctggctagaccaatttggaaacatttcagtcaaacctggaagttggtctgctttcgcaattggtacattctcacaagttccactgggacaagttccatgcatttccattcctctatccagatgcagaggagcacctgggggcttggaaatttgtctcatgaccctaatttcttcacgtatttactcagaccaactcatattaaatcgcccaacaaaacttgaacaagcctcaattgtgttttcctgaacacaagttgcctttcattaaaggctacaggggctttcctaatagctcagtcggtaaagaatctgcctgcaatgcaggagaccagggtttgatccctgggtagggaggctcccctggagaagggagtggcccctcattccagtgctcttgcctttagaattccatggacagtacagtccatggggtcacaaagagtctgtcacgactgtgcgactaactttccttgcctttcaaaggcacatgaagaggagaaactcaattgttttaagatgaaaagttagattaggtggaactctacagatttgccagccgtctgggttctgtcacaaactcctcagggatcctgaacatatttgcaactgaaaagaatttgaacttgaagacttttaaattgggatgtaaaatgtggcaacccagactaggcacaga

SEQ ID NO: 51163 - DNA, 1348 bp, Bovine  19866880430595
  misc_feature (1)..(1): n is a, c, g, or t
naatacctgaggtcattacagtgtcaaagacttcagaagacaccacccgcggtcaactagaggatgtggagtcagtctccgcatcaacgattgtctcacctgacagtgatgggtcgcccatggaccacaggcaagagaaacagactcatggcaggataactgaaggttttcttggccagtatgtgtccaccacacctttcccatcacagcatcatacagaagtagaattgtttccttattctggtgataaaagattagtcgaggggacatccacagttatttctcccactccacgaacaggaagagaaagaacagaaacctctaagaccagcgatgagaacagttacttacaccaatgatgaaatacaggaaaagatcaccaaagattcatctatagaaaaaatcgaggaagaaggcttctctggaatgaagttccctacagcttccccagagcaaattcatcataccaagtattcagtgggaatgaccaaatcttttgaatccccagcactgatgacaacgacaaagccaggcgtgacaccaacagaggcaacagatgtggaggaagactttacaactccaagtggattagaaacagatggctatcaagataccacagagtatgaggagggtattacaaccgtgcatttgatccagagcactttaaatgtggaggtggttactgtatcaaaatggtcattggatgaagataatacaacatcaaaacctttagggtccacagaacatgtaggctctccaaaattgccccctgccttaatcaccaccacgggagtgagtggtaaggataaagaaatgccaagtcttactgaagatggaagagatgaattcactcgtatcccaggtagtactcaaaggccactagaggagtttactgaggaagacacaacagaccatgaaaaattcacagttagatttcagccaactacatcaattgctaccacagaaaagtctactttgagagattctataactgaagaaagagttccaccttttacaagcacagaagtccgagttactcatgcaaccatagagggaagtgctttggatgaaggagaagatgtggatgtctctaagcctttgtctactgtccctcaatttgcacacccttcagatgtggaagggtcaacctttgttaattatagtagcacccaggagcctactacttatgtagacacttcccataccattcctcttcctgtaatccccaagacagaatggggagtgttggtaccttccattccatcagaaggtgaagttctaggcgaaccttctcaagacatacgtgtcattaatcagactcactttgaagcttctatgtatcctgaga

SEQ ID NO: 51164 - DNA, 1054 bp, Bovine  19866880442252
  misc_feature (1)..(1): n is a, c, g, or t
ntgatgagagaatggaggaggaagtcatttccttagctgacgtgtccactccaactctagattcaaagggcttggtattgtacactagtcttccctgaagttactgaaaaatcccattttttcttagctactgcctcagtgactgaatcagtaccagctgaaagtgtaattgcaggttcaaccgtcaaagaggaagagagtataaaaccctttcccaaagttacgagcccgataattaaagagtcagatacagatcttatattctctggactgggatctggggaagaagttttgcctactctaggatcagtgaattttactgaaatagaacaagtccttagcacattatatcccctgacttctcaagtacaaagtttagaagccagcatcttaaatgatacaagtggagactatgagggaatggaaaatgtagcaaatgaaatgagaccactcatttccaaaacagacagcatttttgaagatggtgagacagcatccagcacaacgctaccagaaattttaagtgacgccagaacagaagggcccttcacggcacctctcactttttccacaggccccggacagcctcaaaatcagacgcaccgtagggcagaagaaatccagaccagtagaccacagcctctgactgatcaagtctctagcgagaattctatgacagcagaaactaaagaaacagcaacccctgccactgattttctggctagaacatatgatcttgaaatggccaaaggatttgttacatcaacaccgaaaccatctgacctgttttatgaacattctggagaaggttctggggaattggatgccgttggtgcagaagtccacgcttctggaatgactcaggcaactaggcaaggaagcaccacatttgtttctgatagatccctggaaaaacatcccaaggttccaagtgtcgaaagctggtactgttaatggattcccgacagtttcaatggtgctgccgcttcatcctgagcagagagaaggctctcctgaagcaaccggcacaccggcaagcacagcatcatatgag

SEQ ID NO: 51165 - DNA, 2180 bp, Bovine  19866880446396
  misc_feature (1)..(1): n is a, c, g, or t
ntccttctccattattttcattttttaactagttttatttatttatgactgtgcttagtcctcactgctgcgcaggcttttctctttttgtggccgtgggggctactctctagctgcaaggagcaggcttctcattgcggttccttctcttgtcgtggagcacaggctctagggcctatgagtacatatgtagttgcggctccagagattgtgagcacaggatcaatagctgtggcacacgagcttagttggcttcacggcctgtgggatcttcccgaatcagggattgaaccagtgtctcctgcattgtcaggtggattctttaccactgagcttccagagaagcaccctccaattattttcaagcttagaaaaattttgctcaatctcaagtatttctttgatattaacaacttcatcattttcatgaagatttttaggactagggtgatgagaatccccagatcattttgtttaaatacataacccaaattaattcttcaataactttccttgttttattttataaattaccgttgtcaatgggaataaagagagggaaagtgagaaataaaattgttactctggctaaagagaaagagaagagaaagagggagagagggatggagtgagtgagtgtgtgtgtgtgtgaatgtgtgtgtataagagagtagaggtggaaggtgcttccaagtttaccatgttcagctctatccacagagacatcttgatttagataaaaatatacagaatttggaatcttaagacctgattctagattccttccagttctgcttttggcactaactttgagagcctgggaaaaccacaaagcccacgtgtcttagtttccatgtctgaattctcatctgcatttgcattctcaacttgcataatgttacaatgctctaacatcattatatacatcaaagccatagcactatgaagttctataaatgtccaacaattaataaactacaccactactgttctcattagcaagtatttgtgcccaattctgatctccttccaccaactataatcccgttattacctctccctactttttgtttgtttgtttttggaaaggtggggtgctctgtgcttcatggtaaacacttcaggcaaattattgtcctataatttgatccatcacttcaagaccttacagacttaggcttccaagaaggcaaaaaaatggcctatcttactaatagataggccaccttaacatgaatcctcattaatctctaccttttatttgtgaccaaggttctctgtttagaatgctctgaatttattgtttgaaccagaataaccagcctgggaggaaattaggtcctatatatactcaaaagccaaaatgaggctcataaaagtgatgcacttgtgtctttacagaactgttgagctcctttgaggtcacaaggtatccactatccctaccactcgcatccctatcaggctccgagacccatccaggagtatatatgtacactaacaacatttgattgttatcatatttgataacaacaaatatcaattgttatcatatttgataacaacaaatatgaaatgcacatttcaatatattataaaccccagaagcaattactgattttgacccaaattccataataagtgaaagtgatgcaaacagaggatatatatacatatatagatattcatatatatgtgaatacttactgtactgacaatttcttcccatgaattctcctgggcactcacaggaatagttagcaacaaggtctgtacatatcccaccatttttgcagggctcagcttcgcattcatttatatctgaggaaaataggaagaagagagaaagagaattactggtgaaaaaagatagatttttagaaggttttaggcatttcaagtaagaaaagctctaaataatgtcatgtgcatatgtcttgtcaataatataaatggtgcttacaatagacaatttgttaacaatcaaactaagtcaagttcaaatggaattgagaatccaaacccaacagaactaaaacactctctaatcctgaaaataaacatgactagttggggaaatattcagtgtgtccttaaaattaaatcaaacaaattaatcctgatcgagaaatgaaattggtatcacttacaagatctagacaccttcccagcagcaacca

SEQ ID NO: 51166 - DNA, 1311 bp, Bovine  19866880496240
  misc_feature (1)..(1): n is a, c, g, or t
ntcaatactctgagagtgtattctcttctctgctattcactgtcccgcaggaggagcttttacatggagaaagttctgggtggtagaggccaaattaccatctaactgaaagccagctgactagacattagagccacctgtgttcccaacaagtgcatccccaagcaggctcatgagtatcgcataaattacaaaaaatgacacctcttacgaaaaatgacacctctaggggaatagcccaacagtaagagaaaaaaacctctcaaaaaacattcttctagcttgacttctcatagctaggttaaggaaaaacgagcatttattcctctaatccacacactaaaactaaaatacagcaacttaactaaaatcgatgatcttaacttctaaattaaaaaaagacaaacctgaatagatctattgaactccatataacacgtattcgcgattcagcttaccaaatttggaagatagagtgtactgacctttaagaaggaataagttaaatttaatgataaaaattgcaagtattagtcaatgtaaagaaacagcttttaagatttttgccagagagatatataaaatacttgagcagaataaaaagcaccatgaatattcttataactaaatcacaaaataaataacattacagcctgggtttttagggaacagaggtaatccactttctgaaactgtatttgataaaatatattacagcatttcctagaattgagctagaccttatttgttctaaatatttacagcttaatgaaaatatccaaggacaacagcttgaaaatatgttgaactttctttaaaataaatttaaactgcatacctattacccaccccacaaagttgcataataaacctgcaaatcatggaagagaaaaaccaaaacaaacctctagatgtctttctatcagcccgagggatatgcaatacggttttagctgtccacggtgtaagtactgaaggttaatagttaaagaccaatgaaatgttaacacagtctagtactacacttgagtagtaacacatggaaagacactgaaattaaaacatcttgttctgcatgttctgaagtgatgtaacagtgatgatttggttatattagatgacaaagcagggcttcttatgacttttaaaataaaaccatatctaacattcttccaaactgtttaacatattcttccaattcatgtacaaatacacaatatatgaagctaaaacagaattttttcacactccagttatcttctaatggcagcatttggcatgttgatacttttttttcccaaaagtaatttt

SEQ ID NO: 51167 - DNA, 2251 bp, Bovine  19866880579005
  misc_feature (1)..(1): n is a, c, g, or t
ncattaactgtgaattcgttttttcattgttttcttatttatactggttgaaatgcattaggcaaagaaagtagcactcttgatagcaagggtaaaacaatcttatagttatcaaataaaagcaagagttgtcagagctttcatgatcaatactgaacttataaaaagaatactgcaatgttagcaataagttttgtccttctgtaatgagtctatattatcctaagtatttcccggtgcctaccaaacactgtcagtgtttgtaatcgaattttgaagatgaatctgtaacatgcagtactaattgatattataattttcatttgacttttatttctaatcagagattatatgatcttactttctgtgctattctatattctatatattatatactgcctgaataagttcatatttttcccagttgatttttgtcctattttttgcctaaaaaagtatgcttgtgtatatatatatatatatgtgcccatatacacacacacacgtatacatgtgaaacaggattgagtatcagtagattgagcatatttaatatcagtagattaaatctgcaattcttttgtttttgaaggaagctataactatgtaatcttcaaatacttccttaattaaagaccccagtactatcatcttgcaaaataaacagcaaaatcccattatgtttctttaaagcaaaatttaaatctttgttttgatggtatttacgaatagtcttatcttcactttaaaataatagaataattatttgtctatttttaaaaaattttagcaaatattgacatagtactgcataacttggccaagcatactcgtcatttctttgttcatttctgcatttcctgtgaaactagaattttattgaggtttgaaactggtgatggtttctcaggaaagcacaatgtgtagatatttgtgaggagaaaagtacttactaatggcaaagtagtcaaccattttcaaggtaaaaattgatttctatttattttgcttcaaaggtcctgaaaaaataagcaattatcataacgatttgttattgataatggaggtttcattgacattctcacaaattaaagttctcactgcctccatgaaagtcctcaacatctaatttataagctttaccagtgtttgttttattaaggcttagacatggaattattggagttttaaattaagggttctggaaaagaaagtatggtatgtgtacaaagctttgaggtcctgtgcaacactaagttgtttttttttttttcgttattatttgtgctgcattacaaaacccactagactgttactgtcttgtctgtctatgtgttaacagcaatttcttgatgatgtatatatagagtggtcttcaatcatagtgatgatttataaagagaaagtcaatcataatggcatttttaataaaagcaaaattaggactggctggccacatatttgtcctatgcctacatgctttctacttcagactcttattgtaaaattgttaatttgaagcatctgaaatggtgatcagtttttagcatattaaagaaaaagcgctgccatgtcatcaataacatcttcttaggatagctttaaattaggaatgtaactatatttagtttactaaattgtaagatcatatcacaaataaatactttgggtcaaaggtatatacacatttactctgtagccaatggcccttatgtctttaaagatttactgtcccgccgaactctcccttgtaggttatgcacaattcttgattctctacagagtgtatttttaaagttatgagtaattttttgcaatgatttactttctcagaattattcattgcttcttatgatgttttattttattggtagttttttcaaaaaaaaatattttcaaagagtttgctaaaatgttgctaccttttattagaaatacatagaaatggcttttgtgcattttctctcttctgtatatgcttttcaccaacatggaatatctctttaacccacaatgccccagattaatgacaataaagagattccctgtagatatgtattgtgaggtagtatatagcttttgtgtaatttctatcaatgacattaaagtgaagcagatttattctgtttaaattcacagtaaaacaagtaaaacctcataagcacaaggcacagaagatcacctagccttcaccatgagtaactctaacatgctattttatagtctattaaattatattttaacatttcca

SEQ ID NO: 51168 - DNA, 2152 bp, Bovine  19866880591883
  misc_feature (1)..(1): n is a, c, g, or t
nacagttagtggcctaccataatttgagcacttttccatgaaaaatcctgttcagtttcctatagattttgcagagttcattccatggagatacttcaggaaaatagagaggaggcctgtgacgtgtcttcactcttcctctgtgcagcccaacagctccgatctcaggtgtgatcctcccgtaccaggaccaaggaaggatccttatgtgccgtgcgtagatgggaggatcaatgacgttttttctgtgagtatcattgtcaaaattgccctggaaaacctagtaaagaagaacagactattaatcatttggccttccttttcttgggagttatttttattattttcttgtttggatttccccccgccacatgtgaggtctgataaccatgttttttaaaacacactgctgctgctttcttaatgatcattttaaaactgaatgggcgatgcatgagcttcccaggtgatgctagtggtaaagaacccgcctgccagtgcagaagtcagagacgcaggtttggtccctgggtggggaagatcccctggaggagggctcagcaacccactccagtattcttgcctgcagaattccatggacagaggaacctaggttacagtccgtacagttgcaaaggaacctagagggctacagtccatagggttgaaaagagtcagacatgactgaagcaacctgcatgcaacacaggcaaggaatatttaaagagttaaataagttgaaaattagttttctgaagcaggaatacatagatttatcatttttatgtgttttaaaaagatctttttttttttttaatgcaacaggtatttattttttgcttctggcacaggctgttggtcaggcagcttgctgaaggtggtctcttctaaagagtgattcagagatctaggctgttgcaaattttagctagcatctgaaaaatgcagcattcacattcacaatgggcaacaggaaagagccgtgagattatacagggtgtttttaaaaaaacccaaggtatggaagcagcttaaatcatttctggatacattgcattgaccttaactaattatatgacctcagccaaattgcaaaggatgttgggaaatggagaggagcacgtggatatctggtgcacataattgtctctatcacagtgtcatttgttcatttctcccctagagaacaaaatcaacccagtatcaagagataactccaatcaatgctatttttaaaatacttttttttttttgccttctgtattaattcctagatccatacaatactcttgagatcactgtgacctatagtgtcctgatacagggcattgcatgactttgttcttctttcttttgtttcaaagatttttgaactttgtatgtctatttttctcccagaaggcttttataatagtaaactttgagatgtgcttgcttcagaaagaaagaaaacaaaattagcagctggttggtagagcatggagtagtggtacgtggcgtgaataactgaggttttcccatgtgcttacttgtgctgtgagcacttggaaattgaaaaggaaaagttacaatggacaccaccgtaatacaaaatgtcaactgcaaattggcactggccaagagcatcgccaatgactgaacagcaagggcatttgccatcggcctctgcagagactgaaccctgtgctgctgagctgttgaccttcaacacccgctgagggagttcaaggtggagagaggcactctgtgctccagggaatctggtggcacaggtctttggattgttggatattttcaggaacagattttatgaccccaatcctggtacctcctcatatctagaaaagcacgaagtcccttcatgatgacatcagatcctcccgactagcagaaaaccttttgtaaaatgagtgcttaatggtactgaaatcccccttcaccaaaaccttaacgatgaccttccctcactgtgtctttggagcagtctctcagaaatctctgaggtgctgcttcccaggctgcagtcctcattttgccccccaaaaaacttaactcgtaactctcaagttgtcatatttttagtcgacagtatgacaaccgctaaagtgacccagagtggaattccttcctttcgtctgaaccccgtgaagaa

SEQ ID NO: 51169 - DNA, 1341 bp, Bovine  19866880614589
  misc_feature (1)..(1): n is a, c, g, or t
natcaattaaataaattaagatgttggagaacagcatattgctcttccaaatgagacaatagtgtgggatattttaaagtaatggatggcgtcaacacatcccaattctaagacctaactacttaagctgctttggtaatattttattattaacctgcctgtatcagttgtctgccttaagtggaatccccatttttccatgaactggaaatagtaatgcttaattgttttcaaaggatttttgcccatgacaggagaccttcaataattaagtcataattaaatagtaaaaggatcataaaaaatccacatccctggaagaccaggctttaaatgttttatttttaaatcctcagctgggtattagaagtctttaaggaagaaatacttattttctatgcaaccagagtataataaaaacatcaaaaagccatttacattttaattattgaaggtgaatttaccatactcaccatttttgaggataacattaaagaggttatttcagatggatgaaatagaataaatatagtcacaagagagatggagggaactcagggtactatagggactggtttactatactgaaaagataggtatatattggggacggagctggcggcaggggagaaggagggagggaggtgtggaatgaaaggataaaagtctgcaatgataaagagataccagaatgtgaactacatcaatgttagatgaaggagacatttaagatggttactgaagggttttcagcacgttacaaaaactgtcagaactagttcaggaaggtggatgtccgtggtgtatattatgagtatgcaacacaaagtctgagctgatgaggtgtttagtaaaattttatggaataaatgttatatttaacacagaggcaaatctaagagcaggcacaccagttaagaggcttttacggctaactgcccagagaagaacttgaatgagactagcagctattgaaataaaaataataatcagattgtaagagggtttgagagtgcatcattgacaattgattgtctgttatgggaggaggggaaggaaaaaagtaagaaaaattaaattccagggttttgagcttgagcatgattttggtaccatgaacagaaatatagaagttatgcatagaaaatgctggatgtattctgggtgatttgccttgagaaagtaagtgtccagcatgaagttggaaaagtgtttgttctttatagagaatagaagtgggtcaaggggacaccacccccgtgtgaccgtcttcctttttaccactgactactttgagtcgcaagcctgggcctgctggaatgggaggttaggtggtgtcca

SEQ ID NO: 51170 - DNA, 1306 bp, Bovine  19866880615575
  misc_feature (1)..(1): n is a, c, g, or t
ntgtttcctccctcccgtagcatctcccgggaacttgcaggacttcttagggcgcagctggatcccagagcacatagtttaagcgatgacactagttttctacctcgctctccgctgcctgacacagggatcgctccacgcccagtgacacagggagcctagacaaccctgatgccccccagcccgcaagcaccagggatactgcccggcggcgcccacgcctccgcagggcggtggggcgctccagcccagggcgtcccccggagctgccgacactcgctctctgccgccgcaagactcgccagtaaagttgctcaactagggccgcgagcggggagaggggtggggaaatggaaggaaaaggagggctgcagtagtccgggcgaagagggctgatcctggaggccccagattcgggtccccacgccacctttgtctgaaaagcgccctgagcgctggcttgctggttgagacgggagcaaaagcctctacctcgcttctcagaatgagctaaaattcttgcacatctctactggttcggaacaagcttttcccgccctggcgccgagcagacgtccgcggcgctccaaacaccccacccccatcccctgctccctcctggccggctccggagcacggcgcgctggacaaaagaacccaggggcaccggagagagccgtgacagccctcaagtcgccaaagagacgcgcggaccgggaaccctgcacctcccccagaccggaccgcctcccagacagcccgcgggatgagggggtcacgtccgctcagaacccggatcgccttgtcaggagctgcccgagagcggctttccaggaacgcgggcattgaccacacaccaggggccgggaaccaggtggcctgcaccaaggcggcttcggggatttgcttgtgggcaagtctcgggagtccccattcaaacttttgcctcgagcaggttaacgacaacaaaaagatcaaggtgccagggtccctccgtcctctccagctccagacccctcgacgtttctagggggggtctccgcatttccttccctcccttcccccaattccattagtcggtctacccccaccccaccctgggcttcttttgtctggatctttttcagcaccagggtccctccgtagtcctctctccaaacatccttttgaaagttacctgcattttttacagtgcctatattttcttaacttctcaaagatagttctttttgccttaattaaagccttctaccaatcacaatgtactttttttctaaactcgatttttttttttctataagttttt

SEQ ID NO: 51171 - DNA, 1936 bp, Bovine  19866880630860
  misc_feature (1)..(1): n is a, c, g, or t
natgcagggaggagcttgcttttatttatttatgactgttgagtcttcattactgcatacgggctttctctagttgcatcagtgggggctgctttcccctgcagtgcgtgggcttcccccctgtggtggctacaggagggcacgggatcagtagttgtggcacgtgggcttcgttgccctgtggcatgtggactcctcctggagcagggatcaaacccacgtcccctgaattggcaggcagactctcaacaattggaccaccagggaagtccgagataatagctttaaatgaacctcatcagtgtaaagggccatacagttattaaccataccacagttactaataatgagaggcgtatttgtgtgctgcatgtttgttatcatatgatagttatattcaaagagcaccagaaaggagagtagccagaagtcagatagtcataaatcaaacttataagaattcttgtagtgaattctacaagactgtatataattcagtgctaaattatgtggtagagactaaaagtgatgtaaaatttcaaagaagattgatgacaactatagtaataagagaaagagtcttggagggagacttacactagacttcaaaggctgcaaaaagtactcataatattactgggttgtttcagatgtcaaaacaaatttcactttagaattacatttttatgaatatatcctgtgtagaacaccaaacatttagttgttgttttcccagacctcattcattcatccatccatccatctattcatttattcagctgatacttaatgacatttgtatgtgccagtactttgataggtgctaggaagacaggaaacggcaacttactccagtcctcttgcctggaaaactcatggacagaagagcctggtgagcgacgcccatgggggtcgtgccgagtaggacatactgaacgactgagtacacacacacaaggcacacatggtctgtgccctcagagagcttaccatccagaaattaagtctgggggcttccctattgatccagtggttgagaaacctcatgccagtgcaggcgacacagatttgatccttgctgcaggaagatcccacatgccgcggggcaactaagcccttgtacctcaactactgcacgccaccccccaggccgtggagcccatgctctgcaacaaaagaagccaccacaatgagaagtctacgctccacgagaaagcatagcccccacgcccagcaactggagacagcccctttgcagcagcaaagacccagtgcagccaaaaataaatgaatacatgtctttaaagagaaagtttaagtttggaaaatactaggctaatcaagataaaacctttttcagtgaggttactgtttgtatgtggagaaggcaatggcaacccactccagtattcttgcctggaaaatcccatggatggaggagcctggtaggctacaacccatggggtcgcaaagagtcggacacgactgagcgacttcactttcactttttactttcactgtttgtatgtgtatatacatatgtttataactgaaggattttaagatttttagtatccttaagtctgaaaatatataaaaaatggtatattgagagttattttacagatcagttattggacccaatgtttagacgcctgaaaaattgtctagaggttgaagaaaaatatggtgcatattatttgaaaacataatattagactcttcgaacataaactgatcttctgtttcctatgtatataataatagccaacttgtagattacagaaatacttgaaggtatctgggaactcacctaggttcactgattaatagggcttgtacagatgttatgaacactgtcaaggctatggtttttcctgtggtcatgtatggatgtgagagttggactgtgaagaaggctgagcgcctaagaatt

SEQ ID NO: 51172 - DNA, 1265 bp, Bovine  19866880637716
  misc_feature (1)..(1): n is a, c, g, or t
nctatacatgtatatggtgtgtgtcctgacataaaagtctatctcgagaaaacgtactttgggagaagtctgctcagttcttgagaacttccagggcttgggagagagggagacagagagacagaggatgcacagacagagaccatatggaaattgagcagttcaggatctagaaatgtaggttcaggtcagaggtggagacacagggacagtcctctgaaatatgaagggacccgaatccgccagaggagaaagaggtcaacgctgctatatacatggttcaattctatgagcagtttacaatgcaacagtgaatgtagacccttaaacacttcagtttgattgtttaaacagggagctttcagcttattttattaagaagtatcttgggctttatgaagagcattgtacagagagcagtggtttaggtaggcagttgtgttctaaatgaaaccctattattcactggaaaaggtcaaatgtaaaatggctatttttgaaaaggtgactctcacataattcctttgcattttaataaatagcatattcatggatactttattcttttacaaggcacatttttggtgccttggcaaatacggccatgtagtattttcactgatcaacaccttactgatggcagggcctatagaccacaaaaagcaagactaaacattgtaaagttgtttgtatgttatggctctttgcgagagaaccagacatttgtatcctttgcctgaggctgcttagagacagtttagctgccaaataaagttgctaaatgggcttttaatttactgtatatatctgaacctgaggataatgttgtatctgagaactggcttgtggaagaagctaaatttgactgttatcaccatataagtggtcatatttgtttgactcttttagtttggagaaaaatatttttacagcagtgctgagataatatgtttgaattaaatgtaatgggtagagtcactctggaaagattttgctctgaaaatgacttttttctaagcccttttccataataaaatagaaaattttataggctgtttccccccatcaaataatatttactagttatatattttgatgacacaggcctttgtttcttttcttcaattgttacctttgatgattttgcctaagtatgttgtcagtatatacccttaaatcaagaaaccctagggtctggcaggcaggaggaagtgataatgttttacaggatatagtcaccatatataggatttgttagaagtgag

SEQ ID NO: 51173 - DNA, 1106 bp, Bovine  19866880640872
  misc_feature (1)..(1): n is a, c, g, or t
naattaaacgcttttccttctcagcttatccctgtccactgaagttgtccagttccacatgcctccattattaaaagatgcttctttctttcagttggtgtctgactgcagcgtgagctgtgtttattcaagggattattctcaaggtggagagaaagctcagattcttcattttctagggatgaacctattggtttgatcaacaaatatgagattctcagatggtggtaaattctaagaataccacattcccatatttttctttctaagtaaggggctcaattggcagctcttcattctgcttgaaatatctgggatttttgttgtttttaaatttttttccactatttctccctttgattttagtcaatgaaaattttccctgccaaaactcatacatatgagtagaaaacaaaaagcaggaaattttgaagttttaagtctttgaaaagcccttctttgaaaatgctgagaatcttacatatgaatctgaaacaaaactgcagaaccattcatttattattctgataaataaacatattcatgtgtaatgattgctgtgagcccagggaaaagataaataaagtactttgtggctctgcttgtactcgaggtcagccaaactgaacatcctccctccatgggaaagcacttaattcctgtgctgagagcctaacttcaagtggctgagaagcaaagtctactgttctaatagaaaaaaaaaaaaatgttttttaaaggccaacctttcagttcaatatacatgaaaatgtagtaatatattaaagcagttggcagcatattagaatcacctagggagctttagaaaaactttgaggcctgggtctctttgccacagatcatggtcaaaggtgcaacctggacatcaggattgttcgaatcttctgtcacagacctctggtaaattttaatatgtagtcagggttgagaaacactggtcttaacagacttagcaggaaaaaaatcaaaaccattccactgataaatggttggactgatatttatagttcgcaatttaaaataatttttaaaatagtataatcggttgaatttgatcaaactcagaaattcttcaaatgtgaaca

SEQ ID NO: 51174 - DNA, 1495 bp, Bovine  19866880658049
  misc_feature (1)..(1): n is a, c, g, or t
ncagcagcttccagactactgcaaggcacggcagtctcagacacttttctctcgtgtacaccaggttggggttttctggacatttctgcagtgggtgcttctttgttatgatggctttgcaggaagaaaggcttttaggcttcactttccaagacccacctgtgtcttttcttccatcttcaccccagctgtgcagtcatggaaaaataatcacatccacttccctccgcttcatttctcagcactcttgctatactctttatctctgccttgattctctaacttccttacttagacttttgggatacaaaagcccaaatatttgctggctgtttcagctttctgtttggatacatccttgtcctgaggcaatgaacccagaatatttgctacaggggacaaggaggaggagggcaaggaaagcggaaaatagcagtggaaaaacaaagaacattagttggtttatcaaagctgttatctggatgaatgtgatatggaagaaaaatgtacttctgaagccaaaaagacaagaaatcagatgccaacaatgctactttctagctgtaaatagggcaagttttatttagcctctctgagcccttgtactctcacttaccaaaatagggaattaaaagacctaccttctggagttgttgtgaggattaaatttagtaagataatatacgcgaagtcgtaataccttcatttactaaaaacacaagattccaactaccaacccaccgttgtcacagaaatgatgtaagagtggatcgatgtctgagttctttcctgagaaaccagcatccatgaagaaccagctattgagcctgaacattcattctgagagtgacctctcactatgaaacaagacgctgctctagaggctggccagctccttgtctttctgatgctaaggaatagcctgaggatgggaattagcttttcagttcttccctatcattatcatttttagcctttggagcagtttattttttgtgctttcctgaatccagatgaatactctgcagatagacagatgccttatattttaatccacttggctcttaaactggaacactgctgaactcttgtggggagagaagagtgctctggtgttttttcaggagttggagaaacccagcagaggcctgttgccagattttccttctctgactaagaagctgtcatgcagatgcaaagccactagatgtcacaaatggggaagtgttctgtcttgctccccgtggtttctctgcaaggagaaatggtgatgtactgtaatccttaaaaaaaaaaaaatcttctaaaagactaatttttagggcaattttaggtttataacaaaattgagtagaaagttggggagtttcccatatatccactcatgcaaacatacttggcctcccttattgtcagcatcacttgctagaatggtacattttttaaaaatcaaagaagaacccacactgacacatcattatcaccaaaaatccat

SEQ ID NO: 51175 - DNA, 1128 bp, Bovine  19866880707176
  misc_feature (1)..(1): n is a, c, g, or t
ntaccactagtgccacctgggaagctgttcttggctaatttaattttgcttatcctggtattttcataagtattctccttaagtagatgagtataaaaggacatgtttgatatgcctacttgtcttctattccttttcttctgttaatagccccctgatgttctttgggaaagtcctctctctactaatctccattgttttaagcggttgtttgggtaactcagggatgatacagtgaaacaagaacaccaaagccagtgatatttattgcgggacttttgtgaaatttttcagagacagagctcatcccttttctaccagggttgaaactaataagctgtgtgtttagagccactggtaaccattctgcttctgtataggaagagcctatctgaggatgaaaccaacacagaagcaaaggatgcctgagggcattatttaaatccctgaatccagctgtttgtgaagccagaatgtttcaattatgagacattgctctctctcttgtgtgtgtgtgttgggggagggggaggggcgggggaggatggctggagctggtttaaattcatatctggcttttgaatacaagaactactaacaaaatacattgagaaattgtagtatctgaagggttctaagctaagctctggaacttatgctgcataggtaacccctgacttctttgataacttcaaaatgtcatagagggtaacaaaatgtccctttgtccacagttctgtcctaggcaacattaaatatatatgaatggaaggaaaacagtaaaaaatgtaaatgtattcagatcctatcaatacaaagttctatttttatctgttctcttatcagaaaacacctcatattgctttgaaagtacagatcttgtatcatgaggcagaggacagaaactgaatatgtataagaagaaagaaatgctaccctccatttggaagtagctaattgacatttccaggaatacttgcctttaatttgattataatgcattgtgctcacatcaataattacagtaactcaaactaaatgcccatgacttttcatggatcttctttacctaaatatacataaccatatttgggctttccccctatcatatcagatacaatctattag

SEQ ID NO: 51176 - DNA, 2049 bp, Bovine  19866880712211
  misc_feature (1)..(1): n is a, c, g, or t
naatttttataacactgaactacctctagaattaatgtttgcctcatattttttaagcacctcattaaaaatcacctatcacattttgttaaaatgtaccctggatatatagacctctgtatgaaaagaaaaatgctctcaaatttcagcagatggccaatttatctcaggcaatattaaacataactttattttagtactgtgaagttatatagaaaacttctaatttttaacaaagatgcagaagtattagaaagtataatttctcctcaaaattaagaaaaagggacacactcttgggataaaattgtatccccattcatcactacgattaagttttctaaatgaattcatagacatatttttaaacacactgttctctaaattagtttctaatccagacaattcattctatgaatgttttaaaagtcttaatgaattacataaaaatcatttgaaaatatattgttctcaggattcaggatgtcttcacaagaatggtgataaagaagaaacgaccaagattatataaatgggagagaggctcttgcatcagtgtattaatttcctattgcggttgtgacaaattaccacaaagttaatgatttaagacaaaataaatttatcctacctacagtctgaaagataaaaatataaatgggcttcattggactgaaatcaaggtattagcaggactgtgctccttttttgaggttttcggggagaatctggtatcttgccttatccagctgctagaagctaccccatattccttgactggtgtggcccccttccatcctcaaagttagaaggccaatttttttttataatcatcacttcaactctgaatcaatcatcacagctcattctctgaatttcttgcctccctctttcccttgagggacccctcataactacctaagatccaacagataatccagggtaatgtccccatatcaagatccttaatttattcatatttgcaaagttcctttcacacagattcaaggaagcaggacctgaacacctttgggagaccattattctgctaccacatcagacacattgctattacttcctctcccatataatcttatacctaactggtcacaaaaggcaaaggagaaaagggaagatgtacccatctgaatgcagagttccaaagaatagcaaggagtgataagaaagccttcctaactgaacaatgcaaagaaacagaggaaacaatagaatgggaaagactagagatctcttcaagaaaattagaaataccaaggggaaatttcatgcaaagatgggtacaataaaggatagaaatggtatggaccaaacagaagcagaagatattaagaagaggtggcaagaacacagaactatacaaaaactacacatcatgaatggatgtgagagttgaaccataaagaaagctgagcaccgaagaactgatggtttttaactgtggtgttggagaagactcttgagagtcccatggactgcaaggagatcaaaacaatccatcctaaaggagatcagtcctaaatattcattgtcaggactgatactgaagctccaatattttggcgacctgatgcaaagaattgactcattagaaaagactctgatgctgggaaagattgaaggcaggaggagaaggggacagaggacaagatggatggatggcattgctgactcaatggacaatagtttaagcaagctccaggagatggtgaaggacagagaagcctagcctgctgcagtccatggggtctcaaagagtaagacacgactgattgactgactgactgaacaaccacaacaacaaactggtcacacttattttcttctaagtattcatcatatcaatgattctggaattgactctccagatatcatttatttggtttttctgactttgaaaaaaacaatctttctgatgtcagttcccacttttagttgcagcccccgtccatcctaaaggagatcagtcctgaatattcattggaaggactgatgctgaagctgaagctccaatactttggtcacctgatg

SEQ ID NO: 51177 - DNA, 1097 bp, Bovine  19866880804633
  misc_feature (1)..(1): n is a, c, g, or t
ntgatatttaggtatgtattccctgataggagctgtaaaacaaaaaaattttaacccaaagaaatatgaaaaagaatgtgttacattactctttccagattctttgttaaatatgtaattgtttcctcctcagagactataacaaaaatgtggaagtttggatacaagtgatgagtctgcttataccggacatctatgtggttaatgaggcatagttgcagtgaccattgaaaagattaagctgtaagaagcgaatactttgaaatataagccacatatacacaaaggatctgcacttttcagaaatggaaaattgatttttagcagctttcttttctagcatacctaaaaggtgttataggaaatttctccctagatgaaaaattggctgtgtattttgacaaataataaacatgaaaaagtcagcatacaaatgtcaccagaaattaaagatagaatactatttggtaacctggctaagtcaaaagatttcaatttgcatcatactatataaatatatggtattttttccccaaaggtatacaatgctactgaattgctcactggcctcacaagctatgtattggcaatagattttatgctcttgaacactaaacaagaagaaaaaaatgccatttgaaaatggagtgatttatatgaaaattgatagctggaaactgcccaaatttagagatagacctaagaaaattgaaaagcagaaatgtagtgttgaatggtggggttaagcattttaccaagaacctaaaatccagagatgttaaaggttttgttcaagtagagtatatgataaaatcttaagtgtctttcctttttaaaagagcacattaaagttaaaatctaaattctgtataggctatacatttcttcatttactaaccatggcaggtgactaagaaaagcccttcacaaattgttcaaaccttccattccagcctcctttcctaaggttcttctgccatatattctagccacaagaaaatcctcctccttctgtaaacacagaaaattctttgaagataccacacatttgcaagtatacctttccttgtctggaatgtccctccctccttttctca

SEQ ID NO: 51178 - DNA, 1188 bp, Bovine  19866880851983
  misc_feature (1)..(1): n is a, c, g, or t
nactttttaaaaatgctttcacataatgtgaatgctttcaggtaataaaaatgttttgcagggtggtttttttttttttttttttttttggtaataagaattccttgaattagtatagtactctgagcatgctcacacacatgagatatatacatgtatgtttgtacacatatgccaaaagattaaaccctgatgataaattagcatcaaaacattttatttattatgaatatttgcatagtgtatatggctagttgaaatttctcacagtatttttttctgatgatgggtcagttttatgggcattatggtacactgcagttcttgaaaggaatctattaccttacagtatgtaattttgacttatattttacatgctgcgatacttcatgtgtttcatataaacactttcagatgggatatacaacattcttctgtttccaacaaatgcaaaagatatatttgtatgtctctttattataaaggttttattataaaaaaaatatagaagcagaaaagtgaataaaaacaaatatactttgggatgaataaactgtttaaaagagaaaattcatgtgaaagtgttactcagtcatgtctgactgtttgcaagaccatggactgtagcccaccaggctcctctgtccattaaattcttcaggcaagaatactggagtggattgccattcccttctccaggggatcttcctgacccaggtatcgaacctggatctcccacattgctggtagattctttaccatttgaaccatcaattcagttcagttcggtggttcagtcatgtccagctcttggtgactgcagcacaccaggcctctctgtccatcaccaactcccagagcttattcaaactcatgtccatcgagtcggtgatgccatccaaccatcttcatcctctgttgtccccttcttctcctgccttcaatctttcccagcatcagggccttttcaaatgagtcagttctttgcatcaggtggccaaagtattggagtttcagcttcagcatcagtccttccaatgaatagtcaggactgatttcctttaggatggactggttgggtctccttgcagtccaagggactctcaagagttttctccaacaccacagttcaaaagcatcaattcttcagtgctcaactttatttatggcccaattctcacatctata

SEQ ID NO: 51179 - DNA, 1684 bp, Bovine  19866880852949
  misc_feature (1)..(1): n is a, c, g, or t
ncatatattttcactcaacttgggtggggtctgacatgaactttcccattccattaaaatctgcaaatacgtagagaaaggatttcaaagcaaacagctacatacctaccatctaggttctgttagtgttttatgccatgcctagtcactggtctctatttacaaatgcatcaaaaaccacttaagttctctaacaagcagctaggcttacagagtactgagccagaggcctacatggctgggtggcattgagaggcaagcaatgggaactttgtagatgagcacacagatgctacttcaccttgcctgagaacaggagtcctttgctacagctggtgatgaaaggtgcaaccgaagctcctggatgttctcctgaagctttgtaatggcaggctgtgtgtttgaatgggtctggggagaaagactagacgagggaagggtcctagtccccatatcgatgaccttgtgggtcttaaggtagaagatcctgttggggtggggggtagtgacctcacaggtggtccagtggaaggagacgaggcttcacacaggtgctagccatcacggccgacacctgagccagcatctgcattctgaagatgggggtggtacctaaagaccagaggaggatcctgatcaagggaaggcagcctgaactctgggagggctctccctcaaaggtgggcaggtggctgggccagctgtggctagagtacagaggagatggactcttactcaacagctaatgaggaaccgctccggggatctgaggccccagttagcatcatctgggaagaagctgaggctcaaggcagttcccttcctggaatagggatgctaaaggaccaggaagtgcttctccgggtttcgagaaggggtggagtcagacaatcgggagtgcagcctggctgattcaagtttccgaaacggtttccctgctggtgcattcagccactaggtggtggccacagcttgtggttctgtacgccgaaggcttcaggacaggtagctggtggtccagtgccttggcaggcgggcgtgtgtggggtgggggacccctagagtatgagggggacctctggttgggatccctctaccaagaggccctgggctgacctgagctctggtcttgtcaaaattcctcccattccagcagccaagttggattttgttcccgctgggcttgagtccccgttcctaaggttttgatttaatgaggccctgggggtgagacacggctgagtgattggagaagtgtgagagagtctaggaataaagctgatgggttgggttctaattcagaattcaatttgcaacttgctctggacttgtaggcaagctgatctctgaatatgcatcctcttgtctctaaagtgggcttcccctcctcaaaggctaaggttattgacgaactggcttaccagtcactgaactgcctagaactttgcctggtaatagctgctcttatttccagatatatatcacctgccacctgaaggtcactccggttgaccgagtcccggaccaactaaacaaagcctgttccttcagcaagtcctccaacaggtaaggagagcagactagggtggaaaaccagccatccttgctcatgctgattttttccccaatgtgcccactattagcaaactgcttcctgcaggctgcaaagctgtctaacttcctg

SEQ ID NO: 51180 - DNA, 983 bp, Bovine  19866880860201
  misc_feature (1)..(1): n is a, c, g, or t
nagtgaaccccccgtgcttgcgcttcctgcactggcagggggattctttaccactgtgccacctcagaactagagcataaaaatgtattgcattgacaggtgctaaaagcaaagagtgactgtagtttcctccttcaagtatgcttggccggaacctagtgcttggttctgatcaacccctcagagccatgcctccacgtcagcactacattctctgcccaaaattctccaagggcccacccctcccagattagacagtagtcacctcttctcagtttcctgctcttgtgaccaaatcctccttgcaggcgcccccaaaccaccatcaggactgcagaaccgaaaaggtggacacattggcctcagggtatcaataacgccagccctggcgatgggagagcaggctgctcgcaatggactatgcataacacctagacagtgtgtgagcctcttattcctggaactacaaagctcccacttgtttgacttccttgagactcatttcgaactgatgaaatccatttttttaaaaatggatgattatgtaacaaacttgtgtgagacaggggttcagaaatcttggcatcacagtatgtacctttgacaaccacaccctgggacacagtggccgtaatagtaaagccccaggccggcttcctgtggccaatggagatgactctccagggtgaaggatgcagtacatttacacttgtctcagttttacactttctgtaagctttacagaaggtccacttctgttttcttcccatattggaagaaattggaaaattggactagtcctttcagtgaaatattttagtactaaaaggtactaactggcagtccaaagatgttaaattagtagcagagtttaacaacttttacatagtagttgattattggcagaagaaaatttgatctatgtatcctatttccagcctgagcttcttttatgtaaattaaaaatttatatcctagagttt

SEQ ID NO: 51181 - DNA, 1519 bp, Bovine  19866880860402
  misc_feature (1)..(1): n is a, c, g, or t
naacatccgctggatcatggaaaaagcaagagagttccggaaaaacatctatttctgctttattgactatgcacatattaactgtattcaaataaatgccatcctccaaatctagcacaagatcaaacttcatgtagaagactgatagaatagaggtgactttgtaattttctgaaccttttctatgcagtgtctactgcatagaaaggagcacctcactgtggcctagttattctgcagttctcagggtggggaattgagcacgcagtatgctgtctgaagtctttggccaggagagattaacacttctcttcatactttcacaaagaaggagttggtaataacaactttaagtcctgaggcacttcctcattggttggccaaaaacaagcaaatcaacaaacaataaaacaaagattttataaaccaaaaccttcctctaaatacttctctgcatacttccagaggcagctccacaacttacttaaatgactgaattcacaaattttaaattgtagttgactctacttttccttagtaatcacacccacacacacgtacacacacacatttatagcatttaacatctgggcaggcatgaataatcatgcatacataacatcattgttatttttgcatcactgcagttgagtaaaagcattctaagatgttgtgaaaatacagaaatacgtatttcttgttgctttgctcatggaaataatggattgcataggtaattctatatttgcaaagcatgttcagtgcataattaactagttatatagtatagcagacaaaatgatccataaatcaatatgaactgagtaacatcttgtaaaataaattatcatatgcgaagaagtgtattttatatatttcatagtgagcttttccaatttgatggtgagccatgctgtgtatatgattgctttaaatgggtagaatttctatgttttgaaagtgtacttaagacacccaagaataagacaaacacaaaacaacagcaaccaaaaaaaaaaaacaaaacaggagatataagaattgttgagaccacatagaaattacagctggtccagtgaagaagtatgtgtgttttaatagcacgtgtatatcagagcaatacacggctcagtggatagttattgtacttgacagttgatcctatgagcaaaggagaaagggaaggagaagggaaagaaggaagggaagaaaaaactgtagaatgcactcttctttgatcaagcaccagctcagttcatgaacatgatcactgccagactgctctgaaaatttgtgagcaactttgaaattagagaaatagattcattgtatcaaaatatggtggtaagctccatggacaaattaaaatttgtggaaagcccacctgtcctctgaggtacagtcctgaacgtccccttctctgacttcaatctttcccagcatcaggatcttttcaaatgagtcagttctttgcatcaggggccaaagtatggagtttcagcttcaacatcagtccttc

SEQ ID NO: 51182 - DNA, 776 bp, Bovine  19866880870833
  misc_feature (1)..(1): n is a, c, g, or t
naatttaaagaacagtctagtacaaagtaagtgtatttaaaggtaataaaattgcaagagaagataagtagattttaaaaatgagctaaagaaacatctaacatattcattctttatatcctaagacttcataaattgtagaaactatttatgctgtttatatcatgcagtaatgcatagagtggaacattaagcaccttttgcaaatatatgtttattttagtcatttatgaatttaagaacaaatagatattggatagcacaaattgagtccaaatattaatgtatcataaaatcttgtcctttggaataagatatgagtagctattaagtaatattttgatgtaaatattcctactgatttaacaatttcaagattgcacaaaatgtttaagctacatgcctgcattttgtctcacaaagcttgtaataacatgtttaatgtaaatgcaaattatgtagttgactatttagattatattcaaatttgaagctgaagagatgtgttctttagaagaaacagttgggtgtcaaggttcctattaacctgtctcatgaagactttcttctttatggtatactgtggaaccaattactagctaacatagggcaaaatgacaaatcatcccattatcaaccaaatgagaaaaacttgaaaacttatttcaatatttaaatcacttgcaagattacagttcaaatgacacaacagcattgctcaatttaaacttacatctttctgtaaagctgaaaagcagattaaacttgaataatta

SEQ ID NO: 51183 - DNA, 995 bp, Bovine  19866880883134
  misc_feature (1)..(1): n is a, c, g, or t
ntatgagtatactccaatttgacatggggaagtctggagagataagctcctttggcctagacagcaggggaaaatatggcagtaaggaaaccccaccttctgcctgtaataagcatgtaagatagtcaaagtatatgtcagcatcctgccaaaacatgagacatgttatctgtaactgtgagtgcaactataaataaccctgtttcccctcaccccgcaccacccccagtgccatcatcaccaagttgtccagatactgtgttccttgtgctgcttaactcatgtttaactcaagattaattggcaatgagtggccaagagactgattatatgtgcagtgctgagagcatgaacgtgttaactttcataaggttcatgtgaatttaaataaaagtgagaaaataagaggtgtgatcaaagaagaaaaacatgttgttggatgaaatttggaagcagatggtgaatcgatgaggcaaatacagtaagacagagtgattggttaccagaaagtacatctagcttttcctaattaaaaagagatttaactacttcattgtactcttacccttaataaaagagacttttacaatgtcaaatctcactatttatgttattaggaaaagtagttttagcagttcaactaggtaaggaaaggaagtgggagtagaccagttgctatagagattctaaacaaagccatgaaatgaaatatgcaatacagagatagcactaaagaagcaagcaatataaatgtttaataggaagaaaagattcagaatctgaaaaatacaggatacgttgaaatggctttgccttccaaaggtaggctgtacagcagtgcttcacattacattcacaaatgcaggtctttactcttcgtaaataatacagaacagtcatgctatccattccccgtgctgccctgtgaccttcagttaaactattgctttcatctttttcttcattactgacatcatatcatttcaccaagtcat

SEQ ID NO: 51184 - DNA, 1193 bp, Bovine  19866880889332
  misc_feature (1)..(1): n is a, c, g, or t
nctgcctgaaatgcagatgtggttgtcagccttcttggatcacgtgtataaggacaacagcctagggatggcagagaagcaagggagagggagcttgggacttgtgactctgctgtgccagtggtgatctgcttacattcagttaatcagattgacccatgagacagaaatcaactcatagcttgttaactccaagcctttgttaaaaagattaaacctgtatcctaacacagagagttgagctgtgatatccaggtgtgcaagggtctttcacactgcacagtgtacagcctctgtgttgtacaaggcatccctgaatacagtcccatttcttcaatcaggacggcaaagctcaaggaggttaggtcacacttttagcgaatcctagatccaaagccctacaagcattatagactatacaggggacaatacgccagtttctttataaaataaaataacagtaacatatcaactttcttaggcaaaagataaaaatatgttaagggctagaattcaatatttatgtactcagaaattaaagtaagacatttgaacaaaattagaattggagacaattctgctgaatgttgttcagcatgttccaaggaacaggattctctccttaaatgtgatagctcacgtgacaggctgtgcacggggcagttaggatgcctggacgtgtgggtctatcatttgcatgcattaagatggaaattgagcatccatattttacttccatgtgccagtgaagtgattgcacttcccaagatccctttgtactcataattatgtgatttgtgaaccaaatgagtggtttgaggatggaaataggtacataggaactccatttgggaggtccaattttgacataaatgactagaggctttttatgaaagaaagattagatattggattcaaattcagtttatttaaacatgtgatacttggggtttcatttattggaagggcccagtttgattttttggtacttaaaattgtgctttaattgggagatgtagttaggtgatgattgaaataatctgtaataagaaaacaagtataaaatatcagttttatctgtgggatatatcaaatcaactctgcagctgtaagaaaaagtgtcaatttttttgtgtgtgtgaattgtaataatgctttgcaattatctgcctgttgttccaaaatacatgtgt

SEQ ID NO: 51185 - DNA, 1594 bp, Bovine  19866880909050
  misc_feature (1)..(1): n is a, c, g, or t
nattactttactgctgggagttatttaagaattagtgataattgggttgattcagttaaaatgccccatgtcaactagaatagcttcctgcacactgtggttcagcagatggcttcaaatattgattccggattatagaatctttccacatggattgatgtcggtgcctgaagatgccggaactttttattctctacagaactcacagaattgtagatcacagttaaggctgtgggttcccaaataggctttagacatgaatgcaccttgctaagggtttgaaattgaacttggagttctttttgtttaagtgtttgaatgtctcgctaagagtcactgaggaaggtgtccaggcgtggaccctggcagaacctctggaaaatgatgtcctctgtcagtatgacttgaatagattgactgtgaagtagctccatgggtagaataagaaaaaaaactatttgttgtatgattgtactgtcctttaacttaattctcagaaaaaccttgatagggatttttgtaaaaccttcctttttatacatgaagatactaaggaacagaagttaagtgactgggtataccctttttttactgtccttcttgagtagcttttcaggaccaccaaagattccccagtagagcaacaggcagtcttacaaaccaggagggtgcaaagtactcttaatgctccccgaaatctctgatttttcacatgaaaatatcctaattcttatctgagtaatgattgcatccctgtttggattacagtgattgggattgctgggttaaatgacaactctatttttaacattttgaggaactgttttgaaatttttaccagaagtaccttagggtcccgattctttcattcctgccaacacttgttttaatctgattttttgattataaccatcctaatgtgtgcaatactacctgtgtgtggttttgatttgtatttccctgatagctagagatgttgagcaacttttcctatgactgttgactatgtacataattttcttggagaatcatctgttcagaagctttgctcatttttaattgggtatttgcctttttattactgagttataggaattctttgtatactctcgattcaagagtgtctattcagatatatgatttgtaaatattttctcccattctctgatttgcatttttactttttcaataggaccttttgatgaacaaagtttttaatttttatgaaatccaatatctagtttttctttgataatttgtgcttttggtgtcacatctaagaaaacagtgctaaatccctagtcatgaagacttatttctgtgtttgtttctaagaactgtagaagttttaacttttatttttatctattttgagttatattttgtatatggcaactctttgcagaagaagtaaaacaattttgaaaaagaagaacacagttgggagtctcatattttccaatttcaaaatttacaacaaagcaatagtaatccaaacactgttgcagtgacgtaagcatagtcatacaggtcagtggggcagagtccagaagcaaacccatatatttagatcaatagattttcaccagggtgc

SEQ ID NO: 51186 - DNA, 1287 bp, Bovine  19866881014770
  misc_feature (1)..(1): n is a, c, g, or t
ntaaaataacactgatattcattcactctgactctcaggctaagatagacataaattgcatctgtatttttctaaacattctcatgattttctagaaatcccaacaacttctcatctgccaaatcactcagtccactaacttaggtgacagacaacagtggatggcatatttctggagcaaagagtggtaggagacagagacagaaagggcttcacatttttcttattctgtcctcagcatctgctgctgctggttaataaaactgctcaaagaatataacataagaggctcttgatggtacttggggcaaggagacaaggtgtctcggtcttagtttcattattctgttattaacttcatcctgccttagcttcaacaagctccccctctatctgaggagcaacatccaaatatattcctgagctccagagttaggctttcagggggcacatctgaggttttgtactgagacctggggctgtcagcataatctccccgagcctttatatctctatcagtaaacaggaatgatagtaaaatcatcatgaatattaagagaggtgatttagtcattcatttagcaaatatttattgagtgcctgctgcatgccgggtactgttgcaggtgttaggaacatggtgatgatcaagacagaggagtccctgtacttagggaacttacattttcatgaaagaaaacagatggcaattcgcttatgagagtgaccagcacccaataaatagtaccttcaacacatagtaattgagcactctttggggtattatgggtaaaaaatagtgacctcaagcaaatattctcttgaacatttactttcctacttgtgcctttttgaattttccaacatatttacaatgagcagggattgctaaggtaataaattaagaaaaataaaagagcgatgacataatttaacatatctaaaagagttttcatggtgtctaaaagagaattatgattcaagttatgattatgttgaattatgattcaacaaacagtaattgcccacacagttttcagcttggatgtgtgttttccaacttcagcacagtggtccattcatgcttggtaacttcagcatctctcctcctctggtctagtctccatcccaagcctctttcttcatggatgtacaggatcattatttttgtgtgtttaagccctccgtttattaaaaatcattttacatgttttccattcttatacaatcagaaatgcccaagcgattgatatctgcccactgttagtgagcttcgaatattctttg

SEQ ID NO: 51187 - DNA, 2510 bp, Bovine  19866881027540
  misc_feature (1)..(1): n is a, c, g, or t
natgggaagggtgcctacccagacttctagctgaggacattgaaacacagctggacaggcaagttactgtttgaatggcctccttaggtctcgtatgtgacttctttgtggcagacaagaaaccatgaaacaaagcaggcatggataccagccagctggccatctgtttcttcatccactgtgataatttagtcttgtagaattttgttaagtgaacattaagtaatgaccatgtcaaacagagtgcataatgaatgcttcttaatcactggataaaagcttaggggaagcttgcccaaacactgaaaaggtcaccgatacaaaccaagaattaaaaacaagagagcaatgaaactgatgcagaacagcaataattaacttcttttccagtttcacttctgatcatatggaatctatgtcacatggaagatgggggtctcataaggaagctgggtaatagtgtcatagttcctaattcccagtatacatgtgtcaaactcaggaataaatttttaaatgaataaaacatgtgaggagatttatcattctgactcaagctgaaggcaccagggttatagctattaacaccaaacttttccaaataattccctggattaaaatcaagaattctggaaaatattttctgtgttgttttctataaagatcaactgaaatatctcattctgagaaagttttttttttttttttttgtctcataaacaatacctacaaagtcatcaagttttttaatccccccagtggaacgatgtactcgattaactgtattattgggatggtcggtctcctactgcctggaattctgaagttcataagtttacactaatcttagatagtcagtgttaccgccactattcatgaaaaggaatcagaatgttttacttggttaagttactatcctattacctaaagaagacaatatctgttcctaagaatctgcttatatggttccccagctcagaatgcctttcttcaccccactgtctcctccaaatctccccttccttccaagaccttccaaagtttcgtattctccactcagcagtggacacaggatgggaataggtcagttttcatttttaaaatcggaggagggcaatgccaaataatgttcaaactatcgtacaattgcgctcatttcacatgctagcaaagtgatgctcaaaatccttcaaactaggcttcaacagtaggtgaagcctcagctgagaacttcaagatatacaaactggatttagaaaggcagaggaaccagagatcaaactgccaacattcattggattatggagaaggcaaaggcagtccagaaaaacatctacttctgcttcactaactacgctgaagcttttgactgtgtggatcacaacaaactggaaaatgtttagagagatgggagtactagaacaccttacatatctcttaagaaatctgtatacgggtcaagaagcaacagaactggacatggaaaaactgactggttccaaatttggcaaggagtacgacaaggctgcatattgccattctgcttatttaacttaaatgcagagcacatcatgcaaaatgccagagtggatgaaccacaagctggaatgaagattggctgggagaaacatcaataacctcagatatgcagatgataatataatggcagaaagtgaagaggaaataaagagtctcttgacaagggtgaaagaggatagtgaaaaagctggcttaaaattcaacattaaaaacaaagctaagatgatggcatctggtcccatcacttcattgcaaatagaaaaagtgggaagcagtgacagattttatttttcttaggctccaaaatcactgtggacaattacttcaaccattaaatataaaaagacacttgctccttggaaggaaaattataacaaacctagacagtgtatttggcttccctgatagctcagttggttaagaatccacctgcaatgcaggagactccagttcggttcctggtttgggaagatcccctggagaagggataggctacccactccagtattcttggtcttccccttgtggctcagttggtaaagaattggcctgcaatgtgggagacctgggttcgatccctgggttgggacgatctcctggagaagggaaaggctacccactccagtattctggtctggagaattccatgtactacagtccatggggtcacaaagagtcagacatgactgagtgactttcattttacagacagtgtattaaaaagcaaagatatcactttgccaacaaaggtctatacattcaaagatatggtttttccagtagtcatgtatgaatgtgagaattggaccataaagaaggttgatcactgaaaaattgatgctttaaaattgtggtgctggagaagacacaagagtcttttggacagcaaggatatcaaaccagtcagtactaaaggaaatcaaacagactattcattgaaaggacggcttgaagctccaatacttaggcca

SEQ ID NO: 51188 - DNA, 1790 bp, Bovine  19866881060665
  misc_feature (1)..(1): n is a, c, g, or t
ntttggtatattatgctactgtttattgccaagtgttatagctagcctctcttgccaatttacctcataccatgaatttcccttctcatccataatattttatacatataaattaactttttcaccagaatggacaatgtgtatccatgttatggataatagttgaacagaataaagtattaacaatgcaactgattatttttacagttaaagtgccctagcttttataaacattcctcaagagatattattccctgcatatacttttaatatcaatttgtggggtcaggagatggggtatgacttctttctgaaaatgtaaaaatgtaaagggtcaggtataatctcttgtcaaacttgaaagtaaaacatattcatatcttaagggtataaactgcgccatgtgtgagactggccttcatgaatcaaaagactgaaaaattggggaaggcgatgttcaccaactaaaagcatagaacttgcagcagacttcatcgcacgagggcttcctcctgattgctttatgatgaatgagctcaggatgatgctggcccgtggtgatgcagtgacacgcaaaataaacactgtgcagcaataattctgcagagatttacaggtagtcagcaagcctgctcgaattaccaaaatggggaaaacgtccctatcgcgataattaatggtactaaatctgtaccacggattgcttcataaaggaaacccatatatagcatgaaagtgtgattcttaaaatagattcactcatctgcccaaatgcccctaattcctttgaatgtaaagggttcatttaaagtttggttgttttgaacaatcacttgcatttccttctaaaccattccctttcttaaaatcacatataaacccaagaaggtaaataaagcatgcattttaaccattatatgcaaccttttgaaatgaataaaattctctcagttgtctctttgcagggatgtgttctatttttaactaaatggtctataaatatgcaagtctctcatacttggaggttgtactaaaaagtgggacacaaatggatatttagtgttctcaaaaacacagtaatttcaacaaaatttcaggccaaagtgacaaagagagttgtaagtgttgatgacagaaatataagaaccatcaccaaaaatacagcacagtgaaatgcctgggcaagattttctgtttagttcagaatctacctagattgaaagtgaacaactaagagacccagtcataaagtcttcatttttatatccagtcttgaagctccaggaggactagaattatttaaatttgagtcctttggtagttatctttgtgtttaaaaaccactttttgagtaataggtaagttgctagataataacgatctaggaattcatagtagcaatcttggtttttaaagtattgtctcctaggaaacaatgataaatttacatgttttggaaaacctaaagaaaaaaaaaaaagacgaaactaaacgcttatggtagatgtacaaacaaaaagcttacttttctatgctgtatagtctaaatgtaactgcaatttatgaggtcaggcagattccaattttcactgaaattttgtcataaaacataaatcatagttgctattaaaattaaaaagacacatttaaacttgacaagagtttccagtaaaaatttgttgtattttctttgaccactaaaagaaacacattgccccttctacattaatcccattctgtagtgtgttttagaacttctttctcttttaccctctctctctgctccttct

SEQ ID NO: 51189 - DNA, 1134 bp, Bovine  19866881102839
  misc_feature (1)..(1): n is a, c, g, or t
ntgctcacatgatataattccccacctctgaatctctgcttatattgtctttcccacagaaatctcaggagattgcagtacatgagcaacccagtcttgagtcatttaaaacataactaaccacaccctttcttatagcaggcaaatatggctgctatatttgaatatttcaaattcaaccttaaattatttcaaagttgtctagcacatactcaattccagctcctggatgaatatcatcttatatctagcaaagagaggacctgtaaacagttaaaatagtgggtatataaaccacgctggcagtttgaaatggtgaccttagaaaaatatcacggtctctaatttttggatcttaagatatttgctgaaagagcaagagcatagaatttttaacatctagatttcattttcaggactccatacagcatttttataacacaccaagtctgcagtcatttcaatggctgtttatggcctctgtctcagccagttcaagtggaggtgaaagttgactgcttcagtggtgctccctattttgaagtggaccaattttctgttctttggtagtctgtgactttttagcacttcagtgtagtgcttgcaatctgtattttgattgctaaggcttgaagactttgttttggtagtaaggacttttgattattctttgaaagttctaacttaagctgatcatgtttagcataggcttagaaattaaagaagcagcatctgactatatgcttgagagattgctgagcgtacggcaaaaatctaactttcaagtcaggaggtaaaatgcctgtattgaattgacctatctatgttagggagcttcctaaaatataattgctgagaattatcgtgtcaggtcatttgctgaagttattgtatgtatttgtcatggtgactctgtacagtagggatgagtaggccatgttgtggacatctgctttttgaattgctttaatctttaatctttcggaaactatccctctatgcaattcaagtggtgcaagaaagtaattattccttcacctccatgtgctgtagatcaaatctgccaacctgtactaatcttagtagccttaagtacctaaagtcctgagagaaagaacagaactcaagaaaagc

SEQ ID NO: 51190 - DNA, 904 bp, Bovine  19866881140078
  misc_feature (1)..(1): n is a, c, g, or t
nttctatctgtgagggcttatacccaaggctgatgctatcatatcatgttactctgaagcatggcagagaaaaaaaagaggtaaaaagaagcatgtaatggactaaaagcaaaggaacaaaacaccaattgatttttctgtgttcttgcctaaaactgaaggaggtagaagacaaattatcaaaatcaaaataataaatccccagaacagagtctatcattatgtctgggatggtaaggatttacagagcacttaactaactctggggacttaaatgtgataagtagtttgctacacacttccctcctttttttcttttcttttctcttcagagggagggaatacggcagtcactgttctcattcagcttcagtttagaaaagaaggggaaaaaagtggcccccatctatacagtaaaaatttcctaggaaagttaaaaaatacttattctttggcaatttaatagcagcctcttcctagattgttttgctttgaaccagatgacacatatctcaggtctaagaataaaaacaaaatgtgtcaaaataaattcacattgtcgtgctctcataagacatacttgagcttgcttgccttctgtaagctccctcagaccccctctgccctcagtttctttctctatttcctccaaaaactgtacagagacttatatggtatgttgtacatggatgtagccaggggaccagccatatcttgactgcttgaggtagtatttttctctctgaacttcagttttcccttctgtgaagttagaaaaaccattcacttttcaaggttattttgaagatacacttggcttgtattaaatactcaacagttggtggccactgtaactattacttttatcattatgattatttttattactgtcataatcatgttt

SEQ ID NO: 51191 - DNA, 786 bp, Bovine  19866881159235
  misc_feature (1)..(1): n is a, c, g, or t
ncctgctctcctagtcagtaaaacctccacaagtcctattctttcactttcctcatatttattctataatcatattttattatcatcactaagattatttctagttgaaacagcagatttatccaattcacattttagaaagtatcaattctatatgtagcaatatatttaggcagtttttgagtcaaataataacatattgagaaaatataacaagattaatgttaaaaacaaaatagaaacaagtgcctttctaatgcaccagcataacatttcttcttctctggttgttttgtgatttgtactaaaattttgagtaaaattgtatgttgttatccttaaaataatggaatattttattatttaataataataatgcttaaagaaaaatatttcaaggaaacatgaaaaggtcaaaataaagattcaattaactacaaaattaatcagtatctgtcctgtaattatagtattataaagatatttacccaacaataccaagaataactttttatgagtaaaaagttttttttaagtaactgctatatttcaaggaaaaaatgcccttttaaaccaataatataggatgaataaataaatacttagaagacaaaggctggtctttaaaattaggataataatgctgatctaattctacatgtggatagttactaattaaaactaaattaccaaatgcctcaaaaattattttgaaatgatttatttgccagcttagtaggtcaattctgctattctagagataaaagtcatgccattcattcccca

SEQ ID NO: 51192 - DNA, 1461 bp, Bovine  19866881164072
  misc_feature (1)..(1): n is a, c, g, or t
nctactttcttttgatatacttaaaaagtggcaatctagaaaatatagctgaagtttactgccagtgtaaaatttaaacatatttgacaaatgttttcatctcaccaggatactggttatagtatgcttgtttcaaaagagaaaaagtatatgtatatattaatacacatacacatatctacatatgtgcatatggcttgatgaaatgaggggtactaagttaaagtcactcttgataaacttcaaatcctgatgcttttgcactgggagttacctatactccttctccttttgggaaaaaggctcacagttgttagtgatatcccagaagctgccaattgatgaagaatttttttctcttagtaaatctacgtgacaagaacctgtgaccatgcagctctctgggaagtggggaaggactatttccagagcctttgaagtcattatgcaaatagagcattcataatccttttagcaagaattcttatcttatcatttgactgatttctctttagaaaagtttggtaagaaattattagccccagttgtttcacaagtgagtcagtagactctgcagcctacagaagttttgattggccccttttccagtttttctcctgctgatactggctttcatcaaggaaagtgcagttcgatagtgcctttccagtcctaagatgtattgtcactcatttggcaggaatcacctgggctctctttatcatgatttctttgtcactgtaaccaaaattggtgaatcccttgcttcagggacattgcattgatgtggcttgggatgtctatgaacttttggatgagtgaaccaagtttgaatgatataggtgagtttaataagcccatccttgtttcttcccagacacggagacatgtgactatggctggcacaaatttcaagggcagtgctacaagtactttgcccatcgacggacgtgggatgcagctgaacgggaatgccgtctgcagggcgcccatctcaccagtatcctgtctcacgaggaacaaatgtttgtgaatcgtatgtaccaaatatacatgggttttcattcaatcttaccaccttcttagtttttcctgtatctaactgaaacaagtagcattctcagttgtgacccaacttattaaatccctcatctgtaaaatgctttaaatcatgtctcctatgtgagtcccctattttgagaaacattcaattgtaacatgggcagacatttcttgatttgccaccagaaatggttgaaatagcatgctataggtggaatcatatgaaattgctattcaatcattttttaacttacagaaatgaccacctcttaagtttccaatctaattcttcccatactttttggtctttgaatatgtacatatgttgtctaaagttaaagagaaaattgctttcaattatttttatcccactaattaaaattaaattataaagcaccc

SEQ ID NO: 51193 - DNA, 1811 bp, Bovine  19866881172531
  misc_feature (1)..(1): n is a, c, g, or t
ncaatacagttgaatgaggtcaggattggagcattatttgcctgttaatgatgctgtttcttggaaaccatatttcttctctcctacattgctcttctgcctcttggaactggagatggagagagaagacaggctgccaaatagtggtaatgaggattgctgttagtggggctggaaagtgacaagaagatattactatgaaaaagaaagaaatgaagagaagcttagggattcctacgaatgcttaatttgagaattaaaaaaaaaattcttgaatggctaactacacaaaagttttttcccaacttagattactctcttgttagtgtagatactatgttgaatcaaatgatagataaagcagtaaaacatgttctgcatttaaaaactcttctaaatgggaaactgtacattgaggtgagggtaatcaaattaccaaacgggataagtgaaactcaatctccctggaagaattggcagccatcagaaaaaaaaaaaatctaagtttataaatggctacttgaaatggagagtctgagtaactttaactcataaaccatttatacaaagtgtgtatttttatctgaattgtaaacttaagtcagctgggtctgggaaacacaactaggtatttcctcctcttttttctacctttattttacttttcttttctttttttggagtttagttgctttacaatgctatgttagtttctgctgtagagcaaagtaaatcagctatacatattcatatatcccctctttgtcaccacagagagttgagtggagttccctttgctatacagtagattctcattagttatctattttatatatagtagtgtatatgtgtcaatctcacttttcaaacatgtggccttgacttgccttcaaactaatttccattcagcattgataacaatgggtcagaaaggaaagggaataattgtttatcttctttggcagagggttccagtgagtgcagtggggtgcagggggctagggatgagaatagaacatgtatctattaactccctcgctccatctctctctttttctcccctgtccctgcatctatctgtcttttctgtatgctttatatatgcccttcttaagactaaaaacaccgtttattgtcttgataagacaatgagggtggtgactgaggtccaactgctttatattcattttatttgttttctatgagaaatttaatttttcaagcatttttcactctgaaaagggaaaacctgagagcagatgttaaattaatgagttttaaggcaggtgttcattaataaggaaaaatacatatgtgcctggaaaaccaacctttttatgtatcaaggcacatttttccaaactggaaaatccttggtacatgtacaaatttgtataaatctattcaaaaacgtaaaattgacctgtacatatactgtatattcaagtaggcaaaaaataccacccatgttactctaaaccaaggcattcataatttttttgctgctctcagcaagtcacataaatcttgatttttaaaaaatttttactactattaaacaaaacacactatgcaggacatgtttatgttctatttgctcaaatggatcttaatagcaactcagggtgctgttgccggagggcaactgtagttagcagttaaaaaaaatctgaaggaacttttcagctcataaaatttttatgagctgaaaaatgctataggggtgtgtttaaccagtggttcagggggatactgaaaacatggctcctgtctatttcaggagtaatttgcacacctgcactttgaaaagt

SEQ ID NO: 51194 - DNA, 1444 bp, Bovine  19866881198487
  misc_feature (1)..(1): n is a, c, g, or t
naaaagaatatacagtatggtcaaaattgctaacaacaaccaaccaataaaatccaaataattatgacaaagggctgtccagaattaacagttgagatgaagtatcaatactgttcttcatgcacatgttgcaaaagctcttaccttgctcacaaagcgcaccaacgtagctcgggaggcagagacacctgaaggtattaaaaccgtcaatacatgtggctccattgcgacaaggattagaatgacattcatcaaaatctataataaaagccacaaaagtactttcagtaaaaggtcaaaagatcctatttcataagattgccaggtaaaatacaggatagccagttaaatttgaattccagattaaaaaaaagaaattttagtacgtcacatcctttatttagggcaaacttgtactaaaaacttttcttttttaaatctgaaatttaagtgtcactgatctaatatttttatgtgttaaatctggcaaccctaagaaaatttcaagtatattcagagtaaggtcattatctccattgctgttagatgagtcccatgagcattaaaaccaataaagaatccccctagccttcccacccccaattctgactcatgctctgaccacttcagttgtgaaacactgaaaatacttcactggcttcatagcctccagacccttccctttccaatatatccttcattcagctgactgtcatcttctttaggcaccatcaagataattttattcactggcttttttttaatctttttaaatgtttaaatgtatttttcaatttttacaaaacttttaattttatattggagtatagccaattaacaatgctgtgatagtttcaggcgcacagcaaagggactcagccatatatacacatatccattctccctcattggcatctaagcattccgcagacaccgattatccagggtggcagtcgtcagaatgtggtccctggaccagcagtatcgatatcacctgagaatatcagaaatgcatgttcccaggcccatccaagacttactgactggtatttggaggatgggaacaacaaattgtgttttaccaagccctccaggtgattctcatgtacactaaagtcttagactttagactagatcccactagctttccactgttctttcccagcgtttctctctcacaacccactaagtaggcatccagaatactcgaggtcccccagacgcatcctgcgtttgcggtctctgctttcgtttgctgtgttgagtctttctctcccacttatgaaaatcctccctaatttcagtgtctatattgaatacaaactttctaacagacatctatgatctcttgtgatgaaactaatacctttatttcattgcattttgcagttacactaaaaatttagttaatgtttatataagtattaaaaatgaatatgtgtgt

SEQ ID NO: 51195 - DNA, 1533 bp, Bovine  19866881205520
  misc_feature (1)..(1): n is a, c, g, or t
ntttctccctctctccctgccttctttctcctttctcagttgttgaaatcaaagtgttggtgctactatggataaggagaatataaaatacctctttgaataaatgttcccccctggagactgacatagatgaacgtcagggcagtgaacctgtcacgtgtgaccccaggtcatgtgtctgcagaggatagctctgtgcttctggaaacgctgtgcacctttagtttctgtcctgccccctgtcctgttgtgctctgccctctctccagctcttggatgaagcttctttcttccctgttgcctctttttcctttactatgttatcctggggctcgaatggtcttaaggttccatcttcttccacacacccacttcttttgggacctctttttatgcttgtgggtttcacctattatgaagacagacaccaagtatatttctccggttccagcttctgggctccttactggacatcagtgctaaaccttgtatttaaagcccaactccttttctttccctttacaaaccagtcctctgatgtcacatttttactagtctatcagcacttttccagtcacccagacactgaaattctgatatcctttcctctaatcaggcattcctttgccgtatctcctgcatccatcctttcctttccattgcctctgataccaggctggctccatttgcctgagatcaattgcagggaatctgaaaggactacacaaagattagttaatgctatcagtgttttcagcctctccctcatcatctcctttgtctttgggattaaatccctttatattgcattggagggttcacacagtttactttctaaatacctgtggagttaatctacttctctcacacaaaccttccattccaatccaacttaactaatcactattcctttaatattatttctctttgttcacgctgttctttctacccaaacatcctgagtatgtttctccagcaaaagcccaccctttctttaagggccagtttaaactttaaccccctttcatgagcttctgttaacatgaagttatatatgctgccttttgagctcaatgatgagctttaataacatttcttcttctttatcaattttttataacactgttgcttggtatattttaatacattttatctctagttttagattataaactacttgagggcaaggagtttatttgtattttccacagttaatagggaggttcagcatatcagatgactgattgctgcctggaggttgtgtcatctattataaaaaactatttacctcctatctttccatgaatgatgaatgattctgaaattattcataatagctacctacataataggaactgcatttgtcttgaagacatatgtacttagttttattaccaattgtataccaatggtggggttttagtctattattaattttattctgcctttgggggattctcagggtctttacagctctagggctttatttatccctggtaaataataccatcatgcacaaaaggaaatcagcaa

SEQ ID NO: 51196 - DNA, 1337 bp, Bovine  19866881224623
  misc_feature (1)..(1): n is a, c, g, or t
nttgtaaaggcctgacagattttaatattgccataataacacccattcattagagttttgttttgtttttttttttaataagatacttttcctgttcctaaagctaagatgtataactatgggacctaagacaaagtcatacgtaagttgtggataaagtcaaattgaatttttataccattaacaacttcaggttttccatgttgcaattaaaaaaaaaaaaaagaaacaacatgtttcttaaacccagaaaaatacaaagtttatcttggaagcccccagtctatacttactttctttgcatctcattagggaatcaatactatggcctgttctgctgtatgtgaacaatacaaagaaccttcacccctttcacagtacaacacaattatataaataaatatgttaggaccaagggactgtttccacgtttggaaacagatttatcaacattgtgtccttacctggtaaatagactgctgtgccttccactgactcttcattaatgccaatcaggaaactggtttcattagaagtttccagaaggggaaatgatggtgttgcaagctcagtatttaactctgtggtgcttagtgttgcctgcttattagaatcaagcatcctcgtcggtacttgctgtttgggggccgctactgtggaatcctcccctctgatcaaagctgcctgtgtttcagggcttatttccagaggagaaaggatggtgggccgctcagaagtctgtgggctgggctgaggcaccacacctgcctcgaccccgtgaatcacagaagcagaagtagaatgtggccgcagtgtagcaccttctaacttcgtttcacttgcagctgtgacaatagcctcagcctcaggggtttcaatactgggaaacaccttgactgcttccccagaaacctggacactggttgtgttgtcagaattttggaaaatctcaatttcttcttgagcaattagttctgtggcagaagcctctgttggttctaatagtttaggcttactttcatcttctgaaggctctgtgtcaggaggtaaggatggaggctcagttatgtaaaagtcttcttcacttgagggtttgaaagtcgcttcaatgtttgcaagttctcctgaggatactgggggtgtgctggcatctgtacttggcagagcacttggctgcaagtcctctgagtgctcagagtctccactgcctaagtggatgctgagtggaggaaatgatggtgtctgagagagcagctctgaaaaagctgaaactgtggatgtgtcgatggaatccggcagacgggctccttccatcacatcaggtgcctctgtaaact

SEQ ID NO: 51197 - DNA, 939 bp, Bovine  19866881257776
  misc_feature (1)..(1): n is a, c, g, or t
ncagttcaggaacatagccaagaatagacgttatgccaagcacatttttttttcaatattttatatgtactgagaactcaaagttaaaagaaaaataagtaatttcaagtgatgaattttatcaaatgaaagtttccaacttttattagtaggcaaagacagtacacatctcaaattttaattgggtaaaatttaaatgacttctgaatagctctttatgtttctctctaaagaaaataaagaccaggcaaatatttggttgttccttcattgtagccattaacatatttaccatgaatctgagttttgaaaatgtagaaaattatgatttggaatcatgaaaatttgatgtaattcatgagaaagtggaaatgaatttggacagagaataagtgaagaattacagccctaacttgactacacctaactttcaacaccttgcttcaggacagtaaggttctttgaatagggaggatgtataaatagaactcatggataagtagttctcatataagtagaacttaacatctaaggagttcagtgaaaataccctttcaatagaaaaattgctttcaaaatttgaaaggaaacttgactataaatgtttggatagatgatttctaagtttgctctcagctctagaagttggaaagtttctgaaatgaggaaacaatgaaaaatgaggcgtaatgttgtgccagacaccttgattctaagtcagtatttaaacttaagactgagatgtaatactgagcaatcataaaggatagataattcatcatacaaagattgacttgttctgtgttcaaagaatagatgaaagaaaggcgtatttatttctaggaagctgagtaatggtgtttcataaattttattgataaaatttctttcaaaggaaagaaatcaattcacccttcagggccaaaagagagcacaggg

SEQ ID NO: 51198 - DNA, 1621 bp, Bovine  19866881313760
  misc_feature (1)..(1): n is a, c, g, or t
nttctcttttaccctctctctcctgctccttctcactgaacaaagccctagaacattttgtagcaaaaatgaatatctatgaatattgaaaaactgcaagctagcaacacactacatacaattgtgctttgttttcctttaaagagagtacaaaaatagataatacgagactcacctgacagttcacatccaagaagttccattctcaaagtgcaatgccttcgacaaacttgggggtagagtctcacatactgagcttttatggggggtgtgaaagagttagcatagggtgtgttgttatcaacgtttccatggaatacctatataaagaaataacagaatttaaaattattcattgcagcttttttaaaaaaaaacaaccctattttcaaatattgactctatatcctacccaaccaagtccctcaaagattggactaaataatttagaggtctggagcttttagagagcaccttgccatcagggcttcccttatggctcagctggtaaagaatccgcctgcagtgcgggagacctgggttcgatccctgggttgggaagatcccctggagaagggaaaggctacccactccagtattctggcctggagaattccatggactatccagtctatggtgtcgcaaagagttggacatgactaagcaactttcacttactttgccatcagaagcaaatctaaaatctatagatagaatcctcattaaagctataaaccactgtaacctatggcttaatctataccctattatgttggcttattaatttaagtccagtcctttagaatggaatgcttctaaagggaaatgcctcctcaacttagtcccggatctgggtctatctattcattttgctacttagtaattatgtatgttgttttaggaaccagccttcaatgttatttcctgatcacttagtttctctaaagagaagtcgctcagtcgtgtccgacttttcgcgaccccatggactgcagcctaccaggctcctccgtccatgggattttccaggcaagagtactgaagtgggttgtcatttccttctccaagctgtgatcaaattcatgatgctttagggtgtgagtcctcaagtcccagatcattggataagagactcatatttctttatatacatatctccagtgaaaaaccaatttatctttaaaatttaaatgctaaaatgtgttatttttaattcctttaaatctcattttactttatcttttatatagcctagtaatcaaaaaaccttttaagaagttaattaaaaaaatctttcataaaatttatcagtctattttaatgattcagttttaaatggaatgagctacattgctgctttttaaaattagaaatttgtgttaaaattaattaaaaatttggaaatatatgaaagggcaaatgagatactgaatatcattatggaagatgcacactgatatatattcctctaaaatactttattctgcagaataacaaaaatttcttccaatattaagatattaagtatagaaagatatttatcttttctataactcggtgtttctctttaaaaattttattttttctttaacagttttgatctgtatttatttaaggagaa

SEQ ID NO: 51199 - DNA, 1368 bp, Bovine  19866881328678
  misc_feature (1)..(1): n is a, c, g, or t
nacttttatgaataagaagtttttctttcttcataaaatagaaactttgccaaaggtggttgggcatttatttaaaccttagtcttcagtcacttggggctatctgttcttgataatttcatttttaagtgaagagaatagctatatattttggtaatctcttcacaaaattggaaacagattaaaaatgggaaaactagataagaactaattctgtttaaacataacttaatgagcaagagaaaaccaacaagctccagaccactggtctccaaagagaaagtacccagaggccagtattccaaaggggagtgttcagtgggcctgggctttctatcagaaacaagcaagaagagaacatggtgttcttataaagtgagccatttattgtctgctaggccctgaatctcagaggaatgactgacactgtaatttagaagaactgaagatactttcacagagaagaatcaattcattatatccctagtggtttcactgccttttccttcctttgggagccggtaacacatccaggataaatacattcggcgaacgaagatgctttatgaatagatggtctactaaacagtcctgccttttagcatcttgggtgtggaatgttggtattttctgagtagttgaagaagtctttgactcttaaggtagcacagcccttggtctttgtaaagatgaacaagaggcatattcaggaaataactcccttttttggaacaccctaatactggttttcttttcgtttccttctgaaccatgcatgtcttattttccagattacagtttaaaaataatggtattcacagccagttaaaattccagcgaaatgcagagaaaatttgaaaacacttttgcattgtcatcttctgttgcctctagttaattttccaacctcctgtattcattatcagtagccatagtacttagcctatgatatttaaatgtatttagtctgttaagtaaaagtaacaatatgttgttggggtaaaatggaaagggatggaaacttaaatgttcttaggattgtaatcaatagtgtttaaggaggattacaggaaacagctggttaaacaaatattaagtgtagagtggatgctatggtataaattaataatgcagctctttatttacactatgaatgggagggtctgtgatggttccatgtgggaagcgtagtccctgtctgccacctagtggacaaattgaagaacgctttctcaccagcctcttggtaaaaaattctgagttccattcagttgacattgaacaccaactgcagaccatacgttggggtaggtgctcagagtaaaaaatacagcaagtgacttttgcataatttaaaaattaaggcat

SEQ ID NO: 51200 - DNA, 1263 bp, Bovine  19866881345587
  misc_feature (1)..(1): n is a, c, g, or t
ntgttcttgtctggagaatcccagggataggggagcctggtgggctgccgtctatggggttgaacagagtcggacacgactgaagtgacttagcagcattgcattttaaacatgcagaggagattttataatctggaaccttagtaacaatgttttacttagtgttaatactttttgaatgtttgatatgtatgtgttcagggtattttatatgtatgaattcttttcgtctctgtcattgccttttgaggtagattgtattattatagtattgacatttcacagaagatgatactgaggtaaagagaggttaaataaatcatccaaggccacatggctagaaagtggtgaaaccagtattcaagccctggccgttggtctccagagccctcacagcttctgcatttcctgtagcactaatatccagaacactttctctgtaaaattgttaattgcaaaatgttcacccagtgtctactttaaagcatatgtatcatgcagcaatattgctttctgtcttgcaggtccctgcactcctaatccatgccataatggaggaacctgcgaaataagtgaagcgtaccgaggagatacattcataggctatgtttgtaaatgtccccgaggatttaatgggattcactgtcagcacagtaagtcatccacggtctttgtgcttttattatcattgattgcaaagtatgcaagtcattatcattcttgtttgcagtagaatgatagaatctttgagcctgcttctctcccactggatacaccatatccccagctgaggacttatccctagactgtttctattctcccaagggtgtgggaggctagcaatcttctatcagcccttttcactgtcgctcagccatacttgcaaaatgctgcttttatattgatctgatatctatgtctttctttcacatgtgtcctaaaactacagtcttcaagcttcccagacatttttctgtttgggttcagagaagatacctaaaagagaaaactgcccactctgtcctttctataagccagtttcttccatctcacatgttagcatttttatactctcaccctctttgtcttagaagcctattgcataggaaaaaaaaaatagttcagatgttatgcccttaggtgcaaaccctgcctctagacactgggcaatatcccattatgaaaactttgttctcatttcaagggggcattctgctgtggtgtgtgtgctccgtgcaggcagcccttaattgaggggctcag

SEQ ID NO: 51201 - DNA, 873 bp, Bovine  19866881413504
  misc_feature (1)..(1): n is a, c, g, or t
nccgtggactgatacactccggacttaatccccagggtctccttcctgctatttaatgtaccactgctcaagatttgatgctgtccagtttccaagaagactgaaagctgcacattctcattgttttatggcacttgacactttggccacattgctttttgttcttcccacatgactggtatcttcgaagtacaatggttaagtaagggaaaggcaaaaatgtgctgtttttgttgcttctctctctacagatgcctggcagagaactgtttgcctgcggcatccaggattcatgtccttgttattttgctcttccctttccttcatctttactgagtagtaaggagtgtcatctaccaatgtcacgagggataacagtaacatctcccgagaatcccaccagacataataagaatgtaaagtccaaataggaggtaccgtgctgcagagaaacggatctctggttcacaacgcatgcacgcgtgctaagttgtttcagctgtgtccgactctgcgaccccatgaactgtagcctgccaggctcctctgtctatgggattctccaggcaagaattctagagtgggttgccatgcccttctccagggcatcttcctgacccagggaccaaacctgtgtctcttatgtctcctgcaatggcaggcactgtcccacgagtgccattttccattctttaccactagtgccaacttggaagtccctggttcacagacgggtgttcaaatgctgactccaccaaatatgagacgtataaccctgcacccattcattactttctctagggttcaggttcacctccttgaaactgatattgctaaataagataatgaccatccagtaggcatccattcgat

SEQ ID NO: 51202 - DNA, 732 bp, Bovine  19866881793877
  misc_feature (1)..(1): n is a, c, g, or t
natgcagacagagccctcccaatcatgttttccttaagcatacaaaatgccatcactaaaatgggtgggattacactgccaattgtgggaacaataatctgcacgttaaagttcagatttagaattttgaatacaatagtcaataaatgaaatatttggaaaggtcattattatgtattttttcaaaaagatatgtgttaggaattcttaatgatagcatactttgaaacctcatgatctgctagagtctataaagccagggatgtgtagaaaccaggactgttctgacattttcatagcattttcagtttttgtaagtagtcatttatgtcaaaaggtaataaagcataaaaacagtgttgtgggggcagtgatttcataaaactgcttcaacaataaaattagtaatatactgcactgtttgatagcatatctttttcagatgttatctaaatggaactttcaaagccttggggaaaagacatcatattttaatgttacaggtgaacgacagtattagtactacacttaattgaaattcccatgtgcttggtcaatatgatagccaatgactacctagacttaaaatttttaaatttgtctttgttttatctcgatgaacttaggaaagaaaggataaaaagttaagtatttgagcaataatttggctgtaaaactgatcagaatattgcttatgtaagaaaaatggaaaatatcatgcatgtcttataa

SEQ ID NO: 51203 - DNA, 819 bp, Bovine  19866881936109
  misc_feature (1)..(1): n is a, c, g, or t
naatgcctgctgttgtgcatttttagcttatatttatcaaaataaaacaagcactcgaagaatagatgttaaatatattgtcttgatccagtgtggttgtctcctaaattcctttaatacaagcttgataagatcttaagcacagcctatcagcctgtactgcaagatttattgctgaattgtcttttttttatactttaaagagcattttatttattctattttccattaataaatcttctgttccttcatctggatatcttttctctttctcttttaaatcagggatagactgttataccttacaatcccctctaaaagtatagaatgggaagtgtagcaagctaaacacatatcagtttttctgtgtgtgtgtatgtgtgtgaaaatacatgatatcacagaattaaaaacagttttaacatcctaaactgcagtctactgcctgtgctattctctggagagcttggcttcttaaagcacagctcaagaatatttatgcagtctgactataaagcctaaagctaaaacaagaatttaaggatacaggacaaaagtttcatcttaggaaaatccatgaaaaaaattcccatggaatcatataggttgagattctgggctgccagcaattatgttcagacaggtaaaaaggactccatgtataatatagttacaatgttgtgctctttgtgtcttcccatttccatataaagtgccggcactgaaattaatcagtgccactggatcctgcatgccactgacagaacagtcaccctgacacttcctcctgtaaagcctttctatctaaggccttccaca

SEQ ID NO: 51204 - DNA, 2371 bp, Bovine  19866880244004
  misc_feature (1)..(1): n is a, c, g, or t
ntttgtagttgacagcagttttactggaatatcagttcagttcagttgctcagttgtgtccaactctttgcgaccccatgaatcgcagcacgccacgcctccctgtccatcaccaactcctggagttcactcaaactcacatccatcgagtcagtgatgccatccagccatttcatcctctgtcgtccccttctcctcctgcccccaatccctcccagcatcagagtcttttccaatgagtcaactcttcgcatgaggtggccaaagtactggagcttcagctttagcatcattcttttcaaagaacatccaggattgatctcctttaggatggactggttggatctccttgcagtccaagggactctcaagagtcttctccaacaccacagttcaaaagcatcaattcttcagcgctcagccttcttcacagtccaactctcacatccatatatgaccacaggaaaaaccatagccttgactagatggacctttgttggcaaagtaatgtctctgcttgtgaatgtgctgtctaggttggtcatgactttccttccatcatatctactttagtaggtatttagtagtttcatgctacactggcaaattactttttgtgacagaaatagaattagtaagttgtgggagaaactgtgtggactgaaaaatcctagaatatttcattcctgaccccttaataaaaagtcttctatccttgatctagaataatgggagagaaaagagaatgagtctgtattcatggtaaatgtggaacttctatatagccctggactacttacttccagggttctttccgatgaatagggaacacacttacaacttgctcacaccactcgtaaactttatttttattaatattatattcatgtttttactgataaattcagccaaatgtaatccttagtgataaacctggtattaacgtaggtttgatatctaatatgtttaaagttcttcatattaataactaatacatttaagtgcttaccacatcaacattttgccatatgtcatttattttacttttaaaggttttgagaacttttttgctaatttatgtcaaagtctcatttggttagcactcattagaaaagtgctaattagtagaaaacatagagcaagaattttaagactactattaatatctttcctcttcccctaacatgattttcttgattttttatgagccaatatttgctgtgatccaaaagtattctaagaacacagtcattactgtaaatatcccatagcaagatataaattctgctaattaccttatgtcaagatttcgatctcccctctcagaaacaagttatcaatttatttttctgtgcttaatgccagatataatatttttcataaaaatactatgacttcatttaatagaatgttcaaaatattgactagaattttacctaaaatgttattaacatctggagaaatcttcattgatatggaacaaatgctacattaatttttagtgttattaaatctatacaatagatcaaatgacatcacagtctacatcaggcaaatgccatggttataagaatttacagtagtatctcagtacagttaccaaaatcacacatttatttaaccaattaagcatgaaagtggcattattgtcaaagatttgatatatgacctgaacataatttggttaatgaggaacaagaaatgcctgctaagtacaccaggtattctgttagcagaagactgctaagactgctaattacccctgacatatgtcagattgaatggtcttaggttaaaaaaaaaaaagtgctgagtggagacactatttcaaaaatagtctcctctttttatttataaagtgcttttaaacatttagctttaagaagttgaaaaaacaagttttcagcagacagtagttgcagatattgtgcaaattctcctgtgtactcagtcaatgataaataactgctgccatttcaggtttttgtctgttacgaacttgtagagaaaaaaaaaaatctttatacccaatttctaattatctagactcccaaaagtatcaaactggagaatcccctggcttacgttgcatccaagtcttaacacctaaaatctctttaactccctccactctttctccttttttataaataagaaagacaaacaacattttacatgaggataagaaaaactcttgaagttaacagatttttgaacttctgttgtgggatttcagtgaagttccttattgctgattgacaaataattcatggaaaaaggtaatgcagggcaagggtttcaagggaagtactgctaaaaatagaaaataccagatgaacatagcaattaagaaacatggggtcagaaccag

SEQ ID NO: 51205 - DNA, 1070 bp, Bovine  19866880587264
  misc_feature (1)..(1): n is a, c, g, or t
nagcacaaggttggagataaaggagtcaggtttgttctctgttacaaaagttaaagtgctggcaaaaaggaaaaaccaaaggagagtgatgactacttcctcaacaagatctctgatcctactctttcatctcattgcttgaaagaagagccttttcttggtaaaagctcattgtttttagtaagctttgcctcacttctaactgacaccaaattaaatgacataatctggagggtaaacgcagtaaaatggatataaaatttggaaaatcctaaattagaaataaattccaactgttttattaaaaaaagatgtgttatcttaaggatgatatttaacttctttgacatagttttcatttttgttaaaagtggataaataatattttattaatgggattgcagtgataataaaacacatgtgatatgaaacacatgattgacactgagaaagtgataaatttgtatggatatggaaaaattgaattcaactttgaaatctacttcatattcaaataattaataaggggaagcattttaaaggttgggagaatgaattcagatggctgaaggtaaaaataatcatcaaatatgtaaattcttaaatgttttgcgtgcttctctgatggtgactaacatttgtccctatgtttcttcattccacagagtcaaaggcatttttgtaaagttctttatgggtcacaaatcttttcccatgctgaaaagtgtgttcttcaccatctgagaaaccagcaaagccctaagtttctacactactcctgaaaaccacttggacaaattgaaaataattctgttttcatcaacattgaattacagatataaaatattgtatgggaattataatttgataaatgggaacattctgggtcccatattgagtccagatggttacagtgtctttaatacatgcatccatttggcactggcacatttgtgtatcacagtctctttctcatttatgtttaatgatggataaattccaaatactacaagaaggctttcttatcttttcttgctattctttggaactctgcattcagatgtttatat

SEQ ID NO: 51206 - DNA, 1092 bp, Bovine  19866880641940
  misc_feature (1)..(1): n is a, c, g, or t
naaatcttaaaagtgttaggtagagtaccctaggagttaaaagatgacagataaggaagagggaagtagattgtttgtaacatgagattaaaaggtctgggaacataagaagaatggaaggaaagtttttcttgttgttgtggaagtctccaaagcctatagcacccagtatttccaggcagtctccattccaagtactaaccaggcccgatcttgcttagtctctgagatcagatgagattgagtgcattcagggtgcatggccacagacccaaagggcacaggtagtttgtaaaagaagtgacacttgcactaaaatgtcctcttattccagtgctgtaaaaggagtttgttcctttatcataaattaatctgaatagctcatttatttgttctataagtaatccttaaaatgaacaaatgcctttcagcagaaattatcatataatagtagtcatataattgtaaaactacagccttggcttaatctgcccctgtaattataaaataaaattacataggactagcaaatctatttaaagaattaaaactatggaatcatgcatggcaaggaaagaaagaataaaatatgaagattcatgttaaatgatgtgaaactttctgctccatgcttacctaaagctctagcagagtgaaaatatgctttctcctttaaggagagaccctgggactgaagccatcatttttcctgtaactgacagatcctgccttacttacagtaattgaggtatcgggatgaactcaccctatgagcacagtagaactgcttgagaacctgcacatcacggaatcttgaagagagtcaattggtctttctatctcaggaagcatcacagatacccagtttcccaagatagaaacttcagtgctaaccttgactcctgaagtctctcccatctcacacatccacttattcacttactaatccttctccataaatatctcttgaatctggcttttcctctccatttccactgccagtgccctagttcagtccttcattatctcttcccaggaacttctcaccagtctgctttataagaaggtatgtctcttccacagatttttttt

SEQ ID NO: 51207 - DNA, 804 bp, Bovine  19866880665584
  misc_feature (1)..(1): n is a, c, g, or t
naaacttaacttgtttctctgatagctcagctgataaaaaatcccctgcaatgcaggacactccagttggcttcctggttcaggaagatccactgcagaaaggataagctgcccactccagtattcttgggcttccctgatggttcagctggtaaagaatctgcctgcaatgtgggagatctggattctatccctgggtttgggaatatcccctggagaaaggaaaggctacccactccagtattctggcctggagaattccatgggtatagtccacggggtcgcaaagagtcagagaggactgagctactttcactaaattgtttacagagttgaataaatggcttatgtgtaatactgactatattgtcttttaaatcagcaatgttagcccttagatgaaaaaaagaataaactgtgaagattttttttttttaaacccttatgtcactccccaccccacaaccttattgttttaaattcattaaattcaatttggaagctcaggtatccattttataaccaaaagttttgtaagcaattctgataaatgtcatatctaacaatcattgggctacatttttaaagggtctgatcaaaatcatcctaaagcaattttcaccttaggggaaattaacttagacaagattagttggaattctcgctcaaatctttttcttttaaggacaatgcattggccaatacataaataagctaaattatcttcgtaaactctttatcaactctgacctaggtagtaggcaatttcctttgcagagtgtttgcagatagttcatactgatt

SEQ ID NO: 51208 - DNA, 1325 bp, Bovine  19866880782372
  misc_feature (1)..(1): n is a, c, g, or t
ntctgcttggttaaaaaaaaaatcaggaaaattgtgacaaatctatttgagatacagtttgatccaccaatctgtgaaaagcaatagcacatccatgggaagaagagttacatgaaaataatattattgaatgaaaaacgtacttatgagatagtccggattggaatccaagctctttcattgtcttgctgtaaccactgtgtaatttaaaatatgttcagtcataaaataagattatttttaataagctcaatacttagtaagggctccacaattataaactcttttgtttttcccaaagtaaataatctgaatgcatataataaaatatatcatatacaataaaaattataaacaattacattgtttttccaaaagtaatataaatatatagtattacatatgtacacataggcttctctggtgactcagtcagtaaataatctgccagcaatgcagaagacctgggtttgatcttgagtcaggaagatcccctggtgaagggaatggaaacactctaatattcttgcctggagaattccatggacagaggtacctgatggcctatagtccatgaagctgcaaagagttggacacgactcactgactaacacagacacacatgtacacacaaagatttttcaagaatagcgttttcttgattttatactctttttaaagcttcttctaacctttctaatttataaacatttatgaggagaaaaacaagttagataaaaagtgttattctaatagctgggtatattctattagaatatgttagtagctttaaacaatctctgaggttattctaattcacactaaataagtggcatcttccaatgtgtgagttggtctaaaatcataagtttcagtaattttttttgtcagaaaagtgtaaattgaacattcacatcctctctcttttaaaatcatttccaaaaggtgaatttgtataacataaacactacatctctgatgatatcatttccattttacaaatatgcagaaaggaacacggcatctttttttaattcaggcaccctgcctcagctcttggaacctgttgagtgtagccatgcaccaattctaaaatcattgcctttggtaggaaagtaagccattgccttcatatctgtgcaaataccagaaactgaatcttcaagccattgacttctgaattgaaaagcaatgtggatcacagacttggaatgatctgcctggatttaagctccaattgcagcataggaaccaaatatttcctttgctgtgttgaaaattgtgagctatgctctatgacaaatatcattttgattaaacaccca

SEQ ID NO: 51209 - DNA, 866 bp, Bovine  19866881036126
  misc_feature (1)..(1): n is a, c, g, or t
naaaatttcttgggattctgtaacaatagagtttgcttagaattgaacaggatatatttgattctgcttttctgtaaaactttaaatgtgtaacatgctttatttttctcatctttataatatatgtatttcaacttgaaaatccactttccttggctgtacaaactccctctaagtcagttactatttttaaaattaaatatatgctataaatcagaaatatgtcagttgtggagaaaatacatttaaaagaggcaaaactaatatttcagtttaagattgtgagaaattaattatttttggaaaacttaaataaaaacgtttatcattaaaagaaaatgaaatattaattgtcactattctgtctcttcttcaagtctttccacacaggcagtcaaattcaaaaagtgtttgctctcatgtttgaagaaagttacatcacagagaacagaaactattttcagttctaaaaatatattttctgtttttttaaaataagaaatgaagaaataaaaagtatacatataataatattttatggaaatatataattattagtaatgattgataatttctgcttaattatattttagtatgtgataattagttgaaaataccaggcaatttttatgactgtaagcattattataatttatagcaaaatcaaatatttttagcatcaacctgggacacaggagaaagcaggtaattataagtgagattctatacaaattggaataattgggctcaaaatggagccatctcataattacagaagagttttaacattgattaggatagaatgtatggagatttaagtatttttttcctattcaatatgtgtaaaaagtaaatatatatgttta

SEQ ID NO: 51210 - DNA, 2175 bp, Bovine  19866881147203
  misc_feature (1)..(1): n is a, c, g, or t
nttgctagtagtccagatatctattaatggctattagtaatttctgaaataagttgttcagatgaattcattagttgaaataattccccttgatataagagaatggctaaatatctgtcttcaagaatttaaagctagggctgcctaaatgtagacgacttggctctctcactatattagtcctgtatccctttggtcttcaataagagaatgatacatttcagggactgtcctgagtaaggaagttactgagtagaaatgttctagtgctaaatctggaaacttctgttacataaagagtttggtagttatcactctgtccataaagcaggaagcctaataaactgaacgttagcaacttttcttggattgagcagagacctgaggtcacatggcaaaccactatcttgaaatctggagagacagtgaatacaaagactcacaggcaggtacacagaatcacagccaagaccaactttcttggagcagaagcagtaggaggcaaaaacttgcaggaacacttaattggtaatgtttctaaggtgctaggctcagatggtaaagaatccgtatagaattcaggtattgcaatgagggagacctgggtttgatccctgggttaggaagatcccctggaatgggcaactgactccagtattctagcctggaaaaccctatggacaggaggagccttggagggctacatacagtccatggggttgcaaagagtcagacacaactgagagactaagcacagcacggaggaggagtgtggaatgatgtgagagtgagacactcctggggaccctaatctttgggagccccgacactccaggtgcagcatagaaccccgctaggatctcatgactcaaggctgagagcgagcctcacatggctctgcggagaggcagagagtaatcctttcagaagatgtgcggagccttctctgtagctgctgctgctaagtcagtcgtgtccgactctgtgcgaccccatagatggcagcccaccaggcttccccgtccctgggattctccaggcaagaacactggagtgggttgccatttccttctccaatgcatgaaagtgaaaagtgaaagtgaagtcactcagtcgtgtccaactctagcaaccccatggattgcagcctaccaggctcctccgtccatgggattttctaggcaaaagtactggagtggggtgccattgccttctctgtctctgtagcaaaggtccagaatccatgggaagaaaagatacctctgctacagccccctctggacttcatgtcctgccactgagaaagggagggaaagctaagaaacacatgtgatggccaggaatagacgccagcgaaatcactgagatttaaccatgagattctagaatgcgtcacaccctccacacctgcacacaggactccactaaagtaacagtggattacagattaaggggctgaaagacagagtctatctgaggagtccttaaggaaacacaaaggcagctacagcacacgcaaaaggcattagagtgatttgaagcctctggcatccctggctatcgtaaaggctaaaaacatagctcaactcctagccatactacagtaaatcctcacactagagcccaatccctgttaattaaaaaatcatctcttctaattaaaaaaattacaaggcatgccaaataaaaacaatctgaagagacaaagtaaacataagaatcagatttagaatgacacattttggaatcagtagaaagggaatgtaaaataattatgattagcacattaagggctctaattaaaaaaaatagacaatgtgtaaaaacaggtggataatgtcagcagagaagtgcaaactaagaaataatcaaaaagaaattctagaaataaaaaatacggcaacagaaataaagaatgtgtttggtggactgatgagtagttaaggttcaggtgaggaaagaattagtgaccctgaatgtatgtcagtagaaatgttctaaaaacagagaggaaaacaattaaaaaagtgagcatatccaaagactgtgggacaattacagaaggtataatacacatctataggattgccagaaggggaaaaaagaacagagcagaagaaatactgaagtcatgatggctgagaacttttcaaaattaatatagacaacaaatca

SEQ ID NO: 51211 - DNA, 923 bp, Bovine  19866881159639
  misc_feature (1)..(1): n is a, c, g, or t
nctgaataatacaaaggaaaaaaagaaagaaaatttaaatttcagatttaattttctcaagcaagaaaggacacactagaagaagaggggaaaagagacactaggaaaagaaaagggatattatattgtgtgcaagttctaccccataaatcttaagatacctgagagacttgaaatattctcactctttaataaacacatatagaaacatattttgctgttctcaaactgtactttctcactattactgcctttgggaataaggggctcaaagtagaaagaatttcaggtttagttttcagggttaagtttccataagtacttacatacataaaacaggtcaaagaagaagggcatggcatggtagcacattctgaaaataaacgacccccataatgaataaatattttcaataataaatttggtcatatatttaattggtgaacactttcctttaaagtagtggaggctactctaaccataggtaatttctaagaggtctaataaacaacaataaacatgagtatttatattcaatgcttgagaattttcaaagcaatctcacagatgctaatagtaaccttattattacaggttctcacattgtttccacatagctgatagaaacagataagtggtatttcacataaatactgtgacatttttggcaaactttctcaagtgaaatttatgagaaattaagtcacagaggaaccagagatcaaattgctaacataggctggattattgaaaaagcaagagagttacagaaaaacatttgcttctgctttaccgactatgccaaagcctttgactgtgtggatcacaataaactgtggaaaattctgaaagagatgggaataccacatcacctgacctgcctacttgagaaacttgtatgcaagtcaggaagcaacagttag

SEQ ID NO: 51212 - DNA, 1712 bp, Bovine  19866881306076
  misc_feature (1)..(1): n is a, c, g, or t
ntgatgagacacaacacagtccatgtttattttggcagaaaaacacagctgcaaacggtaacaaaaattgctatcacttttttattttttttaagtaacagtacttgctacctattccttttcctctagagcaatagatttttctgtccatttttttcccctcactgctagctgacaaaggctgtgggcagaactgaattcacatctcacaattctcatcacccctccctgacaaagatgcacactccgtatgtttgatgtattatttcctccacagaaaacaaccctgcctcaagaaacaaaatatgatacaaaaggctcagctttgcctggcagacaagaaacaaaactttatgaaaatgaggccagtgaggggaaataatagcagctctatacacattgggataaaacttttttaaaaagatgtataatatctagctgaggtaattagtaaaaacaaaaagtaaaaacttttgtttctactaatgacactggaggtaattgataaaaacaaaagctctttagatatatgtgtctgtttatatatatatatatataaaaacatatatatttttatataaatatataaatatatatatatatatatatatatatttctttatgactcaatagtaaagaatctggctacaatgcaggagacacaggagatgctggtttgatcactgggtttggaagatcttctggaagaggaaatggcaacccactctagtaatctcacttagaaaattccacggacagagaagccttgagggctacagtccaaagggttgcaaagagttcacatggctgagcgtacagcatatatatgtatatgtgtgtgtgtgtatatatatatatgtatatatatatatatatatatatatatatatatatatttgttttgaaaactcactccttccgacaaagggcaaggagagattaaagaaagaggctggctactccagattggtaggtgacagggttaatatcaaggcaacttacaaagatgcacagatctcttctcctggcctccagaatattaaaagttcatgtagagaccttaactgggttcaatcacatatactgttcagatagtatcaacactttgctctctcatggcttcttgcttaaaaatggctcctatgtgggaacagtgggtagaacatacattccaatggcacagagtaaggagcctccaattgctcaggtccaactcagagaggtcatgtcctctggataatttcctccaacaccctatgcctcctaacttgctcttgcaatcttacacatctcccatcttctgcagtgtgccctgagtgcttggcagtggggttcattaacttggaggtggcttttttggcatctatctagcttcatagcaacaatataggcacctgaaagaggaacacagatctagatgattccccaaataagtaacagtcctgagggcaaactagagtatcttagctctcattcctgctgtgaatatggtcccatcagaaccttccaagacagacgcattggtgggtctgtttcacccccaaatccctaaaagagtgtttactttctctatagatttcaagggcatcacatcctcagggagactgtcctcattgggtcaagctttcctgtagtctagaataatccagtgtataagggagtgagtaccttgaacccacagaataccatgtagatattgtaggagggcacag

SEQ ID NO: 51213 - DNA, 1033 bp, Bovine  19866881489413
  misc_feature (1)..(1): n is a, c, g, or t
ngataatagatttctgttatatgcttggcaacattgttttaagttctgcagcttaatttctattgatgatttatttttaaagttacctgcataaagttgttggaaacttggacaggtatagttaagataactaactgttctaagctcctggagtttattgtttcaaagaaaatgattaatataattagcttatggtacataataaatcattgccaatttgtttctttcaattatattctgtatactcaaaagtttaaattgaattaactaattactttaaattacagttattgttgttcaatccctcagtcatgtttgactctttgtgaccccatgaactgctgcattccaagcttccctgtccttcactacctgcctgagtttgctcaaactaatgtccgttgagttgatgatgccacaataatttcacaattatagtagtaaaaatttcattctagtactgaaactctagaaacctatatgcaggtcaggaagcaacagttagaactggacatggaacaaaagactggttccaaatgggaaaaggagtacatcaaggctgtatattgtcaccctgcttatttaacttatatgcagagtacatcatgaaaaacgctggactggaagaaacacaagcttgaatcaagattaccaggagaaatatcaataacctcagatatgcagatgacaccacccttatgtcagaaagtgaagaggaactcaaaagcctcttgacgaaggtgaaagagagtgaaaaagttggcttaaagctcaacattcagaaaatgaagatcatggcatctggtcccatcacttcatgggaaatagatggggaaacagtggaaacagtgtcagactttacattttgaagctccacaatcactgcagatgatgattgcagccatgaaattagaagacgcttactctttgaaaggaaagttatgaccaacctaagtagcatatttgaaagcagagacattactttgccaataaaggtctgtctagtcaaggctatggtttttccagggtcatg

SEQ ID NO: 51214 - DNA, 1078 bp, Bovine  19866881604030
  misc_feature (1)..(1): n is a, c, g, or t
ntccttaaaaacttatgtagaaatttcttattattttttcatacactgtaagtattagcttgttataactgaacaatttcatgagaaaaattgcaaattatgcatcaatttttgcccaaaggtaagactttaatagatttaagtaagaaggagttaatcacggaaaagtgaaaaaagagaaagtgagaaaatgagtcttcattctggatatgtcatcctcagcacccttaattgaaacaaagttacacttgaagaatactagaattcagagcatttgaattttcaggtagaggattttaactttcttaatataactctgtatatagcaggagccaagagtttgcaatgagcctgaacttgagaagactttggtacaggaatgtaagagtgaacaagtagatatttttcaaaatgtgccttgtgtaaacacttattcctgccttccatggtataagctctttaggaaagctgccttataaaaagactgggctgccaatttcttagcaagctcaaatcctggaaatatcaccattgatgaatcacttcttgctgaggagccaatttgaaacagaaatgggcatgcaagctgctaactttagggcagaggcttctgaggtgtataaggatagaagagaagaacagcatgttttcacgttaatttggtccataaccttgacactaaagtaataatggaaatcccataaagtgtgaatgaaggtctccaaccaagctagtgaggatgttagataatacctcagttataaaacctcttttgactatatatatatatactgagtgtcttatacctcatagcacttaacctactgttattgtggagtagtaggacgagcacggattttgaagttagatgagtggaagtcagcacgtgagtacaataggtaagtcacttaacctttctcgcctttggtattttcatctgtaaaatgagggtgactagattacttgaaaggtctcatcaagcttcataaaatctatggctctacatatgtttaagatcagactcaaagtacagtagatatagtataaggaaaaagaagtaaattttttcaacagaaaa

SEQ ID NO: 51215 - DNA, 1607 bp, Bovine  19866880372852
  misc_feature (1)..(1): n is a, c, g, or t
ncattgctcatctgaagagctcatcgaaattggatatacagatgtggagtcagggttctttgattttataggtcattgacaaagcattcgagagcagaaagcttctactgtgaccagaggcacagggtggagagtagggaggtgagggtaactcacagggacaagtgtgccctgactttggtttcgcagcacagggagcaaaggccgtgacccagacccacattaccatgccttttcaatgtggttccagtgataaatgaaagccgtggctttccagtaagctgacatcactacagatatacacagcttcatgtctcctcaccaggtttaaacacttttgcttgacaaattcattgttccatgatctatctgctataacactatacccagttgttaactaagacagcaattagccaagtggaagaaaaacaacacaatgatttcagcttctttggatgcagattgggaaatcccttctcttttttcttgccatggagatctccttaagagtgggatggcaatagaagttaatgatcatgtatgtctcctagaaaaatgctcttattgcattacaaaaatctcaaatctttatgcccttgaacaacacagaggttaggggtgcagaccctttgttcagttgaaaaatctgtgtatagtcagccctctgtatatgaggttcctctatatcagtagttctgtatccatggattcaaccaaccccatgttgtatagtactgcattatttttaaaaaactaaatgtaagtggacccacatatttcaaccctctattgttcaagagtcaactgtatatgtattttaaccttgaaaagcacagattgagacaaaagcagagagttgtgttttcttaggcaacaaatatttttaaactgtcataatatgaaaacaataacaataacctttttatgtatgtgattatttccttttgaagaccccattatacacaggcatatggagagaggaaaaatagttgtgacaaattattttggaaatcggatgtgtgtttaaagggaaaaaaatgtatgagtaatcctgaaacgagcagctgggggaagtgtgactaccgttcatccctaaaagaagcagggattttaaagcagttcatgaactgaggtagttgaagaatcccaaagaatatttaaccactgtgcaaaaacttgaacttttatggaaaaatcaataaaagtttccattaaaatataggctgcttgttaagaaatagttgatatcttactaaatcacaatccaagtgttctacttgcatcaaggatacttttttcagaaaatggatataagatcggataaaaccagcagactcagatatgtatgtgtcactgataccacctgaaattttttaaatgacaaaagagatctacaaaaagaaaacaaaaactatgatgaggagtgataaaaaagaaagtgtatcatgagtaagtcagaaatattggacaattaaaacaaaatagaaaccagataagactgctgaagaaacatttagagagattagaatccaaacatacccacatgagaatgtctgcaagaggtctggtctaccaagggagcagcataggctgcagagagaggagct

SEQ ID NO: 51216 - DNA, 3055 bp, Bovine  19866880413398
  misc_feature (1)..(1): n is a, c, g, or t
naaacagaactgtaaagtatcaaaatggaaggtagaattgaagaacccaaataaaattcacaacccctggggaggctgttcacaccccagtgatttgttgacttatcatacattctaacacatgataacaaaatatcttgtgtcagcaaagctcccatactgtgataactttctgagaggaaaaataaagttttcttgagaaatggatgtacttttcaaatttgcatgaaggtaggtgggaggtgtctaaccagggatcttgaaatcatctgtatacccatgagtgctatgggctgcatttctaggcaaagagcagacttaactaattataaaaatactaaatgcttccagtttttaataatgaacccaaattatagaacttaatgtgaagatctattagaaaaaaatagagaagtgtaagatgtggagatggctttcctggtggctcagttggtaaagaatcttcctgctattcgggagacgtgggttttacttctaggctgggaagatcccctggagaaggaaatggcaacccactccagtatgcttgcctgggaaatcctatggacagaggagcctggtgggctacagtctatggggccacaaagagtcggaaaagacttagccactaaataataacagcaaagacatgaatgaggaagttatgtttaataatgagcagagagaagaaataagattaaggaaaataaatagaaaaacaagaatattaaaaaaatgtagaggctgtggccaagaattttctttcagtcaaataacattattttgaaagtgagatttataaacacaatttaacattcatggccttctgttttcagagaaagctttaaattagtggaaatatttttcacctcacttcgcattgtttttctattttcataaaacctgacttaatgtttttatttttaaatgtaactgtttcactgtcaaagagaaaaaaaaaaacaaatgtgctccagctaaaataaacagaaaacaggaagaaagagccttagttttcagggaaattgcagtatgccagatggctcatgtgttaataggaatattaagacgatgcgtgttgactccaaaagtcatcatttcaatcagcttcctcaaatatgactagtacatgaaaagctttaagggcagtatttatcggaaggacaaatgtaaagaccacagcattaatatatagtgtatatatcttatactattaacataaacataatatgtttatgttgttgtggtttagacgctaagttgtatccaactctttgggaccccatggactgtaacctgccaggtgcctctttccatgggatttcccagcaagaagactggagggggttgccatttccacctccgggggatcttcctgacctgggaattgaatgcctgtgtcctgcattggcagacagactgtttactgctgagccatcaggaaagcaatatgtttatagttccaattctaatgagttttatgcaattaaaaaaaaaaacgttatccccagttacaaagcctttctcctgcgcccagatgcagtgtgccacatatcagcaaaatatcaatcaaaagactaaaattaagttgtatttatcaaacctatttgacttcgctctgaagaataatttctctttatttcatatttctttgccattaatgaggatgttactatattgggttgcttagtggtgccatttgcataatatggtgcaatactgtttatccaatgtgaggagtatcattgattaataaaagaaatgaatcatatcatctgtgtatattgagaaaatgatcggaaatcttgcacgtgacatcagtagatggtagtgttgaaactaatacctaagaaggcacatttgatacaatttgattagatacattttgtacttccccatgattttctcataaagttaggcaccttcctgtgcagctgacaagactgctactaccctagggagagtgttttcaaaatgtcactaatgtcatagacctgctcttaatgctctaagtgagaaatcaggataaatagaaattgacatatgtattccccaggtacttattgcctgacagatacttttcagctcattgctgatgctggagagagaaaaacacagtgtcctatcctcaagggatctgtgtggacctgaaaaccaaaatgtctttttttgttttttgctttttatttccttaagaggtaaatcctttaagttaggcagcacttaatacacactaacagtcaaacttgcttttaacagtgttttctgccacagtgagaatctagagagagaacttcccgaggctgaattttatttgaaggtaagatatcaaaaggcctgttctggagtgcgagggccagagtttcacattgcagttgcttcaataatatcactttatttttgtctttcaaaatgttttcttggaaacacaacccattaatcctctcagttaaaaaatgcataggctgaatcgagcattgcttactaccccatcttgccctctcaaacatatcaccaagaggggcacatactgatatgcttgaatgaaatgccatcatgtgtgtttcaatcacgtatacgagattgaatgggttctttctctaatttcctaaggtgaaagctgctgctgctgctaagtcgcttcagtcgtgtccgactctgtgcaacaccatagacagcagcctatcaggctcctccgtccatgggattttccaggcaagagtactggaatggggtgccattgccttctccaaggtgaaagctaagggtgattaattgtagttctttcttgattcgtgcatttagtattataaaatttccctgtaagaactgagttaactgcattctacaagttttgaaacgttatatttttattttcatttacttcaaagaatttttctatagtttctctgagactacttttttgactcatgcattatttagaagtgtgttgtttactttctgaattttgggagactgttagatttatttctattggtgatgtgttctgtgcctgggctaagtgcttcagttgtgtgagcccatggactgcagc

SEQ ID NO: 51217 - DNA, 1428 bp, Bovine  19866880513113
  misc_feature (1)..(1): n is a, c, g, or t
ncacagaaaaacccactatattatacccagtaaaggcaattgctaatcaagagatttaagacactttcatctttcacctcaaaaactgacctgttaaaaactgagttctgatactaaaattgggcagcatgatatatcaatttttattgtaaattaaacagtttcatttaagaagttaggaagcaattacgatttggcgagtttttgtcaaagaacattttctccacaaataagtgacatggcacattatcggtgttaggtcaaaatgccctccttaaagtgtttcaatattaaagttaaatatttttttaagcggatttctttccagaatcttatgcatcaaatttctgtagcagcagcccaacatgagggatttactgaaggtttatttcaacaccaatctcatattatcagcaaccatcatgagtcactctttccactaagtgagtgtcacagacagacatgtctttagcttcctatgagaagatcctctgtgcaatgttgtgaattaaatacatcagaaatcatgcttacaagttaaaatgcttaaatagtatttcatttcaaatacagtgtctaacaggtgttcttcaaagtgacacttgagtactgctttttagaagacttcttagtttgtagcatctggtgatgtactattcctaatttcaatttctcagtggcatgcttgaaaagtacctgagtgactgtctttggatgaacacggcccttgtgccaaaacaaaagttcaggcaatagaaaattgcaaaattatgaagctctttatacaaaactgcagtctgcctggtttttgcaatgcaaataaagaaagcaatcttgatgcaattcatctgtgtttgaaatccccttgcattgcgctaaagtgttccttaattgactggtaaatcattctatgatcagtttagcaaaattgtttttctctcttttcccctgccgactctggggagctttgagcagttttatggtaactgttgcttttttccttcttttcaactgaaccgctataacctctgcatgtgataaacaagttcaaaaagagaaacaataaatctgtgtgtgagaattcaaatgctcctggaattaagtaaatataacttccctgtcaaacagtattgaatctgagacttgttattagcaactgaaaaatgtgagctttctgaatgcctgattccctccagaggaatgtgaaaatagaatgtttgcaaatataataactaggtctgggtttacagtatttcctcagagcaggccaggggctacactgttaccggccagttgaagccaggtcattgtataaaataatcagtgtcagtacactgataaaacaatatgagatactgtagttgaagcttttcaaaatgctagcgcctcagttggcagctattcctccagctatgttcttctaaagat

SEQ ID NO: 51218 - DNA, 759 bp, Bovine  19866880600589
  misc_feature (1)..(1): n is a, c, g, or t
ntaacctttttgtttttagagagaactgtgtgaagcattcctatatattagaaaccacgggaacaaatacaaattggatccctcggatacttaggtttccagcttttgtcatattgacaataaagagcaccataggatttctgatacccacctccctccacttgacgcagaaggcattttgatccataattaaatttgctttttcttggtaagagaattgaaatatcctacagtgtgttataagaagttttgacattatctttccatttagagccatgttttgacagctcacaattttccctctaaaagggcatgaaaaacacatcacatactaacggaggccctgctggatcagggaaaaatcagatctttcagccagactggagcttttgataattctagatgcatgatgaacgaagtcaaatcacctccaaatattactaatatagtgctgtgttagtcactcagtcgtgtctgactctttgcgaccccatggactgtaacccactgggctcctctgtccatgggattctccagcaacaatactggagtgggttgccatttcctcctcctactaatacagtaaggaaatataatttattctactgtaaatatttctcattatgaaagcttcctcctcctcccccctccctctccccctcctgagaatagacttgtagacaaggaaagaggagaagagagggtgggacaaattgggaggctgggatgacatagatacactaccatgtgtaagacaga

SEQ ID NO: 51219 - DNA, 1676 bp, Bovine  19866880688674
  misc_feature (1)..(1): n is a, c, g, or t
naagtagaagtagatatttttctggaatgctcttgctttttctatgatccaacgaatgttggcaatttaatctctggctcctctgccttttctaaattcagcttgaatgtctggaagttcactgtttgtgtgctgttgaagcctagcttggagaactttgagcattgctttgctgacatgtgaaatgaatgcaattgtgtagtaatttgaacattctttggcattgcctttctttgggattggaatgaaaactgaccttttccagttctgtggccactattaagttctaaaaatttgctggcatattgattgcagcactttcaaagcatcatcttttaggatttgaaatagctcagctggaattccatcacgtccactagctttgttcatggtgatgcttcctaaggcccagttgacttcacactcgaggatgtttggctcttggtgagtggttataccatcatgcttatctgggtccttaagatcttttattgtatagttcttctggagcatgttgaatgtctctataattttattcatataacttcaaaacttggaaaaactgttgtggctattggtgcatagcatactgctattgatctgtttatataaataaataaatctataggtcttccctaatggctcccaatgagtcagacgagactgagtgattgaactgtactgaactgaactgattgctcagtcagtaaagagtctgccctgaatgacctgggttcaatccctgagtcaggaagatcccctggattaggaagtggcagtccactccagtattctagcctggagaattccatggacagaggagtcttgtgggttacagttcatgagtccatctctctctctctctatatatatatatatatatgtgtgtgtgtgtgtgtgtgtgtgtgtataaatatataatatgcatttttgtaaactttagctgtgctgtcaactttggaaaatgtgtccccattgtaccttgtcagcttggcattgtacagaaattaatagtcatgttggtctagaaaggctaaacataattttctctatttgtacagaggtaactcactgaataaggcttctctggtggctcagatggtagagtctgcctgcaatgtgggagactcagcttagatccccgggtgcggaaaatctcctggagaagaaaatggcaatccaatccagtattcttgtttggagaattcatggacagaagagtctagtgagtgtctatggggttgcaaaaaatcagacatgactgagctgctaacacacacagctcactgtaaatgtaaggttttatctacatgggtttgattacaaaaactagagcattctctaaaaaaaagaaaataataataagatatatcactttgccatcaaaggtccatacagccaaagctatggtttttccagtagtcacatacagatgtgagagttggaccataaaagaatactgaatgccaaagaattgatgcggtcaaacagtggtgctggagaagactcctgagagtcccttggaccgcaaggagatcaaaccaatcaatcctaaaggaaatcaattctgaatattcattgaaaagatggatgctgaagctgaagctctaatattttggttgataaaaagccgactcattggaaaagactctgatgctgggaaagattgaaggcag

SEQ ID NO: 51220 - DNA, 1114 bp, Bovine  19866880840956
  misc_feature (1)..(1): n is a, c, g, or t
natgtaccatagtttgtttattgacctattgaagaacatcctggttgataccaatttgaaagttatgagtaaagcagctatcaacattcatgtacaggttttggtatgaacaaaacttaactcacttgggtaaacacttggggacgtgattgctggattggatgataagcctccatttggctttataagaacctgatgaactgtcttccaacatggctgcaccattttattccccccaggaatgaatgagagttcctgttgctccacttcttctccagaattcagtgctgtttgtgttttggattttagcagtaatagcagatccttgtgtttacattaaaagaaactccttcccataaaactccctcttgatcctttgttggtcgcatgcttgtgtggtgggagattgatgttggcagatggttcgtccagggctgaccctttcctttgtttccagcctgaagctaaacttgagagaaacttgccaatcgaattgcataaagtgagctgtgtagcatcactgacgtgggctgtacggagaactccctaattcatcttgggaatagaggggcgcaggcatggagctgatctttgacctcatctcccttagacggtacagggtttcataacatcagtcctcctgacacagcagaggaggagagtgagggctggggaccaggagccgagggtaatgtgcctgatgttccactagttaatccggtgaccttcaagcacatcatttaacctgtagatccacagagatgtgtactatggaatttgtaaggccctcgtaagcgccaaaattctgattctaaagttagtctcagcgcaagtcatcagcgcagaacaaaggaaagaggccctcagccctcactcggaggcagacatgagttcatcaagcagaaaactctctagtgagttgtcagtctttgaagtggctgagacttgtgacagggaggcctaaggtaaatttcttcaggggagatgctggaaggttcacaaaggggatcctgcgtgttgtcgacctgagcgtggggatcacagggagtcggagttggtgtctccggctggttggggtttggttgctggtttgcatcagccatggcgaagggaa

SEQ ID NO: 51221 - DNA, 1421 bp, Bovine  19866881128556
  misc_feature (1)..(1): n is a, c, g, or t
naattgattgctcttcctggagaatgtgtttgtaccttcttcctacagggcatgcattagaatccaaaaatagctccccactcctcccctcaagatggttttaattaataaaaatgtagaaaaaagaagttaggtcatgtttaatatataattcccatcagaagccagacacttaatagaggtatatcactgatattattcagactctgtaaatgctgtgcagtggggttcatggctcactcttacaagaattcaaatgtactgaagattttcttgtctctttctccaccttcccctaaataaactagtgtaggcaataaaacccttggtggcataattacctgtaatgggatgtcattcatgaaaagaaattaaaagtgaatgaaatcatttttttctacatggagagccttacagaaatcagtttcattgccttagagttgcatacttaaatttaacaatctgttttagtgtttcctggaattgtaagcaggatttttcatgcctggtgaattgacatatctgaaggagaaaatgtgattaatggagatagtagtctaacaaagtgaaaagaaaatgacttttgggaactttataattgtggagcaaatcaggtacatcttgttggttgtatgttgacagccataataatgtgatatcatggtaacagaagaaactttgtacataacctcggtgctcactctagtattactggtgaggaatcttacgctcagatggtgaggcagtttccaagttaaaatcatgctgtagtctatgcaaaaggcgagacatcgtctccactaattatgatgactgtgggatagaattgagggtgaaccattgtattcatcttcctctctttagagttcagtattcagtgtgccttgaaccaactcctgagacagaaggcagaatggcattgtaggatcatccttactggcttttataatatactttgacattttcatatggcaggtaagagattaaacataaagtcctttttatgatgacactctgataatttaaataacagacccatctgaattattatctcaaagactctggcatttcaaatctgttgtcattttaaattccctgaagaatggggagcgatgggtgtctgtttatttgtaaatattacagtgaaaggttgtgctgtgcttcatttaaattaaaggtgtagaacctctttgaaatgttgctggagttataaattaactctgaatgacctattaaataatacctcattcattaactcaaattagatgaatctttctataacatgctttgtctatttgtttatatttaactctcaagtgtattctgtcagcaaacaaaggatttgcaagaagactttcatcactttccaagaccactttgcaattgattcaagttgtatcttttggaatgtaagtcaaaga

SEQ ID NO: 51222 - DNA, 1040 bp, Bovine  19866881131740
  misc_feature (1)..(1): n is a, c, g, or t
nggcgtgcagggaaatattggtatttgaattagagtctaatcggagaagcagacaaggtgacgtgtttcagccttgtcttttttgtagccaattaccccagactcctagtgttcatgtcttctatgcactttctttaattagcgctttaatagctcagcttcagagagctggtgcgggagagaactttccccaaaactgccaaatggtgacaagcaggaggtgattaaatctcggctcgagcagtaggcatctacatgcgtcctttgtatcactctgtgcttttcgagatgtgttcccaataactcctgaccagagggatgcgatgctgtcagtaaatgcatttgagaaagctgcctggcatcattggctcctgtctgtatactatggatttacatcagttttcttaataagggtattgcctctccattaagcaagcactagtttatgttgggtggggaagaaaaaaaaatatttatgtagagattgttttattagctctgaactaggaggagaaaaattttttttaaatgctgcttcatccttttattagcccttcatgttttaattatggatggggctcaatggaatactcttggcttagagcattaacccctttgattagatacactgggttcagtttaatgtaaactgtgttgatagccaataattaaaataagaggaaaacctcatcttaatgtttcttgtaggatttgaggcagtagcttccataatatgatattaaagagagaaagtctctatggaaatttgctgaaacttggggtggtttctttctttcaaatttatcatctctgaattcaggatgcatattacaattaacgtgagaaaaaactacttcaatggtacatcatatcattaatggcaccttatgtatagtatgtagttttcagctcagtgtttgtcttaatgtaaaacaactggcattaaaaaccacagtacttaaaaaaaaaaagtattatgtgttttattactaacaagataaggaaacgtcatcaatcttttctttatttaatgatttatc

SEQ ID NO: 51223 - DNA, 1579 bp, Bovine  19866881154489
  misc_feature (1)..(1): n is a, c, g, or t
ncatggctagatggtgcagactcagcaggtatccgagatggatgagacacatgctccttctctggtgaagttggagccctggatgcacagaccctgccgtcccctgggtgaagctgagagctatacgatctcttccccatcttaggcagtgcgtggggtcaggcactgtaattaactagagtgtgtcctgaatattcgtactaccttcattgagtgtgattttgtcttcttttaggaagcaggaggtttttaattaatttctccatttcccacagagggaatgtgtgaagttttgctgaatttgtgtggtttagggggtaagaacggcccaggacctcctattctgccatcctgctgatgtcattcttatgtgaaaatattttctaattcaacttcaaaatctatctgataaaaacctgatgattgtaggaaacaggatttgcttgttgcaacatacttttttatttttagtagggcaaatcctgacaactgatcctgtgcttttctcttcatgccatactttcattagaggatttttctaacccagtggattactatttcggtgacttcagtgattttggtctctaatatatttttatatttcttaagtatctctaatttcctttctttacaagatcattatatacttcatgggttcaattctgagacttcagatatcatttataaatatgcttaggtgtctaggaaatctttacccatgaaagtatttttcatatatataaattgtttagccaatgatagtgcaaatttattttaaaaaaaaaggacacattattaaaaaaagacccatacatttaaatgaccagacaccaacagcttgaaatctagcaaggcttagcatcatctctgctaattgctgctgttgcaaattaatgggaagccttttaaatctcctgatagtggttatgcaactttctgcagagagagaactctaggcagaacataacagatgcggtcattaatatgcagctgcacatgcttcaaagctctgggttttgtgaatcattctctacctcattatatgtctcattgccaaaatagatcagtgagcctcctgtctgagagacaatggaatggtccattttatagaagtcttattcctttctattaagaattgaatatgtaaaagttaaactgtaatctctttgagaagattattttgacaaagcatatagtttaatcattattataacttttacagctaaagttacttgtttattcttgatccaattgcaggaatagttaaaattctgaatttccatgaaatcattgatgggttattttatggacatcatcagtgtttccagtattcttagaaagagaccaggtacatcatacagaatttgtattaattttttgttcttctttaaaacaaaaacagtggaatttctaagtaacttgcatttaggtagccatttaaaaatgtatatgtatacacgtgtgtgtttatacacatttgtgtgcatgtgtctacacacacataatatatacaaacatatattagcaaagacacctagaactaagcgaatggataatagaaattagcattttccctgtt

SEQ ID NO: 51224 - DNA, 1443 bp, Bovine  19866881159824
  misc_feature (1)..(1): n is a, c, g, or t
naaaagttctttgtattatgaaatgtagttgaatatatccagatgaaaagaaatgttcattaatatcctattcaacttcctatagcatcttatgccagttttgttttttaaactgttttaaacaaattcatgccctgatcttttaaaacttttatagttttgagttgcagtaattgaaatactcatatgtcagtgaaaactgaagtaaaactcaatttcttacaggtaccgaaaacatacgcaaaacatttctgacattcatggcaattaaatgaacacatgaagaaaataatcctgatttaatatggatgtaaggtaataagatgttatgcaaaatacactttcaaagagtttctgaagaacatgtgaaaaacaaagtattactcaaatccaaagaatcctatttaataaaggctctgctactagcagctatgatagccaaaagacagaagagaaatgatagaatgattaagattagaaacacaatgcaccaaatatttgtttaaataaaccccaaaagttggttgcaattactttatcaacaagctatgaatgcatctggagcaaagtatctaaatcattttgataatcagattcctgaacagtcacagtcccacagtcgtaagtgcaaggacagtatgttatatattttcagtgatagtaaagggagaatgtcacaaactagacttaataaggaggtaaagagaagcagttccaatggaatgaatgaggtgatcagtgcacataaacatcagattattgatcatggaaatagtattttaagtattgaacacctgattctgtattcatttataactatttacttgcaataatttagcattattgatttttaaagaaatgtaagccaatgtattctcaaatgataagaatagggtccatcttcacttatttttataatagttatacctaacatttttctcatatgtgaacactttacatcatctcaaactttgcaaaaaaaaaaaaaataatgaaaactgaattctgcttcaccagttactttggttgtagcattttacctcaaataaagagtcctcgactagcatagctccctcctaatccttctaaaaaagtaaacccctaaaaacacaaatttctttcaagtaatttaactgtgtccaagaacaaacctgtttccaatagccaacaatataaaatacacaatatttgcatgtttagcaatatttgactagattccaaagaaaacagaacatatgatttataactagtagagaaatcaatcaaggcaaatcaagaatgacacagatgttagaattagtaagtaaggacaataaagtattttgaatggttgacaaattaaatagagacataataagtatagaaatacccagagcggacttcaagagatgaacactataatatgtgagatgtacaacagtgggacgaaggttgatggcaagt

SEQ ID NO: 51225 - DNA, 942 bp, Bovine  19866881245944
  misc_feature (1)..(1): n is a, c, g, or t
ncttctatttccccaagtatctggagctctaaacttccatgacttatttttcctttggtgactgttgtccaatttgcttttattggtcttcaagtaagaggtggaccttttcaaatccaatctcattgtctttggttcagcacattttccaggttccgctgtttgtgttttcttggaaatgcaggaatgcaagagcattttaagaagaccagctcttacttttaacatttcacaaaggaacagaacacacttgatgtatgttctccgagtataaatttatggcacatttttcaaggcattcactgtcaattcagctacattgctattttggactgttttatgatgtccatttttctcagcctgacacttcggtgggtcctaacacacacacactcactggggaagtctaaacactagagaaatacagggctatcaatcaagcagaaaacaggtgctgagaacctaccaggggcaagttctctgccgggagagggtgatacagagagaagcaaaacatcgtccccagtataaaggagcctggggtcttgttaggaagccagaatacacatcatgtaaaccaaatcactagtaagcacaggaaaaacaccactacattctaaagaaggatcagaggagaatattttaagatgaagttgatgcaaaaacttaaagttgcttaaatacacggtcagcacttttgacatatttcagcatttttcttcactccgtttgagataatgcaccatagctccagaatcacctaaggtcttttgttcaccaccaggaactgcaaacccgtcttctgaattcatttatctacatgggactggactttgagtttgcccatgagaagcatagtatgagtcttggaatgcttgggcatggggctattttctctagcaggagttgcagccagacgtgcagacagacatagacatcagg

SEQ ID NO: 51226 - DNA, 1164 bp, Bovine  19866881281321
  misc_feature (1)..(1): n is a, c, g, or t
ntagagttttatgcattaaaatttgatccacatttgtgtgtgatgtgtgcttgcatgcatagttctaaagaagggttctgcaaaaatatacatcacattgattttataacaagcttccattattgaaagaaaggcttgaaatgatgctaaaattttgtcagggtgtaagtgggtggggagacttgaaggctgagggcctgtggatctgatatagaccaaatgcgtaacagatccttttagccatggatgtaggtgggaggagctggaaaaaaaaagggcaatggaagaaacaatcaaaggttataggacttttgtgataggttgattttaagtaatgcgtttcttagaaattatctgttatcagcctcagcctggggagtgtatgcagcacttctcataacacagagttaaaaatcatgtcaatcccaagtattcatgaggcttccctggtgactcagtggtaaaaaaaatttgtctgccaaagcatgtgacatgggtttgatccccgggtcaggaagattccctggagaaggaaatggcagcccactccagaattcttgtctgggaaatcccacggacagaggagtcagggactaagtccatggggttgcaaaagaattgaacacgagttaaagactaaacagggaggggaaaaagtattcatgagcaattttaacaacagttttgaattggatagtagagaaaaaatgtggggttgctgtatattcaacagtgttcacatgataagaaagtaactgagtctattgtggatgaagaagcagttaaatttttgagtaactgtacaggaagctacagataagtctctgctgttagaacatcacttcagattcaagtaataatggtgcattcttgcataactttccccagatattgattttccaagatgccccagggttatattaataagtttaattaatgtaattcatcattaactccctagttagtatgggaattcagcatatttctcccctgttattacaaagttcctgattttgtgtgggtttgacctagtttacaattgtttaggactggaaaatcacaccattttgactcccacatcattcttctgacttctgagatgctcagactaccaactcctggggaattctcccttatcctggaccacagcaccagccatgggtt

SEQ ID NO: 51227 - DNA, 816 bp, Bovine  19866881296186
  misc_feature (1)..(1): n is a, c, g, or t
ntgttttgggatgagccaagctcttgatatgagaatatttgttttgtatatatggatagttgatagaaagcagtttaaagaacaataaagtcccaagaattaatttcaaatatgctgtaaatttttaaaaatgcaaagaaaattaacttgcactcattcaagttacaatgaggctgattcttcctttgttagacctcctatgtctctgtctgtgtattttttttattgagtcaagtacgtattttggatattcccttaatctaagactgaatacggaaaccttcaatatttaattataatctggcatattttccaatataactagtcattctttgattcctgttattgtttgttttgtcttattttgtgttcgtcaatgggcaaaataaaaagaaaatgttgatatgagatgtaggagaagatgaaggttcaaataggtttatcatttctatttcattatgtttagttttaattgaaaaaaatgcaactaatcctacatgtatttttccacaaagcctgcaagattgaaaagtaaatgtggcatcagtatgatttatgccacaatggacgatttttcctaaaaatctcaattaagcttcctctagggctagcagttttgaaggaaaatactgtacttttccctgtggcctccagtagaaatattctaaagttaactaacactttttctttgtagcaccatataggaatacagaagggccaaagccttgagatgtgtcaaattactttcggaaataatgacttgttgccatggtaacctagaacctaacgaatctatcacaagatctcagtccaggt

SEQ ID NO: 51228 - DNA, 905 bp, Bovine  19866881378242
  misc_feature (1)..(1): n is a, c, g, or t
ncctgcacctcaaaagcattcaggcagtttgcagaaagaactgactgacatgagcagagggagaagactgaaaacccaccattctgaagtctcttactgggaagacttactgggaacagtttccttggcttcacaatccatatgcccttctctgtggtacaacggttaatgcttgagtcaagcctaattttaaaattctattcagtaagtccctttgagagattgtaagaaatggttattcaatttaaaataaagtttacatcaagcatccctggagaagggaaaggctatccactccactattcttgcctggagaattccaatccatggggtcccaaagtggacacaactgagagactttcacttacatcaagcatgaatggagaggaagattttgaaatgatagttctgttagtgggaatattcaccctgtgtatattaacttattgctattttgttggttgttgtttacttgctaagttgtgtctgactcttttgcaaccccatgaactgcagcctaccagactcctctgttcatgggatttctcaagcaaatactagagtggattgctattccctcctccaggggatcttcccagcccaggaatcgaaaccgcatctcctgcattggcaggtggattctttaccacgatgccaccagggaagctctgttgctgttttacattgaccaattcatggcacacttaaaaagtctcatttagaatgctgcactattatacaaagctcaagcttgcctttactattactggatattaagctaattgttataatataaattttgttgacatcttagcagaaaattgattatggcataaaagtatttgttcagttggtctcacatatggaaaatcttaattgtagagctcttggacacagaaatatat

SEQ ID NO: 51229 - DNA, 620 bp, Bovine  19866881894658
  misc_feature (1)..(1): n is a, c, g, or t
nccactgactcatgaatctgagcaaatgagtgaatggatatgaatctgagcaaactccaggagatagtgaaggaaagggaagcctggtgggctatagtccatggggttgcaaagagtcagacataacttagcaattgaataacaacacaatattagtgatagtcacttatatatatttaaaacataggattgtttagcttgacacttgaaagcattacagtatttgagtccagattttagttgcatgtctttctttgcatactatttaaagttaaagccttctataggaactccatccacaagaggtggcaagatttcatcagtgaaagacgtgtaagttttactgaggttctcccaggtaacgttgcataatattaagtcataatgctgaagttattagatctgagcaaatagcataattaaccatctatgtttaaataggagacaagtgagaatttataaactaagataaaatatgcattatgtaattaaggtatgtaacattcttttctgtaaacaaaagcaaacacagcttttttccacagcgctaatgtcattttggaagtaccatgcttctcgagggccatcaataaaggcactgcatccatctttgtcaattt

SEQ ID NO: 51230 - DNA, 883 bp, Bovine  19866880386091
  misc_feature (1)..(1): n is a, c, g, or t
ntaatatatggtaatatagcgcacagaactttgcctggatggaagaggagtttgggggagaacaggtacatatatatatatatatggctgagtccctttgctgtccacctaaaactattacaacattattaatgagctatatcccaatataaaataaaaagtttaagtaaaaaataaataaataaaaacaaatcagaaaaaaaaagcttgttcttctaagcttgtcatttggttcacactttctctggatgaagaatttagaagagtaattatatatatcttgaaaaaaatcttcaaactacagagctgaacttcagagaagtttctacaagggctacataacataggtgaagctcttttccaagaggtaacaaagccaggcaagatctcaaaactggtcactgttatgagagtatgtgcttttcataaaagagataaaaaagtgaaatgctttttccctcccttcaaggaaagatgtgacaatatcagaaaagatgagaaaagtaaaaaaacctacctcatccaagtcatcatcaggagtagctggtgttcggtctgttctaaatgaggccatggatgatgtttcggaatccatggagtcctcatcatagccaataaatgggtccaaaacaggcctctaatggagggacagtacacatttaccagaagaactaagtggggaaagtcagcacattaccaacacgctgtcaactgtagacatgcaatgaacagagaacacacagctccttcaatgcttctttgataaaataaacatattaagcatgaacaccataattccaataaatgcttcttctggggtatttcactttgatactttggaggaagattcattcatatttggctctcttcataaaacccttgg

SEQ ID NO: 51231 - DNA, 1199 bp, Bovine  19866880388068
  misc_feature (1)..(1): n is a, c, g, or t
nagataaaggaaaggagtgagtctgaacaaggctgtatctcatccagaaaactatgagatgcttagaaaggaagggattccttctcactggaaaagaaacactttttgtttttttatgtttttattcacttaaatattttaggaagttggaggaagtaagatgcatttactataagcaaccaagagaagtaaaatggtcactgcttccagctctacagaatttgacaaaaggtcagaggctgacactgccagcagagcacctccacttttcattcttccttcccatcaaagcttggactgaatacaatttcttcttcccaactctggtgggttttgactctgaactgtttcgtgaagccacgcaagggatgagatgctcaactaaggatcttctgtctcacacaacaccctcactcctaccttgtccaaaagtgttaggacaatgcacgggatgaaacgtactcgagcaatggtctctgagcactcccatcaccaagccaatttttccaggatacacttgaccgacttctacctggacctccccactcaggatctctggagctcagagaatcccagagatcattctttgagctccacagttgattctagagcactcttctcattgggatgacctattcccaaaaccatggggtccctacagcctgatggttaagaatagcctgtaaaggcccatggatgccacctaatgtgagtgggggaagtgtgggctctttgaggtactgatcactgctataattacatcccagtttcggctgctccatgaagaaagggaccctgtctttttcaccttccctctccaaggcttggcacatagtaggcattcagtaggtatttgttggatgattggctaaagatgctattgaaacttttgaaaatgtctcttattggtacgcataggaaatatttcttctcgctcattagtcactttgcataaagtgcagcaagaagctctgagcacagcagctgcctccatttaaacaaggtgataaaatctttcatctcgagctgaatttaataaacacacatgagaaactcattccaatggggggaaaaaaatgcccttattcttttcctgaggagaacagatctgcccaaggtgggggaagggtggtgggtggagaacaccagagccacttctgtgctcagaagccacaaacaaagctggaaaggggctgaga

SEQ ID NO: 51232 - DNA, 1480 bp, Bovine  19866880397545
  misc_feature (1)..(1): n is a, c, g, or t
ntcaaagctagcaaggcagtgatttgaaatatggcctgtggtgccgcctaggtggtttagtatggattacagaaattggaatgaattccatttataaacaaaacttttttccccaaaggtctaccatatgcgagccctttgctatgaacagctgatgcagttcagtcattgtggtacaggaactcccaacaacacagaggagacaaatatattttgtgctaccaagtagattagctgagacatgggccaggtaaagccatgttcagatggtgtgggaaaccgagttctgaagaatgagtaaggagaaggaaaatgaacttaaaggagcaccctgcagaagaagattataagcaaaagaccagaagtaagagatagtgcagctggtacttagagctgcaagcagtttcctatgagcagaggggcggagcagagtgcgagtactaaagggagtaaacatgatctacttgtgtaagtgcctgtacctcactgtcgatgtgtaaaaaggtcattagattaaaatttttaaatacatgtagatactctagaagaggtagctaaaaggaaagaagaaggcataaaaagtatctggtgcctggaagccctcaaaaatgtcagttattagagaaataaaactacaaagcagctgttttctgagatggataccttatttgttctctgatttgagctagaacaaaggacagaatctgggtaggccaaacagaaatttaatgtagtggtcaatagccagacagacttgaattccaatccaggtgttaaatattagctctgtacccatggccaggtttttaacctctctaagcctgtttcctcatctgcaaaacagagataatatacttcattcacaaagctgttgtgagggttaaatgcaatactatatgtaaaataattagcacaaattgacacagagacagcactcaaaagtggctgctcgtattattacaaaaggaggcaaaggacatgtggcagtgattggagaacattcccagaagatgcatggtgataaggacaactgtgtccactgggcatacatccatcttgctgtggctaggtctgttgtaaagaataatcccatggatgaataggcagacagccaagatggcttgatcttccacactagctctagccaggaaatctctggagtgtgagtagaatgtgaatcacctgcttactgtaaattaattattattatgcacccagcaaagagggaaaaagtgcttggtcagaattaatcaccttaaaaaacccagttattttagattcattacatttgaaatatggtaatgagacatttgtcacttttataactctgtgggggagagtgcctattgtaggatggaaaaggattaacataattttaagagtgtgctctcctttttttcctttttccgtattcattgaaggctactatataatatatgttgcatatccccactttacagataaggaaacaggctttgag

SEQ ID NO: 51233 - DNA, 1610 bp, Bovine  19866880508873
  misc_feature (1)..(1): n is a, c, g, or t
ntagaactgatggatcctgggattccagttcaaacttcagtttggagaactctgagctcaatgaaccatgtcataaccacatcagcttttcttctttctttttcttttgtttttcccttagccaaatagaggctgaatggatgggctcttggcaacctcatcacttctattgtgttctcatcattatttaaacaaatggtattcactggggtccaagtcagaagacaggacacagagaaggctttttatcagtcagctggactgctctttgcttttcccaagtcttttgtgttccccgagggtcctcaagtgtggagaagctcacaaaggaactaaaatggacacagcctttgtctgagaagggacagccagtcagtcccctctgcccctccgcagatgtcttgatccttttgataaaacagcacttttttacttaaggcacttacacatgctgttaaggcactaggggcggcagaaatggaaagagtcatgtgcaggttttttacaagaatcaatttaggcactaggacatacacagcacagaaaggtgttgaaagatgctggctctgcagacagtatgcctccgttccaataattataaaagtgatctcgaaaatgctttcacctagcgagacttagatccctcatatgtaaatgggaacaattattacaggtatttcacagcattaaccagagaattaagtgaaatactgcatgcagcatgtttattggaacattttgtgctttttttatactctcacttttataactatagctaaggatagatttatggagggaggtggccttgggtcccggaaaggggaaaaattatacaatgtttcaggcccaagtccagggagtcatgacatttggagaataaaggcatctgcaatttatcttttcactctagggtatacagttagtgaaatattttacaaatctgaaaagtttcaagtaaactatactagtttaacacattgatgcttgaacttatttcccataccacatttcccataaataatagtccaggaatttttttctttgttacctctttgaatcctataaaaatagggtcagtttagttcagttcagtcgctcagtcgtgtccgactctttgcgaccccatgaatcgcagcacgccaggcctccctgtccatcatcaactcccggatatttgaaaaaaatcagtgtatttgaaaattcataatgaatgttaggatacagtctctgaccaggcctgtatgaaaataacataattcagcactggccaaattaatttgaatatgaagtactgctgtctctactgctgctactgttcttgggagtgagggagcagaagggtgcatataaccacaccttggagagtggcggtccatgggacttggtttggaagctctccagattattcccaggagtggatctgatgttaacctgtctcactcaaatgtgtgctgtcagttcaagtgtttgcatgcagagtgtctagtccatcaaaaagtgttctttgcaacaatgatagtgacactaggcgttgttcaaaaatagtggctcttagagggggagaatgaggggaaggcagagttagggagtttggggtggacatgtacaca

SEQ ID NO: 51234 - DNA, 621 bp, Bovine  19866880548172
  misc_feature (1)..(1): n is a, c, g, or t
naattaaagaaattaacagtcttgaattagataactagtacaaccactttatccactccctttaagaaacattatcagataatatgaaatagaaagagaagacactgtggaagcagggaccatttcaccctataaagatcaaggataacatgcttcaggaaaaggactttcttgctctgtggggtggttctcagaacagcaaccaagtgcattctcaacagactcacctgcgagcctgcgagggggtgaggatacttacaaaagctcagcgcacattgcacacttgttgccgtgcgtccttccgtcaggaccaagaactggatcattttccctcgtgcatccaagtcttccatccctcacataaggccgaaaatcactacatatatcctgaagaacagagaaaggaacgtgacatttaccatcctgatggtaatgcttacaacactgccttcagaaattttatagagcccagtggccctctgctcaggacacactagctacctggagcagtgccagtgtgtagaagcaggtcattaagtgctgtgtaattcacatggttaactatagagctcatttacttgtttattcatttgttagtaaacgtggatagcctgtgatgtg

SEQ ID NO: 51235 - DNA, 948 bp, Bovine  19866880623720
  misc_feature (1)..(1): n is a, c, g, or t
nctggttgaaactgcaaatgaattctatgtggcacatactccctggggccctgactcctgacaaagaaagtggtagaaagctggatcagtttatgagacctgtgagctgtgagatcagggtcatgctgtgattacatgaggttcaaggagcatcccttatgtcatggctgcacagtgcttcccacaggttagataggtgtcctgttattacatttagccaaagagagtatagaataggaggtagggatgggatctgcaaattcctgcgtacctttggagaaaaaggtcagattcagaaggctagtgcattacctccatatatgagacacagtagattaatggacagactttgctggtagattttgcccagatcagctggcttccacactggtgtgacagacatggaatcacttcacacatagcaatcatagattaattctgtgctctagagtccacaggaccattacacacttacatgtccattatcatcttacatgttgatagtgctctactgttgacaaagcagttccacacacattatatctctagattcatagtatcctggaagattttgcagaactgagaagatttagggaggtctaagttgttcaagttctctatcagtagctcaataactagcatatattagatgctatgcaccagacactatgcttaacattttgcatatcttttctcctaacctcagactagctctgcagagtaccactattgcctctgttttacagatgagggaactctgagctgtcaaaggatctgctaaagtcacacaacaaatggcagatccagaatttaaactaaagggtatgacttcagaacatattctcttgacaattttgctatactgcaggtaggtgtcagtgatagaactaaaacttacatctgctaaaatctagttcagtattctttctcccacctactaggatacat

SEQ ID NO: 51236 - DNA, 765 bp, Bovine  19866880687565
  misc_feature (1)..(1): n is a, c, g, or t
nagctcaaaatcccttttaacttatgtcctataaatgaaatttttgccatagtgaagttttagtggtagaagaataaatcttgctttgtattttaaaaaaagaaaaaaacaacactgctcacataggtggcatggatcttcaggaggacagagatgatgtggggctcatgggtcatcactgaagtagaacaagtatattctccactagtaatagaacaaataaagttttgccaaatgatttttgctacagtattttatttcaacttactctggtgattttcagtttaaagctctggccaacttgttcttttttgcctattgattgtcaacatgttttgtaagcccattgtgtgattcatgtattcagtgtcttcaacttaattcataagttcattgttttaaaatgaagcatgtctttttaaccttcctaggttttcatggaagttataaaaataatattcatcagttctgtgctgatgcaaaataactggatcttatgtgttatattacatcaaaatagatgcacagcatagatatttttaaaaaaatatttaattgcattttttgatctgtcaaaatgggcaacatagacattttgttttttaaatatttaattgtatttcttgatctgtcaaagaatggcacagcatatatatatatagtcatatatatgaatgtgtgtatatgtacttatctactatactgaaatggctcagtataacttgagagatcggttatcagagcaagtcttggatgactgtttgc

SEQ ID NO: 51237 - DNA, 3274 bp, Bovine  19866880725445
  misc_feature (1)..(1): n is a, c, g, or t
ngagagttgtctgagaaccacaccggctattgtcctatagttcttgcccaaccaggaaaaatacccattctatcctcacagccttcctcacaactgaggaaggctatgagggttcccatgagtacagagggggacccatccctgtctaaccctcagctggaacctggccttcacccgccagtggctgctgacaggcaaccaggtccacttgagagctctggccatgggaaacacttcccttaagcgagctgaaataggcttctctgcagctttcacccacatgtcctaatttcatcttctttaaccacaaagaacaagtctcccattgcctcccaagagaatctttcagaaggccgcagactgatggagtgcttgccctgtggttattgatttccatgccattctgtggtgttcccacagttacactgtttcagtcatagtttccaggccttcttagtcattgaccaacatgttctaatatttgtctctgcccttttttgaaggcaaaagatactggaatctgggccccttttccagtataaacagagatgctttccttagcagttcagttacacaagatccagtcactgtacttacgtgactccattaatgacagattatggtgtgtctggtgcgctttagagctcggcccctccccacccttttaactctgcaaatgatcctaaaagatgtcctccaggtctactaccctcgtttgcatccacagactgaggattctaatatcttattcaaatgttctcctgaatttcatgattaagtatagcagccttgtgaatatctatggatgcgtgtcttacaggtgttttatcttacaaagttcaaattgaacccacccactttctctctatgctccatctctgcactgaggatagtaatagtatttacttcacagagttgttctaaagttgaggatagcaatagttctaagaagtaaatgaatgaatgaatgtgcataaagcacttaggattgtaactgatgaatttacttacatattgctattatcagaggatatagaaaacaaataaggtataaagtttgaagagggaatggttatatggaaaaaatgaaacaagacagattgagaagtgttggtagaaacaggatgatgctacagggcagttttggaaaaaatgactatatgttcctcagtgctcttctttgtgaaatacatgtctgaagaaattcttagtgtattcttaaacactggtcattctgagcctttttcgttattaaaatgctcagtatgaggaaccttctttcctatgtctgaagtcactactaggtccaggatttctctgaactcatcagaagaagtaagttcatgatgaagttaatttctgaagaacaaggattgcatttgaagatggcaacagcctgctttgtaaggatttatccaggtcaaatgtcaacttgctaccaagaaggatcttgtggatctggaaggtgactggttaggcatgacattagagcattgctactcaaagtgcagtcctcagaccagtgctggtcctcaatctgttgctgttctgaatgtgataagtatgggattgagaacaagcatttaaacagatgtgtatcagtcttacagagtgcctttatgtctgttaaatctaccagtagagaaatgtgcactcatatttggcacatgtgtgataaaggacttgagtatctgtagattttagtattcatgaggagtcctagaatcaatcccccatgaaaatggagggcttggtggtatatgtttcatttaatttaaggcattggtttgtgatgaatagaaaacaaacaagaaaaaaagaaaaggaaagaaagaaaagagaagctggtattttttatgacagattgtttgaaagcactgggcaatgtggagtcatgggttccagtcctggctctgacaccaactcatattatttcctcatcctaagatatttcttcacattgcagttgctggtattgattatcttgtggagtcaaatatcttggcacctcattcttctttgggtattactgtcttcattcatggatgaaaggtcttagaataactgatttttagtttctatttcagttccacagatgccataatcccaagaatctttagaaaaaagtctaaataaaaattgagtgaagctgcattgctctatttcaagctaaacaatcctgctttttggtaaaagcctaagtatagcatagattctgaatgctttacttcagatccccataagaagcatagtttttcttttggtggttatctctctgttgtttttttattaaaaagctctctttttcttgctgctctcaggttttccccatgaattgcaacattttatagggaaaaatttctctgctgggtattcatagactgactgacgattgtcttgaattttccaagagagtctctgagaatgttctctgaataaaatctaaccagcattataaggagtttagatcttactctatgactaaagagaaatcataagatggtgctaagaaggagactgacaacataatttattttatcaaataacatattggcggatctttgattagactgtaagggtacaagactataaacacagaaatgtccaaaggctattgcagtattataggcaggctataatggtggtttggcctatgggatataaaaaataggttatgcaatctagtttatttatcagccttggcagtgaaatgctgtggaattatttataattccacatttataatttagagttccacttttaaatttttctgagctggattgggatcatagttttttttttttttttttaatggggttataattagtagtttgtattggaattaacattagctcacaaaaagtcctatcttagattattactgaatgtcctgttcatatgagtgtatggaatcagaaaatgtgcgggtattgaataactatagatgtaggatttcaggtgatagagggcttctatctttctatctcctgcactgagaaaagacagttcacaaataaaagtgctagtgtagaagtcagaagccatcccagacaaagtgctggtttgttgggttcttagccctggagctacccagaagatagagagacctgcctttggagacaaactgtcttcagtcacgcagaccccactttagctgagtcagcatcacagagcaggaagccattcaactcattttactctggactgtatccaggcatttcactgggaagtaaaagactgagaggaagaaataaggactccacctgggtaaaag

SEQ ID NO: 51238 - DNA, 1698 bp, Bovine  19866880747689
  misc_feature (1)..(1): n is a, c, g, or t
ntccaggagatagatcatgatatgaaaaggttagtatcagtttgttgtacagcagaaactagtgtaactttgtaaagcaattatactccaatataaaaaaaaaaaaaacaacattttttttaaagagagagaaaaaaaagaatgtacaaagtaagctcctaacattctctgtggctgtcttctctcgcagggcacgtgcacatcacagacttcaacattgccacaatgctgcccggggagatgcggatcaccactgtggccggcaccaagccttacatgggtacgggtcccctgagctgccatggccactaagagcaaagccttgttttccattcctgtggacaccgtgtactggaggtccagtcatctgtagggccttgcagctaggaatgacaagtccctctcggactttacctggagagcttctgatttcacaggtctgaggtgaacctcaggaatctccttttagcaagcatccagtctgatcttgattcaggagggcgccacagactacctgtaaagaacgttagcttatgagttattaaggacagtttctacctacttcctgatgaagaatattaatagttcattcaataaatacctactcattacctctgtttttaggtgctggtgatcttgtagggagcaaaacagacaaggtctccaacccttggggcttaccttttagtgagaagagtttaaaaaaaaaaaaaaaaaagaatcacatagagaaggtacagcaataagtgggatggtaataaatgatttaagtattactataaccacgatttacatactcctgcataaggatgtaagttcacaaagtgccttcccattataattttggtttaagtgtatcatcgctataatcccatgagcagtttgcaggcaaaatatttgaacttgaaattaaaggcaagagcattgccaccttctttcaatatttcattgtcttacttgcagaactaaagagaggaaaaacaagtcatctgtaggggaaaatgagcctgattttatgtgatgtttgaaaacctgcaaatttcctggcttccaattatcttcaggggtattaagtcccctttgtcacttttaaaataatggacacatacaatacagtctattttctgccccaaatccacagtactcaaatgataaagaggaatctccaagcctgctggtctgagtttattccccaggtttcctgggtttccatattaagggctattttcttgaagccaagtcagaaaatgtgcatctgggttttccaggcctggtttccatggtgagaggagtaaaggaagatgatcttttttttctctccccagtgattttaaatacaatgcccatataatttgattctcctcaaaattggcatttccagtctttttcaccacatagagctaagaaattggaatccagtcaagtttctctgccctctctaccctcatccttataattaacaattaccaatatttattgaaagccttgtagggatcagacaatgtgttaagtgctttgcattcattgactcatttatttttctcaacaaccctgtgaggcaaactgtaattatcaccattttacaatgaggagaacaagaaataatttgctcaagatcacatggctaataattgaaaaagcctacatttaaagccagctcttttgactttagaaattcaagcttctccctaaaagaaa

SEQ ID NO: 51239 - DNA, 784 bp, Bovine  19866880776081
  misc_feature (1)..(1): n is a, c, g, or t
nttgctttcactattaaaatagactggaaggccacttgccaaggacattatagaaggaatttacccatccaacgtgtgtgttggtggtggagagaacagtgtataaacatgattttcatctaatcctataatttgatatatcttcggcaactttcttaacccagagaactttgaaacagaaataattcctttcagtttttacagagttgtgtgcctgtgagggttgatggagtgcctgctgtgtggaaagcagctgtctcaggccatggacctgtactgtgtcacatgccatggtagagtcattggaaaccaaatcaactctcttcccccagggacctgacaatcttttaggggaaatgatatgtctgtccatacaaagcacatgactttacccaataatatcaatgtgtgtgtgtgtccccagtcacccagtcatatccaactctttatgaccccatggaccgtagcccgccaggctcctctgtccatgggatttcccaggcaagaatactggagtggtttgccatttcctcctccagggaatcttcccaattcagggatggaacccacatctcctgcattggcaggcggattcttaccactgagctaccagagaggcccaataatatcaatataatgcattaaattagtagagtagatgagatccagaggaacaagaggactgtgtgagattataacattatagttataatgttataactttataacagctgatatttattgaatttttaagtgctttacagggttctatggacttaacaca

SEQ ID NO: 51240 - DNA, 1014 bp, Bovine  19866880799737
  misc_feature (1)..(1): n is a, c, g, or t
natttctcctgttaactagattataggggacttagtgcttggactaagcctagtggagctattatatatttatcattaccatttattgagagccttagcacaagtgacatggattatctcatttgactcacaacagctcctatagctctaatggttaaccatcattctgtgttctggatagagcctctgagagattaagtaacttgaccaaagtgacacagccacaaaagcaagattctgggattgatccctccagggatgggttagttcacaggcgggaaagccgtaattccgtattcacggatgactgtccccacccccttgccaccagctagccacacctgttagctcactaacgggggccaaagttcacagagtggaaggggtggggatggtcaggccaagacctctcatatcaccgttggaacaactgagtccacgtccccctagaagtgattcgtgcattgctctgcccgctgtctgagttagcttccggctttcccccaggagcatgtgtgagtgtagggtggaatctatcttgcgtaagtacagatctgggcccaaggttccttctcactgtctgtccctgtcctcttcccagacataaggagccaggctctctgttctccttcagcagggccaggaacatagcacacgccctgcactctaagccagatggggagctctgcttaggaatggtccgggaacgtaggggacatctggaattcaagggcacagttcccttggctaagttagtctttttttctgtggaagggctgggaagtgagctttcaaagataaaataagatttgattttttaagagaggggttcctctgatgggtggagcagaggaaccctttttgtttggtggcgcaggaaaaggcaggaagcccctgatgaagtgttggcacattgtggtccgggctgcccttacctctgatttctctgtgactctgggaaaaccttattatccccctcagactctgcgtcagtcagatgagggtatcgaacta

SEQ ID NO: 51241 - DNA, 1557 bp, Bovine  19866880814443
  misc_feature (1)..(1): n is a, c, g, or t
ntcactcagttgtgtccgactctttgctaccccacgaactgcagcactgcaggcctccctgtccatcaccagctgctggagtccacccaaaccatgtccattgagtcgatgatgccatccaaccatctcatcctctgtcgtccccttctcctcctgccctcaatctttcccagcatcagggtcttttcaaatgagtcagctcttggcatcagatggccaaagtattggttgtattacattctttcatatgaaaaatttatgtgttaactaaataatttgtagtaataaaataattgctattattatatgtgataaagagggtaattggtggaagaacaggagagagaaaaaataacacaaagaaccatacaagcctgacaccttgcagtcctaaagatgcttagctgatactatgttgaatgctagcattttagattcattttcttctaatagatgtataaagggttaaaatctttggacccaatagccataccaccacattccctttatataggaaactagaactccaggtttggactaacttaaatagcagtcccccttcttttaaaaaaactgtttattttatattggacatagccaataaacagtgctgtgatagttttcaggtggagagcaaagggactcagccattcatgtacctcctcccatccaggctgccacataacaacattgagcagagttacctgtctggtacagtcggtccttgttgattatcgttttaactatagcagttcccctcctttatattaaatttctgtgttaggttcatgagtgcacagttaacgaatgtattttcctacataaacaagggattggagaaggcaatggcaccccaatccagtactcttgcctggaaaatcccatggatggaggagcctggtaggctgcagtccatggggtccttaagagtcagacacgactgagcgacttcactttcacttttcattttcatgcattggataaggaaatggcaacccactccaatgttcttgcctgaagaatcccagggacgggggagcctggtgggctgccgtctatggggtcacacagagtcggacacgactgaagcgacttagcagcagcagcagcagcatgtctctgcaggtcactgggaatagaatctgttagtttaattcatccgttttaaacactaacaacatctaattctaaaacatcatctttggaaaagaagtgggggaagggcttagccaaaccagcaaggctttggtgcagtggatgtatcaaagtgttaattatggagaagtgttgcatacacatgaactctagttaattttatattacagttgcttttcaaatcataactcagaggcaacagccttattggaaactcttaagattaataacaaccttattcagtttatagcttagggcagaaccatctgcaaagccgagactcctgggaatactgaccttgccagtgcagatcttattttgccaaaagcataagcaagaattgctttagtcttttcagggatctctgtgcctttcctggtctgtctcttttagcacaaagga

SEQ ID NO: 51242 - DNA, 1366 bp, Bovine  19866880854837
  misc_feature (1)..(1): n is a, c, g, or t
nttgacgaactccttttcctatttggaaccagtctgttgttccatgtccagttctaactgttgcttcctgacctgcatacaggtttctcaagaggcagatcaggtggtctggtattcccatctctttcagaattttccacagtgtattgtgatccacacagtcaaaggctttggcatagtcaataaagcagaaatagatgtttttctggaactctcttgctttttccatgatccagcggatgttggcaatttgatctctggttcctctgcctgttctaaaaccagcttgaacatcaggaagttcacggtttacatattgctgaagcctggcttggagaattttgagcattactttactagtgtgtgagatgagtgcaattatgtggtagtttgagcattctttggcattgcctttctttgggattggaatgaaaactgaccttttccagtcctgtggccactgctgagttttccaaatttgctggcatattgagtgcagcactttcacagcatcactagatccattctatgcccttctctgagctagtctgtgccttgagatgctgatgtctttaggttgtattgttcagactccctcaccaactggcttctgttgggtttggcccatgggaagcagcaataggatgtgataaaggtagaggtgagggtatttgctccttcactcccactcccttcttatcagatacctgtgttactgttaagaatcctcaagagcatgttgttcagtcgcttagtcatgtctgactctttgcgacctcatggactccagcatgccagacttccctgtccttcaccaactcctggagattgcttaaactcatatccattgagtcggtgaggccatccagccatcttgtcctctgttatccctttctccttctgccttcaatctttcccagcattggggttttttccaatgagtcggctcttcacatcatgtggccaggagcacagggccattatctactgtgcagtgctgaaggctagaaggcatcctcaagattttggttgtactaatcattgagtagtaagtcttcttattcacttgctgccaaacactgaacatataaacctcagaactttagggagcagttggcataagtctagttcccagactgtgagtgacagtgcttggtatccaagcagctatggaaaagaacaccaaatgtgtatgcttgtctgcagataggataaatcacatgtcacgtacagaaactttgttattttccaaatgtgtgtaaatagaactgaaactaaaaccgtggaactcagattggggcttgaacccatggtcttttagttgagatcacacaccggtttcaggacctaatgaagctcaggttat

SEQ ID NO: 51243 - DNA, 2418 bp, Bovine  19866880878023
  misc_feature (1)..(1): n is a, c, g, or t
nacacagaccgtggtaaacggatttagaacagcaggtagcccttctttatttttaagtaatggtgttaaggtttgtgctttctctacctgggtagacattagaatcacctggttagcttcttaaaaatatagatcaatcttattctccacttctctcatcctctgtctcatctccatgtccagtaatctgcttcattaaattggtagtaaggctttgaattctttatttttacaagaattgggaatcactgtctaagattctttttacttacatccacttataagaaatggatctgataatataataatattgagtcttctttttttttcctaaattgacattgaaaactatcttatttgaaaacaagatccaattttcctaaatatcctgttttcctgaattctgatgaaaatgaactaggagaaagggttaaaaaaaatcagtcattttaacttgttagatttataggagcacaattttcaagctggaggagacactgaaaacctactcctgttttttcactttgtagatacagaagtgactctttgagtgtaatgagaggctacaatgagaattccgagattcacagacatcacgactttccaaagcaagacacttagctaggaaaagattcttgactttcaccatgcttcatttctttaataatcacccaaatggactggattgatttctcattttatggcatttaagattggcatttaaataccaaatgtatttgtttttttttttaacatgagcatactaacatgctagcattcttcttatcaaataagtcttagaagcacattttgagaattaaatggagtcttacctgtaagaggcaccttgacatcaaggccatagaataaaggcaagagagaagaacaagaatagaaacagaaactgcagaagaaaaagaagaggattatgtaaatctgaatttctgtagtgcaattcaggttgtataaaacctcagcttttccatattgctcaaatctgatcatttctcacatacacacaaagtaccttttatttacaaaaaccataccttttatttcttcactggtaaagcaatacaatgaataactggtgttcagctaacatcaactgatacattttagaattctgagagggtcttacagataattggtctaagctccgaattttataagtgaggaaaataaacagagagcagttaatcaacagactaattgcatacaatttgatggtactgtgaagcctagagcttagacctcccgagtcctaatctgctatgtgttattatctctatttttaatgtgtgagagtgtaattaaaagtgatcaaagtgtatgctttatcactcaacactatcactatttggttactatggcagagcaggaagaatattactttgcagggtaaacatatgattgcttatccatggtgggcactcctagaagggaaatggaacagtattagtaattacattggggtaccaggcataacctaggtctgtcctgggtgagtgagggtatgtggtcctcccactggtatgaactacgcttctacatcagagatagcttcagacagtgaacgtatgctgttgctccagcttgtcatgcttctgagatagatatctccttatttgactcacagaagttaaacagagtccgagctgtctctctccaccaagaaccttcaccagagaagaaaaaacttggatggaaaacatgctttgtgtagcactggttgaaaaccaactgtataataaaatcttgtaggtcagatcagttttctcaaatactgatttccttggggatttactcttacagagtcatgaagtcttttggcttgttaaaacccttcaggagcattctgttggacatgatagttttgaataggtcctgtatggtagtctcatattgggcatattatttgcctacttcctttaatggcattgctcacaaggctcttgcttcatggtggcaaaattgcatgaacaagttataaacatggtgtgaagagctatgtattagtgaccagtctaatagaatgaggagcagacactcttttctttttcccattccttgaagatgtgtagtgacaggatgtcacctgtagtgagagtggatgaaggaggggaatggaaggcttccacaattcccatgagatggtcaggtatcagggctacctttctgggcataagggatgcttatcacttgatttacaatacgagtctaaattctatgtcacatggtgggcaggctgtgggcctcagggtcagacacctgacctctgcttttgatttgccatggatggattatatgattttgtaaagttgtttaatgtctctgagccattttttcattatctgtataaaaagggaacataatatctgatgtgtctgtctcaaaaatcaggagaatcaaatgaga

SEQ ID NO: 51244 - DNA, 676 bp, Bovine  19866880921823
  misc_feature (1)..(1): n is a, c, g, or t
ngactgatgttgaagctgaaactcttaatactttggccacctgatatgaagagctgactcatttgaaaagaccctgatgctgggaaagattgaaggcaggaggagaagggaatgacagaacatgagatggttagatggcatcactgactcaagggacacgagtttgagtaaactctgggaattggtgatggacagggagccctggcttgctgcagtccttggggtcgcaaagagtcggacacgactgagtgactaaactgaactgaactgtggtcaccctgctctgaactcagaagccctggagggaccattttgtgtgtgtgtatttttacaggccatggggaaaatggatgaaaaccagtttgtggccgtgacaagcacaaatgctgccaagattttcaatctgtatcctcgcaagggaagaatatccgtgggctctgacagtgacctggtgatctgggatccagatgctgtcaagatcgtctctgccaagaaccaccagtcggtacggcctgagtgggtgggcatggagcagagtggggaacatgggtggggaacagggacaggagagatgtgagtttgtggtgagccagggtaatcgggcgaggatgtgttgcaataaccaatcatcctgaattaccagggatataaaacctcagcagtttatttctcactt

SEQ ID NO: 51245 - DNA, 1036 bp, Bovine  19866881013257
  misc_feature (1)..(1): n is a, c, g, or t
ngtcctaatttgcttattccctccgcctggctggcctcctgccgttcctggaacttggatgtctgtacccactgcagagctcctgtacttgccctgcactcctggaacacttctgcccaggcgtctgagtggctcgccccgtccagtcttcagccagatagcgcatgcttgtctaggctttctgttatctcaaatcagaacccgcatgaacacttcccatcaccttccgtgcttttattgtttcccataaaacttcgtcataatctagcagagtacttacttattatgcttactgtgtgcctctcccaactaatacattgtctccatgagctggagacacatgtctgttttcatctatttactcagtgccaagaccagtgttcagcagctattacgtgttcaatagacatttgttgaataaaccaacatttaaaaaaagctcttacttgatgcatacattgctaaacacttcacctgcattattctgtggacttttcactaccaccctccaagggaggcctgaatgacagaatgaagacatgggctctacagtcaaacatcttggaataaatcttcccccatcagtacttgccagctcagagccgaataaaggtcagtcattcatcttcactaagtcaccgatagtccatctgaatgaatacaagggaaatattactgattacttatcattggttgttttttgtcagactgtctgaagcaatcagatcaacattataagaagtttttcaaccacagccccagattcaggcttccagtaccatctcatttaattatctatctcatgtgatcatttaagacttaatagctattttgtgtgcactgttttgcaggagtaaagcactcccttgtcttaccctatttcacacaggaaaaacgttaactgctaggttataagcaccctgaaaaatgggatttatctgtgaaatgccctaagtgactacttcagtcagggctcagtgcgttgctacaataatgatacacaaccttgtgttaaatcttttaaatgctctggata

SEQ ID NO: 51246 - DNA, 1017 bp, Bovine  19866881083687
  misc_feature (1)..(1): n is a, c, g, or t
nataaatacttacacagatttggatttagacttacatataaggcacaaaattggctttgaaaggttttggagaggcaaacgggagaagactttccagaagggcccttgttcaaagaaagaaagaaatggagaggttcaaggcatatttaggaaacaaggagatcactaggcggtaaggagtggaccctgcactgatgaatggtggggaaagattggaaatagaagaccagttctcgaatcccaaactaaagtttgaattttaacctgatggtaaagggagccactgaaagttatatgcagagaatttagaatgtaaaaagagattttaaagtttcttcaatggtagaaaattattttttcttctctctcacttgttgagttctaatcagggaacatgatgggaagaaaaaatgtagaactaccattttacttactgagttctggaattttgatttcgctaggctcaagaacaactccaggccgaggtgctaaggtataaagccaaaatagaagatctggaagcgactctggctcagaaagggcaggtaggcatttggttgctcgcacttctgcagatgcagacgattcaatctgaccttccactagatcaccctgtgcccattcaggacacggcttggctctccacagtgatcttcccaaactgtgtccgaatgttgagctctctgtttctgtccctggtgttttgctggccagagtgtgaacccagctacgagagcgaatgaggctgggcaagagagagaatgcccaaggaagaagagcactgcacacttagcctagagtgatcatgaactgctaagaccaagacccacccctcaagctgcattctttgcctctatgctacattgatggttctgcattttaatgttttccatccatatgtatctagcctgtgtgcacttctgacccctttcactttttgcctgtgtggtcacttctgagtccccagaaggctggtcctggattattcagactgaaaaagatagggttagcgagtga

SEQ ID NO: 51247 - DNA, 3399 bp, Bovine  19866881160006
  misc_feature (1)..(1): n is a, c, g, or t
ncaccactagattagtacagttcttttttttcttttgaatacagttaacatacatcattacctgggagggtttaagatttcaccctggttggaagctgacacgttattctgccacagttaaaggcagtctgacagaagacacagactcctgactcagagaaaagagatgtaattactcaatagcaatagccagagtcccagcgtttgctctggttccccaggcccagcctccatagcgtgacatgaagagggccaaggaaacatacagagaaagcacaatgtgctacaagggaaggatgcccagcttttaaaaatccctaaattttttcaagggcactatgcctggaaattccctggtggtccaacagttaggacttggtgctctcactgccatggcccaggttcaatccctgcttggggaactaagataccacaaaccatgtgatgcagatacacaaaaaaagcattatacctgcctaaactttgccctagtgagagatactatcttatacccaatggcaaacaaacctgtcctttacaccagagagagagactattctacattccaaggctatttcctgtagaaacactcttgaaaagattgtttgaaacacatgcagtcgatgtctctacccataagacatgcagaaagatgagaaagaattgagaattatctccccaaaccacaaatcgttccaaaatatacacaaggcatattttggaatgaaagatcaattctttgaggtaggtactgttattatttccatccccaggtgaactacttgtccaaggacatagagctggtaagagtctctggtgagcccactctaccttggagtacacacacaccttaggaaagagagtcctccttacctctaacctggccctctgtcagctactttaggctttgtgaatggtggcagaaaaagacagaaaacagagaaagaattttaaaagctgaagaaaaagaagcaagaatggaatttttttagatattcataccttttatacacctagaattagagaggacaagaacttttgagttcaccttacagatgagaaaaccagaacttgaccatgggctttctctccatagtcagaggaagttagggcaagaaccaagtaaccactagtaatctcttcctgacagtctttaccttgcacatttacctaggaaggcctagggcattcctctcctacacctttcttacactggtggtgtgccccaaacctggaggacaggctatactacggagtcaatcaataaccaaggagatctgtgacgcagagcaggaggtggagactggaagcccacgcacactatatgacccttccagtcccagggttccagagcgaagtgtaagttcagtgcagttttcgactgagctctagaaccagcatttcagccatgaaggtggcaagcatctttctcctcactgccttggttctgatgagtttatctggtagggtgtcgttgcttatttttctgatttgagtaaaacctttttgacctgttgccttattgagcacattactttcaagacttagagtctactcttggacagatcttttggttctagggaggtgaaataagatcagtagatgagaattatatatcgaaagagggattttaacataacacaggaaaacaattttactagtgctcagacatgaaattttttttttcaggtaatgaagctgactcttcaagagatatggtagaaaaatgaagggattatttcaacatcaagtacccttctaactctgtacatgtttaaggccaatttacaaattttatgttctcatggaattgtagaaataggttacaatggtttccagttattcagtgtacagggcagagtttaagaatttgacttttgacctacagaataattttagaaaaaatattctttttgaatagatggtatgtgcatatcttcaaactgtcttgatagtgctgagagacgatctgaacccccagaatcggcatcagcttcctttttgtctttggaaatggataacgtgttaaattttttatcagatctagcaaagaaaccaaatcaacactttgagaaaaaaggaacaatgctgtttgttgtatttgctaaatatttatgggagtggtggtcccttttccatttctcatgcatatcaattaatacagatagatgcctgtgtggcgatcacctgctcattaaatcttagactcaactagattctaaaatccagggggattctcaccacatcaggttctgtctattccagggaacttcttctccaggcccgtgagtgtcttatgccttttcaaaacatttagctcaggaaaactacctccttacctagttgacctcagagattgttaataacaaaatcaaatctgaccaacatttcttcctttagaagaagtgactaatactatcaaattagtccattttccctacaatgagctcacccagagttaccatatcctacataaacgtgatgtcatcaagacctgctattttctggaaaatgcagcatgacaattttaagtatctacctgtaaattcaaaaaatgtgaaattaaactaatagcacaatgcaatggacgaaaagaggtctttgggaaccaaagtttgagttgtcagaagattccactttttttagtatcacttacaaaaaaagacttatgtataaatataaaagttagttttgcatcataagacctggtaattgctagtgttaactgttttactggttatagaaactctccatatctttatctataaacttaagatagatacttacatttcctacatcaataaacaagttgctaactagaatgtcagtgagtattcagaaggtatttgctctgtgcctgagacatctgaagcaataagcacatcgtttttattttcaaggaaacaagtcaacttgtcttaaatatacaaaacttttgtcctaatcaaatttttgcttaatttttttgaggtttcagaaggcaggctgtgagtgaacagcagtgagatgtccttgaggaaaaaagatggaaataagaagggctaggtggtgaaagaggccagcagagaagacatagacttaagtggaagcagaaatttctgaatgagaatacatctgtcctctcccattcaagactcaacttcacatgtctgatttatgttttccaggtaacagtggagctaacatcctgggaagagaggtagagacaattttgtaattttttttacctccggggctagaagtgtttgttccaaccaaagcgtagtctaactcacctttcaatttagcctcaagttaatacaaggagtttgaacgctggcaaggcttaacctactaagtagtgattgtagttccccacaggtgcttatgttgagggacaaattctcagatacacaggca

SEQ ID NO: 51248 - DNA, 1110 bp, Bovine  19866881299290
  misc_feature (1)..(1): n is a, c, g, or t
naatatatgaagtaagaataggttgaagggggacttccctgatggtccaggggttaagacttgcccttccagtgtaggcggtgcagttggatccctggctggggagcagtccacatcaaagaaaaattaaaagaataaattgaagtgtgtgagtctgttacaggtttcttgtgattgtcaataaaaagatgatgtgtctgtagagctctgtaagccaataattcaggagttcattatgtgagggtgcaggtttgtgaggcagattctagaaccgggagcaattgtgagacaattctaagattaggatgagacagagtctgggattatgggtaaacaaagtctgagattgtgagtctggtaaatctgagtttgtgtgtgtgtgtgtgttgctgtaaatcaggaagaacttagagtttatatcaacccacctgagccaacaaagttttcgtacctgagtggggcagaggcttgtgttttggaggccaacttgggagtgagtgtgggtaaaacagggtttgtgctcacatgagagtgaggcgagctctagagtgtcaacctgggggttgttgggcgagctggaaccgtgcctgtgtgtgtgcgcgcgcgccaagttggatttctcctttggatgggcggcggggacgcgtgatcgcaggaggccacgttagggtcccggcgcgcaggaggtgcggcttggctgggcggggcgaggcgggcgagcggaacacgccgccgctccggcccaagcgctgcgctcgctgactcggggctcgcaggggactggcaggaaccggagcagcactgccgcctctggcgcgaaggctcaggcgcctcctcccgccccagtcactgtggttcggcgcacgctgccggctgctgccctttccgcctttggggaagagaacccacgggccgctgtcgcgatccaaccatggcctcgggccgcagaggctgggacagctcccatgaagacgatctgcccgtgtacctggccaggccgggcaccaccgaccaggtcccgcggcagaagtacggaggcatgttctgcaacgtggagggcgccttcgagagcaagacgctgatttcgatgccctgagcgtgggcagcgcg

SEQ ID NO: 51249 - DNA, 1361 bp, Bovine  19866881416308
  misc_feature (1)..(1): n is a, c, g, or t
ntttttttccccccattcttgctatttatgtggttgggaaatagatcttctagttcacctgccctcaggtctttatcaagccaccattctaaagtttctgttgctggtgacccttggaattgattatttttttggttacactgttgtccaggggagatcagcattactagtctcttctgttatcaactggagaaggcagtttccctaaactggtcgtttttgctacttggaaacgtccctggaaaagtagaacaaaggttctactttttgactggaatttactgaggctttgtgaataaggaaaggaaggtaaaatactgaggataactttaaaaggctccttgcatggttggctcttctttatttaagggtcatttccccagagcaacgggttcccaggtatcttcccccaacacatttacctgtataatcatcatcttctcctcccccttcctcctccttatttttattctttatcagtacctgaaattatcttatgtatctgtttatctattcccctgttttagaaagggagtgcttattcattccctgagttcttggaacttagaatagggcatgtctcattgtaggaaaacaacaaacattagtcttaaaaatggatgagtgaatgaatgaatgaacagaaccagacctgccttagggtgcagctaatttttgttcattttttagatatcaacttgcatatgacttcttcaggcaatgtcctccatgactgactggacaagataagtgctccctgtgacacaattcctctgtactcttttatctaaagtaattcattttattgtctgtcttccctccttgagtttcaggtcaagaattagttctgtttcatcctgtaatggactcccaattcctagacaaatacaccccatgtagttggtgcttgacaaatcttttccaaaacataactattaaaagatcattcaacttgatgaaataatatacaaaattaggaagtagcctttttgtttaatggaaaatacaaaaactgaaactatgtgaagaaatcattctattaataatacaaagttaacctaaccaggattttacaaatttctggattttttcttgactcttaacatccctcactcatgagtcattctgttccctccccctagccctgtgactacatatcacaaattcttgcagtgtcattatacagaaactttcagaatatcactcaacaataaatgcttcatttaacccataaagtactaatacctgacattaacaaacctaatgactaaggaaatagttttcccatgagtactttcacattattctgtaaggggtgaaaattgtaatagttggtgctcatattgttacatttggtgtca

SEQ ID NO: 51250 - DNA, 637 bp, Bovine  19866881664989
  misc_feature (1)..(1): n is a, c, g, or t
nggacctagagatttctgcatgactagactcaactggaaagtgggatcatggaagcttttgaggaagaaggtaccatcagaaaaggtgagaaggacaaggaaaacccgagcgttttcagcctgagtgctttgagatatggtagttccactaaacaagacaggcagatggggagagaagagagaagcaaagataagaacgcgtgttcaggtatgtttcgcatgagttcactttgaaacattcaaacagaaatgtctagtaagtggttagtgataggttgtataatttagactgccttgcatatttacgtatgacaaatcctgtccaatgtctcctggaataactctctcaaatcaaagctactgattgaaaggaaaaaaaaagagtaataaataactggaaaggcatattctaatgaatatctgttggggagacagaaaatgtcaatgaaattatgagacttaaaaatttgttgttgttgttcagttgctctgatgtgtctgactctttgtgaccccctggactgcagcatgccaggcttccctgtgcttcaccatctcctggagtttgctctaactcaagttcatggagttggtgatgccttccaaacattttgtccactgttgtctccttctcctc

SEQ ID NO: 51251 - DNA, 1261 bp, Bovine  19866880354241
  misc_feature (1)..(1): n is a, c, g, or t
natggttttgaaactgatgccaaataaacttgtgtatgaaaaaaaatctgtttggttagaacactatgattacctgaacatggatttacaaaaaaaaaaaaaaggtcaaaaaaactgtgcagcaatcagagaataagattatgatgataaaatgagtccaatgagggaaagaaatagctgtaaaaacgccaaggtctaaacaaagagtgagagttttctgaccgtgtcacaggccccagagagcatctcagaaccatactgattcaagtttcctatgtgctccattcggactctaaggattgctggttttttaccatgatgtggttcctgttaccacccacagcacgacacaaaatcaagtgatcaggaagccagataacctctcatactgttttttattttatcttgttattaacagtcattattcttaaatgatagaattaaatgggagctctagtcaaaagctttagagagctttaagtaaatgtttaaaacaaagtctttaacccttctgactatctgttgaatctgaaaatacttgcatacagatatataatcagccttgaagcgtaggagtcttttatcttccacctactgattttactgggataaattaaaacaggaaaaatctgatgatgaaataccaaggctaaaatgtcaccaacacctaagttccacaaagtcatttcttctgctccaagtagtctagtgacacagctatcattgtgccttataatgtggatgtgaccctaacattgcagagctttgaggctgcagccttaacacttcctgtcacagtctttgagtcagtcctcatgcccacacaatacagcgagtttccatttcattcttgagttgacacaggtaagcggatgggtatgtgctcaaactcagagatgttttatcacattaatccaagtccattaatctcattgctctactttttttctttcttttgaaattaaacaattcttacctcttgcccttcactgcttgataataaaaggcactgggaagagtcaagagctgggctaccacttggtcaatgactctctaagacccttcaaacttcatgcttcagtattctctgtaaagagagaatcataatgtttagcccagttctgcaaatgaccagaaaaaaagcacttaaaatgttatgggagaaaaagcataagaatactgactttaaaaaagcaagtggcacaaaataagaaataaatagagcaaagaaatagcagaagaaatcaacaatcttaaacaa

SEQ ID NO: 51252 - DNA, 838 bp, Bovine  19866880478672
  misc_feature (1)..(1): n is a, c, g, or t
naatcttcccctttggctccttctcctctgcctctcaccacagctgaccgaggacaagaaggcccttctggggcagttcccacatccccatcaaatggcacaacggcagacttcccctccacgcctgccccactccagctggcatggagtcatgcctctccatccgccgtgccccaagtgccaactcctcaagaagcaggtagtgatgggtcccctcccacagcagctacagacctcctcctctcaagcacatttcctcatcgtccttccatgacctggacatttcccctgcagaaggcagatagcatggcaactgttttaaagaaaaacgaaaaggcaaatttgacagttgctctccagacgcttccgagtaaagagagtctaagtcttcacgctgtaggtggattcacctctgatttcagcactgatcatgtctctacagacacgacaccaccaggaaccagcctccttccttctgaattacctccatcttccatgcccttcacacgagctacccagactgtgtccccatctcatagtttttccaggaccaagccagtgactcacatagctgtgacagaccattctgagttgccagttttggcttccaaacaggtgacagcttttccctcctccagtgaggtctatgatttctcaacaatgggaggcatgaggaagccagcaaccacagatgttttctggaattctgttgcagcagaagctgagtccctttccacagaacccatgatgtctggctggctgcagcaaacaaattatgatgtaaatgggcacacaattaactctacaagttgggaaactcacccagcttcagccactt

SEQ ID NO: 51253 - DNA, 1241 bp, Bovine  19866880555058
  misc_feature (1)..(1): n is a, c, g, or t
nttatacctaatacacatcattgaaaactgagagaggcgtaaaaactgggggctgaagttcttcagaagcttttcccaggtcttgggcacacagccaaagattactgaactttctaaccactataatcacaacagacaattcctggacagcaacttccacacagagacacctcatgtcagtgaccctttaagtgaatcaaaggaaaatgggctttgaattaagctttgtagacaggaaatatttttaacctaaaacagtgtgagctcctttataataaggagatttaatttaacttgggggatggggcacactgagcgataaaaacattcctcattaatcgctgctaaaacccacagaactacagggtcatattggctgaaacgaaggctaaattccttgataaatgaaatgtaccaagaacccagaattttatcacaaaagccttccctttacaagtgccatagtaatcattcttatttcaaaggcaattgctgacagcagaataagttttgaagaacattagcagaataatctcccctaaacagttacaacagatttttcaaaacagtccaagaaattacagaaatctatttccgaaggattcttgggagtcaaagagtcaagtgtggttacttttaactaacgttcctgcaaacaggaacgttatatactcgaaccctttgcaagacgaaattattttgggtacctctacccccaaagtaaaggagtctcctgtcaaaatagagaggaaaacgccgacatgggaattgcctaaaactctctgggccattccgtgcagtcaaagcacagtgccacccatccgagagcccaagtcatagtggacgtccccaccctgaaatgtgtcctactaaaacacatcccttttcaggtatcctaaacacagcgtttctttatctaaatgaagcatgcctgtgggaccactaggaaggatctgcaacttgtccagaaggaaatgcacttctttttacttccccgcccaacagtgcctgccttcccgggagacagatttctgacagttcgcctgctgttgcagcagcaaagggcggggaaaatcctagcgccggtgctgcaaagatctcccccatccaccgccacccgatcaggtaccggcctggatgggccgtcccgctcctccagaaacctccgcgggcgcaaagcagccgccaagtgcttaccctggtcggccaggcagtgtcggggagggccgccagcagcagga

SEQ ID NO: 51254 - DNA, 2839 bp, Bovine  19866880602739
  misc_feature (1)..(1): n is a, c, g, or t
naaatggcatagcctccacatactctcaccttgcatgggtctccttttcccagtcctctgtccaaaaagagattttcttgggagttttgttatctgtgtcctatatagttctgcataggggccatcctctagacctgccaggtgatgagaggaaagaaaatgaggaaacatctttctctatataaagattgttatttcaatttggccttcccttcccaatctgcctgtagttaccaacttttcatagttttctgatagttccgttttatgttttctccagcggttttagttgtaataagtagatctaatggacttatttgatcttagttggcaccagaaacctttcatgaatttttaaaaatttattgtcttacaaattacagtcgttatttctgatcctcaaactgttctataatgggccaatagaagccccttgagtgttttgattttgattgtgattacattgaattcataattaattttaagggagaattgttatctttactatactgtcttctcatccacttatggaatgtaatgttgttctacttactcagatcttacgtcttttaatatcttaccatttttccacatagataatctatattatagtcttaatagtatttttttagtattttaaatacaattttcatgatactgttctctcattagttactgataatgtatggcattggttgattttcatgtcttcaatgcgtttggtatttttgtttaaatttattttatctatttattatatttttggttttactgcatctttgttgctgcgcatggctctctctagttgcagtgagctggggctgctcttagttgtggtacgtggtcttctcagcgtggtggcttctccctgcaaagcatgggctctaggcacatgggcttcagtagttgtggctcgtgggctctagagcagggactcagtaattgtggtgcaggggcttagttgccccatggcatgtggaatcttcctggaccagggattcttttcttatcctgggaagtcttggcctttttgttgaatttttattttgacagtttttccacctgattctcttgcatttttaaatagataattgtatcttctaaaaataacggtagtttatctttctctttctgtgggggtaatttatcttattggctcaggcctctgttgtttaatgatggcaagcatcccagccttctccttgatatttagtaaaatacatagtgttggaaattatttgtcagtttctaatgtactgtactctttaagaaaatgtccttctcttttgaagttcttaaagttatttttttttcccattaacagtaagcattaaattttgtcagatgcttttttgagtttcttctgaaaaatctgccttcttttttcccacattaatctgttacttgatttcctaatgctgaacctcctttttaaaatttctgccatgaactctgcttggtcatgatgaatcactttagtccattgtaggatttaagttgctagtattttgtttgggatctttacacctagattcataaatgggattagtgtatagtgtttttgttcacttttgttttcaggaatttgctaaccttataaattaaattaggaaagcttttatatttgtttaaatttgaaaaagtttgctatatataactgggatttggtggaactttctaagaatacatctgggacttaacagttttttcctgatagtttgatctatctgggtcagtttatttatttattttctagtaaaatgatttctctaatttagattttaaaatttgttgttataaaattgtacatagtgtttcctcaaaagttttcagtctcctctgttctgcagtttatgttctctttcttgttttgattattatttgagtctttttccttatcaatctgtggaacaattgcctatttaatggttctttttaaagaaccagagtacttttttttttttttgctcctatcactttttactcactttttcttaatttctgcttttatcagttctttttcctcctattccctgggttgaataatctctcattggccagtgtattttttgttgctttctaatgaatggaattgaagttgtaagttccccccagcccgccaccacactgtggctttattcctctggcttctttgttatgtttctcactctcctttctaaacggtttgtcattttagttttgatttcctttttaacccaataattattaagaatagtggatttttacctgtttcctagtaggtttttggagtttttgttgtttttatttctttattactattaataatttatagccctgctgatagtcctttattattaatttatggccctgttctattgtggtcaaaggaatatggcttaggtaatgcctacattttgaaatttatagaaattttgttagtagcttgctaaatgtcaatttttataaatgtcccctgagtatcaagtgctaatagattttattggtaatattgttcaaagcctttatatctttattttttgtttaatataataaatgacattaggttatttaagaaaaatgtatatatatgttgcaggtataataaatgatagatctggaatttgccttaaactatcccagcaggtataataggggtgacagaaaaataaaagaagtatatcaaaatgtttatgattgttacagttgggttatggtatatgagggtttgtattctctaattttatgtatgtttgaactttttaataaaatttttttttaaatcctccctatacttatttgtttttagattgcttgatctgtgattcctgaaaaaggtgtgttaaaatatccaactatg

SEQ ID NO: 51255 - DNA, 2686 bp, Bovine  19866880641782
  misc_feature (1)..(1): n is a, c, g, or t
ngacaaagtttcttgtcccaaaattaaccaaaatgatattacttcaggctgggaatggatctagactaatccatggaaagtatgtttttcccaaaacttccatggttcatttggaaagcagctttactgagctctgaagtcatgcagggacttctggtcgctacaggtgaatgctgctctcattcactggaaacttaataagcatagagcagcagttctctttttcagaaagtgttaccagcactgtcaccattctccagtcatcctcttcacagtggcagacactctgctttgtccctgtgccagtgaggcagactgttccacgtggtttgttgaaaacaagttgcagatttcaaagaatcctatttttctcagagttggctatatcagtactgtatacatagtgtacccttgaaatgtcatgaattattggaaaacatgggctgagaatttatttacaaagtcacattagatttaatatcctaagatttgtgaatgacaaggacttaggacttgccagtttgagtataggctttcttgatggtattggtcattcattttaattcctagtctctttgttttgctgttgaacataattttggataagtttactgattagcttaagttttagcttgacttttgttccctttgatatagttgtgtctggtcaaaattaaagcatttttttccttttggcaaaagtgaatgggaagactgaaatagcattagaagctactcagctctttctaaagcttttggattcccaaaatagagaagaatttagaagactgctgtatttcatggctgttgcagcacatccttctgaatttaaattacagcaagaagtaagtcttttgtctaaatgttaattgtattcagtatctgtgatacttacaggacatattattccattatcagcatcaagtatgtggaaatggacagtagctattaatatttaacattgctttttatattacatttattcttaaaaataaattctattgggtatatattcttttacagagtgacaaccgaatggttgtgaaaaggatgttctcaaaagctattgttcacaataaaaatttatccaaaggcaaaactgaccttctggtgctctttttaatggatcatcaaagagatgtttttaaggtaaaactctgaacgtaaagttgaacttatgtaatagatcactaaattaaaatgcataatgttccatgtgccttcttttttttttttttgtaagattcctggaactctacataaaattgtcagtattaagctcatggacattcagaaaggaagagatccaaacagagacgcaggtaatctgagaaatactccttccatgtctcacgaggataagtagttgcattttagcttcagctagactctaactcatcttctcagagctattcagacttagcagagagcctttttatgtcagaaaagcaacctgacagggttagaaagtcagcagtgcttagcacctttacatgcattttataaagtgggggaagaaaaaaatatatatatatatacaagtgggtttttttcttgttaaatctgaggactagatccattaactgaactttttacttttaaactttaaggatatatttattgccagagaattgatccgaagtgattattctgaccatacaaggaagacaaccaaggatgagctgttgaatttactaaaaaatattgatgaggattcaaaactttccaccaaagagaagaaaaaattgttaggtcagttctataagtgtcacccagacgtgtttattgagtattttggggactgagtttccagtatctgtatataacttgtgcattttaagaataaattatgtatcctaaagattcaatcatattgtaatattagatgttcctctaagtatgaaactgtacttaataaaacattttttgtataaccttttgtgaaactgagtattaggtggtgtattgctgttaagtattgatctctctcaggtgagttgatttataattattgtgcacaatactttatagaacatcctgggaatttaaatgatgggacattgcagcgtttataaaataaagtattaaacagttaggatgtctgtaattacaagttaataggagtgtggtttgtaccttgaaaggtatatttcttgaagatacaagatagaaatttaggctatgctaaaatgaatttgtcagttaccataaactgtagacaagtcagaaattgaactgtcctaatgcttttgacaacttcagcatcttttaaagcttattgtgtataatttcaaacatacataaatatggggagaatagaataatgagcccttcatgtattcatcatccagtttcaacagttgtcaactcatggccagtcttgtttattctgggctcccacctcagcagatttcatacatgctatcacttcatctataagatttcagtatatatgactaaaagataaggacattaaaaacataaccccagtatcattattatacacacacaaagtcacaattccttaatatcttcaaaaatgcagtcagtgttcacagtttctgatctcaaatgacggtgacatttatgtagggatcccaacagagttcatacattgcaattggttaatgtgcttcttaaatctttataggtttttctcttgtctctcctcccttcttttctctct

SEQ ID NO: 51256 - DNA, 1266 bp, Bovine  19866880664215
  misc_feature (1)..(1): n is a, c, g, or t
nctgtattacacgctatgaatccgctgagggtggggaagagggtatagtccagaaagaggaagaagcaggagcaatagaagggaagtgaaaagtaccagcagtgcttggaaaaaaggagtcaagtttcatgcagtaccgaagcatgaggaggagatgatgggggtagaaatgagcattgcttaggagactcaggccttgcatggcaagggaagggattgtacagtgatgagattggttctggggagctattggagacttctgtgcaggggaatagtatcattgaaagtacccattatctagggagattaatctgttgtcagtgttcaggttgagagaaggcagaactaaagaggctttctgatggcccaggcattagggacccgaataagggcttcagagaaaccagggaataggtgaggcaggtgagcaactgtgtggcagaaacagattcggcagcacgtggagcatgctctaggcctggaaggcctagcttgatctgctagttggtgtccacactccttaggaacctgacacctggctcattgttttcctctcctcatcttctgccttcatccacagtgggtgtggcttccatggggatgatccagcccgtgtgttgttatggccctcacttctgctcagccagcacatccttcatagacacacctttgcgtagaaatgatgatcaccctctacagtcttgcctttaaaatgtttttaactcagattctcttcctctgcacctctgtccttccctccctgtgggctccgtcccatctctggtcaggtcaatgacctaatcagttctgctatatcctcttcatgtgtgtgtccccaggctccatcctcagctctttatccatctctccaggtggagaatgaattgtagagggtaggagtgaaaaccactgcaggtgtccaggtgagagaggaatgtgtcagaggtagagactcagagaagatattttacatatttttgcagacagaaccagtgggacaagataatggattgggtatgagtaggagaaggtgagggccaaaagactcaaggttgactccgaggtgtttgcttgagcactgactttggtgtcacttgttgagatgtagaaggtacagagaggaggtggttcggtggggcagtggtggggatgggcagatggaattgagagtttggttttgaacatgttagtttatacatgcaagtagagatcaggaaatactaacttgggaggagtcatcaacacagataacatttagagttaagg

SEQ ID NO: 51257 - DNA, 1390 bp, Bovine  19866880669676
  misc_feature (1)..(1): n is a, c, g, or t
ngtagttgcaagctgacattcccaccaacagcatataagggcgtgcccttcctccccatcttatccaacacttattatttgttgtttctttgacaacggccattctaacaggtgtaatgtgatattgtactgtgctttgatttgcatttccctgatgatgagtaatattaaacattttttcatgtgtttgttggccatctgtacatcttgaggggggatgtgtgcaacagatgagggagattaagaagtacaaattcccaattatgaaataaatgagtcatagtgatgaaatgcagagcatgaggaatatagtcaataatatattaattctgtgtggtgacagatggtaactattttggaatgtacagaaacactgtatcagtatgttatatacctggaactaacagtgttggaagttcaataatgtttaaataaaaaagtaaagcccaaacatgaaaactcttatgcttaaatctgcccaatggcttcccatctcattctagtaaaagccaaagttcttataattctcaatgcactaagttacctaactgttgttcccttaaacctccaattttatctattctccactccagtcacacaggtcttctggctgctcctccttaaacataaaaagctgttttacctcatttcccctcaggtctctgctcaaagctcacctcacagaaaacttccctgaccatctgatataaaacaacattcttcctctgtcctctttccacattgcctgactctgttttcttgctttgtttctctccagagcactaataaatacttgacattatttactagctggcctattagccactaaaatgaaactccatgaggacagggcctttgctttcttcactgctataaccccagcacccaaaatagtatctggcacatcatagataactcataagtaattacaatctatgttcagtttcagaaaagaaatcaataagttacagctcaatcacctctgattgcctgacctgattgcctggcatcctgataaagcttggaaaataaaaaatgaaggactaagctagtagatcaaccctttcttaaaaaaactcgaatacttttgagacttctattaattctaggcattgtatgagagttttcaatataaagcagagatctaaccaggccactactcaatggatttaattactgaagcccatattaagaacattctccttgggtagcatgctcttatgtccataatacttaagaaataaaacacattccaagttttaaaatcaattagcaaaagttccgtgaaatatgttaaatcccaggtaaacaagccagtacttgcacacaagtaataagttacttaagagtgaatgaatgattttgccttaagtagtcacattactttctt

SEQ ID NO: 51258 - DNA, 2417 bp, Bovine  19866880721700
  misc_feature (1)..(1): n is a, c, g, or t
nggtgtggttttggaaacccgaaggaacagatagtgaaatagaaatacatccaaataaaatagaatggtagctattttaagactggcagttcaaaatgatccctggaaggacaagctaacaatttaaaaccatattaagttaaatcaccacctcataacttatttttttttttaaggtagaaggcctttctagttagccttcccaagggagatatcatcacaaaatgacagatttgaatatttaaaaatgtaaggcttccctatactccaaaataacaaataaatgtaaatcaagggcaatatcaaggacagttttggaaaaatatctgcaacaaattattacacaccaaaggcctttacatgtcatttgaaaagaaagtgtcttcatgctaaaatagacaaaaagacatgacaggacagccttggccactgacaaactagaaagtacaatgactaatgaatacttgtaaataacacactacaaacgtaagactcatttccttttcttaagacctaagatgcttccctgatagctcagttggtaaagaatgcaggagaccccacttcgattcttgggtcaggaagattcgctggagaagagatatgctacccactccagtattcttgggcttctcttgtggctcagttggtaaagaatctgcttgcaatgctggagacctagggttcaatccctgggttgggaagataccctggagaagggaaaggctacccattccagtattctggcctggaaaattccatggactatatagtccatggggttgcaaagagtcagacatgactgagtgactgtcactttcactttcaatagactatgaaatgatgaaagacatctaagatgaaaagttaagcaatcatgtccacttttacaactttatttaacactgtacctaagagtcctagctagtgtagtgcaataagttgaggaaaaaataaaatgcatagagaagaaaaagatgtaaaatcatctgccttaaattctcagacaacatactatgtacaaagaaaactccaaagttcaaccaagaaaaacatactacgaattaattaaaatggtaaaagaatacgaagtcaatgtacaaagatcagttttaaccctatctcatagcaagaaacaattagaaaaactcatattaaaaatactgcttatactaagagcccaaaacatgaaatattcaggggtaaatttaacaaaatacttgcaagacctatacaatgaaaactacaaaacatttctgagcggtattaaagaaaatctaaataaatacaaagatataccatgtcatgaattgtatgttaagatataaattctttgtaaattaatctatatattcaacacaagccaaattcaaataccatagactttttcttttagaaactgataaaactgattctaaaagttatatggaaatgcaaaggactcaaaatagtcaaaacaattttggaaaagaacaacaaaattgaaggaattatactaccacattttaagactttttataatgctacattaataaagaaaatgttaaattgtctatccacaaatgtatatgctgaaattgaagattcatgtccaagaaatgattcttaatcctatgtcatattgtataaaaaattaatttaaaatgtactacagactatatgcatacactcatttttaaaagttgagaaagtgaaaatataaaccatggagaaaataatcagcaatggtcctaatttcttttaagaggttataccccacatacttgaattttacctcaaacttcttgtcttcctcaaactttttctgatcacataattcatcataatcttcttgtaacttagtatgagtttctttaagtgatgataactcacttttaatctcattaatttctccattaagttcttcaacctaatatataacatttaaccaaaatgaacatgtatgtaaattagttgtatataaaaatacttcattaacacaagtgtttagaaattgtaaacaatgaaaatattccccaagtaattactaatattaaaagctaccatttgttgaattgtgctgagtacttaataaacataatttcatactcttaaaaatcagctcccaacttacaggtgagaaatgtgaggctcatagacgttaagtaagttgcccaagatcaggtagaaagaaagtgatagtcaagattcaaatgcaaggctaagcctaggagttgtgctcttaagtactacattaaatcacttcttgttacagatgaaaaattaacttttataaaacttactataaaaattctgtaaaggttaccatttcattgctttcttaaagttttgttttcttgttgcaaattagatacacagatttcaactcaactagatgaagaatactgagtactaagtactacaattagaaactgaca

SEQ ID NO: 51259 - DNA, 1585 bp, Bovine  19866880722967
  misc_feature (1)..(1): n is a, c, g, or t
nccaaatgcatctgtctcatttttaaagctttcccactctctagtttcatcctcctattcaaatttaatcttctacaccaaacacaggttccaacagagagccaagatgtcttctgttatagttttctactgctgctgctgctaagttgcttcagtcgtggccaactctgtgcgaccccatagatggcagcccaccaggctcccccgtccctgggattctccaggcaagaacactggagtgggttgccatttccttctccaatgcatgaaagtgaaagtgaaaatgaagtcgctcagtcgtgtccgaccctcagcgaccccacggactgcagccttccaggcttctccgtccatgggattttctaggcaagagtgctggagtgggttgccattgctttctccaatagtttcctactgtctcccacctaatccacactcattcccaccttggtacctagaataatttttcaactcccctttcatttaaattctactccacctcttatgcccaattcaaggccccttttctccagaaatccttccctgaccactctaaaccctctattttctaaactcctgttgagtggttaaagtcaacactacagtttaataataacttaccagttgttctatatgtgtccacctgcctctccaaattagatgtttcttaaaggcaagaactgttccacatgctttcatttactcccccacatttctagacccaaagtaagcattcatttaattaacttgcaattaaaatagcttatttttatacaacttcacatattacagagcaatttcacctatatttttcttttgatccttaaattgcttctgaggtgtataggcattacttcctatggcatatttttttaaaaatcaccaaagtcagactcctaaaggtgaagattaatttttctgagataaagttccctaatctgtcaataaatttcaagcttaacccaaaaaatgcttcctattttaaaagatgagcactctcaaagttctgaaatagatttttagatggattaacaccaccaaccagttcaattaataaataattgtgaaaagaacacagaaaaaattgacaactatgtctaattttattttctatactattcagacttttaaaaatagtacacaaaataatggtaataagcttaagtgtaattaatattttatcagaaagctttgtttttttaaatagatgttatctattacttacataccaacatatcccaaaagagattgaatatagtgatctctttaagaggtttgctatatttttatctttgatttttattactaaagaaggctcgattatttccatcagaaggctccttctattttatatgggaaagtcaatgtcaaagcattattcacttaccagaaatatactttatttatgcagaaataaactgcatttatttggtgacctggtatttgtttcttgctatataacactgtgtgtgtcttctcagttgcttcagtcatgtccaactctttgcaacgccatggaccatagcctgccaggtctctctgtccttgggatttttttccagcaagaatattgggctaccatgtc

SEQ ID NO: 51260 - DNA, 826 bp, Bovine  19866880768401
  misc_feature (1)..(1): n is a, c, g, or t
nagaaggaagcttgttttgtgtgtgttcttagtatagaaagaaaaggagtaaacatgaatgcaggcagaagccttatcaacaactttactgcatttgctctagaaagtaagaaaaaaaaaaagagacttggattaggtagatggtcctaatttaaaatcaatgacacaaatgtgattgtttttgctagtttcagttctttgataatgaaaaggattttttttttttaatttccaaaatgcaactgacctctgtacatgttatgttgataatactggttcagatttaaatgaaaagaaatctgcttccatttaagtaaaacctttcctacttttatatatatatatatatatatacacacacacatatacagagtctttagatttaggcaaaataatatatatagtaatataaattttcatattaaacaatctggaaaatttttaccaagaataataagtagaaaagcaatttttaaaataattattttcttacctggtccaacatcattcctggcctcatccacactaacatttttacaaagtgtcatcgaaacagtctttttgttttctaacagacttactggtctctcgttcagcaacaaaggaatgctagatgttgaagtgctcactgtttgactttcaatttgatttacttttgaccaagaactagggcctaaaaaattcacatacactagagttttctcagtttttttatctgaagttgaaagatcaaaggctgaccttccacttatgtttactaaatctccagatggctttatgtgaaatgaacatgattcttccagctgtccttcactgtaaatttttc

SEQ ID NO: 51261 - DNA, 1704 bp, Bovine  19866880791754
  misc_feature (1)..(1): n is a, c, g, or t
ngatcctaaatgccttcgagttgaggatggcagcctggcatatgggaagaaccaaagtttagagtcaggcatttgctcaaatcccagcttaacactcacctgctatgtggcctcaggcaggctggttaacctctttgtactccaattataaaatgcagataataccacataccatgcaatgttgctaaaacagccagaaataatatgtgtaaaatgcctggcacagtataaacaaaagatagctcagctggtaaagaatccgcctgcaatgcaggagaccccggttcattctggattaggaagatcccctggagaagggacaggctacccactccagtattctcgggcttcccttgtgcctcagctggtaaagaatctgcctgcaatgcaggagacctgggttcgatccctgggttggaaagatcccttggagaagggaaaggctacccactccagtattctggcctggagaattccatggactatagagttggactataagagttggacacgactgagcaactttcactttcactgtagcagcctattgaattttacttaagtatcagttttcttctttatttaaagagtgtttataagaatgctttttctttcctaccaagcaaaagacatccattttatgtgaaaatatgatttaggacctattattctttagagatagggaattatgtgtgtgtgtgtatgtgtgtgtgtgtgaaaaaatcaaattcctaactccaattttaatgctcttcttttttcaacctgtttttaaataccccagcaaatcaacttcactgtaaaaagtgtctagagactaaataaaagaaagaatattagcctcttctaattccactatgtagagataactacacatggggttttattgtttacccttccagaaagtttttctctgcatataaacatatatgtgcaaatccacttttaataatcccatacagcaaagatcaagaatcccatttccctcaggaccatccctgcctgtgctaaactttgcaaggaacaaaatgtaaatccttatatcatatttttgtttatttcagaggagcatgtaggtaagggaaatgtttttaattaaacatcctgtcccaagatctacaacctccctaatatgtataaatctccctgtacccaacaatatgtaagcaagtaccaggcaaacaaatgcccacacattcacaatagatgctgaattcaaatatagtcaacattcaagtactcaagccagttgaacatgtgactgagtatgtcagcactccaatacgactccatgtttttaagccaacagatagctcccctataccaagtaccccttacttcccacttcagatacagacacacaaccatgtgagtccaggaaatggaattttgtttccactccacgtcccccatcctcacaatgccaggcagctgacttgggctgcctgtgtgtagtgaccggttcaagcatttcaaaatcagaaacatgcaggcttgctcacctcccccatccccatcccatctcaatccctgggctcccaccccttcccatcaagaggtactactgaaaagccaattttctaaccccactttaggggagcctaggtccctccgtgaggcctgtgagcacttgggattaattgttatttgctatctaagcaatacctttccaagtagccacggttagtgagtgctcatacattt

SEQ ID NO: 51262 - DNA, 721 bp, Bovine  19866880835131
  misc_feature (1)..(1): n is a, c, g, or t
nctgtgctgtactagtttgccatgtcacaaactgcactgtgccagtgttacagtaaggaccgagaaaatctttatggatgcaatatggtttgtgatatacttctctcaagttctcagtgatttaaatgtaatcagaccttctgcattttgcaacaaaaagcaggttttccaggtgactattttggtgagtgtcaaaataataatttatggtggattcctgtcgattcactttgaatttatatacatatatattgcaaaaaaggaaacttcacttacaaaaatagttaatgattgacctagaacataagctacctgagagagaacccatgtctgttttctttccccaggaatccttagcacctaggaaaattgctagtacattaaaaactttcagtaaatatttgttgaacaaacaaatgagagaatgaaaaagtattctttaatctcactttggtaggtcaatcccttttcagtttagtatctttgaacttcaaagacaacagcatttaatctttaaactttcatctctctggaagcttgactcaaatttgagggcatatccttatagattttaatattggagtatttaaatgtcatttaatctgaaaaaatatttctagggaaatgactttagcttgtctggagtcttacttgttctattagctctatttcttcaggtgtcgattcttttcgatttgcagagtttaaaatgtttctttca

SEQ ID NO: 51263 - DNA, 802 bp, Bovine  19866880858570
  misc_feature (1)..(1): n is a, c, g, or t
nacaggcatttatcatcctgtgtgataaacacacctggatagggccacctgccctttttcttcttagatcacccttttttcttagatcaccatttttcagatgtctctgttctgaatactacatgccctgcaaacagagtcaaccatcaagctgccaagcagtgattattcctaggtccagctctggtctgggcagcatctggaggcattcacggcaagcgcactttgacacagctgctctcagatacgctcgcctccttacctgcagcccagtcctccgtcaccaaactgagccttcctttaattgcaggtttcacctaaaattcatctgattcttggatctcttcctaattaggattctttcctaattaatctagagttatcttctatccccgaggacctgacgccatccaaccgccctaattaatgcacttgccttcactcccattcctaacatttgcagaacctgggacaggaatacaaacggaggcctgcaggccataaatgtaaatatttaaaagttataaatcaagctgatgagttattaaatgaagtatagtctatccaatcttgttattgattccttcataatgacctcaaggtcagcttcaaatacaaaattctcactctagtctttggcccttggtcctcagccagcccactttcttttctcactcccagctccatcccgcagcacaagggacctcgtgctaacagaaatgctgggctgtgcgtaaaaatgcttctatctcagccacatttctttgtcatctcttaggcttacgggtgcacacactgaggt

SEQ ID NO: 51264 - DNA, 1479 bp, Bovine  19866880909441
  misc_feature (1)..(1): n is a, c, g, or t
nttagcagtctgtctgctagtttaaatgctgcccaattcatgaatagttgaatgaaagcctaccaaatcagtaatgattggggcctccctggtggctcagacagtaaagaatctgcccacaatgtgggagatccgggttcaaaccaggggtcgggaagatcccctggagaaagaaatagcaacccactccaatattcttgccagggggcctggctggctaaagtccacggggtcataaagattcaggtcacagagagtcggacacaactgagcaactaacactttcacaaaccagtaaattgtgtgtggatatgtttaacagtaaatttccatttgaaaaaacagaattttaagttattatgggtttttcttaagtataaaataataaatgttaattttttatgtcaaaataaagcacaaaggaatgaaacctatttcccactacacatcagtattttcattatctattcttctagtacttttttctactcacaaatgtctataaaattgagaatattttacacattcttctttgtatttgctagagttcaactaatatgtagagaacattttaagtttagtgcaaaacttaaacatcctaaatatacaggacaattcattgattaaaatacgaagccttcaacagcagttagattaaggaaatctgtattcttgtgtgcaagtaattgaaatcaactatgactaacataagaaaaagaggagttaatattagaagggtattgggcagctcacaaaactattgagaaccctgggggagaaaattcagaaaatgggctgaagcaaaggaagcttgatcatcaggaaccacaacccagataataccagaggaatggtctggcttggaggctggctgaggtcacaccacaggatatgattgacatcagacactcaacaccattgtagattctggctgtctttgctagtctgcacaagcaattcctaaattgtttctgcatctgtatgttactccctcaagagtcaaggacctgaccaaaaagcacatgaaaagatgctcaagattgctaattattcagttcagttcagttcagttgctcagtcatgtccgactctttgcaaccccacagactgcagcacaccaggcttccctgtccatcaccagcttctggagcttgctcagactcgtgtctgaattgagtccatgatgccatccaaccatcacatcccctgtcattcccttctcctcccgccttcaatctttcccagcatcagaagtcttttccaataagtcagttcttcgcatcagagagccaaagtattggacttaagtttcagcatcagtccttccaatgaatattcaggatttatttcctttaggatggactggtttgatctccttgcagcccaaaggactctcaagagtcttctccaacaccacagttcaaaagcatcaatgctttggcactcggctttctttatggtccaactctcacatccata

SEQ ID NO: 51265 - DNA, 1165 bp, Bovine  19866880926397
  misc_feature (1)..(1): n is a, c, g, or t
ntcacatgtaaaagcatgtccattcataaggcctgtgatatttctgggaagagataattggtaccaatgattgtttctgggaagggaacttgagggctggagaatgatgcagagtctgacttttctttgtatatctatttgtattgtttgaatgttttgccatgtgcatatatcagcagttctaattaattcattaaaaaatgaactgtcctttcttctggcagctattgatattgaaatgcaattaaagcataaaaagaatatgtactaattaagcccatcaaataaaatatttcgctaactaatacactattctgtgcaccaagaaaaaagtctcaacaattaggcctgctccaagtaagactgactggttcttgagttcagggtgcagatggtgagacccacgtgtcagggttttcccaggtcctccaagtgttctcctggggcctgccgtctcacacactgcttcatagttgtctagttcttttctgctcttcctcttcgtctctgaactcctggagtcatgtttctcacatagcctggcatggagcaggcccacaatgagtgaggaaagaatgattcagtcttgatcctgccaggagtgaagtctagagatggagaagttagtagtagactgagtcttcccatagcagagcaagtggctggcacagtcagaccccatggcctggtggttctcagctggatgggtggcaaatggagtggtggacatgatgaaggggaactggaaaaaactgagtgtggtgaaggtaccagtccttggcatcccagttttatctccaaacctctgttgtgggggtggctgctggtggaggagacaaagccagcagaacagtgggagtagtaggtgggagagaatttggatgacagcagttgttcagtgaaatttcacagcgcctttcaagaatgaaactcaatttatatttagaatttgattttaatccaggaggaacatgcaggctggttgatatcaagaccctgtaagcaataatttttctgtcagttattaaaatgattagtaattgagtgtgaaagggatgattggtcatactcattcattcatttattcattcatttatttcatatttattggtgagtcattgtgccccatgagggaatacatgatggattagataactcctcttcc

SEQ ID NO: 51266 - DNA, 830 bp, Bovine  19866881014576
  misc_feature (1)..(1): n is a, c, g, or t
ntttggaaatgaaagaaaccattctgtccagagtcagtatcagaaagaaatatggctgcttcctactcttctccacttagtgaaattaattttatgctgctctcagtgatgattctctcttattggagttaggcaaaatgaatttaataagttacttttgctttcaaaataagctgcctaaatgttcagaaatggaacatttaattcttgagtggaatttctatgattatcttgtctaacaccaggtataaggattgttagattaaggattattgctttcaataagataaccgtcagaaataaatatgtaagcttaacccaaatactccatttccacccaatgctactttgattctcaaatcaagttacatgcaaccttcaattctttgccaatttactgaggttttaagtgtaagaagttggcctgttaactcaaaataaagacaacagcaatagccacgtaagcatgtcttacttgggcactgagcagtaacactgcttttttgataggacttaaggcactaaatggtggtaaaataaacacgagtatgatgattaacaacttctttagaatcctaaaaaagaagatcgcttagaaggacactagtaaaaaattttttctcaaacaaataaggcatcctgttggcaaacacaaataaaaacagaaggtcatgttgaacctaatacattcacggtctcggctaaactactggaagaaacactagctatccaactaaagagagctacaatagcatgtataaaggttggaaaggcaccaaaaggaggactcgaccacttccagttctaagagtcaggtcggctgtgtttaa

SEQ ID NO: 51267 - DNA, 1342 bp, Bovine  19866881051978
  misc_feature (1)..(1): n is a, c, g, or t
ntccttcaacacttgcttctttactttcctggggacatttaaacaactattaatatttgttggcattcctacaacatttgaaaaagaaaataagctcagcatcttcatctcacccaggagcacggagcaataaaatatactcaaggaaattatgatggcacagaaatcagcattaagatcatgtaacgctatattttagcagagaagagttcattacagtatatatatttaaagcagtgctgagaatgctaatcaacactcagaaaatttaatcttctcactgcgtacatgatgctttctcccaagttttattcacccatctcactcaccagtacctaaaagaggaacaacagaaaggatacaaatggagaacaagctctctggcaacgtgcatcactccagataacatgacggtgacagaccggagcccacaggcgagtcccaggtatgggtggctgccctgcaacactcttggccaggatgggggaattctccataactaagtgtatgagcgttgctcagtcgctcagtcatgtctgactttttgcgaccccagggactgtagcctatcaggttccagagcatcctcctaccaagaaaactggagtgggttgccatttcctcctccaggggaacctcccaatccaggtcttgaacccgcatatcctgtgtctcctgcattgcaggcacgtgctttaccgttgagccaccggggaagcccccataactagagtgaactgaaatgaatttctttttgataattttttcaaaaatgtgtgacactcttagagatcattggagctagtctggaatatcaatagctacacaaaaatcttggtgctctggaaactcctgacaagaggaaaatatgaaaatgtatacttctgtgaaacttcccccttaacgcgctaaaatcagcagttctcaaaagagccaagtgtaacacttgccaatcgatctgttttaggatccaaatggctctgctcaaactgctatagccccactggaagaaaaaagctttggcacttacaaatgatcaaaaactccctgctatttataatgatggagaaatgtcactgagaattaaatgttttgtcagtggaaaaacgtggctgtctggagaaggctgtagatacatccagggaattaatcacaggatggctgtgaacactcagtgccctcctagtccaagggagtgcaaaagacaagttttttgttttgaatttttctttttctttttttactgaagaatttttcaccttctcttgcacctgaactctggaatggtatgacacaagcaagtcagaccccaggtgtaacaccttgctcactgcagaggctc

SEQ ID NO: 51268 - DNA, 1052 bp, Bovine  19866881055616
  misc_feature (1)..(1): n is a, c, g, or t
naggatattttggttttatctcgagcttgatgcctgctggattatgagacaatagaaaatcagagctttctattcaggaaacgcattcatctgatcaccctggacacacttgcaattctatcgggtgacattagaggggttatgcaaactcagaatgatctagaactgtgcttgctaagagaacttcctgtgttctgatggaaacgttttatctctgctctgtccaggacagtagtcatgagccacctatgtctactgagcacttgaaatgtggctagtttgaggatctgaattttaattttgtttaatttttgttacatttaaatagccacatatggctggtggatagtgtattggacagcacaggtttataaagtactacattcatggttttcaaactgtttgattgtaattcactatcagaagcacattttatattgtactgcagcacaaacacatgtgttgaacactcacacggcccttggcgatgcccccctgcccctgcccctgcccccatcaccaaaatttcaccagatgaaatttggccttactacaggcagtgcacagtggtattttctgttttattctgttctatctcattttaaaggtgctggtatgacttcgttggttgactttgtgactcacgagaggattgtgagtttccgtgtaaagaacattgccttgcattatccaccccctacctctagccatttcctctatctcatctcctgtctctacatctggcctccttgcagggtctttgtgtgtttgctgttccctctgcctggtgtgattttctctgtttcatctcatgattgcatgcctcacatcctcagatttctgctcagatgctcgctagagatttcctcttacaaccaccctactctgggaaactccccatccctcttatcctgacctgcttttctctgtcacagtgcttatcacctgccatgtacatcatttgtttattgtcttccttcccagctagaatatcagctccacaaaagcagggattgttttgtttgctggtgtatcccagcatcccaaagagg

SEQ ID NO: 51269 - DNA, 2793 bp, Bovine  19866881094507
  misc_feature (1)..(1): n is a, c, g, or t
ntcagaattaaattcttccttctctcttttccccaggacatggtttagactccccagtaggcacctgcacatcaggcttggtattccaacgatttatctcttgtctttccatcatgagatgcttggggtcaggaatcaatcttaaacctttctgtagtcatcccaatgcctgtcaaagtgccctgctcatagtaaaagcccaataactggtttttgaactaaaaccataagctctatagagacattgccagataaaatacaactatcctgaaccaaaggcactgcttttaagataaatttaaaaatataagtgtaacatcagtgccaaatttgttacaataaatctaagaagaaaacctcaaccgttgtggttgattagacatctaaaacattacaatggatggctcatgagatgcaggaattatgattcctatcctcttccttagtctccttctcaaatattcacagcaagcatgaaggggaatttttaaagaaaacagaggaattgagggcttcagctcttctccccatcaattatttctctcgctgacacagagaggcagaatctggccccgtgcctacctctttctggtttcaatggatttggctgtcttgatggtgcttccatcctgaggggcatccctttcctgagaggcaggagcatctctaacgggtagtgggaggaccaccgtctcctgagtcaccgggatgacctcctcgtccgccccttgctggcccaggtgctgcttggcataatcaaagccctgcacaggctgcaaagaggaaacagatttgcagtcatgtttctggcaaagtgtgatgctcacagcagctttaagagaagacaggcaggaaaatgcacatgatgggaccatacttagctttccgatgaataagagttaactcaaatctccatcctgatttctgtctctacgaaatcaaagtccacattaattccacctagctacagaacttccatagataagactcagaaaaatgaatagtataaaaaagatgcaaatatgtttacgagaacaagttctttcaaggattttagaccacttattctaagtcactagatactgctaattagaagctcttaaatgctacattaaacaggtcctgcctcttctacataagaatagttctgtcatctcttaagtcctgtgaaataacaggttttgtgactttgccaagtcattgaaatctgaacctcaatgttttcatctgagaaatgaagattatcatatctgttctacttcaccaccctacagtgttacagagaatcacagatctgaaaacaaaagaggagaaacatgctaccacatgtgaggcagtataattattaacaataaaatggaacttatggaatcactctaatccggaccgttccctttagcaggctagctcacctctcatttgtcatgactgagaaattagcaaggtttttattgcagtgtctgaagtcccaagtgaaaagggcagctgtgagcaaaacccaacagacatgtattagtggggtaataaaaaaccaagaagcgtgtttaaacaattcctgtgagtgtctctattctgctctatgccccaaagcagcacagtacggatttgaggcaggatgatggggtggctaggagcagccactctgaaaacagatagcctgggttcaaatcctgtctctgatacatattagctgtgtggccttgggtaagtgactgagattctctgcgcatgtttcctcacctgtaacatggggagaatatagtgtgagcaggatcaaacgtgtatgtctgtgacagtatttaaccaccctcagagggacgctgtgtagataagtaaattcaagcccagcattgagctaagtacctgacacatagtaagtactcaatcaatatttgttcaaattgttttcctgcctactaaatcattggccaggtgaaatggacatcagcgattctctttcaaaaatttggggtgaaacttaacctctatcgtttgggttgtatcagaacttgacatgatcagacattcctcttttagcaccttacttagtcaagaactgtaacaggaaggccagattaaatggtctaagaccgtggcccaacccatcacaccgtgtctcagaataggagggagttttattgctaaatccagaaaagcttcctttttcaagctgtctgtagtatagccaagggcttctccagtggcttggcagtaaagaatttgcctgcaatgcaggagacacaggagatgtgggttcaatccctggatagggaagatcccttggagggagacatggcaacccatgacttgctgatgttcctagaatactgaacctgcttctcctataaacaattaatcaccagttgaacccaactgaaatgtttttggaaactgacctcttctccccaggtccagtgctgtactgactctgccatggtcttgtaatttcgattctgctcctttccgaacccatccttgacaatcctccaaagttatctcccttagaaattaatcaggtcatcactctctcattaaaaactctctggcacccaaactctttggcaaggcattcaagacccttgaattctatgtgaacccatgtgtccagtctcatcgcctattggtcccttttctgttctacccttatcctcccattatcctgttcagttttgttccaactctagttattgggcattggcttgtgtcagggactgtgcttggtgctggaaatacaaaggtgaataataactggctcctctaccctcaagaagctcacagtttcagtttcacttg

SEQ ID NO: 51270 - DNA, 732 bp, Bovine  19866881160098
  misc_feature (1)..(1): n is a, c, g, or t
ntaatcactagctagattcagtaattattaacattttactatttgcctcacaaatgttaagtcctaagttaaacttcagcataaaattcaaagtgtatttaagaggactcaccttttctaccttgtcataatttttagctttaatctgcagagaaacagaagaaaaaaaaatagaattaacactattctttttagagtattaaaacactatctctgagtgttttgattaagcttgtaaattcacttctatactttcctattaattctgcctttcaaaaataacaaataatagaagtctgaatccaacatggataacatgcattgtaaatatgccttacataaattaattttacatgtaaaaatgttatacattcaatatgttgaaattttgtgaactaaaaattttgtaaaacagtcacaagatgaataaagaaatacaaacaaggcatatttgaatagagctttgaatagatctactaaagacaaaacttgtactttccctgaaggactacgactaaaacaaccctgagtacggtagcaaaaaagatttgctaattttgaccacacaaattttgatcactctgtcaacctgctatactggggataccacagtgaacaaatcatgcatagtctggcttacaattttacagggggaaacaagcgccaaggggagggaactacagggtgctatgggagcatttaagaggcgaataaaactcaggcttgctgctg

SEQ ID NO: 51271 - DNA, 1554 bp, Bovine  19866881204520
  misc_feature (1)..(1): n is a, c, g, or t
natttccattgagagttttgctgtaacattttcataaaagtattcttagttcagatgctccacaaaataaatgtgtataaattcttttcttttaataggagtttgctgttgatccagagaaaatacagttgtattctttgtatcattcactccatcattataaatatcatgtttatctgatatgtaaagatgaggtaattactttttttatcttcttaaaaaagaaatgtatgttttcctgaggtttaagaagattgtagctacaatatttttatatgcaatttttaaaggttgcattccatttacagctactccaaaatattggctctattccctgtgttatacagtatatccttatggcctatcttgtacccttagttcataccttccactctgacgcctgtattgctcctcccccctcccactggtaaccactagtctgttccctatatctgtgaatcttctgcttttgttgttaaatgtactaattagctgtagtattttttaatgccttaaagagaattgttagaaataatttttaaaaatatgtgtctgtgctctctctgttaaatgctgtgctcagattaatctgaggctcatcgcttctcatgggacctgtgagtggtaatgtttttgagctgttatattcgttttacattgccatgataaatggcactttattgcattttcttctctcataatgtataatcatcctgtttaattaattcatttcagtcactgctttgaatatctttgctgtcctctttatcaccagaatgaccttatcccaattaattgcagagaaatgggtgttttgtcccttggcgtgaagaaatgatagttaaaatttaattgtatcttttcagtatcataatttaagttgcttagaaattatgtatgaccataccacttgatggatggaatataaggattaacctcaggggttaaatggttgtacacagtaaccttttttgacaagcattatcagttttttaatttaaaagggttaagttggctcaaagctgtacaatcatgaattttataatgatctggtatggggaaatgtgcataaatctaaaatctgtctagcaaaggagaaagtgaatacggtcacacagcatatgttggctatttttacgatgctctggaatgcaggaactgaccccaaaatttgttattccacttttaacgcaattggacggaattgagaaggtttgaaccacttctagccttcctccttccgcacttggagccgacaatgataggattagaccactcaaatttattcgagatagtcattctctgcagatggaatttttttgaaaaattagtgtttggcaaatttttaaatcctcttttcattcaggatagagaaacagtgagcccttgtgaagagcttataaagtgataagtataaactaatttggtatttcttttcattttagatttcttccgtgcagaaaaaaaatgaagatttaggacaggaagaaattgttcagctttgtatgaaaaatgttgaatgggtagaagacctatttgaaaaatttgggagaa

SEQ ID NO: 51272 - DNA, 2617 bp, Bovine  19866881268465
  misc_feature (1)..(1): n is a, c, g, or t
ncttcccaggtggctcagtggtaaagaatctgcctgccagtgcaggaggtggaagagatgcaagttcagtcccctgtgtcgggacgatctcctggagaaggaaatggcagcccactccagaaatcttgattgggaaatcccatcaacagaggagcctggcaggctacaggccatggagctggacttgacttagcaacataacaacaaagtgattatataggagttcattgtacttattcagcccattcgtgtgcttgaaaatgttcataataaaattttggaaaggaaagtaattatattctcctgaccaaaattatgagaatgattttgattaaacaaaatagacggagttgttatttgtcatttatttgtaagaatctaaattcatgaaaggagctgaatttgtttctttaatgtttcatttcaactgtgtacataggaaatttatttaactatggattctcatattttactgtatttacagctatttcagagatgccttatgaaggttttgcacattgatttatggaagtgttatctttcatatgtccgagaaaccaagggtaaactaccaagttacaagtaagttaaatcaggatcttaaggatgcaagtcatgtcctaatttagtcatctcctctcgcaactcttaactccagaggatgaagaaatttaaggatttgaaaaatcaggattctctgagaagttagtaaaacgtggggaaaaccgctttaaagaaaatcactggcattagatttattctggagagttgaatcatccaagcccctcttctatattgaaacactgtactttcgcagctccagaccattttgttcagaggcttgttgtcaacttaataaaaggctgcttcttgtcctggcagcactcttggcaggttacatttgtgatgtgctttttaactattcgaaggcacctttgacagtggtattgtgtaattgacctcctcactaggacgcaccctcacttatctatctttgttgaatataaataatggaccttctcagatgctctttttgtatgtaacaaataggcagattatttctagaaccagaattctttgttttcttttcttccttagtcttatattgaacaagttctttctccctaaattttacttcagagctaatagatcttcagccataacttaccttcttaatcaatgaatcagatatttccccatttgaatctctacatataagagtcagtttgaaggttataaaattatataaaacatggcccctatctttgataagcttacaagtagtaggtaaaagacacaaatagtaggtaaaagaaacaaagtatgtaaattaatgacattaacaagctaaacacaaaagaacactgtatacttgcaaagatgtcattcattttgtttttataaaagatttaaatgttctgatcctttgaacggaagttatgattatgttttagttatagatacattttaataacggtttttctgttattaaaatgtatctttcacatttatttcagaaattatagatatattttaataacagtttttctgttattaaaaaacatctttcacatttatttcagagaaaagatggctcaagcatatgactttgcactggataaaattggaatggaaattatgtcttaccaggtagagttaaaattttctaatacatacacttaataaatttgaaactagtaagaaaaatactaacattttcttttatttcttagatttgggtggattacatcaacttcttaaaaggcgtgtaagtatttacatagttttattttctgtgtgaacactgatttagctacaatataattgatggcatttctcatccaataccagggaagctgttggatcttatgcagaaaatcagagaataacagctgttcgaagagtttatcaacgaggttgtgttaatccaatgatcaacattgaacagctgtggagagactataacaagtatgaagaggtaaattaggagagagtagtttattattatgacaaagtgattttaatttccatgcgttgtgggtttgtagcctttctaacgttaggtacctggatatcagtgctgcatacgtttgttttcatgttgattgtaatgaaaggaccattcctcatgttttgagagtctcatattactgttgagttattttttagagaatactgtaggagaattataattcttacaaaaccatttttattcagtgctaaactacacccacacagtcatacacatacctgttgccactggctcttatgaaagagttccttttggagttccttttccagtgtcgggatgagttgcagtgcacctgtcacctagttacagtgatgtgattattgccttgcaattgcgagatgtgggactgtggtccaacatctttgtttcataggaagtgatttattagtattttattgattaatttttggctgtgctgtgtctttgttcctgcacaggcttttctctagttgcagcaagcagaggctacgctcaggcttctcattgcagtgacttctctcgtggcagagtgcaggctcaagggcgggtgggctcagaagttgcagttccccagctctggcgcacagggttaatagttgtagcgca

SEQ ID NO: 51273 - DNA, 1312 bp, Bovine  19866881309352
  misc_feature (1)..(1): n is a, c, g, or t
ntcattgctaagttatctgtatctgactatgcataactattaatctggaaaaattttcaaagtttataaataatagtttgagaacctagaagtaacttacttttctgctatcaaaataatattgattaaagttaccagcaatcccttgcatcttttaatgtctggatacagaagatcataggtaataattttgacctatagtttgtatcttcttctaattctgtatgtgaccaatctccccttacaaacataatagagtataagctataaacttctggaatgaatgtgtgtgcacaaatttatttaagtgtatgtgtatgtgaatttgtttcctctttgcaggaactcaaaaaataacatactcctgagaaatagaaaattctgttctttaagcttttgccaggcattgcttttttctatgtaataccatttataaaattgtattttgttttataatttttagagagatgagattaaaactcacatgcattttgtagttccttccaaattaaatgtttaaaaagtataaatcatattacactgtttgagtgtatatctgtcttttaagactgtgatcttaatgcagatgaaagaaagatcttaatcattacagactgctaaagaccttatgtttgatattttcagagtctctttggttacttgttgcaaagaaatcatctgaaaaaaattttttgttgttgtttgatatttcattttgttttaaattagtttttattggagtatagttgctttacattgttgtttcagcttccgctgtgcagcaaaatgaatcagccatacatacatacagacagacagacatacatacatacatacatacatacatacatatcccttctgtcttgaacttctttcccattcaggtcaccatagtaccttaagtagagttctcttacagtgttctcattagttatctaagtggcaacccactcccagtgttcttgcctggagaatcccagggatgacggagcctggtgggctgccgtctatggggtcgcacagagtcggacacgactgaagcgacttagcagcaacatttagatataattagaaaaagtggtctttttaatgcctcctacataacctataaaaattttactattagtcgtatattggctttacataagcacttttcctcatataactttgcccttattttaatcctctttaaaagaccagaggcaggacttccctggtgatctagggcagggaactaagattccacgtgtcacacagccaataaataactaaagcaagcaagtacctaatgcaggttctgaggctaattagg

SEQ ID NO: 51274 - DNA, 774 bp, Bovine  19866881323982
  misc_feature (1)..(1): n is a, c, g, or t
ntaattgataatgccatctgtaggtgtagagatattttggctcagctcttttcaataaggacttagaaagctgtactattaatttcaacatgttttcttctcaggcacatttttcttcaggctcccttggttcactcttgacgtttggtaaataaaagacaagtgacggaggagcagcattcattaccagggacagaagtagaggggtcagtccgggagccctggttccattctagcacttaattccatatttcacgttgaaagagtaaagtgagaaatatcctaggccttcctatttcccggcactgcataaataccaaagtcattttgtgtttctgacgtcaggaggttttctttcaagctaagaatagatttaacatatataaatcaaaattaaattcccctctcgtggttaggatgcattaggcaaagtctcgcctgagtagacagatggcaggtgcagcaatgaccttgagctaaagcttgaggcagctccttggccctatttacatctgcattagttggtttatatacaacatttatccctgttctatttggtgtttaaaagggcccatgatttttcttaaacatgtgtggaaatattttccagggaagaagtcaaagaatagagaaaagaggaagaatggtctaaggatgatattttaactctgtaggtttgaatccagtagttttaaatttgttaccttttataataaaggcttttctatatttcaggggaaagttcaaattctcttatgacaaaatttactattt

SEQ ID NO: 51275 - DNA, 798 bp, Bovine  19866881405711
  misc_feature (1)..(1): n is a, c, g, or t
ntatgcattttctgaggacatctttgaaaagtggttttctttggagaaggaatttgccagataatctaagaccctgcagagaagtaacaaatattccatacaacatttatttttcttacttctgactggaaatctgtaatctatataaataaagcaaagttgtaaatatttttctgagcactaaagttttgtctgtatgaaaagtggagtggcatgttataaatgttttatggcagtttgatactcacaactggtactcagaacttattcaggcaataccaaacaagtggcaataaaacctttatagtccttcacaccattatgtagtttgtttatgtcacataaatcagagaaaaaatattaaaggaaaattttagtattttaaaaataatattactctgtcaccatatgtgatgtttctttgcccattaagtgaaatttagtttaccttaagtcaatgcaagtatatttccgatgttacagcatgtctacaaataactcataaaacatcacagtctttttggtaaaattaatgatactttggccacctcatccgaacagttgagtctttggaaaagaccctgatgctgggagggattgggggcaggaggagaaggggacgagagaggatgagatgactggatggcatcaccgactctatggacacgggtttggataagctccaagagttggtgatggacagggaggcctggcgtgctgcaattcaccgggtcacaaagagtcggacccgactgagcgactgaactgaactgagtgatattacctgaagaatgtcgt

SEQ ID NO: 51276 - DNA, 994 bp, Bovine  19866881834284
  misc_feature (1)..(1): n is a, c, g, or t
natgcagcagcaccgggggcagggaaaatggtaagtctccaagagaaaggcacaattcaccaaactcaaagggcaaatgcagaatcatatgccatggcatctaaattttatttagatgtaaccacagtgttactcagacttgtgcattttttaagggctcaaacaagacctaaagcacaattgatttcatctacctgtgtgagtttttaagatttctataaagttctttagaattcttgccagtgtacttgaatttcaagcactgtgggggtcagaacacaatctagtcaatgctcattatctccaataataagagtctggaaataaatatcatttagtgtgtatccgaaatctgaaaggaagggccacaaaccctctttgtggcagagatggcagatgtggaaggcctctgaaagcatacaggatgagcctatcaactaaaactgctttatgtcatcctcaggattgggatataactcactgggcagaggaggaacaaatactgatatggtcacagagaacactgggcaaagtagcaaagcacagacgtgggttcggagggacagatccaacatcatcgggctctgtggtcctgggcaagttacctcatctttctcagcctcagcttccccatctggaaaatgggaataattacagtttacatcccataacatgactgtgaagattaaatgccacaataagcatgtcgggtacacagcacagcgtcaggaacatggttaagtgctgacattataagtgaaaactattactttcactgtaacttacacatcacaggggttgttagttaagatagtctccatttaaaggtaattcaagtgtgaacataacagagacaattttattccacaattcccactgtctatggtaagaatatatttcagaagcaaagcgccagcttctcttttaaagattctgttactctgtgtgattctctaagacttgctctggtaaaaatcgacacttttggaagttc

SEQ ID NO: 51277 - DNA, 3533 bp, Bovine  19866880398387
  misc_feature (1)..(1): n is a, c, g, or t
nctcagctgggctgacgtttgaaggctagaatgggaagaatctgcttccgagctcactcaggtgttggcagaattcatttccctgagactgtaggattgggggccctggcttcttgctggctgacggctactctcagcctgtgggtgagtctcccaaatggccacttgcttctccaaaggtggctggaagaactgtctcgagcaaggtctgccagcaacatggagccttatctaacatgacaccatcacagggacgatgacatccatcgccactgccagattctgttgtcagaaacagtcaaggtggagggtgggggtggtgccacagttaccaccggggggtggggacctccatggtggtcacagataagaggtggtcacacctcttatctgtgtcaattacacagtcctcttgtccttcataaccttggcactttagaatactgagccgcttttattgatgtgtgtacttttgaccattgtggtttttttttttttttttttactttttattaaaatttatttattttaattggaggctaattactttacaatattgtagtggtttttgccatacattgacatgaatcagccaagatggtaaagatgaccctataggtgagaccattgtgtttttaacaattactaaaatatttttctcagataataggggacacatgcatgtcatttaccctccctgcaaacttcagcctatgaatcatcacgtgcccctgttttcatttcctgagagatgctggagaagagacatagcaagcatgagagaacatctcaagaagtcatgggcagagaaagacaagtatcgtatgatcttgcttttatgtggaatctaaaaaaatggtacaaatgaacttatgagcttaattacaaaacagaaatgagtcacagatgtagaaaacaaatttatggcaggggggataaattggaagattgggatcgacacatacacggtgctacatgtatataaaccagataactaaaaaggacctactatatagcacaggaaactctgttcaatattctgtaataacctaatgggaaaagaatctaagaaagcaatgtatatgtgtatatggataacgattcacctagctgtacacctgaaactaacatgatgttgtaaatcaactataatccaaaaaaataaaaataaataatgaaaacttaaaaaaaataatggggagggataaattaggagtttgggattaacatatacacactactatatataaaatagataattaataagtatccactgtatagcacagggaactctactcaatgttccataataacctataaggggaaagaatctgaataaaaagataaatatgtaagtataagtgaatcactttgttgtatagctgaaactaacacaacattgtagatcaactatatttcaatttaaattaaaaaagaggtaacagattagctataaaaggttgtgagcctagaggaatgatcacatctttgatagaaatcagaaaattaaggggaagattctggtttgggaagcatactgaacatttattgcttgccctctggaaaccttgatgaatctcagccagagtgatacaggtggagagaatggcaccccaactctagtggcgggtgtggctgcgaaacctttcagagccctgggtctcagtgatcagcttaggaattggcccatcctgaccaaagccatgtagatgctcagttgcgtcttcttagagcttttgaggaagaggcagtatcctgcagagtatcctgcagagctttaccccacgggagataagcctggaactgtggtaagcattctgccatgcgtgttaattaatattaggttttgctcagagacagaaacctttacaataatttaaataagatacaggtgtattttttcttatatgaaatgcagtaagcaattcagggaggctgtgtggtggctccatggtcagcagaacatggtttctctcttgctcttgttcttgactacacggatggttccagacagatgcttgagttttcaggctgtagggaaaagggagatggtgaagagggattcttcaaggacaacttttggcaaattgctcatgacgcttctgccacttgtgtgccactggccacactaccatgcttaactgcaacagaggcatggacatgtgggctttacctcaggaggctgttcccagccgcaggtgagaggttttatgataaaggaagcaaaggggaaatggctgtgggtggacaatgagctttctctgctgctccctgccaacggagagcctgactataaatagagtctgctctgaaggagcagagttgaaagatgagactaaatcaatcctgtcccagtgatagctttgaacctctggatcaagctgtacctgaagccaaaatacccctgctacttaagccagtaactctcccttctttccttattccctcccttcttcattccttcatttctgtttttcttcttctttgtcatgctcctttttaactgaaaaaaatctcgactggtacagaaaggaggatttcccccaaacagcatataagatcacctttatttctttgttctctcaagctctccattcctctcacagttactcagaaaggcaactgaattttcccttgtatctcctaagggtcaaattatgcatctccatgctctatttcctttcagcctaaaggagagggagctgctgatgtttcttagaacttgcctttttggggattggattaaaaatttaaaaatatgttggcttgtaaatctctactaaaactcataagctgtaaatctcagctcaacctattctaggtatttttacttatttttagcaaatgctccttggaattctttccctatttagtaaaaactcctctgtccaatatcttggctgcatacccacgtcctcttcctcaattctgacttttattaacattaatagcatttgtgagaattagagcttaatggattgctgttgatctgagaaccctgccataatagatcttgttttaaaggattccaaacagttagttggtcagcaatccagccttttttttttcttaaagtaactttgctagtagaatgaatttgccccgcctgttcccttggcatctctttttctgggtctttcctttgaagcagacaatccaaaacattaggtttggaggggttttttttcttcagattctgaaagcacggttttcacttaaattattatgcgtctctgtccttacttatatcagtaaagtgattaggagtgtctaccaactgcaattctcaggctatgaaatctggatttttgaatttaaattataccacagcaccatatggctgaagagagaggagtgctcaatttcttatctaactgagagttcctctcaagcaagggaaattgccgtcacagtccaagttttccccggctctccgaggtttagtattactgctgcctcccaaagcgcatgcgcgtaggattttctgaagcggctcaaaaaaaagttgctacaaaacacagcgacgaggagag

SEQ ID NO: 51278 - DNA, 985 bp, Bovine  19866880412746
  misc_feature (1)..(1): n is a, c, g, or t
ncaggctcccccgtccctgggattctccaggcaagaacactggagtgggttgccatttccttctccaatgtgtgaaagtgaaaagtgaaagtgaagtcgctcagtggtgtctgactcttagcgaccccatggactgcagcccaccaggctcctccatccatgggattttccaggcaagagtactggaggggggtgccattgccttctctgagtctttcctcttaagtgtctgtaaaaggccaccgtctatgtttgcttgtgcttatttgcttaatgcacttgcttcagctcattttcagaaggatgtgatgatatgcatgttggttggtcatgcccccgggctgacttgcctctgcctacttaaaatgcactgtatttttaggtcacccacacaacctttttaagaaatcggggggaacctgcaatctggcttttccctgacatgaagacaacctctaaagatatatcttattgaagtcagtcctttaaaatagaatttaactgaacttttttggcatgactataacctcagaaatataatatgtacttgcctggtgacactgaagtgtctactattttggttagtacagatttcactttgattcttttgagataattatctttttaagatggaaatttctttttctctctctctctctttttttaaaatatttatttgtttggctgcattgggtcttggttgcagcacacaggctcttcactgtggtgaggggctcttcatcgtggtatggggggcttctctccctagttttggcacgcatgctccagggtgcacaggttcagtagttgccccatgggggcactcttagttccccgaccaggggatgtgggatcttagttccctgaccagggatggaacctgggtcccctgcattgcaaggcagcttcttaaccactggaccaccagggatgtctctaaggtgaaaatttcctaggtagccattgccctatcggaaaaaaatgc

SEQ ID NO: 51279 - DNA, 1793 bp, Bovine  19866880421490
  misc_feature (1)..(1): n is a, c, g, or t
ngcccctccctccgcactagtttgcctggcaagttcggagcgggtggccggttcgggccagccctcctccaggtcttccttctctgctttccagtccccggggccgctcaggcccggggctcggggcgctcttgaagccgatccgcagggtgggcacgcccggaatccacaccctgccgccccctctcgatgggaaggtgcgaaagggaatctccgcgcgttactccccacccccgcacccacctcgggacctggcgggaggagcggccccacccactgggtccacccggatatggacccgcccggcctaacaccggtcacacgcaactcctctccgtcttccgcaccgagcctgggccggacacacgtacacggtcacctggacatcgacctcgctggccgagaggaggaacagggctaggaggtcctccgggctctcctgcgcgtctgggaggggaggggagaagaagccaggtaaactcgcccggggcgttttcacccattggagttatgacaaatgcacagtggacacccgggccaggatttgagtggggcaagagtactcggattcctgcaagcgcctccttcagttgagtgtcctggacgcagctctggtctcaccctaatccctacactgatggacacacgtcaacctagccaatccaaccatatctggtgttatcaagacagcacgatgcacttgggaatcagaggctccgaaatgggtaagactgcacggaaagcaggagagatcacagatacctacaaacagagcaaagtattctgtgtattgactgtaacttctgcccccacccccaatggaggcacacggagctgcagctgggtttctaaatctaaagttgagttgatgctcttctgcaaaattagatgggttacactctccactgcactcatcatttttgtgcatataaatatccagtgcaatctggaagtttctaaaaattacctagaaaagagctttgaggatcttaccctcccccaacacacacacacacacacacacacacacacacataaacacacacacacgaaaacaaaaagattgataggtggtccctatgtaggaactcataacacaggtaaataattcaacagttaaaaaattactaaatggaatagagtcagctctcatggggccagttctccaagcctgacccttttctagccccatatccttccaggaagctttcaaaggtggttcagttctagaaattttcatggagaagcttctggaactggtgagacatggttgtgcccccaaataaattacaatcccaagtgtccacacagtataaaaagagatagccgcgccccacccgccatgagactgcatggtagaaaggaccaaactttgaagccagactgggctgaattcaaatctatgaccttgatcaagtgacctctttaagccttagtcttctcacctgcaaaaatggaactaatgttactagtggctgggatgagaatgtttatttggttcaaaatatcatctcttcccatgggaggaatatgttccctccatatgaacctcaggcttggccacggaattcttttggccagtggacagaacagatgtaatagatgctacatccaaacataagtctaagagccatcgtgtggttccaccatctttctccccctcctactaggggagcagtgtgtctcagttcaaggctgtccttcaaattgggtcctggattaaggaaatgtgtgacagagctggccacatgcacaaaatctttgctatcagctgctgagatttcaggaaccat

SEQ ID NO: 51280 - DNA, 1689 bp, Bovine  19866880442551
  misc_feature (1)..(1): n is a, c, g, or t
ntgaagaaacagaggtaaagtggatttcttcgagtctcagaatcccagggcaaggagaaggattctagtgggtttggctgcagagcctgcatcattttcagcctcacacatggttctttcttcctatttaaagagcagcgcttcctcttgcctcggccccccacttgctctttgcaattatctaatcctcagtcctttgcaacacttaaagctgcagttccccaccattagaaggcattagaatcacacagagagctggacaaatgtgcaggtttctgggctccactcccagaaatattgatcctgtcagcctcggtgagagctgggcatctgtaggtttatcccaggtccattacatgacggatccctttatgggatcaacttgggtggtacagccagatgcttgcagagtcccttttcctgtctctgtgtctgtcccttggcacctgtggacttttttttccaggagaccattcttgtgccacttgagcccactttgtccaattgcactgaaagctggaagtgcctgggaaagcatgtacccctgagaacgtttaactaatggcagtggcatgaagttacctgaaactcaactcccttattcaaatcaggatacctctgaggtttaactaagactctagtattattacagcttcccttggcggctcagggggtaaagaatctgcctaccaatgcaggagacacaggttcaatccctgggtcagaaagatcctctagagtaggaaatggcaacctgccgcagtattcttgcctggagaatcccacggacgatgagcctgcggtcggaggccatggggtcgcaaagaatcgagcatgaccgagcacagatgagacctgaggtcagcaatccccaacatttttggccgcaccagggaccagtttcgtggaagaaactcttccacggacggggggctggggtggtggtctggggatgcttcaagcacactgcatttaccgagcacctcatttctattgtcacatcatctccatcgcaggttatcaggcgttagatcctggaggctggggacccctacatcattccaagtcctccgtccttcaccagcctggtgaccttaactcctctgcccctcagtgatgcaggggtaacggcacccacgccccaccgggatgtgaaaaggtgacccctgaaattcagctaagagcacacagctacgctgccaggatcctgatcactccccactctctggacaggtgaattcttagcagtgattcttccactcgggaatgaagaggaactcaaaaagtcaggtgatgggtgatgggtgatgctcgtgggggaagggagccaggtgggaggcagcctccacccgcccaaaccaaggtgaaatttccctcaagtccactgaaatcagaggagcgagccccagagcaaggctgacttactgcactgctgagaccaccttcctgggctcttttctgaaaacccataaatgtgttctcattcattaaatcaccagcaattatgccttctcaacactctgttttcaagactgcgtacaaaaatctgtccttaataatgaataaaagactatattaaaactagacttgcaaacgggctcacaaatgaaagctcctctttaattggcctaagagctgacagaagctgaaaaacagcgaataatccagccttccgggccatggctggtc

SEQ ID NO: 51281 - DNA, 2227 bp, Bovine  19866880443351
  misc_feature (1)..(1): n is a, c, g, or t
nttttttataattaaaaacattataaaaaactttaatttcatttgactaaattcaggtgctttatttgagttcactcagacaatggtaataaatgacagatgacgcttccccagatggcactagtggtaaagagcccacctgccaatgcaggagatgttaacagacggcatgttcgatccctgggttgcgacgatgccctggaggagagcatggcaatccgctccagtattctttcctggagaatcccatggacagaggagcctggcaggctatggtcaatggtatcacagagtcggacactgctgaaatgacttagtgcgatgactccactataatttctgctactcttaagttgtgcaagttagtggtaagtgacatttttaactccttggatagtttctaggatactggtcatatatggaggacttggatgaataagtaaaatgagaatatttaaaatgtgcatttcctgatttctgtgttgtcagcttttggaatagtggtttatatcccaccactcaattttgatatatttagtgttctgtgtatcagtttgtagacagagtagaggccccatatagcagcttgatggatgtgatacaggctcccgctgcgtcctgaggccactgagctggtgtgtattgattattgagtcctctgacctccaggatcacactagtggtaggcttgtaaggggtgtgtctctagcttcttgaatcttaaaactggaagaaatctcagagtgatttccagctcagtgatctcattttatttattaggaaagactgatgcttgttattcattgtaactttagtatttccagtccaggccagtcatctccctatcagaaacactgagtgccttccagggctcatgcatcctggccttgtgggagatgagactccctcctggcaggaaaagctaagcctatcggagcggagaaggcaatggcaccccactccagtattcttgcctggaaaatccatggacggaggagcctggtaggctgcagtccatggggtcgctaagagtcgggcacgacagagcaacttcactttcacttttcacttttcactttcatgcattggagaaagaaatggcaacccactccagtgttcttgcctggagaatcccagggacgggggagcctggtgggctgctgtctatggggttgcacagagctggacacgactgaagcaccttagcagcagcagcaacagcaaacactttagaagagaaccagaagtaggactatacctgtatctaactgttttctgcaaacacagtgactatacaaatgttgcatctctaacaccgaaaagtctttggagattttattttatttttattttttaaatttatatatcatcttatcccaatttgactaacctcctttttcacaggctgaaaaaggtttagaaaatcaagatttgggggagtaagcaattaatgatagctgcaactatgatctgtaagattctgctttttctgacttctagttgtattattagaagtatatatatttctaatacatatatataatatagtacatagtacaatgtactatcagaactgtatatacatatatatacatagtacaattctagttgtgttattattagcttctctgaaagctcagttggtaaagaatccgcctccaatgcaggagactcctgttcgatttccaggtcaggaagatccgctggagaagggaaaggctacccactccagtattctggcctagagaattccatggactgtgaagcccatggcctcacaaagagttggacgcaaccgagcaactttcactcgttcagttgcattattactttttatattttcaataatttaatttgtgaaagatttttgtcactttatagaagatttcctaagttgtagatataagttaaaacttaaagctacaattagaggcttagtatgactttaaggtcatgcactaattactgttaaaagtataatgctaatatacaaatgtataatgataatatagcaatgaaaataacatccactccatatatggggtttactatacatgaggtacctttctgaatcttttagatgtatcaattctgatccttacaacactttgaattggtccaataattatgctctttttacttctgaggaaactgaattacaaagtttgaaaaattttccaaagccatggctattaaatgccacagtcaggatatgaattcatgacat

SEQ ID NO: 51282 - DNA, 1301 bp, Bovine  19866880456365
  misc_feature (1)..(1): n is a, c, g, or t
naaaagtccatggtaatctcttgttattttcttattctaattgaagcagataactagtaggaaaatatatcaaaactaatacaattatgtaaagttttaaaataaaataaagaatatatacattgttcttgtatttttttacttcacaatattctatggagatcttcacatattaaaatatggggatccttcttcatttctgtttttttacatctgtatagtgtgttccattgcatgtgtgcactatgatttatttaacctgtccctgttaatggatattaagatttttcaagttttttaatctgaaacggtggtgcaataagtaactttctacactcatcattttgcccacattttagtatctctgtaggataaattcctagaaaagaaatttctgtcaatagtatcagattggccctctcagaggttaatttataaacttgatgcacttacaataaaaattgctgtaagagttttctaaatgttcccctcccaactaaaaaaattgttttggcattcatatggaaaaataaaacaaatttaggaaaactctgaaaaggaataatgaatggctggggaaggggacacagttggagagagtcagcatacctagtattaattcatggtgttggtaccttttttttttttttttaaataattattgaggttttattataacatggtttaaaatctggtagaattagttgctctccttcatccagcaaactattgttctctttatgttttcttggatacttttttcttttaataaataatttctggactgagtattaaacacccatgatagttttgtgggtttttaagagatcatattaaatttataaatttgtcttctgatactgtgtttttttgagatttaactaaatacggctttatgaagataacctcaaaagctagctcttacggggaaatgaaaaggggaacctgtagttgtgaatatgttatattaaactgacacagaaacttctggattctttcctgtaggaaagtgactatttcacctcacaaggagaattccgtgtagacaaagcaggatcccctactttgttgaattgccttatgtataaaatgtcatactacagatttggagaaatgcaggttagttataatctttgtttttttctataatctttattttataagctttattctagatttattcacaggaatattttaaaaatagtcttgtttgactctaaaaagcaggataatattttggttgtgctctaaagaaaaatgtgctcatctaaaattttttctactctgtttactttctgaaa

SEQ ID NO: 51283 - DNA, 705 bp, Bovine  19866880559301
  misc_feature (1)..(1): n is a, c, g, or t
nactctcctttgggagaggactcctaacctcgaaatgaaaagcatgggtgtaagtttcccataagtgaaaatggggaaaatgtatctggcctgatcatcagaggactgccagacaggatatgttctggctaaaagccaccaggttatcaaccccacacttgctttctaagcttatttgagatggagctcatttctttctgggtccagtaaagtcatgaaaactctaggaaacttttgaaatggtatctgttaggattactgaagccctaggaagctatggaatttgaaacccctgaaaaggatagtatatgcaaggggaaaaaaaagattaaattcatgagttttgcacttgggagcttctttttgatgaaagagttttaaatagttttgaaatcattgtactttgttttgtctgttcttcaacgcattaaaagcttttagaagaatcatccatacaacattggtaattgcagtttaaactgtatgagggaattaaattcttcaaacttgtaatcaatgagtaaatgcttaagaatagaaggctttcaaaatgtccttcattaggtatatgagtttaatgaattgagcattaaacaaaatacaaatacagtgccttttcctttctatacacaaaagccccatggacatcaaagagagaggctgatactcttttaattcctggagttattacactgtgtctccctg

SEQ ID NO: 51284 - DNA, 1327 bp, Bovine  19866880623290
  misc_feature (1)..(1): n is a, c, g, or t
ntggaacgtgaaaatgctatataaatttgctttgaccaaatgatcatgaatgaatcacaactgctactgagtgtttggcatttttactttcacaaaggttcagaaactgatggccacagacacatcttactttacaaactagtctttgtaatgggagtggcacaaattaaagccagaatgtctctgaaaaatcttggctcagttcactgataaccactcttcgcatgaagaactctccagaaacagctgcttcctgcggtaagcttaagtgcttagtttgtaaggactgccctcagcaggttggcacttgatatctactttgtatttaagccttggtctttacaaatctggcaaatgaaaacctattagcaattttcagtaatttttcagacaaatcgaccgatcttgagttactcttttatagacctgacttcatttggtacccaccttctttgacaaatacttctgtttggggaaaatgttggttactcgaggtttgtggtctagtgtctccctgttatcaggggctttcactttatatatccttacaagccagtgctctgatgtgaaggcctcctccaaatgcttgaatttaatgtccttgtttccaatctcagcattacgtgtccgatcaaaacctggaggtgtacggaaatccagctgcaaaagtgacatgagtagtggatgttaaacatactgggaaacattcagtattagaagggaatgttatcaccagagcacaactctctctttttaaactagggaaacagaatcagagtgatatactgttaaccagtcctcgtatgctgctaaccagacaagaagaaatcagcaagagagaaactcaatgcataagaattagaatggacgaggggcctgcaggcacaaaaaacccaaaacagcaaaatgaaatccatgaaaacccttcttataggttttcagagcaaacacagaagggcctccctacctggaccttgcactaccaggttactttaccagcctcaaagttcttcatctggcaattctgcatgactggctcctttctattctctggtctcagcccaaacaccatcacttcagggaaatcttttctttagattgatgactgagaagtctcctccactgattcttttattctatagtgtttgttgctaaaatttttattttcaaaattatctgcatcctccactaggaggtaaggtgcacgacgactttaccttattcagtgtggctctctctcaccagtgctacttgtgaaattagagcacaagtaagcctgatgctaaacatcctggaaagtggcaactacaaaggacgttaaaccaaa

SEQ ID NO: 51285 - DNA, 2771 bp, Bovine  19866880678984
  misc_feature (1)..(1): n is a, c, g, or t
ntccactgacgtgttccactcattcccccttcccatccccttcccctgctccccggcaggttatttccgaagagcactccctcataagtcactcaaatctctgtctcagggaccccacccttagacagacacctagaaatgttgtaagcatgtcctttcctgaaaggggggaagagggccaacaccaaccccacaagccctcatgccctctgatggcccagagtccccaccagagatggctttgtctggctgcccattcctgctgtttatcaagcagaagctctggtgaggctccttaatctggtagcactaacagaaaccttccaggcagaaattgattaatttctcactccatcaaagtttaagtcatcagggatctcagcactcagctaatgcattttgagaatagtttcaattctgtgagcaaatgtggttggaaaaaaacttattagcttaatgtataagaaaaagcatcctttttggtgcccaaattctgcctgtgtagaacaaccaaccaaaggatacataaaactccagatgatgctgggaaacacaattttggagaaaattcaggcaagtcttcagatctcagtgtttgaaaagaagcccataaatgtcccatcaagagaaggcaattgtaggaaaaacaaaaccttagcaagtggtatgttgacaaatagtccacttcttcaagtgtagatgacgagggtcatttcatgtaaattcaacatagatgtggatagtgtaaatataaatgttcaaaatgtcagaaactgaccaatgggaaaaagaaaaataggaaaatcaggtcatggaggaaaggttgtgaatgaaagaaactaaacaagagttccgaaaacagtatctgtacttcagtgaatcagaacaggaactagagaaagcaggtgtgggagttaccatgccggaccaccagggaggggaaccagcgggggagttaccactgccggaccaccaggggaaccaggggtgggggttactactgcccgaccaccagggaaaccaggggtgggaggcattcaaatgcaggaacctgggaaaacagagcccatcggagggcctaggaggctggaaaacagcccaccgtgtccttaatccttacatcctagaaatcagaaaaaaagtgaaaatcactcggtcgagtctgactctttgcaaccccatggactatacagtccatggaattctccaggccagaatactggagtgcataaccattcctttctccaggggatcttcccaacccagggatcgaatccaggtctcctgcattgcaagtggattctttaccagctgagctaccaggtaagtccaagaatactggagtgggtagcctatcccttctccagtggatcttcctgacccaggaatcaaaccagggtcttctgcattgcaggtgtatcctttaccaagtgagctacagactctttaagggaaacccccaaaaaagtgaaagtttctcagtcatgtccaactctttgtgaccctagtcacatggaattctccatgcaagaatactggagtgggtagcctttcccatattcagggaatctttgcaacccagggcccaggtctcccacattgtaggtggattctttaccagctgagccacaagggaagcctaagaatactggagtgggtagcgtatcctttctccagtggatcttcccgatctcagaatctaaccagggtctcctgcattacaggtggattccttaccaacttagctatcaggaaagccctgatagaaatcagagaaaccccataaagagaagggaagaagttcatagacatagctttgagtttggacactggattctgtgatggtttcctaggtacttgttatttgtgaaaccaaaagagtctgtatcctgagatttctcagcctgtcactaaatcctttaatattgtggttaaaaatacaaattttagattagactttactcctggatccaatccaagccctgctactaattcactgtttgaagtgacttaccttccctaactcagtttcctcacctaaaaataagaatattaataatacacatctcatttgcagcaacatgcatagacctagagatgatcatactaagtgagtaagtcaaacaaagacaaacatcgtgatattgcttatatgtgggacataaaatactacacaggtcttccctggtggcacagtggataagaatccacctgccaatgcagaggatgtgagttggatccctggtccaggaagactccacatgctgtggcacaactaagcccgtgtgccacaactcctgaagcccacacatctagagcctgcactccccaacaggagaagccgccgcagtgagaagcccacacaccataaagaagagtagcccctgtttgctgcaactagagaaagcctgtgcaaagcaacaagacccagcagcagccaaaaataaataaataaaaatttaaaaaatatgatacaagtgaacttatctatgaaacataaatagactcacaaacatagacaacagacttgtggttgcaagggggaggggaggtggagggacagggtgggagttagggatcagtgggtgcaaactgttgtatacaggatggattaaacaacaaggtcctactgtacagcacagggaactatatccaatctcctgggataaaccataatggtaatatagtaaagtaatgctcaaaattctccaagacaggcttcagcaatatgtgaaccgtgaacttcctgatgttcaagcggttttagaaaa

SEQ ID NO: 51286 - DNA, 1973 bp, Bovine  19866880698904
  misc_feature (1)..(1): n is a, c, g, or t
nactcagcttaattaagtcctgtgttgatataaataaggttctggtttaactgagctcagcaaaagaaaaagtgtgtttgttaaagttctttggttgcaaacaagagaaataaaattagatgagctcaagttcacagaggagggggctttgagacagtgcagagtctcaaaggcctggagactgctggacacacagcctcaggagagaaaggacttggcgatgacaaaataggaggacacattcagtaaagatatcttccacgttctctccccaaagcagcttcatctgcttcctggaacctgaaggttcagccaagaaacagactcatctttcaatttcagccccagatgcccagaagactgacaagtgtagagctggtatgtggcgctggttcagatagcacagccagagatgaacttacacagaaagactatggtggctggagaaccggctgttaagatgggagttgttcctgggaaaatggggagttgttgtctcattagctgatcaaatatccccagaagagtccatcaaagaacagcatcttccctgatggctcagttggcaaagaatctgcctgcaatgcaggagacccaggtttaatccctgggttgggaagattaccctggagaaggaagtggggactcactccagtactcttgcctgggaaatcccatggacagaggagcccggtgggctacagtccatggggtctcgagagtcggacaagatttagtgactaaactaccatatatttataccaaaatatttaaacactctgtgattccatagaaggtgtgtgatagcaagtttggcagttggggtggataatgaggaattctttaggccattgtttcatattctgcaagagaatgaccaccatttccagcttgtcacagggaaagtaacatggattttggacaactttccagttcctcttaacccttattttcttttttattattatttcaaaactttaaaaaaatgtttatttattatttatttatttggctgcaccgagtcctggttgtggcatgtgggctcttagctgaggctggagggatctagttccctgatcagggattgaacccaggctccctgctttgggagtgtggagtctggacccagtggagcaccaaggaagtcccgaaccttattttcataatgtaaatacgtttgctttttagttagaaatgttgtgatttcttactgtgtcgaacaaatccttatcttaatagaagtaccaaaatccacttaaaggctaacatatatgacttatgaaagtgtactgttggatttttatcaatattcccttcaaattcctaagaactgatggcatgatcagtggatctcagtttttaaatgtagtaaaggtcatatttttaagctatttcccccagtcattgtcttttccctaagtcccttcctctttaggcagttaggctgttttgaactccctgcctctaggcagagacacaccctggtgggcagctgaagtggccttttcctggcttgggtttccaaagtccttggccttgtcatgtggcaggagaggacagagagcccaccctcagaggagacagagaaattccatgggtgagaatagaactgagttgaggggaggttgctgagtagactaaagtttcttcagagttgcaacagactgcttgataggctgaaaggaagaaattcagggactaaatatttggaaaatggcaagtcttcaagattgtggctttgtatgctttttccagggcccccaatgggcagcaaacttaaggtagatttgaaggaccaaggggcggctacgtggtctctgctgaccgtgtgactggagcggcccagagccgtagcggcacaatctatctacagacacctggggagagtcttgtgcacttgggttctcctgtccttacgaagcccactgggcacagaagcagctgaatattctcatgcgaagcaagccatagat

SEQ ID NO: 51287 - DNA, 1733 bp, Bovine  19866880707766
  misc_feature (1)..(1): n is a, c, g, or t
natccatggaaaaattcttccaccaaactggtccctggtgccaaaaagactggggactgctggttcaggaagtccgtgttctccccacgatttctaccatttccaacagctttgtgtttctcccggtcatctctggcttttaccgaatctttattctctgcttacattctttttctatatcagtatccacccaaatgagagttgatggctctttctctttgagtgtctttctctctgttatttccctagatatcccccatatgaactgtgcgattgctttaagcagagatttgtcatgggatagatgacaccaataatactggatttctgtattcttgaataagatgcctaatcatttctgctgcttgagcttcagatattctagcacagcgtaaggtgcttctttctctctcatcaggctccagatctcttttctttctctcctgctaatctgcttttgccactcaagattatatattgcatggtagtggtttagtcacttagtcgtgtccgattcttgcgaccccatggactgtagtccaccaggctcctctgttcatggaattttccaggcaggaatactggagtggatttccatttccttctccaagggatcttcccaacccaggaatcaaacccaggtctccggcattgcaggcatccacaggcagattctttatggactgagctacgaggaaagccccatatattgcatatggggccaaaaaacacacagaggctgtgtaacttggctaagatcatatgattagtaagagcagagctacagtgcaaatctaggtgcgctatgcaaacccaaatgagtataaaaatcacctgggaatcttaccgcaatgcagattcagagtctgctgctttgggtgagggactggagagcttgcatctgtgacaagctcccaggttgacacccacaccacaccatggtccgtactctcagtaacagaacctagagagtgctgcttatgtttctgtttttcctattcaaaccagtgaggctttgccttgtggttcaatgtctcacacaatctctgaatttttcttcttgagccaaatgggctggggctaagggggcccttcccttcaaagatccaggactcctaccaggtcagagattccacctcacattaatgaaattaattaattgaaaagctaccattactcagatctaagaaataaggttcccttcagaaagggcaggaaagattgatgtaggcaaggtgatttagtgttgaaaagtaggacgtttgatgttgaatggtgacagtggatgttttaaattctgcccttctgtcccttctgtagtcaacttggtgagaaatcgactctgcccatcctcaagcttctgtgaaatgcaaactgctaggggagcttgaaagagcttccaacagttacacatcattccacagatgttctcttactgaaggcagtttcttccatgacgctttttattttttaaaatttttttaaaaattgctgttcttcactttgatgttcaaatttgtggaggccctgtgactgaagcaaagggtgattagtgcctgggaaagccacttgtcactgaagcctgctgctgctggggaagagggcagtggcagagtcgggcagagtgggcgcgtgtgtttccctagccatggcaatgctctcaatacaagaatggccagagttgtgatcgcctcatgaaagcaaccagtattgagtgcatcatacactgccat

SEQ ID NO: 51288 - DNA, 1156 bp, Bovine  19866880733794
  misc_feature (1)..(1): n is a, c, g, or t
natcatcggtactagcatgaaagcaggaatcattctatctgtgtgattcactgatggatcccaagcaactatctgttgaatgaatgaatgaacccccagggtccctttcgtttcactgaggtgcaaaagaatccatttatgacacagagtctgcaggaatcatctcagtcaattaggacaacacagctgaagattcaggaaaaataataactctgctatcagtttaagtttgccaagaaaatggttaaatttaacctcaaaaagataaaatgtttacatactcattgacattcaactctatggagaactgctaacatttagggagaagttgacttcgagctacttgtcgtagtcagcatttctgtaaattcctaccataaaaacttgtctcaaaaagtgatgtgttgaaagagaagaagaaaatataacaccagaatgtaaatcatatgttcttgactattacagaggatgtcataatgcttaagagaaaaggtaagtaaaatgaagctattaactatggaatccactcattttttaacttttattttgtcttggactataactgactcacagtattgtggtagttttaggtgtactgcagaatgattcacttatgaatctacacatatatccattctttttcagattcttttcccatataggtcaccacagaacactgaacagggttccctgtgctatacagtaggtccttggggattatctattttctatatagtagttggaatatactcatttttaatcaacaaaaagaactatattccaattatatagcataggataaataattatttcacaagcataaaatatgatgcaaatctcaggtaaaaaagacacaaaattatggaccccccccccggtggttcagtggttaagaatccaattgcaagttcaggggacactggttcaatcccttgtcagacaggactaagatcctacaggctgtggagctgctaagctcaagcaccacagctactgagcgctcactctagaccctttgagccacagctactgagcctgagcatctcaagctcgtgctctgcaacaagagaaaccactgcaatgagaagcctgcataccacagctagagagtatccctctcgctgcaactagagaaagcctatgtgcagcaacgaaa

SEQ ID NO: 51289 - DNA, 1172 bp, Bovine  19866880748029
  misc_feature (1)..(1): n is a, c, g, or t
ntgagtgagaatctcatgggtctgctccatcatgaaccaccccaccaaactgtggattgatggatgagtcccacgcatgtcccttatcactcaccattccagtaattatcaacccggtgctgctctcagtattagcagttctctgcctacgggcttcctcttaaccccagcttgtggggcagtatggcagtgctgaggaactgtcctaaatcagcagcacatgggaattggtgggtatgcagagtgcttgctttgatagcaccagtcctttgaccctctctttcttttctctgttggctgtgccatgtggcatgcgtgatcttagctccctgaccaggggtcagacttgtgccccttgtggtgggagtgcagtcttaaccgctggactgccagggacgtcccctttgatcatctcttagtccatcctgtttgccttggaaagtgctagcagctcagacatgtccgactccttgcaaccccatggactatagcctgccaggctcctgtgtccatggaattctccaggcacaatactggagtgggttgccatttctttctctaggggatcttcccgacacagggattgaatccaggtctcctacactgcaggcagagtccttcctgcctgagccaccagctccttgctctatgacttcatgatctctctcactaaagagatggcatccagttccctatcacttgaatgtaggttttgtgtgttgtcactggtcttaggatgttagcagacttgttacaaacagaggcttgagaaatccatcgtgcatttctgctttctcccctattcctctgtgattgccacgagaggatagccaggctagtcagccagaggatgagacatacgggtcagcgaggcctttgcagaacagctgagagtctggtgacccctgggaacatacgagagagtccaactaagatcagcagagccaagcagccaatccagagctgggctgcaggtgcatgagtgagcttagcctgagatcagaagaacctgcccagctgacctgcagacacatgagcagactaaagggttgttattttaagccactcaattctccttgaactaccagtctggaggcttggtggttcgggcaggaaaggttaggttcttgacttctttggtaagcagtagtcttgggcattagacattgtta

SEQ ID NO: 51290 - DNA, 1321 bp, Bovine  19866880757760
  misc_feature (1)..(1): n is a, c, g, or t
ntctttctttttctatttctctgtggcactgaaaatattttcacaggctgatattggttaaattcattcctctaattctagggaagacataaacttgggccacgctcaagaaacatttatctacttcgtcccccagtacacgtgtcacctctctgcttcctaattacacgccgtacagcccccggtggtaacatttattcctggtacgacaagcttcagatgaaattgcccatcttcaatattgctactgacagtctaatgagaaagtacagatttttggctaaagaaaacaatgcctcattctggaaacttatatgggcttttatctcacttccttggggaaaagaaacaagagtagataaaaggcagatttcactgcttgaaagaaccaaatagagttccagacacttaacagtagccactgtcaattgtaatctgtttgtattaaagtttattaaattatcaagcaaggtttgtacatcaggttgtatccaccagctgtacttcagcaccagccccttagattgggatctgttggttcttctaaagatcacactactgaaaaaaaaaaaaaaattaaaaagtcacactactaaaacctagctttatttagaaaccagctcttagccaagcactgggtattattattgattacatctgggttgcagccaccttggatgacttggagaacttgggagttttaaagatgaaatgatcagattcagcattgtacccaacctgagagaggcagagagatttattcagtttctacttgattgaaaatcaaatgttaacctagtcttggctctagatgagtcttgttcatctccttattcaacactggactcctgccttgtgccagtaactgaggatacaatgttgaaaaatagagacaaagtttacagtctggaaaggaggtcaaataaaaacaagtatctttcacagaggggcttccctgatggctcggtgggtaaagaatctacctgcaatgcaggagacgcaggagatgtgggttcgatccctgggttgagaagatcccgtggaggagagaatggcaacccactccagtattcttgcctgaaaagtcccatggacagtgtaacctggtgggctacaatctgaagggtcacaaagaatcgaacacgactgagtgactaagcacacacactccccttattataagctgtgattttgaatctccttccacatttctctttaaaaaatttttttttttaaatttttggccacattacacaacatgtgatgtcttggttccctgaccagggatcgaacctgtgtcattggtagccaaagtgtagag

SEQ ID NO: 51291 - DNA, 1037 bp, Bovine  19866880772121
  misc_feature (1)..(1): n is a, c, g, or t
nactgtagcccatcaggctcctctgtccacgggattctccaggcgagaatactggagtgcgttgccatgccctcctcccaagggatctttcccaacccagggatcaaacctgggtctcctgcattgcaggtagattctttactatctgagccaccagggaagcctagatttatgttataacagaaaacagtttttcacttggctcttttttttaacatgcatttgttcagaatgaatgactgactttcacaagccatagtgaagaactgatctattccacttgttgtaatatacaatctggaccctctgctgggcactggcacttctgttggggtttttgctgggtgagatggcagcttctagcagtgccaagaaaacttaagtgctggggttaaactaagagctctgggtaaatgttgcctcaaaacggctgctggtaccaaagccaaataagccgaggaatcaattaccctctgatgctggcactgtcagatgactagagccatcatcactggaactgctgggagagaaagctctggttaagccaggcatctgatgatgctaagaacagaatactcatctatttcccgggtaattgttttctcttccgtaagctccagctgagggacgcagccagcgtcagtccgccccaagtggcagctcttccaacacctgggcaccatttcttccttcgttcagatatcttatcaggaaacagcgaagttttaatgagagacaatgagacctaacccctgggcttccaagtgccagctggtggggagagggcttctggggtgacagacacaatcactgcttccattagaccacactgatcgctcactgctgggagcgatggggatttgcaacttgattaaaactggagatttagtggctggagtagaatttctcagataattgctggaaatgggccaattccttcactggactgagttccatgtggcagattatatgctctctgactgaaaccagatccacgtctaagacagagacgcttcttaaagatgcacttttcagga

SEQ ID NO: 51292 - DNA, 1834 bp, Bovine  19866880852889
  misc_feature (1)..(1): n is a, c, g, or t
nttaggagtttgggattaacagatacacactagtatatataaaagagataaccaacaaggacctactatatagcacagggaactatattcagtatcttgtaataacctataatggaaaagaatctgaaaaagaatatatatacgtatatagttgcacacctgaaactaacactacattataaattttactgtattaaaagtggaaaaaaattttacatcatgttgttaaacttgattagggtatttgagggtctgaatgaccagtagggtgtggctggtgccagccttactttatgtggtacctctgacatcctgagcgacatgaggagggtgttttatttatttatttaaaatatttgcttatttatttgactgtgccagatcttggttgtggcacatgggatctttagttgtggcatgtgagatctaattccctgaccagggattgaacctggatcccctgcatgaagagcacagagtcttagccactggatcaccagggaagttccagggagagagcacttggttaggttgatgaaacccaaaagcaagctcaggaaggaatctccaaggctcccgatttgcaggatcactggatcttgatctctttgttgctcatggaagctttttgtgtaatttaaaaaattttcagctggacactaagatggtcccctctgtgccagggagtttggaagaactgtttttacagtggaatacatctgatccccaggaggggagagttttggtctttttaactgatatgcaactttttcattctctgcatttaagagaacctgattgtaagtaactctgtgaccacatattacaactcagaaacaatcctgacgttttaccactgtctttttctggaagcattttccaaaataaataaacaataaaaggcaggcggaggctgacattttccttctcagggcatcattccaggaccctgaagatcctcaaatgaacttgccctcatctcacaggtaaggaagcagccccaaagagatgacatttagttcaaagttatactctggctttgtgacggatagaataagaaactggctctctgctcctcagacaattttggaaaaactccagaaaagtgttgctaaaaaggatctttctgccctgtggtttttgttatacagcaaagaatacccactggtttctcattatctggctgatgccctgaaattcattcagtgttctggtttatttattagctgttttgagtgatggagaacaatttcaaaatgtgaagacagctattcttgaaccctgtgttcccggggtattaaaagattgtgttgggatatcttatctctgaacctgatgttaatttcctctaatatattgcaaagaataagtcacttttttttttcttttgggcttgcaacttacaggattttagttccctgatcagggatgaacctgggccctcagcagtgaaagtgctaagtgctaaccactgaacttccagggagttccttatattgcaaagagaactgggcttaatagttgcttttgtttttccaaattatgaataaaccagattttaaagctgcttcaaatctatctgtagatagatgcactctttctggtgatgttaaaatagaagatgaacttctgaattctgaaaggtgcctagctaaatctgattatgttgcattacacatttgagacttttccctggggactggtgtttcctcccaggtctttaggacagaatattctttggtcatttggcagtggttctaccctgaccttgatgtgctggcgaatgtgacatgtttgtttctattgtacacccctccactcttttttaaacaaa

SEQ ID NO: 51293 - DNA, 913 bp, Bovine  19866880903749
  misc_feature (1)..(1): n is a, c, g, or t
nctattgcatgtgagagtaaggacctctgaaaatctgcttctccagaaaaacaatgaatcagcaaaattgtgaaagtcaacttttccaaaactctggaaattaacaaaaggtttgcaacaacccaaggaaaagaaccacatcttggtaagaataggcaggattgtggcattttaatttgctatcttctgatcccttcccctctccagcttcacagtagccttgaaaaccacagttccacaatcaaagtgaaaactagcagccactgacctccccaaatcaccactccagagaattgttattatttgatctctcttgcagttccctggacactgtcattaagcaagtctttatgggacttgactcagagcttactctgagtgagcaaccttttcctcaggggtatttatcaaaaactatcagcagcaattgtttaatattgcacttgcctgaggtggcaataacagttgggacagacaacaagctgaaaagaaacttaaaaggaaaagcaaagtttgtaaagatctctgaaaaaaacatctctgtaagtccagataatcacgcacatgtacaggtttctgtacatgcccagtgccatgtacaaggccagaaaaatgctgaaaaccaggaaatcacctctacattttttatggtcagccatttacttactatccaagtcatggggttcctactatggaaatgtgcaggtccatacaatctgctctctagaacagttttaagagaccaaacagacaaatggccagacaatagatgaaaatagaactctgacccataacttctgcagcaattagtctaggaagacaaaacctctgcagcaatcatcccagacaaccaagacttggtcaacgaccaccagcttcccaaatgtttgctcccagttccaactcatgactg

SEQ ID NO: 51294 - DNA, 789 bp, Bovine  19866881059559
  misc_feature (1)..(1): n is a, c, g, or t
naactaagatcccacatgccacggggagcagccccccccccataaaaagatgaacctaggagccatgtctgtacattattctctatcctgattgtctcattttatatacacatgtccaagtggaaatgatactaatgtgacttttatcttaaattgctatatagcaattcagagtgttaagtgtattattgtttcttcagtcattcctggaatgctgtgtgttgaatctgtcactttactagtatcaacagcttaacccaaattaactttcctcttctacccccagttctatgagttatttcctcagaatacagttcccagcagggaatttatgggtcagtggcaacaaacagcttctttgtgcttagttgttcttatttatcaccaaactgtagcaaaaaagaaaatatgcaatattaccaatatttcttaccaccgtaacctataattatttcgagtaatcttgcagacaaaataaactggatttccatttgctgaactgctgaggaggatatccctgttctccacaatgatgtcatgtctcggattttctatcttcatctctcctcaccacttccagagagaactttgtgtactgatctttgggatctcagtattttggatgaaaaccatttaatcttttacactgtccctttatttttacccatgttgtggcattccatttaatacttattctgttgcttctggctgggctatttttccttttggtctttagctattcgggcccatctgtcttgtggacgatgattttctggcttgcctcagtgg

SEQ ID NO: 51295 - DNA, 998 bp, Bovine  19866881065881
  misc_feature (1)..(1): n is a, c, g, or t
naaacatcaatcagagtaaatgccaaaaaaaaagaaagaaaattctattcctactcatgtcatattcaaactttagaaaattaaaaataaagaaaaatcttgaaagagatcagaggagaaaaacaccttacgtatagaggagcaaagatgaaaattatagctgacttctcctgtgaaaccattcgaggaagaagagaatgggtggaatgtttaaagtgttgaggaaaaaaaaaaatcaccaacctaaaattctgtatccccccaaaattatccttcacaaatgaaggacaaatactttctcagacaaagaaaaaacgagggaatttgttaccagtagacctgccttatgggctccccaggtgattcagatggtaaagaatctgcctgcaatgcaggagatctgggttcaatccttgggtcaggaagattccctggaaaagggaatgactacccactccagtattcttgcctggagaattccatagacagaagagcctgacagactacagtcatgggatcacaaagagttggacacgatggaacgaccttcactcacacacacgcacataggcctgccttttaaatgttaaaagaaattcttcagagagaggaaagtaatttaggtcagaaacttagatctacataaagaaaggaagagcagagaagaataattaaatgaaagtaaaataaaaacgttcgttttactcattcttaatttaaataagttttttcttaataatagcaacaaatatattgttgtgtatgctgatgtatgcatgtgtgtgtttatgtaagcctatccataagtaaaatgaatgacagcaatgaaaaatgggacagaaagaaggaattaggattattttgtttttataaggtacttgtactatccataaagtagtatagtattatttgaaagtaaatttagattcattgaaaatgtatattgcaaattctagggcaaccactaaagatctcactttatatatttatataatatt

SEQ ID NO: 51296 - DNA, 886 bp, Bovine  19866881080839
  misc_feature (1)..(1): n is a, c, g, or t
nagattaatggaggcgtctgcgttactgcagaaggagagaaaagagagacgttaataataatgatgacgagggtagcagcttctattatgggccaaggggctttataggagaggcgaccagaagtctcaccctattactccatctagctccaagcccagaatctctggggaaatgtgccttcctctgagtcagctccacgtatgatttctcagagcccaggaatgatcaatttaaatatttcaacaaacaatggttgaaaaaacaaataaggtaaccacagatgactcctttttggataaaagcaaatagagtcacccaggacatccagtcctgagcacgctctatccagccagagaagactggcaggcactccagtccttggcagtgaagcgatgtccttggtcagccaatctggccgcgcatggttttgcaaacagataagacttttcgtagcaaggttatatcctgtttcctcttctaagagccatcttggaccaaaccttgtcccactctctcaggactcagccgaaagctacaagaatgagccaacacactccaacatccagatttttttctacgtaagtcaaagctagagttccatactagtatcatttcctatctgcagagccagaagccaaaactcagggagattaagttactcaccccatcagtaggacacaaagcacagatacaaatggatttctcctacttcaagattattgttctttctgtttcatcatttataactttttcatttctaactacagaagtaagtacataagcgtgatgggaaaattggaatatacagaaatggattttgcatttcttttcaggctcattcttttatcattacatgcatgcaaaaaacacagttcacatttcatc

SEQ ID NO: 51297 - DNA, 904 bp, Bovine  19866881161820
  misc_feature (1)..(1): n is a, c, g, or t
ntactataaccaactacagcatgtcaaaatcaggatatgtgctcatattttcctagtaatttggtcgcattaaattaacattttaatatgaaagcaaacaaaaaaagcttaaaagaagtagaatttctcaaaatcccatgctggggatgaccatccatctagctacaacaaatatatccttttcttcagtctaccaaacacctaatgattagccgcaacactaaatacaaacaaaattcatttggctaacacctagctatctatttaaaatctttagagaacagaaaggtgattaattaatgtaaattagttatgtaatagctagagtaaacataatgtgcatgttcataaaacacactgcacttgctttacacatctgcaaataattttcttaacttacgaaaaggaaaatataagacaaatacagtaaatttcagattttgcctcattctccagcatatagcctctgattctgaatgatatataaacaaattctagtcttaaaaaccaaataagcaagcatacatcgaatcactttactgaacaaatatgtagagaagtatgttgaaaattcagcaaacaaaaagcactttcccccacagttttcctacttaatcacaagtgaagtctgatgtctaagtagtgaataacggtttgtaacttttgaccttctgttggtcaagttcttaccagtgctatggtggctgttattccaggtgttgttatccaccagagtggttctattagccatcccagcaatctgatagccgtaatcccaccaagacatcactcgggcatgttcatctgtattctgccttagccaaaagtaagcttctctgaaatcatctaaaatattcctggttctgaaaagactcacaatattaacttaaataagaccttataa

SEQ ID NO: 51298 - DNA, 1131 bp, Bovine  19866881194140
  misc_feature (1)..(1): n is a, c, g, or t
ncataaacacacacacacacacacacacacacacacacacagcaaaatcagatcctcgaggactagaagagttcctatatcatccacaacacagacgaactaaaatacttagtttcaaaataagtttgcccccacttactacctctgtgatctcagtcttctgctctgcagcaggggtccccaaactctagaatctaatgcctgatgatctgaggtggagctgatgtaataaaatagaaataagtgcacagtaaaagtaatgtgtgtgaatcatcttgaaatcatcccccacccctgatccatggaaaaattgtcttccatgaaactggtccctagtgccaaaaacgttggggacctctgctctttagaatgtatataatcatagcccccaccttatggggttatcccaaagacttaaataatgataatgcatttaaattctagcacaatgcctagcatatagtagacacaacaaaaatttttttcacctagtcaggcattccaaaatttccgcagcaatctaatggaatattttcccattcattgccttctccacactcatatgagatcataaaagctccaccagtttccataagcgtaatagctttataataaggccagttggcaagctaagggattatcctcagaactttcaaagagaaatatgactgcattcccacctaattatacatcaaggcatccttaagaatctctcttacccctggggggggactaggaatattcttaatgataaccaaggactgtcattagctatcagaaatagattcagaagtcacagatgcaaaagacttcaatcaaactctttatattcaggtccattatgagtgataatagactcctgtctgcttcatggattcttggatgtatttcactgcttctacaattgcacttcaaatgctatcctgcttcctaataataaaggcacatgttcacttcagcagaatttttgtaacttgattaaaggacccaatgtcaaagaatctctagttagcactcaatgggactttgaacctttaatcatattctcatgtctttcatcagcccacttcccagcacctacattttgagctgcttccaggtctgcctgtgtctttctatccattacaacaa

SEQ ID NO: 51299 - DNA, 970 bp, Bovine  19866881206501
  misc_feature (1)..(1): n is a, c, g, or t
ntgttcttgcctggagactccccatggacagaggagcctggcgggctacaggccacggggtcgcagagtcagacacgactgagcgactaagctcacacagcacacaacacaaggcgtcaggaaacaactccagcacagtcaacagcattctcagggcccgactcaacatttttagagaaaggtcttaaattattttgtcatcaaagcaaactcagttccggctctcaacagaggatagaagagctgtgtggctacagagctttaccaaggagacctcgggtttgaagaatcctgtaaaacaaaatgtctgttcctctcaccatttcttaccttcagagaatttctgaggcttatgtaatggaaggtcaagggaataaaaactcactcactgtcttcccttggttcggtcaatatgatatgaggggtgggtgggagaagcctcaccattgttcttattttatcttttgccccacaaagtctttgaaattcccaaatctttcaaaattctcccaacccaacatagatgatcactttggtgaacactagtgaagtggaagtgaagtggaagcgttagtcactcagtcaggtacagctctgcgatcccatgggctgtagcctgccaggcttctctgtccatggaattctccaggcagtagtactctctaataaattaaggttgcaagaaagaaaccagaatccttggctattttagaagctttctgtagcctgtttccatgagctcttgttccagaaaataattagcagcaaatggaagtactgcagggaaacctggggaacactaggcggtgtccatggaccattaacgaggaacagtttcttggaaaaatggagccagcatcttgtaccaggtacatttttctgcttgatttctggttgggtgcttggaagagataaaattaaaatttggttttcctagagcaggagagtccctatcacttaaggaagaagg

SEQ ID NO: 51300 - DNA, 944 bp, Bovine  19866881331423
  misc_feature (1)..(1): n is a, c, g, or t
ntggaaccaaggagcagggctgttagccgcttgcttcattgccattgtgccaggctacatttcctcgctcagtagctgggtcctttgataatgaaggcatcgctatttttgcacttcaggttcacatattacttgtgggtaagtaacacttgatgttttgttatcattaatacccatgaactttctactgaaagttgttattatagttgcatgcagaaaactgttactgttcatgacaaataagtcacagctccaataaaagaggctgttggaaaataagctgttgatttttttgttgttgtttctttactagtggagagagagaggtcaaaaatacttaagaaagctgaagtggggttcagtggcttaggatgttgaattctgtgtgtgaaatttgcattattttactgttgccaagttatttcttctttccctatctgtataccttctgtttctttttcttgtcttgctgtattaactagtacttccagtatgatgttgaagaggtgtagtaagatgatcctcgcctggttccttttcttagtgggaaatctttgagtttctcactattaaacatgttggttatacgtttttttggtcttatttatcaagttgaagatccactttagtttgttgagtttatcatgagtggatgttggattttgtcaaatgctttttctctactggtacatgattgattcatgaacaacacaggtttgaactgtgtagatccatttatacatatatattgttttctattaaatacatactacagtacttcacaatttggttgaatccatagatctggacccaaggattatgtaaggtccctactataaagttatatgtggattttcttatgccaaggaggtagtcactgctacaacctctgccttgttcaagggtcaattatagttacatatagttgtaactatatgtaaatt

SEQ ID NO: 51301 - DNA, 1523 bp, Bovine  19866881490108
  misc_feature (1)..(1): n is a, c, g, or t
nttcaatgcattggagaaggaaaatggcaacccacttccaaatgttcttgcctggagaatcccagggatgggggagcctggtgggctgccgtctatggggtcgcacagagtcagaaacgactgaagtgacttagcattctcccccaaactccccctcccagccaggctgccgcttgacattgagccgagctgcagtaggctggcctgtcataaagggcccgcttgtttgtaggggtggcagttgttgcttcttcttctgccttttcctcccagttccggatgccctatgggatttaccaggagactttttttttggctcctgtttgccctcaggaggaggcatgggtatgaattaaaccgtgagaaacacacagtgaatgggaaattaaaggtttttcgcctcaaatttactgcttgtgaattcagatgacagccattagataataaatatagggttagccatccacagcagaattccttggctcccgggtgactttcctgatttattgctgtctatgggacagtctttcaggcagcgagaggccttcctttctgatttctgatggattctcattctactcagaatctacaagtatggttctccttacagtcttgctgaccatatagattctccagtaagtatttaattacatcttggacttcatcacgactttgatcctaaagaaaataaggagcaggtcaatgactgcttacaattttgtgctaagcggcttcttaacattttaaaaatcgataatgctaccatcgatcaactcttaagggctgtaaggaaagaaatgaactgtggccacacggctcctgcacggcaacccctgtgctaagcgttttttgtacctgagctaattcaactttcatgatggctcttaagggtaaatattatgatgccttttttaaagattaggaaattgttgcttaataagaaaactcgaataactcacctgaggtcacacagcttgaagctggtagtgctaggattggaggtgggggtgaaacctggctgtctggcttcaaagcctgttgaaaaatctgccttttcttgggttggaataaggctcccaaacaatcaaaatgtatttcagtggattaggcaaatttgctgttgttgaaggattgaagagggtgttccctggcggtccagtggttaaaactctgtgcttccattgcaggggcacaggttctatccctggtcagggaactaaaatcccacatactgtgcaggacacacacacacacacacacatgcatacaaacatatattatatacaaataaaaaaagtgttaaagacatagcttctttcttcctcttcacttcaagggaaaagattgaagttgaaagtagatgactattgaatttcagtataatcaaagtatatttaattctcagagatttctccagttacctgtttataaggtaacttgaaagcaatacagtgcttcccaagtttatctgtcttactaattctgtccaagctcaaatccagagaaatgcgtgagctaccatg

SEQ ID NO: 51302 - DNA, 1576 bp, Bovine  19866881491951
  misc_feature (1)..(1): n is a, c, g, or t
ncactgaattctccaccatttatgtttggtttggactccttccaataaggtttagaaaggtctgcagccagttctaaaggctaagtctgggaacttcccctggcggtccagtgcctaggactctgagctcccaatgcagggggcctggggtggatccctggcccaggaactagatccctcatgctgcaactaaagatcctgcatgccacaactgagacctggcaaagctaaatttaaaaaaagaataaatattttttaaaatgctaagactgagctgtacatgcaaagatagaccttcagcgtacatttggtgaaacagtcttgttgtctctggaaatacacagagatgttacaatcaatccacttaggccctcaacatgagcggaggaatgtgaaaaactgccaagtcgcctgagaagaaattcagtttgctttgaacacaattgcataaccttaccaccccctaacaatgctcatctgaggaagacgctgtttttttttagcttttagagatgactcagagaggactgatggcacttacctttcacaaaatgcagaacttgatttgctcttttgcaataattatatcccttcactagggtaatggttaccataaatagcataatctcagaactgtcattattatcaaatatttatcaagtcttccctccctgcatgcgtagatagtagagattaatagagttgattagaaacagccagtgttctgaatagttcataagagagaattcagaagaatggaaaagacacaattctcttgaagctaggaatggcctggtctcttcttctgtgggtctcatctctcgttgtccttctggagcatcctgtcctaaatgtatgctcccaaaagtcagtgcctgagacaagattttgggtacaagccatttattcaggaggcaatcacagaagcacagaaagaggtgggaagtgagacagtaacaggaggaaagccaataaagggtctgctcacaaggatgttactgctgttactgagtttcagtccttctggggaaccactggtgcctgcatagcacacatctcagaattgtcccttctcccaaagggataaagagatgtggacattcatcctccagctcctgtccctgtgtgggtgaaggttgctatcggggcaccctcctcaccaggccccacacatgccactggcagagagatgcaggcaagggggaactttgtgcgagtagaggggttctccacgggagcggcagaccacctctgtgggaggggaaggggcggggggacggggaagtgagtgggccgtttatgacaactgccacatctcctttgctcatttgggtaaaagttagttcaggaccaaagccatcatcagaataccaaggattcaagacattctaacattatctgaaggcaccctatacttttcttgtactaaaaattatgctgtatctacttgagtcctgaataacatttcccaatgttgaatagcctaaaaattagttctcatagctggattattttttttatcacaagtgtggtacattggcatttttcttgcggcatttttttccgatagggcaag

SEQ ID NO: 51303 - DNA, 1730 bp, Bovine  19866881730642
  misc_feature (1)..(1): n is a, c, g, or t
ncagggtgctcagggctggtgcactgggatggcccatagggatggcatgggacatggaggcggcagggctcctctgtccatggaattctctaggcacgaataccggagtgggttgccattcccttctccacgggatcttcctgacccggggattgaaccaaggtctcctgcgttgcaggcagattctttaccatctgagtcacctgggaagcctcacttgatcacctcacaaatcctgggctactatcttctggaattttttatgatgggcataataagcctcatttttaagccactgttcacagccaaatctatccctgactgttgcaggtgggatctctattttgcaggtgtagaaactgaggcacagagtgacctacatggccttgctggtaagttggggagtcaggattggtctgactctggggcttgctttcttttcaccgccctggaaggaacttggagaccttctcccccctcattttatagatgagatcactgagggctttgcctcagggtaaagcagccacgcattccactgcaaggcagtcattgctcagcattattcctgttcgctctctctagccctggccttccctgggaagggcccctgtgctgtcgttagcgattttctcgcccagcgttgggtggcatctctttctgtgagtagatgatgtttggtgggtttttcccggtcagaagcaggcactttttcgggctgtgtgttcagagctctcacagcctcgtctcttgcctcctgcagtccttcggaagatctttccatgtctgtcctgtcctgtcttcattcaggctcccaggacaggctgagggggctcttggaccctgtgagtcttaggaagctctggccggagtcttaattgccagggaggcctcccaaatccacactcccaaatcagagtgtggactttgggtgaagtgggatcgcatgttttgaatgcattttgcttctgggattcttatgtagctgagttccaccctattactaataccttaaaaatgggcctcccgacccctttggtgaacttgggcgaactttacagagctttactgtgtacatgttccagctgactcatttcttgagccctaaaaaatggagcagaacgaaagccagtgtgtgctgagaatgctgttgggagagtattgttgcacacttatttatctgtatctgtatcatattgcgttttgtcactttttacactagcagttttgtcactttttatactagcaatattcttgtggtcatttttattctcccagctaatctgcgcctttttcctttttgtgagaagtctgcccttgaaaccttggcccaaagtgcattgtaacactgttttagtcatttaattaatttggagtttcctgtaactgaactttttgttaaacatcagtttctgtgatacccttgcagtgagctgaaattcaggaaaagagtattgaaagccaaaactctacattttttttttctcacatttttctcacaagataggattgacataaaagtgctttagaaaatctctgtgtcagagaaacaggactaaacttatggagtcaagcttaagcctggggggcgtcatcttttggaacataagcaaagcataacctatctagaaagagactaaatcgcagttgcttatgtcatgaaattgaatttctgcttatctagaactggcttccttttcctttccagcaatgtagcagttattggtatt

SEQ ID NO: 51304 - DNA, 2278 bp, Bovine  19866880413257
  misc_feature (1)..(1): n is a, c, g, or t
nagaggagggaagagggttcaggatggggaacacgcgtatacctgtggtggattcatgttgatatatggcaaaaccaatacaatattgtaaagttaaaaaataaaattaaattaaaaaaaaaaaaaagaattgatgcattttaactgtggtgttggagaagactcttgagagtcccttggactgcaaggagatccagccagtccatcctaaaggagatcagtcctgggtgttctttggaaggaatgatgctaaagctgaaactccagtactttggccacctcatgcgaagagttgactcattggaaaagactctgatgctgggagggattgggggcaggaggagaaggggacgacagaggatgagattgctatatggcatcacagaatcgatggacgtgagtttgagtgaactccaggagttggtgatggacagggaggcctggcatgctttgattcatgggatctgaaagagtcagacacgactgagtgactgaactgaactgaactgaactgatgttggtcatagcttttgttccaaggagcaagcatcacttagtttcaaggctgcagttaccatctgcagtgatgttggagcccaagaaaataaaatctgccactgtttccatttttttccccacttaaattgccatgaagtgatgggactaaatgccatgatcttcattttttgaatgttgagctttaagccatctttttcactctcttctttaaccttcagaaaaggcttgggaactgataaaccttgacattcgtatctaaaaagccagtgttactgtatatatttttcagtttggataaaagttgatgaatgagtgaaagttgcttagtcatgtcctactctctgtgtccccatggactatacagcccatggaattctccaggccagaagactagagtggatagtctttccattctccaggggatcttcccaacccagggatcaaacccagatctcctgcattgcagacaaattctttaccagctgagccacaagggaagcccaaagttgatgaaatttaacctaaatcttcatggacaattcataagaattctgggcaaccagaaaggcgattgagttcctatagtaaatttggaatttgtgggcccagccgctgatctgagccttggtttggctgcttctcttcccttgtttctgtgaccctcttaaaatcagcttcagggcttccctgggggctcagtggtaaagaatccacctgccaatgcaggagacatgggttcaatccctgatccaggaagatacaacatgtcggggagcaactaagcccatgagcctcaactattgagcctgtgttttagagcctgggagccgcaactgctgagcccccatgctgaaactactgaagcctgcacacaagagacatagagcccgtgctccagcacaagagaagccactgcaatgagaaacccgtgcacggcaactgaagagtagcccctgctcaccacaactagagaaagccctcaagcaacagcaaagattcaacacagtcaaaaataaaatgatttttaaaaaaagtgaagtaaaatcagcttcagaaggtcaagtgaggcagtaattgtccctcttttctaacatcatgttggaatataggcatgatgatgatgataaggatgatagtaatggtaacataagtagactctggctaaagcatttgatccactggcaagatcttcctgaaacaatactacagagtaaaggaacaggataatcaggagtcttttcatctcacaggaaatatgggagcttagtgctctgcccatctgcctgcaatgaaatccagctatgtgttccttctgctattcctagttccatgaagggcagactttacaattccttgatgattaaaaaagcaagacacttgaagattaaactagaattgaggcaaaggttcataaatctccttttagccacaagaagaccgaagactttgcctccaaaatcgcggggataagggacctgatgtgctatccatcaccttggatgtgttcaacattcagttatagaaaggagctaagttttaatggaatactaggaacagcatctggagacaatcaggtatactgatttaaggtatcacagagagtgtgtatattctgtatcatgaaagatagaggatcttttcttgtgaccaaaattacagatcttttctgcaaaagtcacccaaagggcatctatataccacatcagagccaattgcaagattctcagtttttcccgcctcacatatcttccattttgac

SEQ ID NO: 51305 - DNA, 1299 bp, Bovine  19866880456358
  misc_feature (1)..(1): n is a, c, g, or t
nccctcagagaatgaaaactcatccccatgatttggggagatgaacgagggggaaaagccttgagaggtcattgccaccactagggcaatttcccacctgacccctcagatgtcagttgctgcagagcagactgccaacgggagagaattggcaaaggcctcctccagctctgctctaacaggctgtgtctgtggctgccctttggcctcagagctgacccacctcatagggagggatttcagggccagcctctctctgggcaggtgagattgggggaggtccaggcttaggtgcttgtcctgctttgtcttaggggttgttgagggtgggggagatttgcccatagccactgtcctggtactgctggggaagggaaccaagggagcccctccctgcctgcctgggggctctggggctccgggttccagacaggttgcagaggcatctcattaggaagctccctgactctgggtgtggggacaggctattcgttcaccctgcttcctgaaccatcccctctccaactccccattctttccaagcagtttgttccttggccagcgtctgggagccaatttattcaggccctgaggtttgttttgttaaggattttaaaatgtattaagaaaagtgcaaagagctttgtcatcactttcccctttctaatgtacttgagtgattggatcaggaagtccctgttggcctcttgcactggcgggccaccaggggtggccagctgtctcaggggcaggaagcaggggctcagtccccttcatgccattcctctggccacataacctgcctgggctgtaatgatctgagtacaggagaaggcggcgggtgggtgcttctctctgttctgtctcttcactccctgttttacaggggttggaagtttccaggagtcagagcccgggactctggggctcccagctcccggggtactctacagggcatgaggaggacttgagtgatgacagtcactgggaaaggggggcgaggtgcctgcctccctcctctctgatgtgcctctgccaggctgcagggcatgggccaggggtccccagggtctgtcctaagggctcttctggctgtggagaggatgtttgatgttgctctgagctgagcttgggcactgaggagagaatgttcatctcaagatgagtttatgggtattataggttcagctgtataccccactaaaatgatatgttaaaggcctaacccgccagtacctcagaaagtgatccttctttctttttttggtttagaaattaatcttattggcaatagggttt

SEQ ID NO: 51306 - DNA, 684 bp, Bovine  19866880494239
  misc_feature (1)..(1): n is a, c, g, or t
nccccttcctcatgtctcccctgggtgcagagacccccctcaaatgtggctctgggctgcatgggtggggaggaggacatgcttctccagatgaataaaaactgaattaactgagaggaactggaactgtgcgcatgagaggacagtttgacagaactaccacaggttccctttaaaaaagaatctgcacctctctcatctaggattggcggtgaagtgtgattcagttgacggtgtatggacacttctgggtgtagggacctgccttctccccacagcgggtctacccgcccttctggggggtgacctgtgcctcaccacagccctgagtggggaccctgaggttcgggggggtaagccggggctgcgtgggcttcagggctttcctcacctcactgccccacctccggctgttgttagccagacttttgttgcatcaggggctgttcctgcattccctggccttggagtcagtcttctcctgcagttctaggctaaggctaaattctgggctctgctctttttgtggtgggcaggaggggcggtgagctcatccctggaaaggattagtcatcagagagacagggacagatctaggggggcaggacagaggacgggctctatgtaaatgagtcatcttccctgcagctccgaggccccagcttgacagctgctccccaggag

SEQ ID NO: 51307 - DNA, 3148 bp, Bovine  19866880517019
  misc_feature (1)..(1): n is a, c, g, or t
ntgaggtatcattgtttgctgttccatggaattatgacttgtgccgttgtgctttatcctggattgagagtaaatgtgtctttttttgctgccttgatattgagtcattcttgtattcattaaatccaacttgaacacaggccagttgccagcagtattatattccttatgagtatctataaagctttattcaaaatttatacttgaccctagaatgtctttttgggggggctttgccatgaggcatgcaggatcctgttccctgaccaggtatctaaacagcacatgctgcttgaaagtgtgaaatcttaaccactgaaccagcagggaagtcccagtacctaaattttcaaatataatactaccaaactaatctgaaacaacaagttgtaaaactaaactaagatctggtttagttgaggaacacatagtatttgcatgtattctggcgcaaatgcactttccttgttactggggcagccagattcaaatcctcgctagccatctgcccacagccagtgagtgaatatagattaagcatttaacctctctgggtgatgtttccctcatctttgtaagggagataatactgcctgcctcatgaatgtgagaggaataaagatgttttcatttgtgtggctttgttcacagtgattcattcaatcaagtgttttttaatggttgttcattcaactcttggaagcactgatatgacaggaaaacattaactcttttaaagtaggaattattgataagtggagaatattggatttttgttgacctgctacttgtgttccatgcctcgtcttcccattcaggaccttcagctcagaagacagccatcagtcactgagacctgagagcatggctactggtgatttggcagcaggatccatcttattattacagacagtatttggaatgctggggaatttctctcttctttactgttatctcttcctgtggtgtactggggataggttgagaaccgtagatttgattgtgacaaaccttattgtagccaacatcttcattctgttttctgctggattctgcagtccaatgacaacttttgggtggaattgtctcaaaagtggatctgcatgcagagtttttgcttatcttcgtggagtgggcaggggagcatccattggcatcacatgcatcttgagtgtcttccaggccatcacgatcagtcccaggaactccaggtgggcagagcttaaagtgaaagctctcaagtgtgttgttccttcaattatcctgtgctgggtcgtgaacatgatgttaaatatcatttatcctattttcgtgactggaatattgagtaacaaaagcatcacaaatagaaaaagtttcaaacattgttctgatgttcccaatgatcattatggagaaacatatgcagcaatgatgtccatgcctgttgtcttttcttttgtggtcatgatcttggccagtggctccacggttttcaccctgtacaggcgcaagcagagagtccaaaatgttcatagaatcaatggctcctccatatcctctgctgagtccagagccactaaaaccatccttctcctggtgagcatctttattaattttaacacgctttcctccatctcttatattattttgggcatttccaacaattctagtttgttcatttcgaccatgtctgcagtagtcatttcatgtttcccagctatcagcccctttctgcttatgagtcgtgactccagagtatccaggctctgttttgctgggaaaaggaatgcaaactcccccactcttaagagaaaggtgtgaatggtatgtatttgcagtatattcattggtttattcactcaatccctcagagtcctaggtaaaatgtgagtggtttaccagaggatggtaaacaggatgtggtgagcatcttcctcaaagtaaacaatgttgtgattgtaattgcaaagaagtatgatacagttatcatgtatggacttctgtaatggacgttctactagtgcttgaagtcgaagagttcagaatgtatgtaataataaacaccaggtcctcaaacagtctgcttcttatagacacatgtagaagggtgtaacttaaaagtatcaatgcaagtttgctagaaatggagtaggcatggaatattaggaaaaggtgggtggaaatggaagagcatgtggcaggttgttactgaatctgaaggcaatggggaagggaatttcagtccttgagtaaagatttgtgaaggtaggcatgagttttgtcaattttatccttagaatggcaacagttgtttaggtgaaatacagtattttgtggggagatgagtgtgtttaaggattttcaggtagaaatggccagattgaagtgaagtggtgtacaggagagcataaaattacattttaccatattttaaaaaatcatcatgtgattgtgataattgaaaaagttgagaattgcatggaacttggattgtagaaggcagagttttctttcttttgtgaagatgaccatattggtaagtagaggttttcaggtgcatgctcacatatccaaagctatgaaattactttgtagtggagacttccattaaattcagagcactggaggaagaaccatttgaaagggcaagggatccatgctgtgcatatggagtttgtggctcctcagttttcaaggtgcacagtgagtattggcttagtgttgttgttcagtcactctgtcaagtctgaatgccagctcatggacggcaacactgcaggcttccctgtccttcaccatctctaggcattgctcaaactcatgtccattgagtcagtgatgtcatccaatcatttcatccttagtcgtccccttttcctcctgccttcaatctttcccagcatcagggtcttttcaaatgagtcagttcttcgaagcaggtgccaaagtattagaacttcagcatcagttcttccaatgaatattcagggttgatttcctttagaattgacgggcttgatctccttgcagcccaagagactctcaagagtcttcttcaataccacagttcaaaagcatcaattcttcagcactcagccttctttaggatccaactttcacatccatacatgactactggaaaaaccatagctttggctagacggac

SEQ ID NO: 51308 - DNA, 817 bp, Bovine  19866880594305
  misc_feature (1)..(1): n is a, c, g, or t
ntagaccacgaggacttaacaacaggcaaaacagcagcctacccagaaaggtgagccccaggaacagcacagagaacttaagacacagtcatcaaggctgcttgagccaggcaggctagaaggggcatccagcaatcctctgacctcgaacaggactgcacagaatcccatcccaagagggaacaggatctgcctccagagaagaaaagctcgccaccttccttggcagtcttctctgtcaccgctgctccctaacgtctcttctgggttgctcatgctgcagccttagctgttttcacttcttttcctgtgctttggctttggaaggaggcagttgcagacagcttgagcacgcttctgagggaattgaaagcatcgttcaagggagccaggaaagggacctttcctcctcagtaacctcccagagaaacaccggtcctctagtgtacagcagcagatcagggctcagtggtatgcacgtacttttgttcatgttcccttagtctactccccccttctcaataaacattgtctttcacctcaggccaaagggctcagtgccccagatgtcaggggctgcttcccttggaaaagccaaactcgcaaggtcagtgggattgtcggagcctagacccagagctaaagggcttgtttgacatcctgtttgagggcgagcatcgagaactagacccggctgacaagctgggatggggtcctcctgtcatttcagggttatagacattattagggaccccttgtttggtgcaggtttctgaacccccagctaagaaagtgctccattctcttagatgctgtg

SEQ ID NO: 51309 - DNA, 2432 bp, Bovine  19866880613162
  misc_feature (1)..(1): n is a, c, g, or t
natagtgaatggaattgtttcccttaatttttcattctgttttttcattgttagtgtataggaatgcaagggatttctgtgtgttacttttatctcctgcaactttactatattcattgattagctctagtaattttctggtggtgtctttagggttttttatgtagaggatcatttcatctgcaaacagtgagaggttttactttttcttttccaatctggattccttttatttctttttcttctctgatcactgtggctaaaacttccaaaactatgttgaatagtagtggtaagagtggccacccttgtcttgcacaactaattttcaagtgagaaataaaacaataaaacttcagtgacatatgaaaagcctttaactagtatttgaggaaatgcacggaaaataatttccttttacagaaatggaactcaggagaagatttggaggtctgtagaggcatctctatgaggcaatagtgctatagcttctactgctgtaattgaagccacaaaaggaaaatttggttcaatagcctgcatgatataatgataatagggaaggcagcttcagctccttccctttagctcctctcaagcttaagaaattcatatagggaacttccctggattccacactcccaatgcagggtggagcatggtttcaatccctggtcccgcatgtagcacagtgcagccaaaaaaaaaaaaaaaaaaatcatacaggaaacatgtcctagcacagaactgttcagctcacagagaacctgcctatattcaaagacagctactttgtttcagcaatacatttagtgttatcattatgccaagaaatgaatagagttgcaaaggagacaaaaagtagttgtcagtcatactgttctttttttttaagtatttatttggctccatggggtcatagtattagttgcatcaggcaaactcttagttgtagcatgtgggatctagttccctgaccagggatggaacctgggtcccttgcataagcagtgcagagtcttagccgctggactagaaggcaagtcaatcatactgttcttaaaggaagcacaaagttatgaatgcctttggagggttggtccctcggttttctgctttcatactgtatcttcctctataatcccctttccacatctctcccaaccctgatgctagataatcactaagaaggacagaaggaccctgctgatctgtgacttgtcattctgtatacacaacactttttgagtagcttacaattgcatcagcaaagactgaattttgcagtttcagaccatgtttatagttaatgttacttcagtcattatgttggccttccaaggtggcattagtggtaaagaatctacccacaatgctggagacctgggttcaatctctgggttgggaagatcccctggaggaaggcatggcaacccactccagtatttttgcctggagaatcccatggacggaggagcctggtgggatacagttcatggggtcacagagttggacacagctgaagggattttagcatgtatgcccagtcattatgtaaggtaggataggtttatttattttaataggtttataaaagactagtgctatggagaaggcaatggcaccccactccagtactcctgcctggaaaatcccatggacggaggagcctggtaggctgcagtccatggaatcgctgagggtcggacacgactgagcgacttcactttcacttttcactttcgtgcattggagaaggaaatggcaacccactccagtgttcttgcctggagaatcccagggacgggggagcctggtgggctgctgtctatggggtcacacagagtcggacacgactgaagtgacttagcagtagcagaatgtgaaaagtagaatgctgcacattctgctgattacaaagagtaatttggggatttaatgacatttaaacatttttacatggttttccagggaattcaaaactcctttggaattataacatttgttttaagccgcaggatgacaatatacacagcatggttaagtattaagtgaaatatccacaactatttttacatgtttaaatataggacttgtaaaatagaacaaaacacacccaggttttctggggggagaagttcttatcaatgaagcgccaaagtgtaagcagatgaagaggctctgtctcactggcttttcattgccttgtttacattgaccgaggtggctgttgaggaaaaacagaggcgcttttgattttaccggttgaaagaacttttccagaaatcacacacacacacaaaaattaaatactgggccccacataactatttcagaaatggtatttttgtagctacgtataaataaaaccatttccaaagcagaggtctctgtaggaaatttcagaccagtgtttccattattaaatatgt

SEQ ID NO: 51310 - DNA, 1656 bp, Bovine  19866880646278
  misc_feature (1)..(1): n is a, c, g, or t
nagctcccaaaggttagaggagaaagagaaaaaatacttgaagaaataatagctaaaaattctccaaatttgatgacaaatattaatcttcaaatccaagaaatccaacaaaccccaagtgtgataaacttaaggaaatctattcctagacacatcatagtcaaaaagttgaaagccaaagaaaaaaagaaattcttgaaattggtaagagaaaatgattcatacaaaggaacaaaaatgtgaataatagctgatcttgcatcagaaataatacaggccagaaagcagtagagtaatatattcaaaatgctgcaagaaaagctttctaattaagaattctatatcaatcaaaagtaaaaataaggacatttccagtgatcaacaattcagagaatgtgttactagtcaacctgtcatttaagaaatactaaaggaaatcctctgtgcctcagtttgcttttctgtaaaatgggaatcataatagtatctatttataaacttatgacaaaaataaacaagattatatgtgaaaattcctagagcacatcttggcatatggtaagtgcccagtaaatacaaatgaattgcaagtagaagagctgtgtgcatacactcaataaaccaaatggccctctgtgcatgcacccctcagcactttgccatttaccatttgcaatgaagcgataggtctagatgatctctgaatttcttgtatctcaaaaaactctgagactctgatttttaccttagttctcttcttttacatctcagtcatctcccttgactcacctcagagctgtcccacgatccattttccactctgtaccttttccacagaggacagttgttttaaatatgctccgtttacctaagaaggaaggaaaaaaattaacaaaataagaagagtggaaaatataaaaacacatacatgaaaagtctagagatgaaaagcaaaatacactggaaaatactacaccttgtagttttttcatcatccagttggcaaaccctttcccatattgtaaagcaactcctgaaacatcatttcctttaggcagacttcccaatttgattcccagaaagagttccacttatgacactcctacagctacttcctctagtgcatatttaacttggttcaacctgtcctaaaaggcaatcatcctcaatgcatgttttcctgtttagtgacttgacttaaatgctaaattgttctttgaagcctctatatgtgtagcaatgtcagtgaatctgtctttgaatttaaaaggactgtaatctcatggttagaaaggactagacttactatcaaaaagataaatctaaataaaagtctgatgccctgaactactttttcagactttatgcctgctgctgctgctgctgctaagtcgcttcagtcgtgtccgactctgtgcaaccccatagacagcagcccaccaggctccctcattcctgggattcttcaggcaagaacactggagtgggttgccatttccttctccaatgcatgaaagtgaaaagtaaaagtgaagtcactcagttgtgtctgactcttagcgaccccatggactgcagctcaccaggctcctccatccatgggattttccaggcaagagtacggaggggtgccatgccttctccgactttatgcct

SEQ ID NO: 51311 - DNA, 1311 bp, Bovine  19866880701078
  misc_feature (1)..(1): n is a, c, g, or t
naaatgacagataacaagtaatacagtttttctcccaatcatacgaagttgaaaactattaatagatagaataccgtttaatggtgcacttaagggggtgagaccgaagaagagcaaggatgtgactgtgtaagtctggagagtggttggggatgctgatgggaaggggcttctagaggacttctgaggtgctatcgtgttctgttttttgacctgttttttgttctgttttttgacctgttttttgagtggtggttatgcaggcacttgctttatgattattgccaagctatgcaattatgtgttaagcactttatgtttgatatgagaacacatgaaaatttaataccaataagccctttaaaatgttcatcttaatttaccatgctgttactcatcatcattgataatttgaagtgagtgacatcagtttttcttttatggctatcaaatgcttggagagaaggcagacttacagagaaaagctttagatgtgtacatttttattggtctacaaaatgttgtggctacttacaagtggaggactttttgatacaattcaaaaggcagtttttaaattccagtgaaacatttcatcccttggttagctgtgatcaggtgttcttaggttgctgcacagaagagcgtgtataaaatggaaatcagcctatggttttagttgtgagggctacaggaaatggggtgaggggtgaggtgttgattctaagaaaacatgtggtctctcaagctctgataaatcagggtgctttcatttttctaaaagagacttaatgttttagttctaagatgtttttgaaaaatgaagcagctcataatagacctgtagtttaagatgtttcagacttaagctgtgcttattacatgaatatgctaatgaagcagccagtctccttccttttggaatggtagatgtaaagcaaaagataaactaatttctgacctgagaaaagacagttggcatttgaaaattctaattgcagtgtggtttggttttctttctccactcgaatgtgaacttggataatgccagaataaagctgaatctataaatattacccaagatttaggactcagccatactgttaccatgaaatctgttggccacatcaccacatttctgagaaaatacatggcttttttacattttaaaaaagttagcactaagaatccatccaagatgcaattgtttttgtaattagattttttcccttaaaatactcttttgagggcaaaaactgtaacagaacagaagaaagatgttttaggatatatttaaagactaactttttc

SEQ ID NO: 51312 - DNA, 717 bp, Bovine  19866880721507
  misc_feature (1)..(1): n is a, c, g, or t
naaaaaggaaaactgagtggacagcatagttttttctattaagagttttaataacagctccttgatggtcttatgaatagaagagctcccctttattttacaagaatatattttaagcaacagcagctttcacatgacactccttgcataatgatttcaaaagagaaaattgtgtttatgttttgggatagcacttaattgccaggaacataagtaaagaactcaaggcagcattactattgaaatctgaaagaaaacagaaagcttgcagtcccattactgcagtgcaaggtgattcataattaatataattaataaagaagttaatatcaaagcagttgggtcacaagccccaccagcctaaattgttgatctaatttagctaataaccacttttccataaccactcctattacaggcagaaaaaaaattgataaattcacacgggccacaccatataccttcatcaactctgcaaaggcattttgtatagtgcctgaggaaggactttgaattgattgtctagaacagaatgggagagagaaagaaactaaaatggaaatctgcaattacagctcaaaatatctttagggaagcaaatgatttcaaagcgcaaagcatgggtcagccaccctggatgacaaatgaaaatggaaaaagacttctgactgctggcacctctcacaattcacagaacaactctcatctcccccggtc

SEQ ID NO: 51313 - DNA, 1258 bp, Bovine  19866880763995
  misc_feature (1)..(1): n is a, c, g, or t
ntttgggaatgctctgcagtcagtttatgaatccccattttataagtgcccttcccaagcccatgggagtagctgaaccctgggaagggcccaagcagccccctgccacaagaagcaaggtcagctcctaaaacagcagcagagccagctccctggggcaacaccggccctgtttgggtaaaggctgcaagacacaattgcatcattccttgggttacagtagacatggcgagaccgagacatgggttcagggcagcactgactttgtggtcaggtctgcattaactgctccttctgagaaaccagttcctgtggctgggaggcccctggtcctggtgtgttcctgccgagaaaggaggtgggggggggggaggaggaggaggaggaggaagcagaaactgcagcagaaaaaaagagaagattctgaaatgggtgcgggggagggtgagtgtgtgtgtgtgtgtgtgcgtgcaggcgcgtgtggagaagaagagaagtgggtggggaagagcaccgaattccttattgttcgtctaaaggatacttgagatgaaatctcaggaaaattgtgaggatgaatttgcactctttcacacacaccgcctcaaattctgccttatcttgagttttggtaggcggaatgctctgctctgtgaaatcaagaaaacaccctgctttcttgtcagctctcggaaggttgggctttcgaaaatcccccaaggagagcggaaaggtgggaggtcctctagcatgtgaagtgaagtgaagtgaagtcgctcagtcctgtctgactctttgcgatcccatggacagtagcctaccaggctccgccgtccatgggattttccaggcaagagtacgggagtgggctgccatttccttctccaggggatcttcccaacccagggattgaacccaggtctcctgcattgcagacagacgctttaccatctgtgagggggctaccaaattattctccagggccccagtggtttccacgactccctgaggggagcaggagggtaaaactgctgctaagatcagacccagcgggattcttctgagggatggaagacactgataaccaactgcgactgcctccttctctgtattgaggagagtatgttgactttagcccagatcctgatacagcctcagggccacagcctgtccagggcccatccttagccctccctccctggttcccgcctcctaccgggttgaagcagtcacgagctaggctctgctccaactctag

SEQ ID NO: 51314 - DNA, 987 bp, Bovine  19866881088400
  misc_feature (1)..(1): n is a, c, g, or t
nttttttctctgtgctgtgcattctgtatgatttcttcacgtataccttctaattctgtaattttctcttcagctaatctatttaatccagttttcttgttacttttacttttagaatttctgttatgttccaattatttattgctacataaattatctccaaacatagcatcataaaccaatcatttattttgctcatgattttgtaggttaggaattcagatagagctcagttaagagattctggcttagggtctcttttgcaattgcattcagacagtggttaaagctggaagagcagaggactagagaagtgatggatagccagatagctctccttatttatgtagcctcagaacctctgcatataggaattttacatgggcctgacaactcctgggcagttgaactccttgcatggcagctcaggacttgagtacaagtgatccagtcaacaaaacaaaaactgtctcacatttctgacatagcctcaagaagtcacacagcactacttataccagattctattaattacaaatgaatcacaaccatattgctcaaggaaagaggcacagaccccacctctcaatggaaggagtataaaagacatgttgtaagagaatagcacatgggatggaaaatattgttgataccaactataagcaatgaatttgaaagatacaatctactgtactgcatgattttttttcaaatcccttctttttaaaacatgatatcctgttcctacctacaagttttgtccttcctctctttttttaaacatctgaaagaatattaaagtctcttttgcattgtgtcctggattgtggttaagactccatcaagcttttgcatggctatgtttgctagggtgtcaatgggattcactgattccacataaatatttagtttaaattcttggcacagggcttctacaaaatgaggttattgtgagaatttgagactgcataggcagcacagaataag

SEQ ID NO: 51315 - DNA, 989 bp, Bovine  19866881092655
  misc_feature (1)..(1): n is a, c, g, or t
ntggaaatatcaggcattgtctagactattgtctagactagaggacccttcttgagttgtctgattctactgagatctgtgccttttattgtcatcaatgatgctgcatctctagaaatagacgttaacttctggagggctgctgcacaagattcctgttcatagaaatgcaaacgaagatgctagttctgcatcaattaataaattcctcccccatccttgactggttatatatatggatctacgttctgtgactgtaacattttactggttcccccagtaattaatgagttaaatgaagtccaagtcacatgtacattttatatttgcatgagttacaattttccagggctttcctgatggctcagcagtaaagaatctgcctgcaatgcaggagtgcaaggagacacaggttcgatctctgggtcagcaagatgccctggaggaggaaatgcaatccactctagtgttcttgcctggagaatcccatggacagaggagcctggtgggctacagtccctggggttgcaaagagtcagacacaactgaagtgacttagcatgcatgcatgattttccactttaaataattgtctttaaccatgttaaatatctgtctcagacttccctggtggtccagcggctaagactcctcactctgaatgcagggttcaatccctgttcagggaactagatcccacaggctgcagctaagagtttccatgccacaacgaaggcccagtgcagcccaataaacaaataataaatgtatttaaaaaatcagtatctgtctcgtgcttaagctaaaggaatagagaaggagaggaggagaggagagcagggtagaaggacacaggagaagagaagagaaaagaaaggaagtcaggagggaaggactgaggcagagaaggggtgggagaggaacaacataacctaggaggaagccaaagaaaagaatcctcttgtcctgcaagcacgcgaatgcctctt

SEQ ID NO: 51316 - DNA, 1864 bp, Bovine  19866881162147
  misc_feature (1)..(1): n is a, c, g, or t
nttgaaattgatgtgtgaatttttatataatatatatacaaaactctttgcagaatatgagttacaaatatagactgggatctagacatatcctagcccatgacttgcctgttcattttcttaagtgtcttttgatgaacagaagttttacattttgatttctcagtctttatggttactgctttctgagtccagtctaaaaatatttgcttagctcaagatcatgaagattttcttcaatgctttcttctagaagctttgtctcttaaccttttctgtttaggatcataaacaatctcatatgtttacccagttttttcagtacagtttgttgaaaaagtttcctttccctattgaatttctctggatccttcgtcaaaaaactaattagctactctccatcttgatgtctaattctacttggttcgtttttatagtttccatttctctgctaagattatccatttgttaatttattgtgtctgtctcttccattccatccttgaatatattcataatggctgttttaaagttcttgactgttgtgctagttatcaatttattgcctctcagagctaaatcaacctttcatgatctgctcttgctaatggatcagaccctttaatccctattgttgcaattacaatgttaatttttgccagtagaggaagctgggggtactttgcaggagaaagttctatcctggttccagcgctcctgttcttgttcgtttgctcttgttgtatgtcttaaccactggactgcaaaggaagtccctaaggagctgcattttggtttgggttttatttccagcacctggccctgtccttggcatctgtaaaagtagtgaactggatttcattccatagggtgactcctaggaggaccaggccaaagacccttccccaagagggtcaccagcaaagaaggctctccctgacctttaatcttcgcctcttcctggtgtaactggcaggttaacctctccagaggcagccaagacctccctcttatctcctgcatcctccaagtcagcatggaaatgaggtctcccaggggccacagctgcgatgtatggccctcagttggctcttccccaagtctctcccataaggagcctccctaggaattatgcacagtcctctcaggcatcgtatcctctcagcatcgtgtcctgctcccgccagcatcacttcccaggagaaggcagttcattttctccctgaattccagtccctggcacagataaacccctgggaagcatttactgaaactttccaggcttttctcagcatgaacactttacacttctgcagtaaactagactgctagagtaaggcaaaggagttgtcagtgccacgctgctgcatgctgccaaggagttcagggtgggaggtggtgggagaggatggggtttctcatctcttccaacccaagcagaaattaggtctctcacctgagcatgccaccgttcccccccaggccagcagtattcctgctcactggtctaccttcgggtgccctaaaagatcatcctggatttctgctttgtcattttagttcatgtctctgcttctgtcccagtcattcactatgaggaccccacctctgagaccacccccctgccatgtccaacccccacaatttacaaaaggggaaataggaccaaggagaaaaggatcacagctcaaggtcacagcctgcaggtctggtgggaacacacgttaggaatcctgactcgtaacagggggctttgtcccatccactgatctcagccagaaagaaatggtcttgccactgctgagggcttatgccgagggccctttcctgggtcctggatgatgtgactggctaacacataaac

SEQ ID NO: 51317 - DNA, 735 bp, Bovine  19866881206288
  misc_feature (1)..(1): n is a, c, g, or t
nctcttattgtactttgtaacccttagtctcccctcaaacctaagacagagcacctggtcaaactgaaatgagaaagaaatcacctgaagatcgaaaatcagagaatcaggtaaactgccagttttaccatttccacaaggtgataaacaaaagagagagaaagaatcgagaaaagatactttttcagtcatcacaacagcagcgagggaataaaaacacgttttccctggagagagattacctcgaggggaccagatacagacacaaaagataattccccttggggcttttcttttcctctgagtttgtgagatctaaaaaaataaaaattaaaaaattaaaacgtgtatcacaaaacaatcaccacctcaacacatttacttctcttttctcacctattatttctccaaacgttatagatactgcgtcttcagtaagtaaactgaccaaaggtctattccctattgatcacaatcttttcaagatttagatgactccttttagactacaagtaggaaccgacttctaacttcggttcccgagctcaaagctcggtaaagtggatcttcaaggtttagcaaataccctcagctgaactaaagggtacagaatctctagcgctccctacagctcagagtttgaacctacctaccacaaaaaaaccccagttatcaaagattggctacctcgctctacttttcttttccgcttaaaaaatcggatggggagggggg

SEQ ID NO: 51318 - DNA, 829 bp, Bovine  19866881267368
  misc_feature (1)..(1): n is a, c, g, or t
naactttttcttaaaggataccagaaacattgctggatataatttaagattagtgttttctctttcatagaaagaacgtacatactgggacatgagtacagttacagcaagtctaggtgtgctaacaaaacagggcacattcaagtacaataagattttgcttgaaattaaaaacaaactacatgagattaaagcattaaaatcatatttctcaatctgaatacatgttaaaaaaaaaatcaaaataaacgcagaagtgctagctcacatttttaccatattacaaaagcaattggtacccacgtccataaaagcagcaacaaagctgcttgtctattgaagagtagtactactgcaagttggactgcattcaatgctagttgtaaaaacaccagctttttttttcagaagttggtatctgtacaaaattgaagcttattttcttcacttctgtcccttcaaaagtctttacacagtaatgctaaaacacccagctttgagatcctgagtcaatatattgccactttctttttggtagcttgagcttcatagtgtcaactgaccttgtgtatccatttttaatacagtctcttcctgtagcatgggcaaatattttaaatcttcaaaaaaaaaaaaaaaaaaacccaaaacgttttaagttatgatgttagaatggcaggactttttctttagggaaggtattcagttgtgctgcaatgtattagattctataggtggagcagagtcatatagtgtatctgtatcatgtgtaggctcaccagctaacgtacaaggattagacaggttccagcaccacagcacagaaaaa

SEQ ID NO: 51319 - DNA, 1593 bp, Bovine  19866881529524
  misc_feature (1)..(1): n is a, c, g, or t
ntgggcgggtgcccaagaatatgcaccgcgggacgagtttccaggtgccgctgctgctgccatcactgggcagggaaaccacactttgagaatcactgctctaggaagactgtcctcattccatccttgagcccaaaggaagttcaagcctttgtttaaaacacccagatcatcacatggtctggtctctctctattctccctccttcttccgaccatagagtctgtaagaccaaccctgttgtcagtaatgctgatggcctttcctggggaatcttcgtattgttatcagaccatttttctgtccctgcaaagactccatccacgtggggtagctgtgaagacaggagatgagaagagtagcaaagacccctttcttaacaaagctatactgaacacacgtttccaaactctacatccaggaggctgtgtccttatccgtaattggtagtaaccacagcagaaaactcacacagggactctgaatgacactggtggagaatacaggcctcctgttccagccaggacttggaacaatcatacaggttgtgtatttattcagaccttgccatcttggcaatgaagaagttttgtggagtaaatgagcagaagatggagaacttttctgctctgtgtttataggttttgacatttcccaaacgatccatcttgaggtctcacatcaagcaggcaagcagccctttgacactcttgttagaagtttcacactatttattttttgccctgggaagcaatctagttctctgccattgaggctgtcaggcagtaacagagtgcctgagctcactccgttgtttatggggctttctctgaatccccaggcctttcccatagatgagaaaaatcagtggaaaatctctcagcaacaagcctgaatggcccatctgtcctcagctgtccccaactcactctttgtttagtgtccctcacatcgatcagctaggctctttctactctgggctgctcagtcttacctggacgtttacactcagttaaaggaactttgagaggagaatggcccagacggtgatggacttacatgcatgccttcccaggaaagacacagggaacttggaagatcttatctagagaagggtcctctgggggacaccactctgccttcagatatccaagcagctaccaggtagaaacctcttggtcttgcttcctgtgctccagagggaaatcctattttgtcaatcaggctatttgctggggttttttcttctccaagtgggcttccccagtggctcagtggtaaagaatccgcctgccaacgtaggaaacgcaggagacacaggttcgatccctgggtcataaagatcccttgaaggaggacatggcaacctattccagtgttcttgcctgggaaatcccatggacagaggagcctcagcaggctacagtccatggagtcataaagagttggacataactgaatgagcatgcacacatgcttcttcttcaggcatctaacctttggtgtcccgtggagctttcctctctctccccctccctagctaggaaatttcacttcttcttctggctctaaatgtcgtctgtaggctgatga

SEQ ID NO: 51320 - DNA, 703 bp, Bovine  19866881681163
  misc_feature (1)..(1): n is a, c, g, or t
naattgatttgtgggaaattcctcctaagatgaaaagaagtccctaagcaaggcagcttaatacccaaacataacaccaggcaactgagagcgtttaaattgagttatgtggtcatacaagcatagctgaataaatcccaaatctttgctgggcccctgcctcctatgtctgtgccgaaacgggcaccagcagactggcaggcacagcagagggctgcctgggcccgtcagcagtgcagctggaatgtcccttcaaagggcctccttagccaagagccttggcaggcctggggccagcaagaagggcacagtgggctcttcctggtgcccaccgccccggactgtgtgcctccactggctgagagcactgcccaggctctgagggaggccctgggaagtggctgaggccctgcaatcaggtgggtggagtttggaacctctgttctttgaacgtttatgccaatgtgacctaattggctgagcattaggctggagaagctagatattcctgtttaaattcaaacccaaaagacactctaagggggtgatttctgaggggcagtggtggtgggaaaaccagcccacatttgctttgtctcccatctcttgtggcgagtaaaatgtttcggtctttcccaggttgtggggaaaagatttgggaatcatctttggctttctggcaggtttttttttttttggccac

SEQ ID NO: 51321 - DNA, 1100 bp, Bovine  19866881696649
  misc_feature (1)..(1): n is a, c, g, or t
ntagatgtgtacagctatttaccatttcttctgggagggtggatgttcacattcatatgagacaaaacaaatcaagattcaactagacaggctgctgtggactttgggaattggaagagcaaaaataaaaataaaaaacaaacccagcaacatgcaacatactccagtaaatcacttctcctttttgtcttgttcttaagaaagaatttaacaacctcatctgtgttgtggacatttttatgtacttaccactgagttttaaaaagcatgaacaaaatatttggctgaactggcctctagactggaagctagatagtaatcatggtagatcttgctcaagattcaatagtgagtatatgtattaatacatcatttcatctgtccaacaatagctgttcccttttttcttgtctttttgagcaacctttcagaaaatttcaaaattttaccagattctgtaggtttcactacttaagaccaagtgagatcatttaaacactggggatgagagactatttctttcaattcttattcaaattctgaccttcccttcaacatcccaccattatgttctttctgaacctcaagagtgcattgagtttaccttcctcttctacagcttgtcttttagatatgattcacttgggaagaacctagaatccttctacagcagatatcacagactttgattcagatgttaattccgagcattttgttttacctataaaggaattaatgttatttaattccaataatattagaacaatattattgttcaacaacagtgaacaacaatattgttcacaaataatgttatttaatcctctcaatgtccctgtaatcttgggtattataagtaccattataatgaagaagaaacagatgaaaagagttaggatctttgcccccaagagatgaatcacaagaaattgctctctcctttaatatagttctcctggtccagttacctaataggaggcctttgttaaaattcctcctggtcttacatttataaaaacacctttatggattgagcaaacttccaggaactttaatgggaaatctcctaatgaattccttgaagtgccaacacagttcag

SEQ ID NO: 51322 - DNA, 1191 bp, Bovine  19866881707503
  misc_feature (1)..(1): n is a, c, g, or t
ntggaattgatcatgtaccagtggtatcctagaaagtaagaagaggaaagttactgtgactacagtaagtatagaagataaaggtatgaggatttggcagcatctgggtacaggacaccccaagatgtcacaatgaggagtgtttgctactgagaagaggggcactgggccagccttaacaatgactcaccctctgcaaggctcctccagctataagtggtacaggactgtgatgaaaattatacctgtcctgcctttggaaattgccagcctgctggctgtaaaaaacactgctggctggcttctgttaagaaatgtccaaggtcctgtagtacacagaggaactgtttcacaattagtgttgaccttgtgtatcagtcaagaacccaacttcatgttgtgttaatccctacgattggacttagtgcctgaaactctgcacaagtgggaatttcctttggttacttttaccttcctggagaagttaagaataatgattaggaacatagactgtagagttgaactagatataaattctgggtgcattaactgctagctgtgtgtccttgggaaaatcacctaaactctctgtgtcatggtttccacttctgtcaaatggaaataattagtatcaacaacatcatagagctgtctaaggattagctgatcctcaaaggctgagtcacatacaaagcaggaagaatacacagtagttattcacaatattacttactcattctcaccagtgataacaagaatgttctaacaacaggtttcaagaaagaaaaaaagaaccacacacagcacattgggaataagaaaataatgatagtgaagaagaaaaggaatgatgcccacaaaattaatttacacttagaatgtcatgcagacatgataaaggcatttctagacatgcaaagcctcagaacttttcactctcaagtggtctttctcaggaagctgctggtatatatgtttcatcgaaaagaaggcctgggacttccctggcagtccagtggctaagattcttcactctcaatgcaaggggcccaggttcagtctctggtcagggatctagatcccaaatgctgcaactaagagtaagcaggctgcaactaaagatcccagacttcccaggtggtttaagtggtaaataaaccaccccccacctctacgcaggaaccacaggag

SEQ ID NO: 51323 - DNA, 939 bp, Bovine  19866881721792
  misc_feature (1)..(1): n is a, c, g, or t
ntgctgagtatatcgctcgcccatgcccttgcctgcactgttgcggttgatgatgcgtccctctcaggatggttgaggggaccgggtgagaggacatgtccagtgcccagcacagaggctgcacccagggcctgagacagatcagtgctggcctccccatctcacttccaggctctcagagctgaactccagaggccctgtcactggggccccatttgcgaaggcggcaccagacagactgtgggaatgagcttcacagcttttgtcaaagtggcataataaagcccccaagtgtctgctctctgcaaactgggatggcagatcaattgtggcataaacaaaacagcaggcttggtgcgaacccggggacagattccgcctctgcagagtgtgagtgggggaagggggaattctctgggtggttgggtttgccttttctctggctgaagcttcaaggtccttctccagagccagcctggctccccacagattgccaagagtttggggggactgttcttccatcgtgggaacatctggctaggcagcagtaccaggcatgaccctaccgccctcagcacccccagaactctgagcctctaggtgctgatggggaaggagggtggaccgtgccccctccaccctgcctctggagctgagctgacggtgggtctgcaggaaagcaaagggaggtgaagtgggcatgggggccagacctcaggaaaaggccagtgagagggaccctggcgttgggtgtcctctgtgatgtcagggaacctcctacctgcctgtcctcttcattttcggcagaaagtgccatagccagccatgcatttggtgtcatttggggcctggagtcatagccacgaggagacctcaggcccaggtctggcccagcccctgagtggaggcagcagggaaaagctctgcccctatccaggg

SEQ ID NO: 51324 - DNA, 1653 bp, Bovine  19866880354909
  misc_feature (1)..(1): n is a, c, g, or t
nttcattttacataaacttggaggatttaaagtcatttcagactttcctccctgatcatatgcttaacatgccttcaatgtgaacaaggagtttatgagtcactacatgaaaaatttcaagatattatcaatttttaaaaattctactaggtaatgaaaaactcattcatccatcctaatatgatgcattcctaatcattctaatagagttacctttttcacaattattgtacttgataagtatccatttttgtaggtaacatgcctataattactttaaagatacaaacccctatgaaaaagtcaaataaattaaaaataaataaaacactacactaacttttatttgacactaagatattaatttattcacttcctatttcttcttagatctcagacacaaaagcccatagctgattgacactattgaagactaagatattccctatatttcttttgaaaaagtgtactccaacacaatgttataagcatgaactgagttagagttagactatatttggacaaaacaatttataagtattgacaaaaaaatttcatatcaattgattgaatctccacccttccccccagtgtttttactaaaatcagtttaggatgcatataaagagacttctgagttcccttgctatttcatcataatattctctgaacagcaaattaagctttctattctaatccttatcttaaacccacttggtagttttgaggaaataccatagcatttttcatttcatatgtaatcaaataatgtactagaggattaatcaattagctggttaaaaaaattattagtaattaacatatgtactgaaacatgcctaagtatatcacatttaatagagaaaattcagagaagtcttccaagcacagcagtcaacaagtataattctttaagctgttttggtttactgaaagccatgaggaaaaacctcttcatgaatcagtttttctgtctgtttaaacaaaccagacttgtctcaacatgactatatataaaaagtcacactgatttaccagatgaatgtaaaagactttaaatctacagtctcatgaaagtatttttcaatataatatttggtaatgataaagtaaaaataacaaaacatcctgttttccttatgattgtcattataatttcatgtgcaagttcactaacttaactggcttgatttagcaaagtaccaaaactgcaagagcaaaattaattttttttcttagcaaacaaaaggttgttttttatttctttaattttttaaaatgatgtgatagtcataagaattaatgtagaggttgtaaacgaagcacatggtttcaaaaactaagaaatacccaagttcaggatgaaaacattttatggtaatctttcttcctgtaggcagcaattataatatggtctcacagtatttgattaaatttacctgtctctgtctggagaataatggtcatccatgacacggtgtctatccattcggttaattgtattataatgtcctatagcagagcgtgtccctcgaagtccctgctccacatttcgactgaaatagtaagatccattaaatatcttaataaaccataaattatactaaaaaataaagttttttaataaagacagtagaaaaagacaaaagatca

SEQ ID NO: 51325 - DNA, 1710 bp, Bovine  19866880391760
  misc_feature (1)..(1): n is a, c, g, or t
natagacttagaaaacaaccagtattaccaaagggaaaggatgagggagtttcccaaaattaggagtttgggattaacatagacacactactatttataaaatagataaccaacaaggaccaactctacagcacagggaactctactcagtactatgtactaacctatatgggacaagaatctgaaaaataatagatacaggtatacctgaatcactttgctgtatacctgaaaccaatacaacattgcaaatcaacccaggaatcgaacccagggcctcccacattgcaggcagacgttttaccatctgagccaccggggaagcccctgtaaatcaactaccttccaatataaaataaaaattaaattaaaaaaccccagttctcagagtccatacatatatgtgtgcgtgtgtgtacatagtcctttaagacaatggtttccaagtttgagaaacttcctgtgccagtattctcttcattattccaaccaatgctctggctttgtgataaatttaaacagtcttcatagtaacattctcaaacatttgagagaaaagaagaaatatttcttacaaatcccttgaaattctagatgaacatcatttagctacttctcatatcattatgagatcaacagcatcgagattttgtgggtataaacattctgcacaaatacacagcaagatttaagaattttatgtacatttcaggtccaatgccaataactatacaatatttataaactgtgtgcatttcagcggctttattcatttattattcattcactattcacttactcattactcatttatttcttaaccacagtgtgatgagaacaaattaggcatgcatggaaaatagagggagtctcttaatcacaatgaagtctaattcctatttgttcatgtttcttctttttctttattggctaaagcttcacttatttatttcaacatacatacgagaaaaggcttctgattaccattcagtttaactgaattgtacattgattgtacatcagcagttatacactgcttaaactggtgataccatgctgacataaaaatggaaaatggaacatctttcatagaaatttggcttaactgtctggttgacttttaaataggcatttggtttttcattacatattaaggcataaaatttataacaaagttacttaaagttgttaaaaatcaaaggcagtaaagaagatgaagattatcttaaagcaataaaaattgcaggattttaaatagtatattgcaaaaaaaaaaaaaagcccgtgaaaaacattcatggtatacagatccaggtcaaacatcacctagattgggcataagtgaattgctgcctgaaggaagttctatttggagctctagtacattaggtaaacagttcaggctgtgtgcaaagtggccgacgtgggtaccaaactaagcaactcatcatcagctgactcccgtttaaggcactcagtgttacagacaccttgaacgtaacagtttgtctgtcttgttgatatgaaacttcataataggaagtaacaatacagatgaaacatgttttcctcctaaaatccaattcaaaatggttccatctaatatgctttagttatactccccaaataaggtgagaagctcagatctaacaagacagaggcctcaggaagaggtcaatttgtggtgtcatacagaaattctctgagata

SEQ ID NO: 51326 - DNA, 2157 bp, Bovine  19866880417584
  misc_feature (1)..(1): n is a, c, g, or t
ntgtagcctgcccggctcctctgtccatggaattctccaggcaagaatactggagtgggttgccatttccttctccaggctatcttcccgaaccagggattgaacctgggtctcctgcattacaggcagattctttaccaactgagccaactttaccattcttgcctggaaaatcccatagacagaggagcctggtgggctacagtacatggggttgcaaagagttggacacgaggttaagcaactgaacatgcatgcactataccaagtaggaactttttgtcaggttaattattctaaatatttatagttgttgagaactatttgaagctcttttggtcaatgaagagatgaaaatgtttttagaataagcttaattcttttaatgaagattactaactgtgtaaaaaagtgagcatagtagctgtctaaatatttgaatatttgtcactcctcagtttaagtgtttataaaatattattttatgttagcattgtgctttattcattatgctttacatttactatatttaaagcctttcactaacattttatgtttttcagtaaattacaaaatactaaaaatcttagtgtatggataactgtaatcttaatatttccaccttagattatcgacacaatggtcgggatcttcaaagctcaacattgtcagtgccagaacaagtaatgtcatccaaccactgttcgccgtcagggtctccacaccgagtagatgttataggaaggactagatcttggtcacccagtgtccctcctccacagaggtaagacagcataacattttataggatgatattataagcctatttatcttaaaatattattagaaatttataaagataggttcttacagaaaaaagttatttaggggaaaacatatgtgctagtcaatagcctatataatgagagtaatacaaaatatgggctattttgtaactttggatgacctaaatatgattttattttaagttcatagtcataaagaagatacaaattccagtctcatatatatattgagcagatctagttagacccaactaattgtactcatgaatgatattgacattttaagaaataggaaagaataaacatttgttggagcaatacaattaagaacaatcatgagaagactaaaaggaaatgcatgagcagtgggaagaattgtttggaaatctacaattccaggacttatatttagaggaaaattctaatcaatccagttaagttatagaaatgcttattggagtaagaaccatggaaatgtttccgaatcaatccaattaagttattgaaaggcttattagagtaagaaccaaggaaataatgtttctgaacaggaaatatgtgcataatttcacattttatatacttcaatgtttaaggcaatttgaacccttagaattacaatcttagaacacttattttaaatgagtaatggagttatctttagatatttaaacttagaattttaggttgtcatcttaattttatacatggcattagactgtctaagagaacaagatttattatatttataaatttaacttatttaattagaaggatattaagtacttaaatgtttatttagacaattaaagagaaaatttaacattaaatttataaacatagtttaaaatatttgaaaaaaaacatttgaagatttaggtaagattgtaaatgggactaaaattattaaaagtcttctgaaaagtaactttaaatgtggtagacttatcagtagaatattaagatttgtaatctgacatttaaagtgcaagagagaataagattttaaatttgtagttttagtaaattaaaccgtttctcataaaaaaaaaaaggaattcttgacttatcaaagaatgaatatttgaacacaccagtagaaaatagacatcgattttagattagattcacctgcacttaacagaaagcctgtatggaaaagaatgtgcttagtcactcagtcatgtccaactcttgggactgcatagactgtagtctgccaggctcctctgtccatggggtactccaagcaagaatactggaatgggttgccattctctcctccaggggatcttcccaacccaggaactgaacccaggtctccttcattgcaggcagactctttaccgac

SEQ ID NO: 51327 - DNA, 1291 bp, Bovine  19866880472982
  misc_feature (1)..(1): n is a, c, g, or t
ncttccgtgaggaatgtattacacttatatcactattgattatgccatatcaaacatttcataagaccaactgatttatacttttgttcaagttttgcattaactgtatagatttctttttactttaaatttatcactgaaattcttcttatttttttgtaggcaaatacagaaactcgaccagaattggctttatttatgataaaatatctgatgacattaattgttggcatctctgctgtcttctgggttggaagcaaaaagacatgcacagaatgggctggattttttaaacgaaatcgcaagaaagagtaagcatctattgaattatctgacattgttttaaaataaatagatcaaataccaaggaactattcaaatcatcactgtaccagagtttcattatattacctggtttttcaaagtcttttgaaagtcttgaagttttttttcatggagagagatgctttattttagtatttgttacagtagtctttgacatatactattctattgaaatataaatacaaagtttgtaaaatgtacattttcttttcatggcttataatatatccagtattattactgctatcattgaattcattgttttgggttcagcattgtaaataattttatcctttttaatcagtgataaaagatgaaatgggtcaaatatcaatatatattaagcaacatagaatatgattcaaacgtggtatatgatcattacctttaaattttattacacatagtactgacttaacatgtcacttatttgccttaagatggtaaaaatttcaacttatggaatattctttaacaacatagtagacttacatttatgagtaaatagttaactttattatttatatatgttataaattgtgtgctatcaatgtaatacaaagttttttaactgtttccaattggtttgattagtgaacatttttgtggtaaaaattttagaacctttttacaaattaatttttgaagtctgaagaattcatttaacgggactttaatttctttgaactattattataatatctctatccctggtggctcagacgcattgcaggtggataaaaactccacctgcaatgcgggagacctggattggatccctgggtcaggaagatcccctggaggagggcatggcaagccactccagtattcttgcctggaaaattccatgaacagaggagcctggcaggctacagtacatggagtcagacacaactgagtgactaagcacatcccatatttatatgcccacactaacttcagaata

SEQ ID NO: 51328 - DNA, 656 bp, Bovine  19866880498253
  misc_feature (1)..(1): n is a, c, g, or t
nctgaaaagaagaaacgcttattgtacctgcttttaaatctgagttggtaccagcatttatagttgatttatcttagccaatgcacactgaaacaaagttttaatcctagcataagaattgattttttaaatgatttcaagaacataattagatatattttttgcccatatatatagatatagatatattcatgatatagatttaagatcataaatatatacttaaatttatgagaatttcaaaacagatggatagatcagtgcattccaactctaatttagtaataacactcagggtttctgtattcttttagaactatcacaaaattttcaaaatagtctcaaaataaactttaactcacttcgatttgatatatgtcattaatgacgtctaggagaaagagatggctgtgaaagcaagtgaacaacggaggggtataaagaattcaacatcacgcatgtaagtgatgatactgaattaagacattgtagaaatgcaagattttacatttctattatacttaattaactaggtagaaaatgacacagttaatttttaatgttttcagtgcttaaaaaattagcttggcttctagtactgaatacctcagatgatgaaagtaagaaatgtatgttactttttatttgcttcctaa

SEQ ID NO: 51329 - DNA, 2130 bp, Bovine  19866880561283
  misc_feature (1)..(1): n is a, c, g, or t
ntcaaaatggaataaatccaattaccaaaacaggagtagttgtagactgttaagaaagttatagattgatgatggccatattcttctgtatctgtaaaagtctgattagtcttgaggttcaccagagaaggactaaaattttgacagctggagaggagataagaagccattgaaaattagtgaaaattatggagggttctccctagcagagaaccccccaaagatatgtaatttccatggagttccatacatgcacaaataagaattacgacaacaaggaacattcattgagtgtttacttgcaataagagcaatgaactaagaacttttcttgcattagatcatttactactctgaacaacactgtgaatttattattcctgatacacagatgaggataattggagttgactaacgtgcccaagtcgtaagttatctgagatttgcatctacatctgaattaggtctaactcaaaaccctctggcccttaagccttaccccaggaattcctggtagactgtgacttgaacatgaaggcaggaattctggatttggctgcaggtgcagacctatatgacttggtatttctcaattttatgtaagagcaaaagaggtgatggttgagatgatcattttagagtgcttggcctggtgagtttaagacagtctgctgtggtgcagactatgcctgagaaaaggggattcttgtacctgagaatattggtaatattaattaaatggagagcatattaggagaccagtaggactgaagtgatagttaagataatcaagataggaggacaaaattaaagatctaggagttgaagcaggactgtgtaacaagaaacccccagtgtggctgtgcccggcacaagtgtggctgtgaaatggtgatagaaaagaaaacttaggaagatggataactgaaataaaaatattatatagttgaccgaccacctgcattaatgctaggatttttaatgctttcattaaagtaagcccttttaataaaattatagtacctagtgatagggatgttagtcttgaccattaaaccaaacctgcaatatttcaatgagttcaggtgcaaattggaattcagaggtgtccgcaatagtcgaaggagtagaaatcattttctttgagaaataactaaaggaactagtttaacttaggacatggaagggacttaaggtatttagagaactgccatgtgagaaagggtgccttattgcaggtaatctgaaaggcagaggttgggtggaaattacagggaagcagttttggcttggcaaagtgggtggtgctcagaagtgaaactggcagtgaatactagtggttcagcagttggatgacaacggctagaaaacattcttgtgttgggtggaaaggtcacttgaggtgattattgaggccccttattacttcaagataccattttaagccatcaagaatgttgagtgggcgcctcaacaaagaatgtgaagtaaaaatagtaattttctaaattaacctgaaatcctaataatgtgtagattaatctaaggaacctaagtgtagagcgcccttaacgagaatagcatacagtcaagttttgtatgtatatggtattgcaggacctgatagcataaataataacttactgactgcttgctatgtgccaggcatgccttttaagacttgctttatatgtattaactcacttaattctctcttttatgagagtttgtttctgttatttttctccattttgtgcatgagaaaactcaggcacagagtaatctagtaacttacttggggttacaaagtgttgaaatagggattcaaactcaggaagtctgattccatagcttttgctgttagactgaaaccctaaatgggtagtttggtatatctaaagggtaaaatgctagaggttgaaatgaaatgattccagaaagttaagcttccagattgacacatcttttatgccatgtaaaaatggatgttaggaatgagatcaggactgttggttcagttgctaggtcatgtctgactctttgaccccatgaattgcagcacaccaggtttccctgtccttcaccatcttccagagtttgctcaaactcatgtccatcaagttagtgatg

SEQ ID NO: 51330 - DNA, 839 bp, Bovine  19866880667142
  misc_feature (1)..(1): n is a, c, g, or t
ntctgagtaatggactatttgtctttttaatcctttcagcatatttagtatgcttgaataatatacctggaggtgtatttattctgcatttatcttaatgactagaaacaagctggaaaaagttatacagatgttatattaaaatactgctttttttggttttattatggaatatttgtgtgactctaaaatctatcatgactattcactttgaataagagaattgtcagagttcatttaattttaatctgctttatctttttggtcttttatgattgctaatcctttctttatctgttcttggtataatttgatttttgttcttatcagagtccccattaagtttcattctgtttccagtgagacattttagtatcctaaggtcagttaaaattccattgcatttatctattgcctaaaattttaaatagactattaaactagtgctaaactttgactttttaaaagtgttacatgtttaaaatattcagtcaatataattaactgtgtttctgataaaataagagtgttgtgcaggtattatgaacaactaaatattacagaaagtataaaaattatataaatcacagctatatcctcaaaaagctttagatctattagggaagatatgttatataacatttcagtagcaaaaaatactgtaagatttcagaaagatcacttctgactggagtgaaattttggatgacttcttgaaagatttataatttgagccagaatttaaagatgaatgaaatggatataggagtgcatatcaagcctagaaacatttagtagtataagttcaggaaaacagagtatgcatcagagaaacgtca

SEQ ID NO: 51331 - DNA, 1558 bp, Bovine  19866880683856
  misc_feature (1)..(1): n is a, c, g, or t
nactagtccttcaacctggaatcccgttttacatagaaattcctccacagtgaaaaaacaagctaactaaatcctgtttttcctctgtgttttgttttttgctttataaacatgtgccttttcacaagtcctccagactttcacatactaatatatatataacctgcattccatcttatcaagcctcttctccaacattaaaaaaatattccccttactgttcattttaataggcaaaagttatacccctctgatgtctgtgtcaggggaaaaaggaaccacaggttggcagattctttaagaaaacaggtattgccacataagtagggtggggatgatcgcatgtgactggattgtcttcctatctggttgaggttagtatattcaagctgagcccagggatgtaggcctgaaacaatctgcttctaccagctgtgacatcagtgaattgaaggcaagtcccactgaatccagatacctgtctctggttcaagaccctttccaagttgggagaactaagctgtgcgtgcccgcaatacccatggcctagaaatgtgttcacttccctccacaggtcagacaaggttgggtctggcatcatcctcacacagggagagtcaaatggtcactttatggtctttaacaagtaaaataatgttttttgaacaaacgaacattttttgctgtaataaggtagtaatagcttattaagtacctaaaagatgttgaattaaaggttcttaacctgttttctgcctagatccaggtaagatgatatcctaaactctgatgggcatatttaaggcttaatgtcatcctctgatgtgcaaatataagtgtatcccttttctttctctcaagagagtatcggtgtgcaagaaaagtgaatcactactgaggcaacatttaattcatcttaagacaaaatctgttacgaataacaaattacttctgacattttacccagtgatcataccaaatgagtttctacaacgtggttggtaaatgctatgttaaataatttatgaagtgtgtgtaggtataggtgacagttcctgggcctgagggcttacattatagaaagatattaacataaaaactttaaagataatataatagaaagtaagttacttatataaagtgttttttatttatttttatggatttcattttttattaacctttttggagcatagttgctttacaacatatcttttgaagtttataatttaatctttaaaatttaagtatagttaaattacagtgctgggccagtctctgcagtacagcaaagtgactcagttacacacattctttttttcacattcttttccattatggtttatcataagataccgaatatagtttcctgtgctatccactaggagcttgttgtttgtccatcctatatataatagtttacatctgctaatcccacactcccagtcctttcctcccccttggcaaccaaaagtcagtcctctatgttggcgagtcgctttctgttttgtagatacagtcatttgtgccatgttttagagtccacatattagagata

SEQ ID NO: 51332 - DNA, 919 bp, Bovine  19866880722153
  misc_feature (1)..(1): n is a, c, g, or t
ntagggaagcagagttacaaatgaaaagagaaagggaaaaatacatccccaatagggggaaaaaaaatccccattgaaatcagaagaggagggcttctctggtggctcagtggtgaagaatccgcctgccgatgcaggagacatgggttcattccttggtctgggaaggatcccacatgtctcagagcaactaagcccttgcaccacaactgttgagcctgggaaaagcaactactgagcccgcgaactctagagcccgtgctcttgaacaagagcagctaccacaatgagaagcttgcacaccacaactagagtagaccctgatttctgcaactagagaaaagcctgatcagcaatgaagatccagtacaattaaaaaaaacgtcagaagaggaggctgttcatatgcaacatacccccaaatcagtacagggcttcccattctttgtagggttctcactcaactgtttcgttgttgtcattgttgtttttttaagaaaattaattctccaaaaggcaagatttacttaatgaaaactaataaattagaatcattcctaatgtaacaaccaaaaggcaatctcctattaaattaattagccaaaagctatatgcttgttcttgaaaacaaacagaaactgactattgctaacttcagcagaaaaggaatttgttggaaagatagaggataggttacagattggatgggagggctagactccaagcttggaaatttgagaggagccggaaaaagtcagggagcaggaaccaggccaaaatcccactgcaagaaaggtctatttgtgatatctcagtggacatgactgccatttttgccctaggctgctgctagatgcacctccacgtgtgaattcaaaactgcccctgtataatagcttcactagcctcaaattgaaag

SEQ ID NO: 51333 - DNA, 1222 bp, Bovine  19866880805609
  misc_feature (1)..(1): n is a, c, g, or t
ntgagtcgctcagtcgtgtccaactctttgcgaccccaagaatcgcagcacaccaggcctccctgtccatcaccaactcccggagttcactcacactcaagtccatcgagtcggtgatgccatccaaccatctcatcctctgtcgtccccttctcctcctgcccccaatccctcccagcatcagagtcttttccaatgagtcaactcttcgcatgaggtggccaaagtactggagtttcagctttcgcatcattccctccaaagaaatcccagggctgatctccttcagaatggactggttggatctccttgcagtccaagggactctcaagagtcttctccaacaccacagttcaaaagcatcaattctttcagcattagtccttccaaagaatatttaggactgatttcctttaggattgactggtttcatctccttgcagtccaagggactctcaagagtcttctccagcatcacagttcgaaggcatcaattcttcggcgctcagccttctttatggtccaactcttacattactactgtaaaaaccatagctttgactatatggactccctgttattaagttactacatctaagccagtatatctttcacctagactactgaaatagtcctaacagatctcactgggcttccccggtggctcagtggtaaagaaccagcttctaaagaaggagtctcggagagaagggttcgatcactgcatcatgaagatccccggagaaggaagggaatggctacccactccagtattcttgcctggtaaatatgagggacagaggagcctggcgtgctaatccatggggttgcaaaagagttgagcaaccaaacaacaacaggtctcactacttaccactcttgctaatcttacagtcaatttctctgattctttaaaatgcaaatttatccttgtccaaaagaccccaaaggaaaaaaatttcaaagtccttattaagtcctataaggccttaagttccctgatctttggctatgtctccagtctcattttctaactctttctcttactccactgccaccagactggctctctgcctctcagcatcccatgtatatgtcaggatcctgcatttgcttttcccttcatctggaacactctcctccaggtagtcacacagcttgtgtcttggctcaactgttacctcagagaggcataccctgccagccctacataaaaattata

SEQ ID NO: 51334 - DNA, 1854 bp, Bovine  19866880824852
  misc_feature (1)..(1): n is a, c, g, or t
ncagtccatgaggtccctgggagtcagacagtccctgagcgacttcactttcacttctcactttcatgcattggagaaggaaatggcaacccactccagtgttcttgcctggagaatcccagggacaggggagcctggtgggctgccgtccatggggtcgcacagagtcggacacgactggagcgacttagcagcagcagcagcaacatatattaagtgtgcaataaacagttgttgacaaataatgaaagcttgtcactaacattcttgaaaattaataccaatatgaaaataccattagtagctttcagctgaaaacataatttacctatcacactcaagttcctcaggccatcggatcccaaaagtgtccattaatttcttgcaatcagaatacactttctcacaaaatttccgacagggtggaaccacatgaatttgctcagtgcaggttggtacaaaagctttgcaaaggaaagtttcaacatttggtgaacattccagatttgcaagaggaagaaaaatctattaaaaaaaataataagaggttagaaaacattttaatacaacaaatgaattttttagcatatactttttcacttagactccaaaagaattttaaatctcactctcaatacaatcaaatctgaggagataagtgtttaattggacataagaacccttcatacacagtggaatattaatttatacaattatgcatttttaaagcagacattagggttaaatcaaaagtatgagttgattggtagatgaaataaattatacaaatattcaatttataagtatatgctccctggaggaggaaatggcaacccactccagtagtcgtgaatggaaaattgcaggcacagaggagcctggtgggtgatagtccatggggctgcagagagtcagacatgactgggcatgcatgcaagtatatcttaaaatatcctatcactatactgagcatactggagaataaaggaatgtttggggcggagggaacagcatgaaaaatggcatgaggatcataagaatatggtggattcagggaaagaagttcagtattactagaatacaaggtcaaatacttgaagtcaaggatgtagtagacagagatgagactgaagaagaggttccttgacctgatcacagagagcacagatgacatgctaaattgcttggattataaaagaaggagtgggatactaggagaattttaagcaagagatgtctacagtctgacagctgtgtttgaatgctagttccacatttactagttttataactctggcaggtaacttaaattcactgtgccttagtttcttaatctgtaaaacggcaataataatagtacttgtctcacaagattgttatgaatacaaggttaataaatgtaaagcgcttagaacagtgtcgagcatatagttacgtactcaatattcaacctagtggctcagatggtaaagcatctgcctgcaatgcagaagacctgggtttaattcctgggttgggaagatcccctggaaaagggaatggcaacctactccagtattcttgcctggagaattccacagacagaggaacctggtgggctacagtctgtgggatggcaaagaggtgggcacgactgagtgactaacacacacacacacaagattgttatgaatacaaagttaataaatgtaaggtgcttagaacagagtctggcataaggtactcaagaaatgttagttgttgtgactattaccctttagggagtgtggataggttctggaaaaacacggtagactgagcacacatgtttatctcctttcccccctccctgcttccttattaacaggacagatc

SEQ ID NO: 51335 - DNA, 1689 bp, Bovine  19866880903329
  misc_feature (1)..(1): n is a, c, g, or t
ncaagtaatgaagattggtatgaagccaagaatgtcccctccaccatccgtaaggcccaattaaagactgtctcttgtattaattcacagtgttgccctagacacaggcattggcttctctgtgattcagtgtcctggtttctaaactagaagtaatagttcttccttcacaaaatttttgacaggctgcgatgccatgatttcagtaaaatttatcttgtaaactgaaaaaaaaaatactatctctttgaaaatgttagtttttataaatgctgctttgacttgctttatactgtgtatatgtcttgcctccctcagtggattattagttccttgaaatcagggacattatatccctactcaagcactaagcacatacagagagcactgactaaaggataaaatagttgaatggtggggaatcagtgctatatatttggaaagtggaactaggtcattgaaagaagtggagtgggtaaaaaagaatatcacagctcttagaactgttctaggggagaggcacaacttaggtaacggatcctggggtaaaataactcaggcggtttcactccccaagacaggagcccacagaatcccatttctacttgcagattttctaatagctgtgtttgatgatcatatttaatcatcaaataaatttgtgcctctacaagtgctttatggatttatgcctccacaaatgctttcttagtcttgacaatctcaatttaagtttcttattccttttggatcttgtgaagtgtttctcctcacatagcatctgagaaaacatattctattcatttacttcataacggctcccttgaactctttgttgcttccctaaccattagaacctaagatgtgcttgcaaacaggacttattattgacaatcttcatcttttgcagatggaagtgatgacagaccccactgctttgtataaaaatattttgctatttctatacaaaatattttattaatggaaaccacacattatgttatattgaaatattatgacttgaaatttgagtatctaatgttgcttgtagatctgcagctggctggtattttaatttttaatttaaatatgactgatctgaaatattaagaaaaattctccttggatcattgcatttcaaaagaagaaagcaaatccagttgtttaatgatgatgcaatcttttatttataaattgagatcattagcactcacctaatgctttctttctactaagtatattcctaataatgctaaataaaataaaggctctttataatgttaaattcaccagagcaacatagcaaagtatggaggtaagaattattaataacatgttaaaggaaaagactcatttctaaaaacagtttcaatgagcgataattatgcaaataagcactgatttttaggtaatagttccaaagttgtgccgtcttccccactgaattttgaacgcctgcaggtatgtgaaatgccttattcttattattcaccaaattctctagcgtagtgccttctacaccgttgactgcttattgaatctaactaaaaatcagtaagctctgctaataaacccacagtagataggcagtgttttgacttaaaatattgacacttgaaagaaaaatatctaagcataagaatgtgattttcctcaattaaaatgttgagatttttgacttccctgaag

SEQ ID NO: 51336 - DNA, 1226 bp, Bovine  19866880954002
  misc_feature (1)..(1): n is a, c, g, or t
nttaagtttcccaagcagactctgagcagtctaagtaaatattttacactagatagtgttaactagaacaacttcaattttttttaatttaaattaaattagcattattgaaaaccgataacaataacaacaacaacaaaaaaaaacccatgcagcaaagcaaggaaagcataatactacttttttaaaaaacactatattaacattacctttccatatagggatttcctaatgaaaagtggcaaagaacttgtacccaagtattgcagtaaaagcaaatagaattataattacataatgtaaacaaaataaacccaacacattttacttggattgtgattttgttctatcaaagtcctatagttttcgaaagttgaactttatatataatatgcagaaaattcatattttagataaggtacaaatttatttgccagtctcctcaaggagtaattgcttggaaaatgcaagagaatgtagatgttaagtgatataatgaatgatttaaagagacagtaaccttagtgtaataaaaatgtcaacagtataaaatcagctatttgtgtcaatattacagatataagtggaatctacattaaatgccaacctgaaacttctgagttttagtattcagtccatataaaatcactaacaaagattgtctctttaaatttttattgtattttaatccccatgcagaattttacaagctggctcataaaatgatttggaagtcaataatatggtttggagcaacataccaaataaagttttcctactatgcattttccaaaaacatacaaataagggttaaaacacaattttagattctatcaggcagacaaggcctttacctgaaccctaggaacaaaaggcgttgttcttctactaaggctttggctctggtaagcaaaattaaagaaaaaagcaataaaacaaaaccaaaaaggacaacacgctggaactaaaagaccaaaagtaaaaaacacatacaactatcccttaaatccatttttccatgacaatatatatctaaattaagtacttcaacataatgaataattttcccaaaattataaaacagattaagaaccatataaaatctgagaagttttaaaccaaattttttaatgtatcaacataacaggaattaagactgaatgtaaaacaatataatcgggctcatatattcgaaagaagaatgtaacataaatacgagagtcaag

SEQ ID NO: 51337 - DNA, 1138 bp, Bovine  19866881024369
  misc_feature (1)..(1): n is a, c, g, or t
naaaaagctatgagagaatagggactccactttgtgaagttttatctttcacagtgcccactaagatgaccttccttgcaaagagtgataaaaatgtttacttaatgggaacagtaagtagcataataaatgtacagtaatgtctgtggtttaaggaaattattaaaataccatagaattcattagcaaatttttaataatttgattaagagtataatatttatgcttggaaagggataatgcaagataattttcatttatagatgtaaatggatagttccctaatatctttcacaaattctgctattctttccataaataataacaaaacactagaatgtgagatgagaaataagaaatatttcacataaatttaatgattatttgtagctttaaaaacttcactgcaatagtttaacatctggagcaacatagttttaagttattttattaatatctataacaaagatgtactaaatcattcattcattcattcattcattcaaacatgtactgagtagttactagatatcaactgttatcttaggtaccatagatataaaaatgaatgagatgggtacctaccatcaaggatttacaatccaatgggattcagagaaatttaaataagttatatacaaaatgttattaatacacaagtgacttaagaatctaaaaacaggcttatatttttctgccattaaaacaaaatagtccaattagagattgggttccctgtgtcatacagcaaattccccctgcctggctatatatgttaatgtataggtttctatgctactctcttaaatcatcccacctctcttttggactgtaaccaaaagtctgttctctctgtctgcatctctattgctgccctatagataggttcaacaccagactgtatccaaaagcctgttctctctgtctgcatctctatctctgccctatagataggttcatcaacaccatctttctagattccatatatatgcattaatatatgatatttgtctttctctttctgacttacttcactttgtataataggttctaggttagaccacctcattagaactgactcaaatgcattcctttttataggggagaattatcccactgtggatatgtaccatacctt

SEQ ID NO: 51338 - DNA, 1612 bp, Bovine  19866881028795
  misc_feature (1)..(1): n is a, c, g, or t
ntttactgatttgtgtgtgtgtgtcttttcccccctacgcgattataagctctatgagagcaaggatttctatctgcttggatcaccatatgccctcagtatttacaaaggtacctgacacacactaggagctcaattactattaattgaatgagtatttgtatttacctggcggctcagactgtaaagcgtctgtctacaatgcgggagacccaggttcgatccctgggttgggaagatcccctggagaaggaaatggctatccactccaggactattgcctagaaaatcccatggacagaggagcctggtaggctacagcccatggggtcgcaaagagtcagacatgactgagtgactttacttgtatttcccagtatatcaagcaaagaacttgtacatatgtagtaatcaggaaatacttatggtatgaaagaaccattttagattgcataatttacattttacaaacacttttgaaatcccctaaaacacacagccagcaatcaagctgtgacatggttaggtctggaatcaccattgttccctgacttcccacctgcctagatggggaaactgagaggtcaaggggcttgtctaaggttacaaaaaggaggacagtcttttgccttctcccactgagtgacttcactttcacttttccctttcatgctttggagaaggaaatggcaacccactccagtattcttgcctggagaatcccggggaaaggggagcctggtgggctgccgtctgtggggttgcacagagtcagacacaactgaagtgacttagcagcagcagcagcagcaaaatggaatcacggttgctctatgttctggaatagagatctgcaatttgcagaatgggatgttatttcacttacaaactgttgtgtttctgtatgtctgtgttgcttccaggtttatgttaagaggatgttacctttgaaagcctaacagtgctcattatcattcttagcaacaataggtaacacattaatttgggggggaaaagcattaaaaattcttaaaattaaagcaaaattggtaaacatcacagtccatttttttgtgttgatgctttttcaggcttttgattttttttaaaaaccttttttaccttctgttgactttttatctttttaataaagcagataaaggagaaagctaattgtaggcttttatggaacctgttgaaaattggggagcctttgttttatgatttggagaaaatttcagtattccctgtctattctttaggagcgttaataaattttaagtgagaccgaggagagggaaaatgactaccaaaaatttgagataatacccatctgcgatgcctaacctattgttttaattaacgacccttctctggccttcatcacgcggttgggggcggggaggggggagagaagcggaaacagctggagctactggaggtcgcagttgtcctgaacctgaggtgcgcgctccaagccgccagccctccgaggtgctgcagccgccgccgccgccgctgcctcccccctccggctgctgattggcggggacctcagcatcagcagcatctcccggagaggggagggcgccaagactgactcgcagccaca

SEQ ID NO: 51339 - DNA, 1316 bp, Bovine  19866881094104
  misc_feature (1)..(1): n is a, c, g, or t
nttgatgtacggcaaaaccatacaatattgtaaagtaaaaaaaaaaaaaattaattaaaaaaaaaagcatatgaacacaagctatgtttaaggaacagctaatagttctttagaatagtaatattaaacaaaatgggatacatattagaaggtaagaatggaaaaattgcttgggaccagattgtggagagctttaaatctctcagttaaaaatctagaatgttctcctttacaattatggtctttgaagatttttgaaaaagtcacaaatacaaacaaatttgtgttttttgcatataactctgatggtataattacaacagatttgaaaaggatccatttaagtccttgttaaggagtcccagccagaggctattggtatagtccaagctagacataattgttattccttcccgtgtttgattgttgcctccatctaaaatgatcttcatccaaacccaagtgatccttcactatcttctcacagaaaaaaatacgtgtagtgggcctcttccagattttcaacagaatgcaattatatctgccctatgcctaaatttgatgagcccctggagaaggaaatggcaacccactccagtattcttgcctggagaatcccgtggacggaggagcctggggggctacagtcaatggggtcgcaaagagtcggacaccactgagcgacttcactcactcacacactcatgcctaaatttgatgagtcaaggcaattatcaagcccttttagctttttcagtactattcagtctattacttagtctgattctcttaaaaggcaaataccttgaattactttattacttaccttttttttcttttatagttgatttacagtgttatgttagtttctgctgtgtagcaaagtgggtgagttatatatacacatatatacacttttttaaagattctgttcccatatagatcattacagagtattaaatagagtttcttgtattattcaataggctattaattatatattctatatagttgtgtttatatgtgtatcccagtttcccaatttatgcctcccacttccctccctgataggacctaattaatatttgaaagggagccctgcttcatatctccaatccattactttaaaaaaattttttcttcctgctaccgattcccaggatcattatcctactgctaaattctcatgtcttatttctgttacaacttttgggatgttacagattacagtatctgtaatatctatatcctgggtcctaataaaatacataaatattctgcaaaaaattatataatgagtcatgtaatatttaaag

SEQ ID NO: 51340 - DNA, 948 bp, Bovine  19866881095526
  misc_feature (1)..(1): n is a, c, g, or t
ntgtttaatatcacaagtttatgctcaatttatagcttttacatgtcaatcaagatgaagtgcttctgaaaatgtttcctaacataaatgattgtaaaggtaaactaataatgcttaaaggagatctcttcaaattagttaccaggcaaagaaggaagaaccacacactgtatacacatataaggttgtaacagactgaggcaaggcagtgtttggtaattgtgtctccatgatgcgtttctctctgggccttgctttcttggttccagacttaaaggaagatataaaaactacagataggaactctagcgatggatgggatctcccgcatggaagcaggcaagaaactgagatggtctagagcctggaagattatattagttttatgttgctaccgtaacaaattaccatcaatttagaggcttaaaacagcacaaatttattctcaaatgtgatctttcgttagggtccaggtacagtgtggctcagctggttacctgctttagagtctgacaagcccgaaatcaaggtgttcacaggactgtttctttctgctggctctgggcgtgaatgctctttcagcctcatttctttcatggttctttaattgttggcaaaatttcattccaagcagctgtgggaccaaagtccccatttctttgctggctgtcagatggggtcatgctcaactttggaggccgtctgcattcctcggttagcgaagagctgcttccactgtcaaagccaccagcagctggtccggttcgtatcaggttccgagtctctctgacctcgccttctgccccatcgctccttcacgtccctcctttgatataattctataaatgactcttctgcctttctcttcttttaagagctcacttaattccactgggttcatgtggggcaatccaggacaatctcctagttttaacatcagcacctagg

SEQ ID NO: 51341 - DNA, 1635 bp, Bovine  19866881162239
  misc_feature (1)..(1): n is a, c, g, or t
naatattttggtattgttatgaatatagtttggctctgcagattctctgaagaagtcttgggtacaccccctggggtcactagagcactgcaattttgaaaattgctagactataactgctagactaaaggtagtctcccaccttatcaccaacagagtgtttgtgtattgacaggattgtagaagataactcaaactctcagttaccttgcctattttttgtttgatttctgtttttgtccttaagtttgtctatgctctgattgtcatgataagcaaatgcaaaagatctttgctgagtttactttctaagaggaatggtggggggctaagtttaatatacagtgagttgggatagaggtttttcttgaaataattctgacatcttttgaccatagcctttatttgcagagttgctgcagccattgagaaatttggtttaaaactcaggaacagttttcaaaatgtattttttaatttgtaagaaatttatagaaattttaatctttatgcatattcatttttgtatgcatgctgtatttaataatggcactagtgtgtatttctcttaagtgtttttgttttaattttgtgcaatctcttttatccaaagaatgaattagtctcatgcatctcaagatagctcaacacatgataaattgctgttgtcctaagatttgaaatacagtttgctgttaggagcattaatatagaatcgtgtggatttcttctttagtaatctgtggctattctagttttttttttaaactaatgatgcaacaaaaatagataatgtagagaatcaaaattgttattacctataaccagctatttctgtttctgtgatatatacccaagagatgcttgtatatattatgtgacacagttggaagtcttgtggtatgatttggagctctttgtctggaaaggtctttcaaggttggtttgaaggttattggtggaacagttctcactgtgcttgcctaattacacagtgcttgaactggaaaattaaacttaagggtgacctcccctctctagtgatgcggccctcatccacttctttcttttattatgtttccacccgagcatttttgtttgtttgtctgtttcttagatgttagttcttaacttgttttttctcagtaatattttcaaattcttattgagttttctatttatctaatctttaaaactattttagtcttcctattctctgtgtgagagttggtttgtgtctatagagcaggattgacaaattttagttacatccatctggaaaagtgtaatattttttcatacaaccaagactgcaagggtgcagaatatatgaactcaagattgttgtgatgtaaaataactttttcactttagtggtatagatctgaaattcatttgtataaattatttgacatggttgaaagttttgagattgatttattatttttgtctggaaagtgctaagactcccatttcttctggttgactttgcttaataagaattagagtcatgtgaatagggagacttaggaaaatttgattttttttcattgtggtggttccccctctgcctaaatatattttgatccagtgcttaagtgcaccttagcgttttgttctctcaaaaacaaatat

SEQ ID NO: 51342 - DNA, 1348 bp, Bovine  19866881165338
  misc_feature (1)..(1): n is a, c, g, or t
ntggatgtgagagttgaacctaaagaaagctgagcgctgaagaattgatgctttgaactgtgatgttggagaagactcttcagagtcccttggactgcaaggagatccaaccagtccatcctaaaggagatcagtcctaaatattcattggaaggactgatgctgaagctgaagctccaatactttggccacctgatgagaagaactgactcattggcaaggaccctgatgctgggaaagattgaaggtaggaggagaaggggatgacagaagatgagatggttggatggcatcaccaactcgatggacatgagattgagcaagctctgggagttggtgatggacagggaggcctggcttgctgcagtctatggggtcacaaagagtcggacacaactgagcaactgaactgaactgaattgtctcccttgaaaccaattttcactgttctcacatattagttcaggttgtctgggagggagctgaaaagctgtgaacatgatgttgatctccttcaatcatcaaatgctcccagagccccatagcttttcagacctgtggaaataaattctctgggagcaacttccccactgactcttctctctgcaggagtgaccagccaagcgtgaggctcatggaggactccatctgtcacagggcattagcgctgtgagtacacatcgtgctcactgagcagaagatacaaaacaccctccgccgtctcggcacaagcctgagtctgacctttcctctcagagccagatctagtgtcagtcactcaacagcagcaggctttctgcccaagcacaggagcaacacagctggccctgaagatgctgaccctgcatgtcagctctgagggaagcaagaaaaagatgctgaacacaacagaatggacctcatgccctaggtcagagccccctgaatttgcccgggacatttcctgggacagcaggaccctgggacaggaggagcgtggctgtggtctaagctgggaggatacaggcccatgcagaccaataggcatctttctctgctaatgaggaccctgtgcccaacctgttggagcaggaaggtggaaaatgggacatcctccttatcttaattcagatcatcatggccatgatggctgctctcctaagaccactggggctggtcatattgttcagcagtatcgtttaagcttctctttaaaaaaaaaaaaaaaaaaaacacccagagcaggcccaggaaagtctgccctctgcccatggtcacatacgagaaagattgactttatacaaatatttgaccttcatttgctagagacacttccatgcaaacacgcacacacacgcgcacacatagc

SEQ ID NO: 51343 - DNA, 1016 bp, Bovine  19866881266133
  misc_feature (1)..(1): n is a, c, g, or t
ntatttactttttgaatacgtaaaataatatacaaatattttaaaatactacaatgcaataaatatttgtaagtcattattcaaatggcaaattaatactttatcctgtcaagaaaaatgtttgaagtaatattcattttagtttttaaaaatactggtttgcttacaaaactgtttcttctttttcctgagcactccctggactacatttcctaacctcccattttccaatatcttgtgactgagttgcagccaatgaaatacaagcagaagtgagctcactatttccagttcttgctcataaacactttcccacgtgctggctgaatacacagggctccaaggccctacaagagggtagagccacgagacgaaaagagcctccaactctgaacgaccacagggcaggccactgcccactgggaataactgatatttggactggtatctgctcaatgaataaacttcttttgtattaaattttcacagtttatattttaaagcagctggcattatgttagctaataaacagagcaattcgagggtctggttccgaattcaggtttctcatacttagttttaataatgtcatagttgaaaaagaaacttcataaagaaacaccgtagatcatataaagtataaatgtaaagttcatcattaataatagtggctataaatctgtattttattaattttcctgagaacttacaatttttagggacttgtcagatcttagagtgtcactgcatttgcttcatccgcacctaatgaaaagcttgacataaggttagaattttcaggtctacctttttcgtgtagtcgcagcattggtattatactcaattcagtttctttgcaagcctcttgcaatctctgtaagcctctcgcccactttctcagggataacggaactaacacctccaaaaaggcatatgacacctgacttacactcagaccaactgagaaaactagggtaaagccatatattaagtatggtaggcttaatttctttttc

SEQ ID NO: 51344 - DNA, 1299 bp, Bovine  19866881277464
  misc_feature (1)..(1): n is a, c, g, or t
nataagtatgagttcgaaagaatgtcccattgctcagctgcaaactagaaacccaatcaagtaaagaaaacatttttttctagggggataattgcatcaagtaaacattcagttatgaatttaatttgtagatggggaagcctaaagactgacttaataactattagatgatttgaagaaacaacttactcatgaaaattaaactgtgagatatttttaagtgatattttaaaaacctacatgtctacagaatgcctatattccagctagtacaatcctatatcaagacaacaatttaaagagcacaaatccccatgttaaaagactgtatttgtatgatactatgcgtttcaatgtactttcacattcagcatcatatctgatcctataaaccacagaaaggacattttatcaggtgttctctacaggtaagaaaataaagaactgattaataaggatcagaactaaatagttgcccaggttcacaaacaatttcacaggatttacctcatttgattttcacaacagcatattggggataaaagattattctccaaatagcatattgggatatgctaagatttgcttttctcagatgaactaacttgacataaggacctagagtcacaaggtcggcccactataaaggcaggccctgaaccaaggttccaaaacttgtggtctttatgtagcactgtcaccttcctaagattatgctattttcacaaacaaacagaagatggctgtttgtatttaggaagccaaaaatggtgtgttgtggaaaatggctgaagtttgcagaaaggtgtgaggtaggaggggttctctcccatattagattaattgaggctttggtaatctaaaagaaataaaatgagcaaaaggggaagcaaacaaaaataaggaagaatggctaccatgaaggaaagggaagattaggaaaagaaattagaacatatttgtttacaagttaagtaatagaggtcaccatatagttgcctactgaaataccctaaacagtcacaagtcctcagtctttcaaatccatcttgttcactgtcaccaagctattattctataaaacagatgtaattgagtgaaatatatgataaattccttgctattttaacgtatccctcagtctctcccattttattttttgtcaaagtgttattcatccaagttagcagggaatgctgtctttaggaaatatctaccaatgccattataaaatctattcctatctagatattatgcaaatttggaaattaagacatgggtattggtactctctttact

SEQ ID NO: 51345 - DNA, 722 bp, Bovine  19866881366250
  misc_feature (1)..(1): n is a, c, g, or t
natctcaggcacgttgtgcaacgccactattctacgtaccagaagaagtgcgatgaatattaattgttgaattcaattcagggcttccttggtccaaataaattatggcttcaataggaagaggtcctgaacactcagctccattgaacgtgaaataccaacgctgacagcatgcacttctgcattttaaccgaagtgagccgctgaacaaaactcttagggcactgtttgaacgcatctttgtgaatgtacattcctatcacaaacacagaaatagggtttaattagcattttcatttttaatttaaaagatgctttcaaactgtatcgtgaattttattcaactattcttttccccaaagtacatttaaaaagctcagcttttacagagggaaaccagttctctgcaagatggtaagagacactgatattagaaactctaagaaaattgaattatggctttcttagaattattcactccattgagggtatctctcagttttacaaaaacagccacctttcagaattttagactaaaccaatctatatatttacttttctttttcttccaaaattatttcctatattttggatgctttcagattacagcagtaaaccaaatggaatccgtgccatcatggaacttacattctagactgctgctgctgctaagttgcttcagtcgtgtccgactctgtgtgaccccatagacagcagcccac

SEQ ID NO: 51346 - DNA, 1175 bp, Bovine  19866881415412
  misc_feature (1)..(1): n is a, c, g, or t
ngcttcagtagttgtggttccctggctctagagaatgagctcagtagttgtggcacaggcttagttgctctgagacatgtgggatcttctagaatcaggaactgaacctgtgtctcctgcattggcaggcagattcttcaccaggaaagcccagattcttcttttttttaatcagaattcaaaactgcaaatgtttaacagtttataattcattaagaaaaaaaaaagactccaggcaggaaagagcctaacatgaaagcacatcctccccttactgcctccccggagtaaccagtttccatcactgaggccaacttttaagtgatttacaaaactgagtagaacggtagcttgcttaactctttttccttcttgattgggtctttctctttgtcggtttttgtcctgcttgagtttgggctggtctaaaatctggttgcatctgagcccagtgaacatcagagtatataccacctaaagaatgcaacacccatagtgtgctgtttgtctggcaccttgtcagggcacgaggtactgttgacttgaaggcaagcaccacctgctgagtcactggcacgacctcctgatacaacccgtggtttccatagtgacatctcagggaatagctcttaagagaacctgactggttagagacatgagcgatttcctttaatttgagctttttactaatctagaaatgggagcatgattttgaccataataacttttccagtcaaaatcttttggactaaaatgcacagagatgtttgaaaagtgaggttatcaggatagaacactgagagagaaaataagaatggtggtgatacgaaagtgttgcttaagaagatagagaaatgttagtaaatgcaaaggatttacagtagcccatcaggaaagaaaggttgcatcaaatgccttgttattaattcttaccacttagtcactggcaggacaattttctctgatagagccagaggactcagattgttctcgaatgtattttttttttaaataatctccactcattatcttattttcagaaaaaagaaagggaaaagaacaatttcccttccttgccacccacttaaaaatgtgaacatagcacagtctttctgtcttttcctttctttcctcctccctcctttctttctctcttccacctcccccatttcctc

SEQ ID NO: 51347 - DNA, 892 bp, Bovine  19866881663945
  misc_feature (1)..(1): n is a, c, g, or t
ncaaagagttgcaactgagcaactgaattgaactgataatagttgaaatttgcaagcccttattttatacttgcatggtgctgtgtgttctacatacgtactctcatttaatccttatgacaagccaaagcattggatagttttactatttctattttgcagcagtgggaactgagactcagaatataaatgatattgtcaaggatgaacactaagtggcagaactgggaaccagccaatagaatgcaattctaaaacacagaaacaaacaaaaaccccaaaactagtttgttgagtagaagctagtcatttacactcttgggagtaagtcactatttcctttcatagttatcacagtgaggaaggaagatactggtcatgatcagacagtgtcctagagcttttaactgatgtattgaaagattaagaggatataaggatggttccctggcaggtgtggtaatggccaaagaagcatgcaaaaaccaagcaaaaacaaatcatcctaatatcccaacaagaaaaaagggaaaggcaggtaaaacagaaatataaaaaccaaatatataagtgaaaagtctaattacagagagatgccactgatgagctctgatgagaaaaggaagaggcaggcgtccatcagtgaggcaaggggcatctgggcgagtatctgtgggaagggaggcaggggctggaatatagtgaaccgggaaaaatgctgatggtaacaaaaatggctcttttagtgccgggagccagggtgaggaactccgcccgtggcaaaggtcatgaggaaggaggctcagcatacgcaaaggcgggattgagcctcaggagtccccctgaaattctcgagcatctacccccaaaaccagagtctgcctactttctg

SEQ ID NO: 51348 - DNA, 4085 bp, Bovine  19866880373503
  misc_feature (1)..(1): n is a, c, g, or t
natgaaaatctctccctcatccctatgacttcctttatcaactaggatgctgaaggagcacatatatagttatgtcacttaagtctcgtgatttaaaacagtcctcctcctttctcttttcactgactttttctgacaatgacctgttggaaagatgcaggatggctgcctaaggacttgtagaatctttctttttttctgggtttgtccgattgtttccatgtggtgatatttacctcagtcttcagtactctttattttctgcaaagtagaatttaaatctaaaggcatgattagattcagaataaacatttttggtaagagcacttaatagcaaagttgtatatttcatatcatatcaaatcaagacccacataatatagttatcccactattagtgaagctaagattaagatggtgactaaattcctcatttagagttatatttttccctttgtggtgggcaaataatcccggggtagtgagactttagcaccatacaaatattttagttctttatcagtcgttcatctaataatgttaatatttgttgatggtcctgaatcaattatatcacagggagtttcaaaatggtgataaaatgggattaaaaatattatggtaaaatacacataatgaaaatatactatcttaaccatttttaagtgtatatttcagtagtgttaataaattgacactgttgcacaactaatctccagaactgttttcattttgcaaaactggaactctataccctaagagttttctcatgctttcagctttgtaagcttgcaattttctgtgaaaaatagccttttctcatcaaggtaggctatctgattaccctgaaatagtttttaatttaaaatataggagtaaacaattaaaaacttaatttttccttttatcaaattttaaaacaagccattaatatataatagtaatctcaaggttttttggttggtttgtggatttttatatattcaatgtatttccatcaaacacagtcattctttttgatgttcaaattgtcccaagcttggccagtgggagtcccttcaaagtggctcttaaatctttttggcatgaccctatcaggctttgaaagtaagggatatgtttgtttaaaggcactaaagttttctttggagaacagggtcaaacctgtattagccgaagcacaaatagcatccttattatagaaaagtgccatagagcagagtaaaataccaaggtcctaattcatcaacataaggagaaataaggtgaagttagaagaccttttaaggcctgttctcattttatattgtgtgatcttttaccatatataaggttgttttaccattttgttattattggaacaaaatatttcgagagtttgaatgttattaggtttttccttaaataacatctttattactttcttcctcttctgatagtcagcttcctgggccatggattaaaggactgtaaattggaaatgtgagggtggaaatgtgagggtttcacacgcatgtttcacagttataaagtccatcctcagaggaagcctgaaggggtttgcatactaacctttgccttttattcaaataaaatgtggctaaacattccacatagagaaggtcaaccttataatgctcgatcaataagctgctgtcttgtttcctgcagacggctttatttcctctcatttgagtaaacagaagaggttttatcaagagtttaaatgtataactgaatttgtgaggaccaacatcataatacttgtatcatgttttcaaacctctggaagataccatctgacattaaaaaaaaaaacttttgggttttgaaaattgcctttttccagtgtaatgtggataatggtcatcccataagcagtcattcttttccattcatttttctttttcagaataagtgtggctcagttttatccttatgcccctagtagtcactatgacgacttttggttaggaattggatatgaattaccagttttttttgaatactttgaacacatactgaatgttgggcagaagtacaaataatacagctgcataccatgctaataaaaacaaaatgtttgccttgaaaaacagtttcttctcctagaaagaagtattatggaattctgtatttattcatcaatgagtttagtttttacgtaaataaaagactatactgtattttagtatagatcattttttatatgtatgagaagatcattaactttttcaaagaaagctaaccctttaaaaatgtgttaagtggctttaattgcagaaactatgaatattgttatatctagtaaattgagttcattctgtgaattttccagatggtgagagcaactggaagaatttgatacatttcttctcattcgtaatattaatgaattgtgaattagtacagttgtaatctgtactggattgtctgtataagaccatagagacttggcatgagaaatacccagtgtatgtatttggatttagttattttctccaccactgtaactggatttgagatatcttatacggagtatgtataattaaattgctgaagtaaaaaacaaattgaagtctggtaaattagaaataaaaagaaaatgtcaaaatgaaaatatgtatggctgagtccctttgctgttcacctgaaactggcacaacattgttaattggctgtactccaaaataaaaagtgtgtgtgtgtttaaatctgcctccacacacctcctatccctgtaggtatccctgatggctcagtggtaaggaatctgccagctaatgcaggagatgtgggttccatccctgggtgggaaagatcccttggggaaagaaacgtcaacccactccagtgttcttgcttaggagatcccatggacagaggatcttgggaggccgcagtccacggggtcacgaaagagtctgacaggactcggtgactaaacagcaacaacaggcatgcatttttattgatgttttgtttttgtgtatatttgtatatgttttgtttttacacaagtatttttaaagaatataatgataaagtcattactcttctctgaaatgtctactggaaattattgaagattcttttccatgaatattatctttaaatgttttggcattttaaagtataaagatgaataacatttttgaaaaaaggaagtcatgatacttaatagctgaacctgatattttttaagtttttaaaaaatgacaagcatttatattcttgagagacagttcttttaaaccctggtccctgtgaaagtgagtcatttcttccaaggtacagctcatatgtcagattttctgtgaagtcttttctaatttccacaagtacagttaataatatctctttttcctgtctctcccaagaaatctgttggcaattaccaggttggatttcaaaatcctaaaaaggtcagtttttcttatataaatttttcctgggcaaccagccctgtattgcttgtgtatttccagtgagcgacatagaggaaagcattatatagatgtttgtgggttgaatgaagaccagtaagtgaaattaaagttttttttctttgaaattaaagttttaatagagtttatactattaaatatttttcttgtttggaagaagtgaatatttgactgagtttgataatctttctaaggtagagaaaactctgaagtgccaatagtaatgtgaattgacttagagagaatttgaaacagattcttatatggagaagatgaagatggtcagctggtaacaactgctcttctatccagcactgacttacccatcctttcctctttcctgcccctcagtggaaaggatagcctccttttattctgtggataaggaagctccaagttgcaccctagaatcctatccccatcacttttggctgtctcagagatacccttctatgaattaactgctaacctgttctgtgtctgttttcccttcttctagacagtggttctcaaccttggctgtacattaatgtcacctagggacctgtaggaaaaaaaacccctgggctccaacagagatcaactgtattagaatcttgaatcctagaatcatagagt

SEQ ID NO: 51349 - DNA, 1393 bp, Bovine  19866880451658
  misc_feature (1)..(1): n is a, c, g, or t
ncagctcatctttgatcctattgtcaaaatagagatacaattgcagtttctattcatgaagatctaggaagtaaaagtaatttcgctctataccattagaactgccacattctgaccctctcccctgtggagattcagtgacatgtgaatgatggttttccatttttcatgccctagttgaaatcgggtccaggggggaggtgtcactatcacagcaccactcacccagcagtgtgagcatagccctggaaaaggattgtgagtctacagaatggagacagacctgccagggcacatgagctcaggtgaaggtggcaggtgtgtggctgttcaattcatattttggcaggtgcaagatggcttcttttaacatgtaaaagcaaaacaaagctgaaaatagtatatgatctgtagcaatggcaattgtataatgaggtttacgttagtctctagtttccatggatttgagaaaatgtctctacattttgctcattttccaggactgtccagccctttgtgttttctgacaacctactgcctatgaagtgggctgctaacctgcttctacaatgagctgagggcaagggttagtgtgggatggactgggttttttttttttttttttctgtactaatttatccttaagataccagaagtttgatgcatgactatttctgtcttataaaaatgatgacaacataattcaccaagcttttaatcctgtgctaggcattaggctatgtcctttgaatatattatcttatttcattaatcttattaggaggtgacaaggggagaagaaatgtacatcctccaaaaggggatctaatatatttgggggcagaatttttcgtttggtaaaagtaattggtgatattgagtggggcatatacagtcctgagatgcaatgaagacaatctccatcaatcctataccttcagagactcgtgtactgcatttattttcccgtttcctgcgtacttgttatctcatttttctttgatgattagaagaggtatgctctgatggtctcctatagcaagcccctgagatgtacctgagctacagaggcaggattatttatctgaaagtctatggactaggcacctgacaagtttgctctaattcaaaaggaatcaaggaaactggaccgggagctggctcacacatccagtagtgtgttaggcacagtgccaaatctacagtaaagggaaatgcattcctgaaatcccagcaagaaaaatattgtcacacccggtggtgatgtgctgtggaagagtaagtagaagttgggagaccaacctggaaaactcaatcgccaagtataaattcttttagagaagatggtaccaaaatctaaaacttcagatggttttggaaaatagcatatttt

SEQ ID NO: 51350 - DNA, 3754 bp, Bovine  19866880517134
  misc_feature (1)..(1): n is a, c, g, or t
ntgacgcatgtttataaataaaacttcttcccacaagtaagactatgtccttacattaggaattccatgagtgactccactccatgtatcaacattgcttcagttaagttcagttcagtcgctcagtcgtgtccactctttgcgaccccatgaatcgcagcacgccaggcctccctgtcccatcaccaactcccggagttcactcagactcacatccatcaagtcagtgatgccatccagccatctcatcctgtcacccctttcttaagatcccaataaaccccattctaaaaggactactacaacaatactctgtcagaagccacaaagaaataacctaaaatcacagagtattattttcaaatgatattcccaatctgataagttacaatcatattttaatgtacatcctttgatacttattaaattgaataattttccatacatttatttactaactgagctttatcttttacatcctttgccaggcaccaatcattttttcttatttgggataaatatttgcctcaagtcctttaataatacaatttggaataaacattacagacttctccaataaattacagagaaatacaagacacaatttacagttttttaaaaactgacaatttacacttttttaaaaaccaactcaagacaatcactcactagaccaaatactaagattcaatctttatttgacatacatttttctgttaaaattttttttcaagtaaatgaggttttaatcaatcctttaaaatacttaagatctgaagtatttttaacatacaacttaacagtattaactaatgagtacataataacatggtgatttccagtatctctaaaatctacaataattacaaaactggacttagaattcagtgaggtaaaataaggattatgatcatttcagtgaggagaaccgaatgccccatttaggaaagacctatgactgaaagaaagaaaactcactgaacgactctgttttgaaccttgatttaagttaaggttaacttaaccttatcatctaacttaaccttagttcatagttaatgattacgatcatcttgagagttgttactgttgtttagtcactaaatcgtgtccgtctctttggcaaccccagactgtagcccaccagactcctctgtccatgggattttccaggcaagattactaaagtgggttgccatttacttctccaagggatcttcctgacccagggattgaattcacatctcctgcattggcaggcggattctttactatggagccaaacaattattaattaacaacccaaactcaaaaacataacaatacttaaggtaaaataatttattaaaaaaatatatatatatcactaaatttactgttcactgcttctaaacacatatttatttaataaagtacttactttcactatcatctttaatatctatggtagcaaatggcaaatccaccagaaaatccatggtgttggcttcaaattcttctgacatttcttgtttgcttgatacactttcacattcattggaattcacccctataacataacaaaaagaaaactgtattatttttatttattttttaattcatatcctaagctaaagcacggagaaggaaatggcaacccactccagtgttcttgcctggagaatcccatggacagagaaagcctggtaggctgcagtccgtggggtcacacagagctggacacgactgaagcgacttggcggcagcggcggcaagctaaagcaactcaactaactgaactcaatataaattaacatctgttaagaaatggtaaaattagtattcaaacatactgtaaactacttatttagttataccatatgctaaatttctataaacccatttttatgttaaacaactttaataatttcctgaagcacagtacttaactcaggattaaagttgagttaatcaacaaacctcaagatcctttataagacacattttcttaacttcaaaactacatttttcacataacttctgaacacaagccaacaagattttggcaatctctaccatgtttatttgttaacaacatcaattatgtgttctcatctgtacaagctctgacttttatttttccttatggaaagattgaaaattttttttcattccatattaacatgggaaattcaaacattaaaattcacacattaaaaatacatagctctaaatatgcttttctagaaattcagtggttaaaagcaaaaagatcttatagtttccctgatagctcttccaaagacatgtcctaatactagagtgacatttcacacctggtccttgtttttttgttttcttttttgttttgttttgttttcttattatgagtagaacaattatatgcctcaggaggaggttaggggaaaagggtgtctgtttaaactgataaagtcaattgctaaacttatcagctggtggtctccccataccattacccttcatgcttttagacacaaacgttgtttgaaccagaattgaacaaaatcctgggatacttacataatttttattctatatattgactaacaattaatttaccattgaagatattaaagaagtcatttatttcattgttataatcctctattttcatatatcagacctttaaaaccacactccattaagaatgtggcttacaatacacaagataataaatattcatcataagttatagttaacataagccaaaaaaactaaatttttattgtaatttcagtaatctttaatattatttacagacacacaccctacacacaggcacacacacatacctattttgtagataaaagcaaaaaatgacagctaaaacctttttattgctgatttttttatatcaactagtcatgttcaacaccaaaatcaaaaaagttaatagtacactcttaataatgctatttatttatattacagttcaaaccttattaagcttgagtgcctggcatgcaggtgttcaacaagtgttagtttaccatgaatctattcacagctattgaaatatgtgagaacaagtaaatgtttcctttctatttttacacttgtgttgaaaaatacacagcttatatttaaacaaaagttttaataaatcaatacctacctatatttggggcaaatgcacctacactgaaaagatcatcactaatcacttagcttacacaacactataaataaaatgtttaaaggtttttacattttttaaaaaataaataaaattcttgaatgcaatggtatgtcaaaatcaacaagagtctagaacttgaaacacaaaattttttctattaaattacctaatagctgaaaacctttttgtagatattaattattaacaggctttcctggtggctcagacttggtaaagaatctgcccatattgtgggagacctaggttcgatccctaggttgggacgattccctagagaaggaaatggcaaccgactccagtattcttgcctgggaaatcccatacacagaggggcctggtggcctacagtccatggtgttgcatgaattattaactcagcaataagagaataccacttgcaagtaactcttggaactccatgttctatggtcatcctatagaacaatgtctctcaacagggctcaaatctgaaacacttcctccagttctctaagctccagtgttttggcaaaggttggcagatagaattaaacacatccacatccagccccatcacttcaggcaaatagaagg

SEQ ID NO: 51351 - DNA, 1815 bp, Bovine  19866880554308
  misc_feature (1)..(1): n is a, c, g, or t
ncttgctcaaactcatgtccattgagtcagtgatgccatcaacaagcatagcctaccctcaagtatttatttagtgtttaatctgtggattattcacattctttcaacttttaaaatatatctgtgtattttattatttactttcgctaacataatgttatggttatgtcctctttggactacaggttaaaggggaggtaacaatgaatactgaccattctgcaacagagtagtagcactgccatgggttcatagtagaagcaaagagagaacatctgagaaaatggggctatctcaaaatatgtattttatgtttgttatttttgttctttcactcttgttgccacagtctaccaagagttgactcttggtcagaatagaagttattgtcaattcaggtatgtcattgaattatttatatatgggaaaatttgggaaattctggaactgattttaacatattctttgtagactcttctcaatatttctaattttctagacttcagactttattcatcaagatgcctcagagtcttgcacagtgttggtacttactagactcccagcggacactaatagaattaatttaaatttcttttcatgagtgaaaaataaaggttatatttcagtgtcctacacttaaaggtcagttcccaaaagaccctatgataagaaagggagaacatacatgagtgattataaaatgttaacttttaatttaactttaaattaaattttaagtttcaatatttactggaaaataaagcatgaactggcctgtaaaccagttgctagaagtgaagaaggaattagtccagtggaattcttggtcctttaatcctaggatgaataaggaaagtaatttcaaaggctaggttatctttccaaaaacaaagaacatagaaaagctattttagaaatgcaaaagcaattcagtacctgcagagctggtcaatggcctttttgaaaattaactttttattatctgtctgccatatacttgctttttaattttaatgcccaagctctatttgaaataaagcagctatttccatttgatcaatggagcagttccctggtgtacataataattcaatttcatgaatttatatgtcaaaatgatcatttgcagttagtgtttctagagaaccataggttataatccatttaccaaggtcttgtgattggtatggcacatcttcctcattctcaagtttcccaggaattccagcgttacctcaacatgcaaattatcttcatttcatagatataaacctgaaatagaaacttgctcttaatgagattttatacctgtgagctaacagcgaataccagaagcatgggaaaatcgaaatttaagatgcaattatccctcttccaaggttatgtgagaaaaaattcagatgttactcattttattaaaaaggtaaagaaattgactttaaaaaaaatctcaagtattgcatgggcttcccaggtggcgctagtggtaaagaacccacctgccaatgcaggtaatgtaaagagacatgggtttgatccctgggttgggaagatcctctggaggagggcatggaaaaccactccagtttttttgcctggagaattccctggagcctggtgggctacacgtccatagttttgcaaacagttggacactactaaagtgacttagcatgcatacatgcaaatattttatattgcattcttgggatgctgttgatggccttgggaaccaattatgagaactgcattatccttaacaccctgaaagaatatcaaagagaaggtaatgctctctggaagaaacagctt

SEQ ID NO: 51352 - DNA, 1033 bp, Bovine  19866880585452
  misc_feature (1)..(1): n is a, c, g, or t
naataacttgattgcctcccccgcccccatgttttattctgttgtctaaaagtcagtaacagagctattgttaggtttggttacaaactgcttgtttttaaccttatacctggaagctggggttagattttttttttttcctcaagtgtagacaggggaagtggacggtctagacagaggagagtcagcattaatgaggacgcggaagcatttcttgttgaggaggctggtgtggctggagcttgggatgtgtgagagagcatgagaagcagaagatgagcctcgtatttggactggagtcagtcagtgcggaacctgggagattatactgagcagtttggtctccatactccctgcagagccactggaagcctttcagaaattttcattgctattatttatttgaaggaagaggcataattgcaaatatctgtattgcagaaatactacatgccaggttttatggggaattaagcagatttccctgggtatctgtgctggtgaattttaccctcagttaaaggcatctacccaaggaaacctccttttgtatttcttttatttatggctttaggtgaaattgccaactccagtaacacttttgtatttctgtgcaataaaatctggtgctgaggtttttgggtggtatttattgtactggtgactaggatcaaatatttacttaacctaattttaatagtaaatctcaccgttaccagttaagtacattgtttttactacggagtaataacctgaagcttggcagtactgatttaagtaggtgtctttggtatttgttgctctttattatgaaataaatttgtgcccagtcttactgtgaaccaagctgggcattcaaagatgaggacgaaggctgagctgcagataacttcacagtgaggaagactgatgccaggaactcaaaaacggtcatttcagcagtagaagtacctatagaaaaaagaacaacactatgaacctggatgaagagtgaggaaagggtcaggagtgacaactatactgaatttattta

SEQ ID NO: 51353 - DNA, 1718 bp, Bovine  19866880617576
  misc_feature (1)..(1): n is a, c, g, or t
ncctttgaagtattaactagtatttttcctttcgttaatgaagaactgtcacagactcctgatcaccaacacagtctcaacgctggctcttccccctaccagagaaagaagcggacgtgactgtcagagactgatcagtggccaaagcacagtggatttccgctggtcagagagtaacagtcaatggcttagcaataaagtaggtaaataaaccagatccacagcgagatagaaagaatattaagatgcttggtccaaactatattgaaaagtggcagctattgtccaagaagacagctatgagactcagcttaatcagcagttcttcagagtcccaagattgtgctggatgggtccatggactggatacttaaaaacttttgtaacaaacttttatagaaccatgtctactctgaagggcattattttcaaactaaaattcttcaacatcattattatgtaatttcgtggaagctggcattattctgactttggaggtgaagaaactctggtagagataaaatgaatagcaaaagatgagtgcctgtggattcccactgtgagttcccacttcctcttcttgacattcagcaaggcataaatgtcaccttttcaggcattatttctggctgttggtttgcttctcccccttttccagttgcttttgcaaatcacatcatcgttgtgagaacccacaagaagagcctctcttcactggatatggatcatcatgaaggtagctttcagcatgacaccacttggaaatactggccatttggtgagaaaagtaaagaacacaatgttcatggaactcatatggagaataactcaagaccttgtctcgaaaaccaaacatcagggagcatttctaaatatgcaaagaagtcaacatttccctagcagtaaccaccaagctgagcccctgtgctgtacagcagcttctcactagctagctattttgcacatggtagtgtataaatgtcaatgctactctctgtgatgatctagagaggtggaatgggggtgggatggggtgggaggcagggcaaaaaataaagagagagagaaatttcactagcaggattctttcagtgagagccccaaagagccaatctaggtaattgagaagaaacattcaattcaaagtagtagttaaaattactaccttgctcatacagtttcctagttaatgttagcaaaagacacttaacatgtcctaagtctggttatataccgatgtttgcatatgaatccaacaggctattagactgattataaaacaatgaatttgttcacctgaaagaaatgcatttatgtagtgacacagaaatcatgtggctgacgcaaagcgagaatgctattctctgcttctctcccctcgcctccctcactctccaaatcctcatatacatccaatgacttatcagtctccacttgcacttactgcataatatgaaattcactgttcaactggagacactcatttctgggttttattgtatttgattacaaggaaaatatctgctgggacttccagactgaggtaatttagcataagtgtgcatgccatctggaaggagtaacaatattccttcaattctgggagggatctcgttatagcctctggcggaaatcagcttttgtaaaaatgctttctttgacagaaggtgtagaagtttcagccaccaaggtttgctccaacttctcttggcaacagg

SEQ ID NO: 51354 - DNA, 1263 bp, Bovine  19866880701898
  misc_feature (1)..(1): n is a, c, g, or t
nttggttgagatgtctgcatttaaattgtggagtttaaataagtccttctgcaatatggtgattctcatctaataatcccatgtttctatcttacatggagttaccttttcaagcactcaaaaattatttttaaaaattcatgttgatacacaagggaaaagacgtatctcatggctgcggacagaaatcaaggaaaagagggaaaaagcaagagtagatccaaggatgcaaggtgaacaccttgtctgcctcctgggtcttttcttcaactgtccgtgctgccaccatctgatgcttctccttcatggataaaatatccttgaaaagatggtctcctttgctctattgttttaaacaatagacataatcaacaaataagacaaacacgttacacctacagcaacacaaacataaaatggcggtgtgggtcagcgaaacaaaccagacgaagcggcacataaaagggggacccagtctcagcacatcgtcagtttccccagaacacacaacactctagggttgattctggaatatggacattaatatcttcagaaaagctgaaaacaagaacgtaaaagtagtacaacttcagaagatgccgctatggtgttttaaatcttaatattgtcaaaagcttttgcggtttacccggtttttcttttgctcgtctgctttaaagagatttgtcccttccactgtcacacagaaatttaaagcaaataacagctttgctttttaagaaaagggtgaataaaaaagcatgagaatagcgaattcaaatgcctacaatttggcaatattcaaagtcagactagatgatgaatttaaggagaagagaggggtgaaaggaaaaggagagaaactgttgggtaacatctgaacatacttttaaaactgtgtattaaacataggatgatcacgatttcctcaagcaaaacagatgagctgatgaagttcttggttgacaaaaggagagactttggagcatcagaaaagaacagatgcagacgcaaatgaagaaacattttaagaatgtattttaagggcaatgcttatgttggtggcggagagaaatgaaccatggagagaaaaaggatgagtttggaaagacgggtgaaaatatttttaaaacattaatctggattttattactaagaagtttcaatataagttatataattaacattttgccagttttcaacagagctcagcagtcttcaaagctaaatttaactctttatcctcacagtaataaccttaaa

SEQ ID NO: 51355 - DNA, 1232 bp, Bovine  19866880737838
  misc_feature (1)..(1): n is a, c, g, or t
ncatttttccatgccatgcaaagatttttagattttcctgagtttttgcagatggcaatagaagctcctagatgagctatccgtactatgcttgtgcatgcatatggaatatttcgtttactcagatgcatgacctatttctcaaggagtagtgtaattgaaagctataatctacaggtggccctatgatttttgaaatgtaagaaagcacttaaagttcagttaaaactttttttaatactaccttttattcctacaaataccatttatcaggaccaatctaaaaaaaaaccccacaagcaacatttgtcagggcctatttcaatgaaaattgacctggtagtttttctcacatcttcttttaaggaccatttgatatgtgggtggctgggtcccacatttatgcttggcaaggacgtgaaaccaagatgacgttcatttattttagagaaagaccaaatagaagcagcttctggcagctgttatgtttattctataaggattaaaaaccattgctggaatttcctgaaaaaagtcaactgttttttcccccaccaccattccctcctctttttatatgatcctggaccggatttcccatgaggcccaatatgctctgagtccacctttctctaattttactttcttcattatattcacagaatgcaactctagtagtagcccaaatctgaaaggtgaatttgcaggaacaaaatgccttttaaatgtaactatgagaaagaaggtttattagccatgttgagttccatggcctcctcttcatgatttcttaaacaactctgaacaaagaaatcagaaccctttaaggcgtgaatcataaaaaaattacacattggctttaattttcaaatttggacaaactcatatttgtaggtggtgatatggcttttgagacttggcatttttcttgctttattatgtttttttaatcgtaagtttgctttgtcttatttttggtttcattttttatttttatcctattgggtttttttttttttttttcttccttttggattttcccccttttattacgttacatactgctaggacctggataaggcccaggaggaaatactgaaacaccaggctagcattagtgaactcaagcgcaattttatggaatccacacctgaaccacgccctaatgaatgggaaaaacgacgtatcacacctctgtccctacagacacaaggggtatggactagctattt

SEQ ID NO: 51356 - DNA, 914 bp, Bovine  19866880763177
  misc_feature (1)..(1): n is a, c, g, or t
ncttactttgagtcttacacagctaaattagctgaagaagatgagaagcatttttactatatttagttgctgttaagcattatcttagggcttccctggtggcacagtggtaaagaactcacttgacagtccaggagaggtggattctgtctctaggttggcaagatcagctggagtagcaaatggcaacccactccagtattcttgcctgggaaatcccatgcacagaggagcctggtgggctcctgttcgtggggtcacagagtcagacacaactcagcgactaaacaacaaacattatcttaactggcaagcaaattttaagactagaaataatttaccccataattctatccttttaataaaatttaattcaataaaaaatttacgtgtttcatttccatttccagtctttttacctagacacacttataggtaatactgtaataatagttttatagatacaatctcataacttttaacattgggggttttttgaggggaggagaaagttggttccgtttctggtcatctgagatgaaatagactagactgtctggatggaacacaactctggcttttaaattttcacaacggaatgacaactctgcctcttgttcaccttttctctaagcatgtggttctcacttttatcagcaacatagacttcatgcagaacaagagcttgtcagagaaactgacagcatctaaaagctcttatatctaatatagccaacaggacagagtcgaataggcaagcacaccgcctgttttttcccccaagctctacctttgtattgttagatcaatagaaagcgcaatccagaatcacactctctcagctcttcatttcacactatattctttataaagagttaatattggaagatttcaggcaagaagtgcgtttgtcc

SEQ ID NO: 51357 - DNA, 2445 bp, Bovine  19866880795636
  misc_feature (1)..(1): n is a, c, g, or t
nttttataaacacataataattttgtgtcagaatttcttagtgcatatcattgccagacctctagagtaagaaaaaaatggtttatatgaaatttattttggaagctgctgcatattttgttagccaatataaaatacaaggtagtattcacatgccaaagtgaatatatttcacttagattagttcataattttttccctgtcaaataataatgagcatggtacgctgtacaggacaattatttatagcctatattgaatatgatccagtttctaaatgttctccatattttttgctcatatatattttatttgaccctcttagtgccctgaaacagtaagaaactataatagtgaactcataaaatgtaagagcctttgaaaggtatttccctaactcttcagctaactggctggaaagtcaatatgccgtctcaagatattaacattataactgataacagaaggtaacacattgggagttcggaaatgctttaaggaaaaatatatacttaacgaacacagaaaatacctaagtgcagaaaaaagtgattttgtttttagaataataatttctgaacatcttctagttattgatgactcattagttgacaacctcaaattaatgattaattcgcaaaccctgagggtgactgattcaaatgagctgtataacaaacactattaatgtgtactaaaatgtatttaaaatcaactaagaatatttcctcactacttcagtgattaaaaattataagctttcttttattccaaaataaagtataaatggaatgccttttgctgggcatgggtttttaataagcagaaaaaacatatggcattttctcctctcccccaagtcccatacttcttcctgccctcctccttatcttcctgtctttcctctagtacatgtggtttattgaatatggatgcaaatgactcattttagttccatagatcttgttcaaagataaaataatggctcagaagagcttaatggcataattttcatggcagagttacaaagttaataaatcaaacacaagaagtcaaactataaaataggtattgaaaattctcattccaaacactgtgctttctctaatgttagtctctagtatatcaccacacccccaacaacccctccacacacttctaagatgtaatgaaaatttcaaactatagattctggctgaaattttaaccggttctaataaacccaaaatctattcatcagattttgaatgtatgtttttaaaaaaaatctttaattggaggataatcactttagttttgtgttggtttctgtcatacaaaaatgtgaatcaaccataagtatatatatatattccctccctcttgagcctcttttgcacccaccatcccacccctttaggtcattacaaagcaccaggctgagctccctgtgttatacagcaacttctgctagctgtctattttacacctggtaatgtgtatatttcaaagctaccctcttaatccatcccactctctccttctccagctgtgtctacaagtcctttctctacatctgcatctctattcgtgccctgcacacaggttatcagtaccatttttctagattccatatatgtgcattaatacatgatatttgctttttctctttctgacttactttcctctgtaagacagactctaggtttgcctctctctctctctctctctgtgttagttactcaattgtgtctgactctttgtaaccccatggactgtagctccccaggctcctctgtccatggaattctctaggcaagactactaaaatgggttgccattccattctccaggggaccttccccatcccagggattgaacctgggtctcctgcattacaggcagattctttaccaactgaaccaccaggggaagccttatatatgttcattaatatactcatcaatatatgatatttggatttctctttctgacttcattccatgtaacaagctctaggtttgcctacctcagttcaactaatttttttaaaaagctggatttgattttaattgacattgatactgggaatcagtagtcctggattcaagtcttgatgctgccatgaacttgtgtgttccactgtgcattaactcttatgttcttattgcttcttgattttagatttgtatgtttctattagcaagtattttatcttttgtaccacaaatactgggaccttgtctagattgtaaaccattacactgctaacaaaatctctacatctaatttctagagaatacatgttcctggagagtatatagtgaagtgaaattcactcagtcatgtctgattctttgagaccccaaggactatagagtccatgaaattctctaagccagaatactggagtgggtagcctttcccttctccaggggatcttcccaacccagggcatcgaatcaa

SEQ ID NO: 51358 - DNA, 3740 bp, Bovine  19866880827421
  misc_feature (1)..(1): n is a, c, g, or t
nctatcacatacaacagtaactaacatgtgtccgggaggggcaaatttcctcttagccctcttgagttcttttgtctggtctaatactaaattagactactaaattcctctattgtaagaaatggttcttgttctcctggttagaacaggggtttatactggtacttcctttcttttctttgatcttcataccccaggggaaataggctgagtctgatacagttacccagctagacagaggcaaaggtgatgcttttactaaaggctgtcctcttaacatcacattgtagtcaatcagaagaactgcacagcagcttagagaaagatggtcctccacacctgcctgccccctgtctatacaattttaccctcaggaagtataattttattttgcctttgaaggattaagttatggtaggaaagcttaccaacgagttatttttagctctagcaagtaaaacacagcttctgtctctgttccgaagtagagtagcaaggaaagaaggggagggtgctgcttactgccttgtcagtctgctgagagaccagaagcttctgtttcacaaggaagcagtgattacacttatgggaatggcagaggtcacccagacacaggtggggagcgctggttatcagtcatgagtacacatttctggataccacccatctgggccccacggtggaacacatctgtgtaatccattaggtgtgcagcttttgctatagtaacaaaccaccaggactcttttttttttttcctctaagtttgatttttgaagatagggcttccctggtagctcagttggtaaagaatccacctgcaatgcaggagaccccggtttgatttctgggtcaggaagatcccttggagaagggataggctactcactctggtattcttgggttttcctggtggctcagatggtaaagaatctgactgcagtgcaagagacctgggtttgatccctgggttgggaagatcccctggaggagggcatagcaacccactccagtattcttgcctggagaactccatggacagaggagcctggcgagccacagtccatgaggtcacaaagagtcggacatgactgagcaaccaagcacacatatgactatttacacaggatctacagaagatttagagtatacgggaaggtgctataaataatctatagatttaaagtatacgggaagacgtacacaggttttatgcaaatactaagtcattttatgcaagaaacttgagcatctggggattctggtatctgcaagagtcctgagaccaatctcccaggggtaccaagagataagctgtaccttccaacacaccatcaacataacacttgtaatttgcagggatcagttgatgataattgaacctcccacttgaccatctactccacacagtagtgtattaatattttctcaaagtattttttctttttgctagccattgaatgcctaaatctaccagtgtctagccttaagaagtactaaatacaaggtataaattaacgcatgaataaacatgtgtaatcaatttactaatctgtaaaaactcaaaggcagtttacacaattatctcctaaagaaaattccaaggaacctaatcctgtgagacatgccaagaaaagtttcatgtgttattcaactggtgagaaatagtacattctgtagcctcccatcccacttaaaaattcacagtgcacatcatacaatgaagaatacatgaaagccttcaattaaacacattttgaacttcccaaatcaacttaaccacagatgccctttcatgcttaattaatacttgctgatataagagaaccaacattctaagaaaaccctgggaaaacagtaacccaattctttgttggttcaaaaaacatttattaagccctggaaacaaaaataatataagggtgatgaagacaggcaacattaaacaagttaatatttaataggaatgatacttggtgctatcaccacctaagataaatgtgaaacctggctcacggcctactgtctactggaagagacccatgaacacgtgatgagtagaaccaatattaactgaagtggcagagacatgcacatatagctacatacatgtatatatgtataagtgtgtgtatttgcacacactcataggaagggagaaggttttccaggcaggtgagaagcaagagtgtccaatgtgcagaggttttgtgcacacattggtcttatccagtggttttcaaaatatggtccaagaccctctctgggggtgctgccaggtcaagactatcttcacttgtgtgacatttgcactgatggtgcaaacacaatggtggggaaaatggctggagccttggccagtaataaggcagtggcatctgactgtgatagccgtcactgtaatctccaccaccacactctcacagtttaaaaaaaaaaaaaagatcaatttcatctaagaatatactaaaggaagcattaaaagttattaattccactaaatattaaccttgagtacgtatctttttactatcccgtgacaaaacgagaagcacacacagcacttctgctacaagcccaagtgtggtggttcttggcaggaaaaagcactcatacaacggagcggcaagccgaactggccactcttccactgaatgccatttaacttgaaagaatgactgacagaaaagctacagtgactcagatctggggtgtttttagaatgaataaagggagcttgttagttcaaggaaaactgacagtatttgttactaaagaaaaatttgagctttcaagcaaaaattaaaatttggaaaaactctattggccactatgagctctagagtctttcaatactttaaggcttttcagaggagagcggtagtgacagcaactaatgtgatgttatccaaatgactcacacatgatgctgcaaaatgcataaaagatcttttcaaatgcaagacagaccaaaagattttaatgtaacagaatatgagaaactctttgatataagatttcagattctatgctgcaacaaaccttgaagaaactaccacttgtcaagctctgatatagtttcaaagactatccacaattaactgaataggttgttaaaacattcctcccttttccaactatatccaggtaaggctgtattttcttcatacataaaacacaacagggcttccgtggtggcttagtggagagaaatccacctgccaatgcaggagacacgggttggatccccgatctgggaggatcccacgtgctgcagagcaacaaagcccaagcaccacagcggccgagcctgcgccccagagggccggaacctccgcttccgggccatgcgccctgcagcctgtgcccggcaacaggagagaccaccgcaatgagcagcctgtgcgctgcaacgaagtgaggcccccgcaactagagaaaagccacagagcaatgaagacccagcacagccaaaaattaatttttctaatttttaaaacacacacacacaacatactacaacagaatgaaggtaaaccattgatgagagtccagctgtctcccattaaggcaggcaataaagttatctggaaagaagcaaaacaatgttgcccttcatttcctgctttggaaacagttatttttcattaagagtgttatctgtattatgtaatgggtttattactgctatatttaagctaatttaaataaacacttcaaaatcttttcaacttcaattt

SEQ ID NO: 51359 - DNA, 1418 bp, Bovine  19866880838762
  misc_feature (1)..(1): n is a, c, g, or t
ntttgggattggaatgaaaactgcccttttccgtcctgtggccctgctgagtttgcaaatttgctggcatattgagtgcagcactttcacagcatcatctttcaggatttggaatagctcaactggaattccatcacctccaccagctttgtttgtagtgatgctttctaaggcccacttgacttcacattccaggatgtctggctctaggtgagtggtcacaccatcgtgattatctgggtcgtgaagatcttttttgtacagttcttctgtgtattcttgccttctcttcttaatatcttctgcttctgttaggtccataccatttcttcctttatcgagcccatctttgcatgaaatgttcccttggtatctctaattttcttgaagagatctctagtcttgcccattctgttgttttcctctattatctatgcatatttttaagcctactttataaaacctgggaaatacttctattatctttaagtattatgatgttttatcactctctcaaatagcccaaatcatttcttgaatggttacattgatgatttgaaaccccaacaatgtagaaatcttagatttctttttgtttttaagtgtggagatttggcatctagagattctgtggttaaaacagatcttaaactattatgtgaaggttatattaaaatttttgcattctagctcaccatgtaaaggtacctcacatgtgcgggtaccagtgaacatttataaaaaaatgaaccttattattctttaatgatgggttatttatggaaattattttattttttacttcatttttgctttgtcaatgatattttctttaattaaaaccaaaattctccaaactgatttatgttgggactgatttatactatatgaatgccgattgacctttaagttttatctgtaaatcatcattgtcttggtcagataaataatcataatctttaataatcacagatcttccttggctgttcagctttaatgtgaagttttatcctcctgatccttctcaattgactgaagatatcaccaggtactttatgtttatattaaaaatgattcatacttatagctctcatttctgtgccctgggggaatggtggtaatttcagcattaaaagaaaaatatttattcttgagtagagttttagaagtttcctgggaagtgaatattccaaaatactttgaaatgtttctagtttcaaaaattttgttcatgtttctttaattccccacttacattcaagtaatggatttttttttaactgcagcaatcttgtgtcctatgttatactgtcaaaaattactggtacttaatatttcaaattttaacactaagatggtttttattgtgtaacctatgtgtgcctgtgtaagatcttatattacaaaggtagcaaagg

SEQ ID NO: 51360 - DNA, 998 bp, Bovine  19866880844947
  misc_feature (1)..(1): n is a, c, g, or t
naatctgcctgtaatgcaggagacctggattcagtccctgggtgggaacatccccctgaagaaggaaatggcatggacagaggagcttggtgggctacagtccatggggtcacaaagagtctaacatgacttaaagactcagcaacaacaacatgttaagcttccatcttttctttaaatgatgaggtaccttggaaagtgtctgggctatgaagaagggaagcaaagactaatttgtggtccaaaacctgaaaaccatcttttttagctttaaaaatatagctttgcagtctgatgtccctggtaatagtttgagaaccctctggatccatttggaaaattagaggctgcttaattttactatatagatacccaattttgatgtacttgtttattttttgaatgaaagtcctttccttattatgaaggagaaataccacttgctgccgctggatagtgagactaattcacgtagattttactagaaaagaaatatatttccaagggacaaaagagccttaaaaaagccctgcaaaatatattgtcaaacaaaaaattccctggagaacaaggaccatgctaatattatataacagacaaagctgttctggatacttttattattgaagatgttttctgatcagagcatgtaacttttagtacgtcctaaggtctcctgcctctttgaaccacagctctctctgtaagttatgggttaaagaactaagttcatttcactctccagtaaaaaatagcttcttgagattcatgttggaagtcatctgtggagaattcttacaaaatagttggtacttactttttgctaaaactaaattaattagcctaacagattagagtagcttttatatttcctttattccttatttttttaaaaaaatagtgacatcttacaaaactgaaatggagattatagtggccatacaatgctggcaatggtatcttgaaaattaaaggtcttaatttttctgctaagttat

SEQ ID NO: 51361 - DNA, 1106 bp, Bovine  19866880955139
  misc_feature (1)..(1): n is a, c, g, or t
nttaggaagtataagaacgatgcttctcaataattgtcacatttttttttttaaggggaggagggaagatgaggaggaagaaagggagcaaagaagaaaaatatctggagagggagaaggaataacaaaaacgggcaggctgagagccgactaaaattaattcctctcctttgtaggtttatttttcttccgtgtcaaaaggtctagaaaatactatatcccatatccaaatacatacaactacatttcaaagggaatatttgttaaattatctatacagtgagggtaaacaagagttattttttaaataattcaatgctgcccaccctagttaccttaataacacattccatcgtttgtttggtttattttaaagggataaagggcccataagagagacagaactatttctataaagatataagtaaacatctggtttaaattaaacccacatatacaaaagatatgaactgtagccctttgctaactcaagtctaggcaggatcagattacattcagagcatgaatttcctccagccttccactactttttaacagaactcaaattttgttcagcttttctcttttccacatgcgtgccagtaaaggctggctccaggtcaggccacaaggtaatggcattctggtgtagggtaatcatggtagttccccatccctttgccaggaaaacatgtaaaagtctgttggtgggctcctggggaaggacgcctgtttctagaaagagccataagaagagaaggcccctctcctaaacactgggtatgtgattcccagaaatgctgttaccatctggaataatccatgaggggggaaggcctggagacaaagtggcatatagcagaaggcactgcaaaagttacagagaagaggaccagcctactgtgcatgctactggtgaccaggtcctgtatttgagcttcccattacatgagataacatactgccccttgtggtttaaacaattaaagcagggggtacagttacttgtaatcactattagtttctgcatattctgaggcaagcattagaaactaagacctaagaaactaggaatacataatagtaccagctcagacaattactcc

SEQ ID NO: 51362 - DNA, 2722 bp, Bovine  19866880992544
  misc_feature (1)..(1): n is a, c, g, or t
ntaaaaagttctcatcctaaaccactttttcatgatatttaagccagaattaccattttgtgccagctaatatttgaagatgcagttatactgttctgagtctgacattctagagcatgcacgatttttacgcagcactgggctaggttcttcccacatgaacatggatcttcttcagctgcttcagtattcctgtaaaccagtctaggacttcactgcacctggaaaaatctctcagaagttcacctgtaaaatcctcgaagagtagtgtggacttacaccaaaggcttttttgagcccatgtattctactgggatttccctatagctcagatggtaaagaatctgccttcaatccaggagacccaggttcgatccctgggtcaggaaaatcccctggagaaggaaatggcaactcactccagtattcttgccttgagaatccatggacagaggagcttcgtgggctgtagtctatggggatgtaaagagtaggacacgactaagtgactaacacacacacatgtgttctgttacacaggatccagtaagacttcctcaaaatctcctttaaatgtcttttttcccttgatgtttcatgacttgagtcaataccctcatgttgcccctgtccttgtctcctctcaaaaacacattcctcgtaccttttcttctacaattctctggccagttttcctcctcctccttctcactcctggatcttttcctccagatatttccttcatcttttctcatctgttgtaatttatctttttctcaagttcctttgctattttgggttttgaaagtggctgttgaaagtgaaagtcactcagtcatgtctgactctttgcgatcccatggactatacagtgcgtagaattctccaggccagaatactggagtgggtagttgttcccttctctgggggatcttcccaacccagggatcaaacccagatctcccacattgcaggcttattctttaccagctgagccaccagcgaagcccaagagtgggtagtattaagatgttgaaaagttttttttttaaatcttctgtgtttcaatttattttaatggagacaataccaatacctacttcacaggatcggtgggaggcttagtgaacgaatagatgtaaaatgcttactctagtgcctgaaacctagtgaccacacaagaaggggactgttgttgtttcaacgttgtgtttatttgtattaccaagaactgtggtgagacatggagaggaagaaatatgtcctcggggacatcattaatttgatcaatgtagaggtagaggaaactctgactgtaagacctttgtgtattattattaggagcattttaactaccaggctatcaatattcttttgttgggtgtctcggaagtgacatcgtaccttgggaaatcttaggtgttattgcgtatcgtcccaccaggaaaacactgtttcctgtgttactgttctccaggttgcaaggaatagagaaatgctgaggttatttgggtgaagaggatttattgtaaagatctgtgggaagtcagatcccaggccagcacctcatgatttgtccagtcacagtctgcagataatggaaagattgttcagtatgaaacagcttgtctgtatgggaacgctcgtgattcagctctttcttatctctgctgtctttttggggttctgctgctattgccagtctcctctcttgtcattttctctctaatcctgctgcctccaggcttctatatgcactcttttctctggggatcacttggtttgctagtttatattcaagctattttccatttagaagttggctaatattgtctctgggcttccccgctggtgctagtggtaaagaacctacctgccagtgcaggagacgtatgagatccctcgggcaggaagattcccggagaaaggaatggcagccctctccaatattcttacttggagaatcccatggacagaggagcctggcaggctgtagtccctactgctgcaaagaattggacacgactgaagtgacttagcacacacagcattgtctctagctggaaatagaggagggaaaagtcatcattcctctttgttctcagtaggttgagaggggtgagctgatgagggaccaaggattttgcttggataaagatacagtttttgtacaagaattttgcttggatacagttttgtaaacatacgcgtttagccttctgtgcagctctcaccatggttatgccccgcctcacatgtctggggaaatgacagtagtcattcctgttgaattattgctgtcctgaaagatcttaaaggccatgaagaatgggttctcagacacattcatttggagacaaataaatattactgccagcagaaatggaatgttgtctgctgatttgacctttctgtggcaagaataaagctcttatttttaggaaagaccataatgatggtgagtcatactgtatatttcaaggataagtttctggaaagatacatagccattgagtttttccactcagtcagggacccagtctgtaaaagaaggatattgggctatgctcttaagatggacaagcattgtgtaatttttaaaacatttatacatcccattaaactttccgagttatccctccaggatatttaagaataggtagacaagcatgatttgattgaaaatcctgacagtgttctcattttaatcgttacttatttt

SEQ ID NO: 51363 - DNA, 1250 bp, Bovine  19866881063494
  misc_feature (1)..(1): n is a, c, g, or t
nttttatacttggccaatgcttgtacatgaatatctctattagaacaatataaaaatttcctaaataatattgttattttaaaagtgggaatcatgaatttgttttctttcaaaaagtattgctttaaaatgaattactagcaaggggcttccccaattgtgcagcagtaaagaatctgtctgcaatgcaagagaatcaggttctatccctgggtcaagaagatcccctggcaaaggaaatggcaacccactccagtattcttacctgggaaatcccatggacagaggagcatggaagctgcataagtccatggtgttgcaaaaagctggacacgacttagcaacaaaacaatcagaaaaaaaaaggttataagaatgttctagttttaagaattataaattcttctcaccctttcaagttaatgtaattgagatagtaattagcctgcccatctttaagtaggtctcaagaataaggaaataatgacagataagcctctacattgttattcagtctcccagtcatgtccgattatttagagaacaaaggccatggagaagaaggccatacttctcccagtcaggtccagtggagggattgggacacagccccaaatacaggtgggattttggcagcttctgtgtccttctggcaggacagtcttaattgatgaaggactaggggctagaggagccctttcacctgcaggaagcttgactccaaagcacagtctacaaccatgaagggttaggaacctctctttttagatgtactcagtcctcctttattgtatgtctttaagcccaggatgaggtaaaaagatagtcacatgaatcttttgaaatctgggagcacgaacatgatttgattaatttatttttttatttaaattcaggctactgtcaactaagcacccactgtgtctaggtttaattctagctattgtgaataaagggtctcctgagtcaatgagtgagtagcttcttttcatgagaacaaagggtattgaaacaaagaagacttcagcatctttgaaaggataaagcagagtctccagagaggaaaaatacattgcatcttgaggagcaaagcagatgcacttataatgagtgagttcatcagcttgaaatactatatattcttgaaatattcatatatccaagactttcaccctgattatttttggacattaaaaaaatgtgcaggccggtttaataaactgaagtatgaaagggtaggaaatttactc

SEQ ID NO: 51364 - DNA, 973 bp, Bovine  19866881066215
  misc_feature (1)..(1): n is a, c, g, or t
nctaaaatcactaactcgactaaaccagaaattcaggaacgaaaggtttacttacagtacatcacaatcttgaaacacagaaaacaattctaccttttctggcaacacctgcatttactggatacaaggcaatataaaggatgaattaagaattggtgtctgtcttgaagaaatttataatctagaatattctcaaggataatgctgtgtactgtaaagaaaatattttatcaggattgatcagctatctctgtgcctgggttatcctaacttattcacacaactcccttctggcttttggaggtggtgtgttttgcttcctttgcccaaagcccagtccttgctcacagccttcagttactctgacctctagttttgactcagttatgcaaatgagcttcttacggagaagcactctgaaacttcaaaattattattctcataaagcatgcagccaccaaggctggatggagatctttagcttcattatgagagggaaactgggctgggggtccggaaaggggtcttccacttaacctgagttacattcatcttctcctaaagatgatggagcaagactaaactttatttaattttcaaactctgcaatgaactctctcttctgtcccctcaatttaccatttcatccttcatatgcagcacagcttatgtctacagagacccatgaattatcccagtgcatgggtccgacttggcaggtccttacggcaggagctatgtggaaaccatccatgcactcaaaggttacctcatatgtgccttttccacgcttaatctaatgtctcagatggtaaagaatctgcctgcaaggcaagagactcaagttctatccctggatcgggaagaaccctgggagaagggaatggcttcctactctagtattcttgcctggagaatcccatgaatggaacagactggtgggctacagtccacagagtctcaaagattcaga

SEQ ID NO: 51365 - DNA, 1778 bp, Bovine  19866881071620
  misc_feature (1)..(1): n is a, c, g, or t
natattgtgataaaacaggagagaggatgagacagagattcatcttttgctgtgatgatatttctactttgagaactaaaaggaaaaataggccaaaaaaaactgccgaataagtatcttaattgaagcctattaaataaaaaccccagacagccccacatggggccttgattggaagagaacacttaacaacaaatgaggtctgtggacttgaggacacaagcaggctaccaaaacatgatgttaaccatagataaagacagaaaggggaaaatagatatcagcaggggaaaagaagacagaatcaggacctgtaggtgggaaaagaaaggaacctatgcattaatgaatgaagtcatttgtttaagagcaatattcactgtgatttgcaactagaaaaatgtagtcaagcctaagtgaaattcattacttccatcaagtaaaacctggaacagaaatattcaactagtctttcctgccaatgaaaacatcttcttgttaggtatgctgctgctaagtcacttcagtcgtgtccgattctgtgcgaccccatagacggcagcccaccaggctcccccgtccctgggattctccagccaagaacactggagtgggttgccatttccttctccaatgcatgaaagtgaaaagtgaaagtgaagtcgctcagtcgtgttggactgtttgcaaccccgtggactgcagcctaccaggctcctctgctcatgggatttgccaggcaagagtactggagtgggttgccattgccttctccgcttgttaggtatagtggaacaatttaacatttgtcttaagtgagacaatgtatataaatgcatctgatgccctggagataaaatggggctattcaataagtgttcctgttccattcccttccctgcgagcaatctgagaagcagctccaaggcagggcatcacgtccacggttcgtagcaagtgtatcattcatcccttcaaaattaaatttcatggctggtgagaagttcaagacgtcagagtcattaggtcacagagggactctatgtgtgatccctccctactgttactctggcactttctgctattgtccttggctcttcctccctgacagctgacagctcgacatttctcttcacggccagaagctaagtgagtgcatgttcatccacttggcaaatgtgctgtttcctttgtgtcttagccaaccaaaacatgccattaatggaagacatcagccaaagtgtcccggctcccacaggtcccctcacccctgccttaatatatggtaaatatttacctcattttctatctttgatctcatttggttttttctcacagaaacaactatgtacctgagatttctagtgaagatgtcctaaatttctccctccaatgtaatttcacaattagtattcatgtgtcttatactcagtggaggatattaagtttgtgtttatctcctggaactataacaaattatacagaaataaactgtcctaaaagtaaagaggtcatcaaagagtcaccacgtcaggttgtacaaattttgccttaaacaaggatttctgacccaggtgactgggttacaatctagcctttgctctgtttgccaagcagtacccagagcgggagatttcccctaatttatagatagataccctagtgaacagagtgatcctggacatgtcaatattaatggaaaaaaaaaaaaagaattgagtaaacatatgaagctgggtgttatgtagccaaatagattattccaataataatatcaa

SEQ ID NO: 51366 - DNA, 1001 bp, Bovine  19866881122399
  misc_feature (1)..(1): n is a, c, g, or t
ncaagccagaatgtttcccatggctggaccacagagtgagctacttagcttggctatgagacagaggtacagctgtaaacccttatgattctgaaggcatattcagttggatataaatatctataccttcttatgtttatgtaattggtccttgagatttcctttccctggaaaattagccttgtcctttccccaactgaaagattatgtgtcatataagggtccagcagactggaggacctttaaaagaaaataaagagaaggccatttacacagaccacccagggaagggaggcattttgccatatatgatgtggcagatgggattattaacagcaaatgtgatctcctgcttaaagcttccacgtatagtgctcttggctgtgctatttggttaaggacacaaatgtcttagaattacagacccaagaccaatgacaatattgttaatatcaccactttaacagccagctctgtatctcctcagggttcctaacagtgagtaaagagaaatgagacagaactctaggatttaaccagcgatgtgttctaagggcagctgaaattaaaactgaaagccctgcctgtcctcgtttgagagcctttaacaaggtgttggaatgttattaatgaaatagagtctataaattgcctataaaaatgttgaggcttcactgactaattttgtccttccagcaaagctaggagataggccaattgttttctccattttacaggtgtggataaggtgcagaagaagaacttgcctaagtaaatgagttaataaggcagagatgaatataagcctagggagcctttctcttattcctgtaatatacccaccatccttgtttttacatcatgacattggcatggggtttcgaagcagcattctgatagagagtccaggctagcaggctaaattcacacctgcctgtcagtgtcttcctacagcgaggcagtcaccccagtgtcttggtgccttaatttcacattcccat

SEQ ID NO: 51367 - DNA, 1246 bp, Bovine  19866881162555
  misc_feature (1)..(1): n is a, c, g, or t
ncatccaacagaaagcaagcttttctttccacaaaccttgcctctttattggcttttgagtggtgagcacctaacctcactgttcattacattagttcaacccttcatgataaagataagtatactgagaaacattgtgatcatcgctttgtcggtgttacttgggaaggtaattcaattgtttttatttatcttttttactttttcgtcatttcacttattccacaaatgtattttgaatgccttctctatgccaataattgtctaatatagtaaagaaataaagaagatagataatttttctatcataccaagcatccagaaaagggaactggagagaaaaaatttaattattatattcatatatgattttaaagttttccaagtaattttggatagcttattctagttaaccatgacaaacaagtttcagttatagacacaaaactttcagtgtttcttcagacttaactcatagagccttctttcctgttcagcaagcatccttctatgtgagaatgattcaagaactattgtcgatctgactgtccaagcagtatttgaaaccatgcaaaaccagtggaatttaatacatgtttcttttctgataacaaccagacttgtacaaattagggcagcaagaactaatgctccctgaatcagttgaccattgatgatcaaaatattattaactgtcagggacttatctctaacaatggtcttttagtctccaaggcagttatcatactgaaaatcacccagacaggtgagaaatggctgaccacacctataagcaaggccaaatttaccccttgggtactttaaataattggcttactcactgcccaaaatggattctctgactggccatggaatttcaaggttaaagattttaggggatcagggaatgagtcagaatatgcaactcattgcccataggaaatgatcagatgatgtaattataacctacttggggatgttccatggtagagactgcagccaatggtgagtgttatctaaggactaagtcctctatttcttgggcacagaagcttgaccaggagcaggatataaagacacagtgtattggctaatcaatgtaatttcggtaactatgatttgaaggagcgtataatttagtggctggagaaggaaatttagtgggaggaaagaagaaattttagtgcatggcgtacttttgcttaaaggagggtcaattcccatagccagtggattgaagagaaga

SEQ ID NO: 51368 - DNA, 1999 bp, Bovine  19866881188283
  misc_feature (1)..(1): n is a, c, g, or t
naaaaatcagacaggactgagcaactgaacccagcacagaaggaagtttgtagtgaatataaatgtacagcctgcagatcaactgtctttggtcagcaggacagctttgtcaagctgttgtgggagcatggagaattactggacattttatgacaatattactgtacatcacatttgcataatgtttgatataaccagtttgaacatttgatctttacaccgcctacgtgtgccatatgtagtgatgaagagacttaagtcaggaacgattatcccctttttacctatatctgagtggaggcaggctcttccttttatattttgaaacttgcagctggctacccagtgaggggcagttaggaaggcgaacagtacagagtctcatggccagggaaatttgactgagtgaaggagaaaaacaaacaaacaactttcatctattttttaggttcttctggctggtttaagaattaaactgataatttaacaggagaaaatcaagcctagtaacatacatatgaagaatctgaacatgagagatagcaaagacagacaaaatgaggtttctaatgtcattctagactggggtctgggactttaacgtgaaggaaggcaattcacaggaagatgaataaacagtaaatgtttggtaaacatttgctggggcatgcagaatcaaggggacccagagaggaattgtgacaaacagactttgctaggttcctctctgtctaagacacctacttcatattatactataggtatctctagtgatagttctctttcctggaataggccctcaacctaacttcgattagatagttaagggggagataaaaaacatcctgcattcttctgcatcttttctcatgccaaagagatacattggagggtggcaaattttgcttccctaccggacatgacttccctgatggctcagtggtgaaaaatctgcctggaatgcaggagacgtgggttcaatccctgggtcggaaagatctcctggagaagaaaatggcaacctagttcagtattcttgcctgggaaatcccatggacagaggagccttgcaggctacagtccatcaagtcacaaaggctcagatgcgactgagcacgcatgcacgggtcacgagtaaacagcaacagttgctacaagtccataagatcttcctcaaatgccccaaactgctagttgatttataccttaaattcatgcagccaatttattactttaaccatcacagggacacattatttgctgatgacttaccaccaattataagaaaccacaataaagcttcaattagatattttccctaaatactatgtgtgagtaaatgtgtgtatgatgtcatatacagagaaaaggtagctagtggctaacaggactcagaggaggaaaggataaaaaaggagaaagaatctaaacatgtaaatttaggagtcagaaggtattttttattgcatccacttgtaatagagaaaggcattctgatcctgagtttggttcacctcaatcaacaccagcaattttttgttgtatctggtctacaaagacaagacagctgtaacctttcttatttctcttccttcaggaagggtgatacatagggaattttttatgaaaaaagaatcaatatttagagtgcatcttcactttagaaaggtaggaatgatcctaaatcaaatgtatctgacatgcaactctttttctcctgggacacatgaaggttgcaaatgaaatacatttaccctccttgaaataaacaatctttacttgtgggaaaactgtacaaggtgaaaacagaatatgtgtggctttgtgaaatgttacacttttatagctgatgtgaaaaatttcatttgggatattttggtccaattcagcatcaaaattcaatcaccatccacttgcagacaatacaagcgtaaatacatctgttgcttacttatcgagtctaaatttaaaatgagaaacacagaaggtttgctctgat

SEQ ID NO: 51369 - DNA, 1234 bp, Bovine  19866881238657
  misc_feature (1)..(1): n is a, c, g, or t
nacagagtataaataacgtgtttctgcatgttattttgtaaaagccagcattttttataactgtataataatccacttggaaccttgaatgatacagtattatgattatggctactagtcactgattcccagataccatgccatgtgttttatttacattatccaattttttgcccttaccttcaaagggaaattgaagttcttcccattttacagaccagaagttagtcttaggcatgtaaattaatagtcagctctgcctgactctcaaactcatgccctttctactgtaaactgatttagttgcctctctggctggggtaaatgggcaggtgagggcttccaagtatagactaatttgtaattattattaaaggatctgaggaaaagaaatttgtatggaaagggtagagagaataaagggtggctgaccttagcttttcttgcaaatgcttaaaaactgcagctatttcttaaattttattaagctctacaacttttgaagggcatgctaattttgattagttttaaatccaaggagactaagtgattagaatttcacctacagtcacaaaactctttattgtaatagtaaaaagacactgttgccagaatagccattcagaatttccatctattactttgccctcctgattcagtttctgtaaataagtcacaaaattaggaatccatggaggatgtcgggcttcttgttacagaagactttttgctctggatttgaagagtgccatattgtacattttttttttcaaaggaatatcagaattatgagtgttacagtcttgactaattgttctctctactctttcttccctgttcttcacagatactttttgtgccttcagctccggcaggacattgcctcaggtcgcctgccctgctcttttgtgactcacgccctcctgggatcttatacactgcaggctgaacttggggactatgacccagaagagcatgccagtcatgacctcagcgacttccagtttgcccccacccagacaaaagagctggaagagaaggtggcagagctgcataagacccacaggtctgtagacttgcttactggggagacagtggccgtggtgggttcaaattgcttctcttagcgctggctagacatctgagtatagctgacagggttgatcagtttgcccttgtgaagcttcacctaggactggtcaagatagacttggagcactgagatatcctttca

SEQ ID NO: 51370 - DNA, 1937 bp, Bovine  19866881248688
  misc_feature (1)..(1): n is a, c, g, or t
ntcctttagtctgctaacttgacacataaaattaagcatcacatccaaataacaaaatatcaaaatagcttaattcaatagatggatggacctagctcattaatccaaaaataaaaaaatttttaaatgaaaataaagaagccacagtacccagtgcagatgttagggtatcaagcgccttcagtagaatgtatctgaaagtttgaaaagcagtactttaagcagaaatgtatttcattcaaaaaataatagcaaatgtatgaagagcacacacttatattaagactggaggtttattaaatgctttatcgtaaaatattaagcccacactattacaatacacaggctcgatgttctaacaagtaacactgtgcctcaatcgagggaagttcatgatgccaatacaaggtggaattgtggggaattacaaatacagagatattttccttttcctcttctacaactgcaatactgatgttcagaaatgtttacacattgagaaaaacttgtaaaatttcctgagtgttccattaaacaatttttttaaattaggttaccctaatggaaaacatgaaaatttcctggtggaaaatctattttaatatttattatcttcaataactgagaaccataatcctaaatatttattatgccataagaaagtctttggaattatcataaggctttctagaacaagataaatttcaaggcaatgtaccaaggactaaattttattcaaccaccaacttagtgatatgcaaagataaaagaaaagtcaaggttagctgattttcttccaaataacaggaactaagaaatattaggggaaaacaaggatgtaggaatgagtggatattagatgaggagagagatggctagggaaaggtactgagactagttagcatttactagcatatattttcattcattagtcaacattttcttcatatatataattatttcaagatagcacttctaaacactaaattggttcattcatttttcaagtcagttgcaaagaaatttcaatccagaatatctaaagttaaagctaagagcattttgatacttacccctaagaatatctggcattctcagctgtagctcttgaatacatggtttcttaataaaatatcactaaaatagaactgatgttgaaaaaatacaagctacctagagctcagggtactagtcacaaccaactttaccaattcatatcagttacttacacagaactaaacaagtttaaccaattcaattatttagtttgaacagaagccagatattttgccttttaaaaatttaaccaatcctaaagcaatttttcagaaaatgacacctaagatttgcattgaatttatacttccagtccacactttggtaccctggcttttctaaattggacactttgctctatgtgtgatcatcaagatgaaagaatatgatcatcgatgaaagaatatgttcatcaatgaaaaaactttaaagtaaagaaaaggaactttaatttggatggaaatactttatattcatattaataaaagagaccatgcttttggaaaaaaataaaatcccacgtagtatacagagtattgcaatcgtaagtaatccaaacatataaccatctccattacacagttaagcagccaggtctaatatactacaaaccatttgattaaaaaggcttgtaaccaaaattttaacaaggaaacaccagtgaaaataggtttaaaatatatatatccttgtaaaataagatatgttttccacattaaaaccttgtttcagaagttccccgcttcaagttgttactcaaaaactcatcatgttcaaaactcaaattattgtgagatcttgagatcataagaagcttctccttattagtaaagtctttcttgattgcagcctggggcacaagcagcctctccatgggtcct

SEQ ID NO: 51371 - DNA, 968 bp, Bovine  19866881261148
  misc_feature (1)..(1): n is a, c, g, or t
ncttctgggattgacaccatgagaacgtgttaagatcaaaagatgacacaaatcattctctttgaaacactgattgtgggcacagttgagtcaatctatccgctaatctcatttactgatgaaatactgaaacccaatgacatgaagttacaaccatagtccatcgaggtcacagctacactggcagacatgggaatagaacccagattaccgatttatacagttttgattttttttctcaacagtgactatagccatattttaaataaatgactattgaatcagtttgcttaaaaaaaaagaaaaaaggatgtgtcaaaggagaaattagtactttgacactgcttggatcattcttttagaaaacagagaactgtaatgattattctgcttaataactgacaggaagctagatggcatatcatacaggtgctgaattaatttaaaaaaacaataataaaagttattagagtgaaaaaaaaattgagcatatgagaacatcaaagttgatcctgaatctaaagtaactatggaaacattgcttagaaaaattatatgtattaactttgtggttcacggaagacattagcatcttcaatatttaaaaataaacagtctcaagatgttcctatttacatttttagcaagtagatatgtagtctatggagcatattttagctgtcattaagagagtcactaacagtggaatttcctcacttctagctttgaaatttcccccttaagacaaaatttgcattgatgaaaatataaataggatatgtcttgattgaaatggcagtagttgcatgaaattatttcctaggtatgaaagaaaagaaagacagagttcatacaacacattgtttgtataactcccagataagatgtaaagcccagcatcctccacattggtatgtggggcttattctcaggcgactcagactaggagaaggggctccggcttccca

SEQ ID NO: 51372 - DNA, 1739 bp, Bovine  19866881283084
  misc_feature (1)..(1): n is a, c, g, or t
nccggtatcttcttgataatgtcttttgtgatgttcctagtgttcggggaacactgctttggaccaccatcattaaacagaatgttctatagagaagaaaaatatacctacttgcagtttcttccagtaatgtcataactaggctcccaacagcaaaaacaccaccaaaattctcatcttgtcataagcgatatcagggaatacacttctgagtcatcccacaaccaccttctgcaagggatccttacgcagccccaacgtaaaactcacctggtatcaagcagtcatctacaaccagtctaatattatttctgtgtgaagtaaactctaaattctttagctaaaaaataacagtggttcaggaggcttttcccaaataagctaacaacaaatccaccaaggttaactgcacaggataaatgcacaggctgcagacgctgcattttaataggtcataagacaaaagcctgtcaaactcaatcaactccccacactatgacaaggccaccaggctggagcctacactgatctcgcactttcaaatcctcttctccataagctttggaacgctgcagttgacaggcataaatacctaaaccttgtcaaaaaatggaattcacttttgcagttttggtcgttagctcctctatcattttacaatatttacagcactgccaaagagttacgtcaatgcatagcatgtattcttaaaatatgagactataaacggaacgatttttctagcttaggtaagcagatcccaatgtgaaggccagtcctccagttggtcggctgaaggtgccatagaccgttagcatatggaccctccaagcgtgataaaagcaactttccccaggcgggaaaagctgtaattacaatggaattacagacatgccatctggaatgcttaaaaactttttacttttccccaagtagttctactgtgagcattagtacattcaaaactactcagtcaaagttttaaacgactactttttaggtcatgctggcaagggacaagctttcactttggcaaatatatttgtttctttggagataagattctcaaaatgcaacatctgtaaacgtgaatttggtagaggaatctactggagaatatgctaggtattccaacccttggaacccaccaaaaaatttcaagccaacacaatttcaaagtttaaaatttccctttccaactttctttgtgatccagctatgatgttaaacaacaggtcatcaatatatcatacaacgtgcactggaacactccaaaagagacagtccatagggaaggtgggggtcctatgaacaactgtccaggtcatcagcatcaattccacagacatttattccttcatctgaggtgtcaatagtttgaagagacaattctttgttaaacctaaaaacagaaagcttaaacttcacaagtatatatgtaccgcccctccctcccccaaacactcagtagtttcctcaagggtctaagaacattctgggcaatgtcaacagtaatgaaggaacttacagatgtagtctggctatcacaatggtactgcttttcattttgttagaaagaagcaacgtaacaagtttcttttcgaaggaaggttgttaggcaggtaaattatatcaagaagaagcatgaagaagactttctaaatttggatgtttgaatctgggcaatatggtgggttttcacatttcttcaatgtgacaacatattaaatattcagtaa

SEQ ID NO: 51373 - DNA, 1583 bp, Bovine  19866881297639
  misc_feature (1)..(1): n is a, c, g, or t
nattttttaatatgatatcagaagaacaagtgacaaaagaagaaatcaacaagtgggactaaagcaaactaaaaagcttgtgcacaacaaaagaagagatcaacaaaatgaagaggcaacacagaatatgagaaaatacttgcaaatcacctgatttcatattcaaaacttcatgacaaaaatacaaacaatcctattaaaaagtgggcagagaatctgaatatttttccaatgaagacatgcaaatggccaacaagaacaggaaaaggtgtactttcaaaccactaatcatcgggaaaggaaaatcaaaacgacagggaggtaccacttcacccatgtcagaatggttattatgaaaaaagcagaaaataaatgctggtgaggacgtagagaaaagggaacccttgcgtactactggtaaaaatgttacactgatgcagttattatggaaaacagtatgaggattccttaaaaaaattaaacatataattatcatatgctccagcaatcccacttctgggcaaatatctgaagaaaatgaagtcactatctcaaagagccatctgtgctcccatgttcattgtaatgtatttcacgatagtgagaaatggaaacaagctcagcggccatcaacagttgaacagataaagaaaacatggtgtatatctattaaaaagaaagaaatcctgccatttgtgacatggataaaccttgaggtcttatgttaagtgaaataagtcagagaaggacaaatactgcatgacctcacttacctatggaatcaaaaaacacagaacttacagaaacagaaagcagaatggaggttgcccctcactccagcggggggagtgaggcagggaaatatgttggtcaaagggaacaaactttcaagtataagatgaataattctgaggatctaatgtgcaacattgtgactatagacaacaataccgtatcctaaacttgaaacatgctatgagaattgttctcaacataaaaacaaaactataattatgtgaagtgaaagatgtgttaactaatctcgttgtagaaaacatttcattttatttatagatacatagatatgttatcaaaccatcaccactgaacactttaaacttatataatgttatatgtcaattatttctcaataaagctggaaaaaaaagaagtaattagaatcctcacacagtaaatgtcagctcagtttttggaataacagccatgacctccagaagccaaaagcccaatgttatacttacaaccttgggtctgggtcaggcagacacaaagggtgtgagcaggaagatgcacgttattttctatcctcacatgtaatagggattggaatacaaaagcatatatgccaagagtgagaactggcacctaaaccctccttctgagccccaccacttctatttaacacatgtccaaggccaattatgctgataccatcattcctagcaacatccaagcagaagagagatgggttacaggtccatctggacacactaccagtgagggccttagcaactgctgcctcctcaaaagtgaaaatatggcactccagagctatgctaaaa

SEQ ID NO: 51374 - DNA, 1478 bp, Bovine  19866881490429
  misc_feature (1)..(1): n is a, c, g, or t
nactcctggaacatttgggatcattgtgcttgtggtccctacactgttggaaggggctgtcatccagggagcatgggtctgtgtctattttgttcacgctgttctctgagcaggcgacccaggtgggtacaatgtgaggtcggctgtgccctaatgtagcatgtggacacctgagagataccccctccccaaagccctctgccctcttagtcactgatcccaccccccccaaacaagtcaagcaaagatcctgaattttgaactttctgggtttactccctttcccaaagactagccaaccatatcaaagtgtcttgttttcagagtgataaaccttgctttattccacaagaaggaggaacttggagcttacccaaacctccatggggagttttgttgtccaaaacattgcttcagactacaagggaactattgaacttaccaccgcagtcagtttgaggtggtttttgagttccaatttcagtttttccacaactgctattttgctgcagaaataatttacaactacaataaaaatacttctggttttcttctaagagttggaggggaaaattattatagtgttatgattccattttcttttgtggatctcagtaattttgagcaaaattgttttcattcatttgttcaccaaatcattatttagcgagattcatttagtagttgctgttgaatcatatttatgacccattttggtcaaatgtgaggtcatcttatacatggtaatgtagaaaaacggggaggaaatcatgacctaaacatttattggttgctttctgatgagacatataaaagtcctcatagcttgcataaagtagtacccaaagtacccacgctctgtaggaagttcattaattaataattgattcaataaatgttacatgctggtaacaggatatggtaggcatcaaaacagaggttgtggtggagtgtacgtctaagtgggaaagacaggtctgcttcagagtagaaagtgcttgtgaggaaagtaaggaaatctaatgaatagagtgcctgggtttttgtagatcgaagggtaggaaggacttctctgtgtttgagacatttgaactaagaccagtcttgcatactgaggaaggggtgtgtgcacgcatgctaagtcacttcagtcatgtccagttgtgtccaaccttttgcgacctgatggactgtagcccaccaggttcctctgtccgtgggattctccaggcaagaatactggagtggcctgccatgcccttctccaggagatcttcccaactcacagattgaacccacgtctcctgcagctcctgcatttcaggtggattctttaccactgagccaccgaggaagcacattggggaggggaagtaggctttattctcagggcactgggaaaccattaggaagtttttatttgggagcatgatatttgaggtcatttattaaaaatagggttgaggggagtttcccgg

SEQ ID NO: 51375 - DNA, 1068 bp, Bovine  19866881733276
  misc_feature (1)..(1): n is a, c, g, or t
nctataaccatcaaagctccctctggaacatgacacactgcgtctgagcaggctgttgcctaggaagtcaaacaattattacccattacctcacaaacctgcagagatccaagtgtttgccaaaaagatacaaggccaatggtgaatgcagccaatgactaacagcagctccatgagccaaacgtcacagcagaagaactggtatcactctgagaagtttatatggacgcagttatgtcagcaaaaatgaaattccaatgtttatctcaagataatacttcacgaaggatagcacattgttcatacttttaaaataaatgaagcataatctcgggggaccattagcccttattttgtttccaggccctgcagtgaccaatcatttctccatcagatcaggaaaccatgtaaaacaactctgacgatttctcataacaattgtttacaaaagctgtgtctatacatgcaatttcctgggtaaatgtacatttaaaatcgtcattgccttcagatagtccccaaagtctgaaaacatcaacttattaagcctcccaacaacaacaaccaaaaaaccattcattcagcaaaaaaaggactcagttcctaacctaggaattagaaatttaatgatgcccatgatcttgagttccttaaaaatttaaagaagaactacctaaaaagcatgtttctaagagtctcacatttcaaggccaattcaactttctgctgaattttaaacagtttatccaacactgccaggatctgaagcatttccaaggaaggcaaagtcaaacttctacatcatcatttatgtcgtaagtgcctaagcaaaatacaagcatccaccatgttgtatatttatttggtggctgctgagataacttcaaaagatgggacaaaaaaaccggttaagggtaaacagaaagccagcattccaacatgtttttacaaattaggtatctgagtttaaaaactcttagtcacgaagtaaatttgtccttcattactaccatgaaaagagatcatatcaaatcaccaactcatgtaacctgtcagtctagagcacat

SEQ ID NO: 51376 - DNA, 764 bp, Bovine  19866881998972
  misc_feature (1)..(1): n is a, c, g, or t
nggcttaattttagttactgatttcagttgaagagaagggacctttgccagctgctatggcctgaatttacctttatacatgcaggtacttttccccagaaatatgataaataagaaatagatacatagaggaagagcattagcacatgctcaatgtcgcaagaatgtagaatacactccagctataaatgtccgtacttgaagatgctctaaatgatgaaatatttagagttatttactgatgaaatatgagtgatatatcatttcccaacaaatgcaaggtcaaattggtcactgtgtaaatttgactggatgtaggcgtttgctgtgtgcagtgaactgtgtatacatatggtaagaagaaggggaatgagaaggtacatgagaaaaaatatttgagacatatttttgagactccatagctcatttggagaagtgagacagtcatgtttaaaatgttaaagcagcacaatagaatagtatgattttagagttgacgggatctttcagacagtgatcaagatcacagtgctagccagtactatgaagtacaaacttattaggagcagttgaacataaatgttatggaaactaaaaagaatggaactgtctgagcctggaagacagatcaggggaggcttcctagaggaggcaagttctgatgagcatgtgacagaaggggtttccaggtagcatgctgctgctgctgttttgtcactaagttgtatctgactcttttgcaacccccacggactgtagcccac

SEQ ID NO: 51377 - DNA, 993 bp, Bovine  19866881163144
  misc_feature (1)..(1): n is a, c, g, or t
ncacagttcactaagcacctgatttctgatcatcccctgccattgtcacatggaatccagacaacttgctgcagtacagaggtcacttctggaaagtctgtctgcttagaaaggccaggcccagcttctgacttaggcttcttttatttccttccccagcttccctgccaatggctcaacctccccctttgtctgcctttcaagaaactatagtcatttgggaaaacacacttgaaatggatttactttctagggttgaaaatttaatatgtttgatgtgataaatgtctcctttattaccattaaagcaaggaagggagggagagaataacaaaagtggaaatgagattttgaagtatcaagggtgaaacatttttaagcaaactgcaatagatcctgaggctttcaaaggttgattcctcagacaatttattgcagaagatttggcttctgagataattggtcttcttagtcctatgactctcctgagattgccagcttcccccatctggattcacaacatggacaggtgttttctgtctggaccaaattactttaagtgttacattcatggcctaatgtctatttaaatgcaacagatttttgctctgtgacctttaacatgtctaattccaattctgatagagatgggaataacacaattgagaaggtgcttgccctttgctgaatgatgtgtattgagatttgcaaacaaacaaacaaacaaaatccctatgctatgagcgagagagagagagagagcaagagagaaagagacaaatgcaggacctattctaataaattagatacttttatataagttgttaacctaagcttatttgtgtaaccctattcttttggctttcttacatttttcatatgccgagaggctgaaaatataaaagtggtcttggcctctctcaatatcctgctttgcttgctcctggttggtttacttccaccatggctcacctccctaaaggcaacacaaat

SEQ ID NO: 51378 - DNA, 1075 bp, Bovine  19866881310849
  misc_feature (1)..(1): n is a, c, g, or t
ntctctattttgaaccagcccattgttccacatctggttctaactgttgcttcttgacatgcacacaggtttctcaagagacagataaggtgatctagtattcccatctctttaagaattttccacagttttcacttatatgggatatttaaacaatcaagctcaaagaagcagtgaatacaattgtggctgctagggagtagggtatggggaaacagacagcttttcttcaatgaatataaagtttcagttatggtagttaaataagttctagagatctgcagttcaaagtggtgcctatagttatcaaaataatattgtgaacttcaaaatttaatacagtagatctcacgttaaatgttcctaccacataaaaggaagacaagaggaaactttaaatataccagtgattttaattgtgatgatactatcacaggtgtttgcatatgtctgattcattaaattgtaaacattaaatatgtacaaactttgtatgtcaattacacctcaataatactgttaaataataaagtcagggaataactgttttctaatatcctttgtaaaatttccaaattgcttcccataaatgtactaccagtttctatcagtgttaagtaggtgtccaaatgcaatgaatccttgccaatattgaggctttatttcttgaacaaactgatgggttaaaacaaataatatatccatttcaaaatttgctattgtttgaactttggtgagattttacatctttttaatatttaatcattccatataattatttatttgatctgtctgatcatatgtttgatcatttttatttggtcttgatattttcttattgatttgtataagttcaaagaataaaaatgaaaaaagtatttttccagtcatatttgttgtaaatgtttcctcaattaatctttttattttgtttctatattttgggcatacagaagctttaaaaacttgtggtcatattattgattttttcatttatttttttctttgcctttatgctttaaaatttcttattcaaagcattaagaaaaaaacctttatgttgtcttttttaaac

SEQ ID NO: 51379 - DNA, 664 bp, Bovine  19866881344667
  misc_feature (1)..(1): n is a, c, g, or t
ntgattttggagcccaagaaaataaagtctctcacaggtcattggcatgaaatttgttgcataaaaacaccaataaaaaaatagttaccattaacccaagaagtgtctctattttcctgatttaaagtagtctttgtaaaattgttccaggttactcttagaagctcaaaagagaaataagtgtttgtttgcttgtttgtggggaaatgtgtgtgtgatataggattttttttaaaaaaacacagctgcaagtgaagatttacctggttgtattggtgatatatcaaacctagccttgttgtttttgagaacccttctaaagagaatttctagaaagttgtagaacattagtctcatgacttggccaaggagttttcaaaatgaaaaaagaacatcagaaacctggaatgaggaagcagtagaagtgaaataggcagaaaagaggtttttgatgtcccatttcaaagatgtgtgaaataatcaggaatctccttctcaatgcagaaactttgaaaccaaagttgcacctcaagatggaagcaatattagagaaaatggggggcttccatgaattaccctattccaagacagcaaagattatctaaaaaactagtgaatagtaaagtttcttgccagtaaagactctgcaacttgtcattctttg

SEQ ID NO: 51380 - DNA, 1996 bp, Bovine  19866880501623
  misc_feature (1)..(1): n is a, c, g, or t
ntagggcttccctggtgggaagaacccacatgccaatgtgggagacataagatatgtgagttcgatccctgggtcaggaagatccccgggaggaggcaacccaccccaatattcttgcctggagaatcccacagacagaggagcctggccgggctacagtccatggggtcgcaaagaatctataaagtatttccttgtctttttgttcgtttgcacttatagttgtggtaacatcaaaagtgcactgaatttggagccaggagacctgcattttaatcctgactttgacactaattagttatatgtatttaagccacttcacttccataggcctcaaaaccatcaaaacctcaaaacctcaaaatcacatggattttgatccatgtgatcttttctacttaagtcagttctaccatttcagggttttatgattcagcttttacagtaatgccatgttccattaaagactttatattggctttccatatttttcaacctaaggccttaaatgactacttgcttccatttctccttatatgttgcctgttactgcttttcccatttcttcccctccattgtttctttacctccaggcaaagattatgagaaagagatatatcattgacaataaaacgggtttgttagggaaccattgaccgaaatcacccagcttggccatgcaagatgatagccacttgcttaagtgcctcacaacaagaggtctagagaaggaacatggttctgtcactggaaaaagtcaggagggggaaaaagagggaggacatgatcaacttcccatagtcctttgctctggaatccatcttggatgagagatgcttgtgtcaccaggaaggtgattggccagagacgacccagaaactaactccattaccataaaacctgagactgtcatccaaaaggcaaagcagttctcttggtttcccttacctggcttctctccacctgagtgccatttctcataaagtctcttcccttgtcagtatgtgcgtcaccctggacaattcatttctgagtgttagacaccagcccactatcaggtcctcaaaggggtaccctttccttcagtagccccttactaacctttttttctggcattgaaactaagagaactaatgcatgaaattgtaaaattataaaaattaaatcaaatttcataacataggcatagaatggtcttatttttgcaaaaccaaagatacacatacataataagtagatgtgttaggatttatgtaggatgtgatctaaaaagatatatacaaaactgctaaaaacaattagccctggaagagaaagtgtgaaatgaaagagtaatatcaataaaggcttaacttttaattataaacttccctatattaatttcttatcacaagcatgagttatttttataaaaaaatgctatcatttactaatattgattttcatttatataattttaagtgagtttgtagtttactgtatattgggtataaacttattaacaagaaagtgagctgaggtgaaaggatgtttattagtataaacataggaaattcattggagaaggcaatggcaacccactgcagtactcttgcctggaaaatcccatgggtggaagagcctggtagactgcagtccatggggtcactaagagtctgacacgactgagagacttcactttcacttttcactttcatgcattggagaaggaaatggcaacccactccagtgttcttgcctggagaatcccagggactggggagcctgatgggctgcggtctatgggtcacacagagtcggacacgactgaagcaacttagtagtagcagcagcagcaaattcctaagtataaccaatgagtgaatctaatttcatctctaacccaagcaggaactgatgctttcttctaaaagtaacttaagatttgcatctaggttaataaaactaattacagtaattaaatataataggaagaggaaacataagttgaactaaa

SEQ ID NO: 51381 - DNA, 1516 bp, Bovine  19866880632010
  misc_feature (1)..(1): n is a, c, g, or t
ntcttctaagtctggaaaagctaaagcctatattcctaagaacatgataaaaatctaaaacataaaagcaagtaaatgatattcttatgccagtctttgaaaagattttaaagtcagtcacccttttgttcccctcatcttaacacaacctatttaacttaaaatactcaattcagatttcaattatccagtcaacagataagtatttttaaaagactgcatacagatttaccttgttgtcagccaaaatctgtgaagttttctcataaactgctgactacagaataaatttcattatatataacttttatttaaacagaattaaataacagaatgatgagtgatattaaaactagttttgagatagataaaagcatataaaatatagacattatcatagttaacttttgtatcattctcaaaatataatcttatttctttcagaaattcgtacttatactaacagcaaaattttaatcagtatagactaatgatcagttagacaatgtaataaaattcacataccaaatttcaggtatggaaagattgcattaaatacattaaaataaagagaaaataagaatattctgaataagtattcagtagtttaatatatgagtgtccagtgcatgcctttcaataacagtgttttttctcataataaatttatggttagttaaattttgtcacttctactaatcctcagtttatttggggttgttcatcatacagttttatagaaatacttgtaaacagtactagattcctttttaatttatccaattagtgtggtttaatgtcaaagacatgaacagtcaagcaatgtatagtgatttatttctaaggtgttctgtagaaaatgatatttgaattttctattagccaaggtaatgaaaacaatctccaaaagctcctggtgatttttatgaaatgacacagtagagagaggtatttaatcatattcaataatacatttttcttttatttcataaagtatgatatttatcaagttcatacattttaggaactatgtgaactatatactagaataaatgtaaaagaggcagaaagcactgtggagtatacttggaagtactccttggaaagttttaaattcacctacagacccctctctgcatggaagtccttatttcctttgctcatgaagcttctttgcagctgacccagtggaatatcatggttttactttgccctttgtccccgaaaccaagtcatctatgaatagtccatgaagtcagcagggtaaggtcatttgcagacagagttgctgagttagaaaaataattatacaaatataaatacaaatatatatatatatatatatatatatattctaatttggataaatgatatattattataaaataattcatattctatattcccggtggtcactaacaatttccatacctgtgtgcatgtctttaagtctagtgcacctgtctttctttctgttctgctcctgtgatcatcgaaaccaattactccagtctcc

SEQ ID NO: 51382 - DNA, 829 bp, Bovine  19866880788182
  misc_feature (1)..(1): n is a, c, g, or t
nactttagagagggtagggtcacatggatcttgaaaatgtgataaaacttttatagtttctttcttttgaaaacacactgggtgcacacacacacacacacacacacacatataaactttgcacatcatcatacagttcaagcaaaccatgagactcctccgtggagcctaggttacatctaccttctgctcttgccactaatatctggtccattgaccaataccatgagcatgacttagcacttgttcgatatgcagaatctcaggccccatcttggatttcctgaatcaaaacctacattttaaaaagattcccaggtgatctgtgccatattcaggtaggaaaacccctgctctagaagaaagctatacaattaattttcatactcaatgaaaaaaaaaacactatcatatatcactagacaatttcaataacttcaaacatttttctgaatttttcccagatttttaccctgattcaaatcagctgggaattctcccaaagatatacctagaaataaatgaggaaggtagaacttaatcatagctgggaattaactcctttaattttaccacttttataaaataagtaacagtaaaatggtattaaacacttattatttggtacaagttataaagcttaaagaagtacactcttgtaagttaatgctagtaaggtatgatttacaaaggcatagaaatataatcaaaagagtcttcatatttctttaaaagtttaaacagccatgaaattccattacctagaaggttagacagaagtggcagtgtttaggtgtcccataaggaaagtgtcagttgtaataacaaa

SEQ ID NO: 51383 - DNA, 2082 bp, Bovine  19866880958299
  misc_feature (1)..(1): n is a, c, g, or t
naagacagaagtcagattgcatagcagccagaaggaatcaaaaacagactcagctgacccaaaggctacaaggccacaaatgtcaagttcttccctcagtgcctgctgctgtcaactacaaaacagtctttcctggcaaggacagcaggtcacatatctcagttattgctcaggaaataacctgtcagcacatcatctctgaacataaaggacaagataactgtcccaagttctgttagccaaaagtcccagtcctctgaggaagcagtactatggaacgtgggccattctcattaatattatctctaacagtctcttgctctagtaggaaatattttggaggcaataacattttgtagtattgtttttttttttttttccaaaatctttcctaatgtgatttatttctaaatttgtatataataaataaggaatatcaaatttgaatgattatcataatcaacactgatttttttttttaattttctcttttgtatttcaaccaaaatagaacataacagatgtagttccaaatccattaagagtatttttgggttatctgtagggaaattagcctaatattaaaaagagatttcaaaagatttataggaagaggcaagtaggcaaaatggccctgtcagggcatttcatgacttatatgggataaaggtaaaactgtgtgatttctattataatttctcagctgttactcaaattgattataaccataaaggaatttcatattctgattcaacaccatgttaaatgactatgcagtcttctaaacaaatgtatgaaattctgcttcctcttcctagtactagatttacataacaagatcttttttaaaattgtcatcacattttctgtttaatcctaaacgtgtttttttttttttttaatagctaaagttggaatttaaaaacaaaacaaaacctggtcacatcttttgattgattttggaaactagagggaattgcttaatacttttaatccaagggagaattatctggatggatttcaagaaaatcctaactccttaaatgtgacattttagaaaatgttggttaagtgtcatgctttttccccggctttaaaaagtcacaatccaacagggtttaaaaatttgataaacaaacacaaataacaaatagaaaagtagagctactcagggaagtgtgtgtgtgtgtgtgtgtatatatatatatatatatatatatatatatgtatgcatatgtttgtgtgtgtgtatgaatgtgtatatatagtggatgtgttaaactgaaagcaaaaaagaaacagacatgtctttcttgctccattgaaaattcatgcccaaaatattaatgactgtctttgatttattatttttgttgtctactttcttttgaaaactgacatttcaaattttgtctgttctgaacaagactcacagtgttatattatttcactgaatgaaaacattaacgaaatacaatgtgtgaacggaaacattctgtgcatttatgtgtgaacttttacaagaaaagatagtatggtagtagataaggggattggggtgaatctagttctatatatacatttgaaaggaaaataaaatcatttctttagattcatccttgaaatataaaataatttaaaataatttctggaaaaatgatggaaccataaacttggaaagaaacatcaaaaagtaggttcagaatataattaatcatatattttaaagaaggaattatgtaagagacaaattttaaatctatatcaaaatcaatatggttgaaagaaaaaaaaatcacatcatatcaatagatgcataaaaagcattggacaaaattctacacccattcatggtaaaaactctcagcaaactaggaatgtgataagaagcaagtcaaggatatctgctctcactactctattcaacattcatactgggaatcctaggtaacaaatgagacaaaaaaagaaaacttatggaaagggaaggaagaaacaaaactgtctttgtttgcaaacatgattattattgtagaaaatgccaaagaatttttaaaaattcttcaaatacaaagctaatat

SEQ ID NO: 51384 - DNA, 1006 bp, Bovine  19866880996023
  misc_feature (1)..(1): n is a, c, g, or t
naccggggagcctggtgggcttctgtctatgggatcacacagagtcggacgtgactgaagtgaattagcagcagcagcagcagcaagcttttgaacaagggatcatgacttttgtgtactcagttacttaccaaaaccatccttgaactacatcggttgaaagatcccactgaacctaatttcactaatagttccagcaaatccctgtaaagggtagccaccgggccttcaaattcagaaacatttgtgggcaaagtccttcccacagtagcagtctgagacaggtctctgaatacaagcgcttctgttgctgcaggattttgaagtaagattgtgaattgaagaaagcagcctctagagcttctgactgaaaaagctgttttctttccaaagagacttgactttgaatagaacccaggtctagtggaaaaggctgaggatacttccttatcttgccattttaagttattggaaatataaacttgtaaaaaaaaaaagtgccaaaaaactgaaatctcctatgtgtactgggtaatgcaaaggctagtttgacctttttgatacagttagatactaagaaaggtatgtggcataatctaaagtgtcactgttagtaacatccttattaataaaaataatatgttctgacacattggagaaattttattgtcaaggaaggaaatgatgtagaggacttaagggtagatttccaaaaatcattaagaagggctgacacattcccaaatctggaaaatataaaataggaaactgttaagctgatactaaatgcaggatatattataaatagaggaaatgaattggcatgggttaaagggaaggagttattgggagaggaagtgaaggatctggacctgctgtgtggatattcatcatgcaaagatgttgtagagttcttgtatcttcttaaaccctagaactcctattatcagctacagatgcatgttcttccaggcaaataagacattatctagaaagagaattagat

SEQ ID NO: 51385 - DNA, 1674 bp, Bovine  19866881258929
  misc_feature (1)..(1): n is a, c, g, or t
naaatgagtcgccagtccaggttcgatgcatgatactggatgcttggagctagtgcactgggccaaccccagagggagggtatggggagggaggagggaggagggttcaggaatggggaacaccatggatacctgtggcggattcattttgatatttggcaaaactaatacaatttgtaaagtttaaaaataaaataaaattaaaaaaaaaagttcacaacatttagacttccgaaagaattaagtgataaggaagatgtaaattactgctttctttaccttatgagcaatttggtaggggagatggctcagtggtaaagaatctgcctgcaacgcaggagacacaggttcagtccctgggttgggaagatcccctggcaacccattccagtattcttgcctggagaatcccatggacagaggagcctggtgggctgcagtccatagagttgcacaccagtgaagtaactgagcacgtatgcatacagatgaatatattttagaaggacttttacagctcttaaagttttagaagagtgttaagggctctggcactgcattgcttttttgcaaaccatctgcctgttttggtctgtctttcattgtggttttgcaaaagaagtgatagtggtattataaggttactttatatagtctagcgcactgaatgattattagttgaaggagaaaacatgcttaggttagaacattagtttcctattttataactgtatcaccattgatcttttaattgttccagatgaatattttgtctccttgcctcattcttttctccctattcttagtaaatttgatctagcaattagtagtattttcattgtatttccttgaagatctgtgcttttcagcacaatttagtatgttcacagtggttttcaattgctttttcaacacaagacataaaaaccttttcatgcaaacaagaatatggaagggataaacccaactgcttaggccagatggtgaaaaatcagatgacagggaaaaaaatcagacagccattcaactcctatttttcttccatcttctttgtcaatgaaaaggatctttaaactagatggggtgtagcaaacatgtttaaagggatcgaagaattggtaatataataaaagtacctggctgcattgcgccaagtacttttttaaaattgcatcacgcctctaggctagacgaatcacatccccaaattctgagggaactgacagatgttgatgtagcactactttgagtaattttttgcaaaaccactgggaataacaataatgctagagaactgaagaggggaaaatgcacttccagttatcagacatgaggaaagcataggtagttactgtcatttattgttgaactggcaattttccaaagcagaattgtaaacaatttataattctatatgataaagaaggtgaattcactaagatccaagcttctacgtcaagggtatattcttctctttgtgttgctagagatgaaaagaattacgcagaaatggatggtgcacagggatttacgagatatttagtatactcatgatttccttgtgggaaacactgagaaaggtggaaaatgggggtttgttgtttcatagtcagtactaattaacaagtcaatttctgtttggggagaggaggctaataattgtaaacaaactgg

SEQ ID NO: 51386 - DNA, 960 bp, Bovine  19866881304514
  misc_feature (1)..(1): n is a, c, g, or t
nctgggcccctgggaattccatttgggtgtgtgtggacaatgtattcttgtgttttaaagattcagccttgtagcacttctgtgtccataattcttattgacttcagtgagtattatgcatccataagagctatgagatggattattagcaaactgataatagcccagtatatgctgccatgatttggggggaaagaaatcttttgtgaattgtgctttcatactgaaataaatgaagaaatgcattgaggaaaaagggtaactgaattaattactaatatgtaattatgttgagaaagctctatcagattaacatttgattttacatgttatttttagggacaatttctgggatgataactccttcagattatatagttcagcattggccctgagatttattgatatgatataacttccattatcataaagctatgctaatcaactttctctgtgactcctagtggtctccttgctaaatccagtgactatttttgaatacttgcttccttagtctttccattgccattctcttcctatatttttctgacaccatgatctgattgtgtttatccaacactctgtctatgtcttttcagacttctttgcagcagcatccttctctgcccagccattatttattgagtccctcaaagtttatttcttgacccttttctcactctgctttctcccaacagacctgataaatggtcatggctttcattactgccaataaatagagatatatacctttatatttcctaaggaaatcttcctctgatttattcaccaactttattcacaaaaatttattgaagacctattctttgtgaggcactgtgtacacaccaaagatgcaatagggggcaaaaagataaacagcatctgttctcaggggaacaagtaacacctggtggaggagatatgcttaatgaaataattaaataggataatttcaat

SEQ ID NO: 51387 - DNA, 2850 bp, Bovine  19866881371061
  misc_feature (1)..(1): n is a, c, g, or t
nccttatcctcacctctcccttcatagttttgcccttaaaatgaaatgaaacacagtttcgaaggtttctacctatattattaatatttattattaatagcaatgcctctgcattgaattgacactttgaactctattttattaccgaaatgacttttataccacctccacctgctatggctcataatatcttactgaagtacttttggacatcacataggatatgggtgattcacaacccataagcaattgtcagtgcagataatagctgactgcacaagctaatttatttgagatctctaaagaaatctcgtttaatatccggaagttcattccttagaactcaacaagatgccaacacctaccatcaaagttcatgttctgcaaataatgatgtcttattataatttttgaataaatatgtcctgcttattaattaaaattgttctgtgcacaaaacatataattattatgtttcctgtcagctaatgatgagtcagagtactgagatgattacttttgagattaattatttttaaatattgcaggttatacctactcattatacttcatctacagacttctactgtatttgagtaaattttagataaattctctcatagaatatgatgctatttttgaatgggccatcattattcactaactgtactaaattttgtctcggtgaaggaaagtagaagatgataaagaagacaaaaagtgcaaagcaaaaggctggaaagcctaaggaatattgtcctgaatgttctgtgtctcaacatctccaggctacctcctgtgaacctagcaaagcatcagtggggcttctctcccttctgacttttggttgggcaaggccattgggaggccctagtagaggactggagggtgggagaaaatgaggtctgcgttttcttttctggtttcctcctgacagagctttatcagaggctgtgtttctttccaaggccatgattcctgaaggccttgttatagatgcagttccccctgctccttattccttcaggtcacagaggaggcaacgtcttcctctacttcctccacaaatcatcaggaatcttatgattcctagcggaatcatctcccacattgatttcttttacctctgtcccatgtctatattctgtcatccccccctctctctttggtcaccatttctgagagttccatctgtttctgctagtgtttgattgttacaggtaaaagagcacaaagaagaagccaagtgtgcagccagcacttgctggcttgaagcttcttttggtacttcctaagctgtgtgacctcaaggcaaatcgcttactctgcttgggcttactttagaactgtgcagtgaagggcagttgaaccagattctgggctctaaaaattctattctctgtatgcagctcaagttatagaaacggccatccctatgatatgccactaacaaattctttagtcatgtccaaaggagtggggggcagggacagccatagtggaattgatgttagcacttagtaatgttgtccatgaactgagggaaaataattcatacactgaaatcgctgtgttcagatgtttctccaagtgattttatttaatttttttttttacatatgatggtgaaagtgttagtcactcagttgtgtctgagtgtttgcaaccccagggactgtagcccaccaggctcctttgtccgtggaattctccaggcaagaatactagaatgggcagccatttccttttccaggagatcttcctgacccaggaatcgaacccaggtctccttcattgcaggcagaatctttactgtctgagccactagggaagcaatatcatcaaaatagagatatattccttgttaggtctgctggagtgactctatctattgccaggttagtctctggttttaagtgaagcactgtcaaccattacttagggaccagttcgatacagaagatcatttttgggtcccagcttttcttttgtttagaaagaatgtttggtgaagcatcacttttctgactaacacgtgtacgctctttcattggatcctatttactgccttcttctccttgattgcatcattgcaagtgaaggaaaatagagtggcaaatggaagcagagccacgatgatcactgggaatgggaagtacagggatatctcatttcactgcactttgctttattgtgcttcaaagatactgtgttttacaaattgaaggttcctggcaagcttgcattgagcaagtctatgggtgcaattttccaacagcactatctttcaattaaagtatacattttttagacacaatgctatcactcttaatagataacagtgtattataaatataactttatatgcacgaggaaactgaaagatgtatgtgactcactttattgcaatgttaattttattgtggtggtctgaaaccacacctgcaatatctctaaggtatgcctatataaacatttgaagaatctgtatatttttgtatggttatttcaatggatggtatagcagctgtgtcagttactatgttttcagggccctggtttttaatcagcagagcaaatggaaattttactgatgtaacctgtaaaggctgtggtggggccctgagtccttgagccaaaaacataaatgatcaaccaagatggagagaagccaactccaagataaggataacaatattgattatagtttagttgcagtgatctaaaagagagatgcaagaaagcaatacctcagtaaaatgctaggatgataactttttaaggagtaactaccttttgctgttaagagggaatggtgtcttacctgcaaagtgaaagtgttattccgtt

SEQ ID NO: 51388 - DNA, 1513 bp, Bovine  19866881975793
  misc_feature (1)..(1): n is a, c, g, or t
ntttggaggattgtgaatcactgagtccatcagctagtagagacctatcaaggaaactggctggtgtttgaccaatgtataaatgataaataaaccatcattaagataagctactgagatttgggagttatgttatggcaggtagcatcgttactctaatacacataacaaatttaatttatttgtattactaatttgcaataaaacactgattcttgagcacttgacaatgtgttgaatatgttgcttagtgctgtgaatatattatcccatttaaactcagatcaaccttattactaggcaggtatatttgtttttcctgttttacatatgcaaatccaaaacttaaagacctgattcactcagagtcacaaagatattccaaagaaagagaaattccttgaagatagagcactatgaggcaaacctaaagtaaggttatcttctaagagttaaattagcaaaattcatttgtgaggttagtcatctataaatgcattgtcgatgtaaatttttgttgaacaggtactctgaacttattcccaaaccactaattttagtgataatagaggatgcatgggcaaaaatccttggttttatttttttacattttatagtacacaggccactatgtcctgattaaaatgtattttacagccatttcttagggttagaaataatttttgttatggtatctttccatattttatgactttaattaaatttctgatttctgttctgaacactgcaatataatacagtacaaaacacaatttaatcattaaatttgtggatcattttgtgattttcttcaaagcctatagcaccgagggactgataatagaagaataatgcgcactaaaatacactcccggaagttccacaaactccatcctcaaggacttttctttctcccacaacctaatagcaaatgcacacaatcaaaaagtctcatcaggactattcctcaattgtcatcatctttaaaaaggaatctggtcaggggcacaaggtaatataaaggatattttaaaacaactacatatactctacaaaggctctactgagacaaataacattgacacagacatgcatgtgcatttgtggtcacattagtggtcacagaatacaatatttagtaaaaatccttgcaaacttattaaactaaaggtaaagtaaatttctttgtgaaaatatttctcaaggtagtttcctattatccatcactttttataatataaaatattacaaaacaaagtaacatttctcttgcccttgtttctgtgaggtgcagtgatgatatttgaaacaaatgtcaaatttggcaaccaaatccatcacttcatttaattgtgaaaatgtctaacatcttattttagtttaaatttctaaaaattccttgttttatatagtctacatccttgtacgtgcagtcacacaatagataaaccatgtaagtttatatgacatttgtcatgataaacataaacttgagtaagaagatagaggctgg

SEQ ID NO: 51389 - DNA, 1469 bp, Bovine  19866880353892
  misc_feature (1)..(1): n is a, c, g, or t
nttcagatggtttgttctttaattcaagccaacccttaggagcaaatgccatttgcaacggtttggttcagcctggcctcggcagctttctgggttgtttaatgtcctgccaaatgtaatcactgaatggacaagacacttgcttcgggtccttctgtaaatggtgtgtctgcaaacacagcctccaggagccaccatctggtgttcacatatttcttctccatggctccccaagctgctggggtctttagcgagcctttaaagtgccatgttggactttcaggagcacccatgcccctgatcaggctcccaaatcccagacctgcccattccaaccagcccatcaaccaccacatggtccccattcaacagtgcctggtggtggaaggacctggcttgattctccacacttcacaccacagaatctcggggagaatgtagctgtactatagtacgtgtgcatgctaacagggacttctggacctgattctgtggaaatcgctctaagggagctggagaggccgcctctttaacaaggttggcatggaggagagaacagttggtagtgagaaggtgcaggatttacatggaaagtgaaagtgaaagttgctcagtcatgtccaactctttgtgaccccatggactgtccatggaattctccaggccagaatactggagtgggtagcctttcccttctccaggggatcttcccaacccaaggattgaacccaggtcttccgcattgctggcagattctttactggctaagccacaagggaagagttacaaaatttagctcaacatcagggaaaatcccccaaaccaacagatcagccgccaaactcaggaatgcagggcgaagagcaggaccccagggatgcatgtccctgtagcgagttcatcctccccaggcgggtgacatggggcaagtcagttctcacccctgagctgcctcctcctcctgatgatggaggtgacgtcacagctccaggaaggatgcccgggatgtggcttcactcctttgttcaaagcagggcaatgtctttagcaacaaagcactactgctttctgaggatcagcaggggattaagagcccagagatttataaatgtcatggctccgtctgcccggcaggaaagaacctgggactgaaatgttgcctctacagacacggcaggatctgtacccatacgtgtttgccagcaaggactcccggggggaaaatatttgactcaaactcagagtcacttcagacagaaaatgaggcaatgaaggagctcgtctgaaataagtagtgatgaaagcgaacattgatgatgcccctcatacacgctgggcctggagcccttaataaacattatatcatttatatcatccattcgacaaatatttatggagggctggctaggtgccaggaatcatctgcagagggagccacaaacaacatagacaaatatcgctacctttgg

SEQ ID NO: 51390 - DNA, 2597 bp, Bovine  19866880386548
  misc_feature (1)..(1): n is a, c, g, or t
nctcctgccttcatccattcattgagcatttcagtgttgactgtcccaagaactgtgtgggggcaccgaggtcccagaatagagtaaacaaagaaatagacaattggaaggcaggatggaaaataatgaacgtactcaagacacttcctatgggccaggcaccatggatattagctcacttcatcctcctatgtgtgtgtgtgtgcatgtgtgtttgtgtgtgctcagctgcttcagtcattccgactctctgcaatcctatgaactgtagcctgccagactcctctgtccatggaactatcccagcaagaatactggagtgagttgccatttcctccttcaggggatcttcctgatccagggatcaacccccttttcttgcattgcaggcagactctttacccactgagccacttacatcatggccacagatctctatttctcagttcttcctatttggtgtagaattattattgtcttcttacaggtgaatgaatcggggttcagatgtgctaagaaacttgatcacaaagcacggaagtagcacagcaagatgtcaaacccagagagtctgatttaaagtgtattgtcctaaacatgactttggatgattagtgcatgtgtaatctattgttgcaggggagggtgctggtaaactatctctcaaaaaaaaaaaaaaaaacaagaaaaagaaggcagcgtttgcaaatacccaaggtataaatgctcccaccatgactgatttgaagttagtataagtactgatgcatgagcttcctgaaattttaaataattggttcttgtgaactagtacaaattaggccccaacaaaggactgaaggtaagcatgaaatactggtagatccagaggagatctactagcttcccacgtggcactagtggtaaagaatccacctgccaatgcaggagatgtaagaggcacaggttcgatccctgggccggaaaaatcctctagagatggatgtggctccagtattcttgctggaaaatcccatgagcaaaggagtctggtgggctgctgtccatggggctgcaatgagtcagacatgactgagcacatatcagaagagaagcctgcctaacatagctctcaggatttcattgcaaaattcaagaggaatgagcccccaactccttttttgaggtacctagagcagtccttttttttttcttttttaaataactttttcatacttttttttttctaaatttttggccatgacataagcatgcaggatcttacttctccattcagggattgaagaaccctagccctctgctttggaagcatgaactcttaaccaccagaccaccatggaagtcccagcccgttccttatgtgaagacaaaatgttctcaatgtttccttagattctctgagatggtgcagtatccttccaacgaattgttttttgcccaagatgattcagcttgagctttgttattgaaaaaccaaagagtcttcttattaagaaatgcagagggaccaacccacttaggtcttttgttactggaatcgggaaaatggtcttccatggagcagcagccagtgtattgacgtcaattcaatgtggcttccatggagagacacgcttttctgataattcagggacttgtattcccagaacaatagaaattgtcactctaccaaaggacaacctagcagcatgatcctcgggtgcacttaagcatgtgtttatacaccattaactacttggcagagagaccgagggaacattatgaccacaaataacataaactgatgtcggcaaagctggtgccagtgaaagagataccggtgatgaagatgaattatctccaaaattacaacagagcccaacagtaaagtacaattcaatttcaaagggaaaaggccttacaaacattgcacagattcagcaagagaggaaagtgggaaataaatgtctattccgagggccacctgaactttgcagtcaggtggatctgagcttttctctctgctgttttccacctctgtgaccttgaagaaggtactttccatcctgaagcttcagattccgtttttatgtgtgcttagttgctcagtcatatccaactctttgtgaccccatgaactgtaccccgccaggctcctctgtccatggggattctccatgctagaatactggagtgggttgccgtgctctcctccagggcatcttcccaacccagggattgaacccagatgagataaatgattcaaaatgtctccaagaaataaatgcagaatacgtggatcatttagtgtcattctagcccataattcatattgttatactgttcatggggttctcaaggcaagaatgctgaagtggtttgccattcccttctccagtggaccacattttgtcagaactctccaccatgacccacccgtcttgggtggccctacacagcaaggctcatggtttcattgagttagacaaggctgtggtccgtgtattagattggttagctttctgcgattgtgtttttcagtctgtatgccctctgatggagaaggataagaggcttatgggaagtttcctgatgggagagattgactgagggggaaa

SEQ ID NO: 51391 - DNA, 1775 bp, Bovine  19866880480115
  misc_feature (1)..(1): n is a, c, g, or t
naacatgatgaggcatggagatgccagagacgggaacccacacacgcgtaactcagcttttctctgaacatgccttctggaaaagatgagaagagattctccaggggctacatacttgagggctatgcagagaatgtagttcctcagctatcttgtttggttcaccagtttattaatgatattttaaatttgttaccaacacttgaaaattgggagatttggggcttccctggtggtccagtgtttaagaatccacctgccaatgcagaggacatgggttcaatccctggtctgggaagactgcacatgtcgttcaatatctaagtgcgtgagctacaactcctgaagcacaagtgcctagagcccatgctctggaacaagagaaaccctcttgcaccgtaggagtaaaactagtaaaaactctctagcaccgcagctagagagtaccctcactgcttgccacaatgagaaaaagcttgtgtgcagacatgaagacatagtgcagccaaaaataaagaaataaacagataaatgaaaatcgggagatttccttaagaagtctagattcctggcttctctggaaaattcagaagctctagtaactctgggtcagaattcctgctggcaggaattactgactagctgctgaccctctagacagatgggctaggccccccttacttcgcctttacgtctgccgggggctctgccaagagttattaccaaccttggtccctgtaggcatttgagtttgatactctctgtgttgttcctttgcttctgactgccagctacatattccaggctgtttttctcactgggcatttggcacctcggccagcctgcttctcagcatctccaggtgattgcttcacacctaacccaggctgtatctgacatggctcatctgcctgttgtggcaagcactgctggttttgtttttgcccaacaaacatttcctccccgcctttgttcttctgaaggaaaaggcagtatgttcagccttggaggatgaatcacagttggtctaggttatctgtggaaattccaattcatttccaaaactgcctgggttttgtcgtggacacgtgacccagttctggccaatgacatctaaggagtagctctactgggagtttctggcaaaacgttttctccctcataaaagaagaattccttccttttggaaaactgccatgtgaagatgtgatactttgagttgtggcagccattttgtgaccatgaggcaagacctaattctctcactgagaataacagaagacaggaagatccagggaccctcatgatatcactgagctgctgctagttttctttactatgagtgtattttgcaagccacaaatgcacttatgttgcaagatgtgttggcattttaaaaacaattaattgaagttgaacacatttctaaaccatatatctctctcaccaggtggatagtaagctccaaaaaggcaggattgcatctgtttgttctctagtgtatatatgtatgtgtatatatatatatatacatacatacatacatatatatacaaggcttagcacagtgtctggcacatagctgctgctgctgctaagtcacttcagtcgtgtccgactctgtgcaactccatagacggcagcccaccaggctctcacatccctgggattctccaggcaagaacactggagtgggttgccatttccttctccaatgcagaaagggaaaagtgaagtcgctcagtcgttcagtcgtgtcagattcttagcgaccc

SEQ ID NO: 51392 - DNA, 1132 bp, Bovine  19866880480220
  misc_feature (1)..(1): n is a, c, g, or t
ntgtaaaatgggttccattctcctcttctgcttagggttatttcgaggcatcagttagatggtccaaatgaagaaagctcttaatggtaaagctccgaggactcagcggttgctgctgctaaccatcccccaaccctcaaatttatatccctttgcaaaagctgaaacccaaggggaactgtgatctcgcagctttcatggccagaaccggcctccaggtactaggttctaaaaagatgcccaacttcctgggaactacacgtccctcctccctcttgggagtccaaattccaagaaatgtagctaaaattggctctcgaacagcttttgcagagcacgtcgcagttttttttttggtctagagagccagtttccatgatgaaagtggcacagaaggagagacccagctaaaaacagccaccgccccgactggtgttaacaggatgcagcctccctaagtcgcttcgggggtttggacgcttcgacttccgcagcagctctccccatcaccactaggtggcagcatggcagcgcgctgccgggaccgcgccccccgggaccgtaacaaagagccgcttctgaaaaggatgcccgtaaaatacgcaccagtcaccaaattctccactaaattatctcccttttatttgggggatttatttgtattgcaggagctttgcggaggtatctcttctcagaatcgtctaagcgcaggtgccccagcccccagcccactggatttggcattccttatgccttgcgtccagcgtcgtaatggaaaaacttgctttagtttagaattttccagggtaagtttggcctcgatctatggagagtgcactagcctgggactcatggtccagccttgagggaccgcttgcttccccttctgagctgatgggatggagttttggctccagagtttggctccctgtattcacgtcattaaatcatatgggggacgggccattagtggaaacccctcctggcccacagcgaggaatggatgagtcacagatgagaatttctcatcacaaggactcccatctttgctgcttttgctcttttctcagtatcaccggcgtctggcatatgattagccacccaacaaatagcgacttaaagggcgtcacgg

SEQ ID NO: 51393 - DNA, 1103 bp, Bovine  19866880483029
  misc_feature (1)..(1): n is a, c, g, or t
ngttggggggaaaaaaatcctcaaaggattgggaaatagaccatgatgtaaaaaagcttttgtgtttggtttggtttttgacttgtgaagagtactttggatagttcagggtaaaaaatgtatcagggaggaaagtagagagaattcctgtggagtcccaagtgcctctgtgttgtggttagccaaaaagaatgcgtcaggtgcctggaaagaaaaggggacgatgagacagcaaaaggatttaaggtgtatttcagaaagatggtggggtggagaaggggcttatttttttctctgtccatcctgttcttgtgcatttctgaaacactggggtctccgttcatcccaagaacgtgccttggttcagcacctgaatttggaaatatcaaaatgtatctacattgcatgtagactgtattctgggtacgtcctagaatgcgatcctcaaaatagcctggggatctaagtaggattgctctccttttacagataagaaaactgattcaggttggtttcagcctcattcagccacaagaatctgctaataaatgtgtattgttaggcatagtcttgaagtgcctgatctcctccgggggagggggtcagaatagaagtctggaaaagagatgtgttgttttgaggtccccggggctctgtcttgagtttccgcctctgtggtgaggaaggtgatgagtgtctgttttggggtgtgttgagaactcccaggatcccacctctgttcattggcccctcctgagacttgaacgctatctgtgtctctcccctgtatgcttgcactcagcacttacttttttggttcctggggagttattttctctacttagcatgtgcctaatattaaatatccccttcctaatatctcttctttttcttagtagacatcagggataattccattaacatatgcaaataatatgctctcacatgtgtgcgggcacacatgcccacacacacacacacacacacacacacacacacacacacacacactgccttgtggccccattaaagccttcctacgcatgccagcccattttcagaaagaggatactgcttgcaagtgactgtcccttctgttgatt

SEQ ID NO: 51394 - DNA, 1304 bp, Bovine  19866880509928
  misc_feature (1)..(1): n is a, c, g, or t
natggtaaacgacaacagatactctcgttagagcagaattagtgcaggttttacattcaagaggtcacaaaacagcctggctggtgacactcgggcctaattatcgtgcctaataattaccttgactaactagagcaaaggttttggagtatgtttctattcccagacattgagtcatcaatgacccagaagaaatcatttcgctctatttgcatcttggatcatccacttggaaacacccttggccaacccctcagggaaattccaaaggctttgttaattaatatttggaaacagtgtaatttgtatacgttgggactgtagaaatatgacatcagtatgttttgtatcggagaaggcaatggcaagccactccagtactgttgcctagaaaatcccatggatggaggagcctggtgggctgcagttcatggggtcgctacgagtcggacacgacagagcgacttcactttcacttttcactttcacacaatggagagggaaatggcaacccactccagtgttcttgcctggagaatcccagggacggagcctggtgggctgctgcctatggaatcgcagagtcgtacacgactgaagcgacgtagcaacagcgtgttttgtatggtgggttcatttattttattactcagctatgctccaggggtacttaatatttattaagctcctattctgagccaggccctgaagtaggaactaggagtgcagtagtgaacaagaggaacccctgtcctcatgcagctgagagtctagtggtcaagacagacgatacatcagtgaagcaataaataaaataatcacaaactgttaagcgctatgaagaaagctaatagaattctgccagatagcagcaggaggcacccacttgttttaagctttatgtgtttattttattttttgactgctctgggtcttagttgctgcacgaaggctttctcttgctgcagtgaccaggggccgctcttaactgcagtgcatggtggcttcactgttgcagcctctatggtgcacaggctcagtagctgtggcgatcaggcttggttgcccaccccatacagtccctcaggggagcccaagggaaagagtccccaaagtccatcatggtaccctgcccattaatgcaccctgtactcattcttctcccttcctcgtctcacttcgctccctcttagaacttggtggaatcagctctcagggctgggatggggcacacgacgtgtctagagtataaaacgtaaggatgcacttaaactgattgagggataaacacgtatggtctgtcc

SEQ ID NO: 51395 - DNA, 2820 bp, Bovine  19866880541576
  misc_feature (1)..(1): n is a, c, g, or t
ncttgtaagataagtgcttaatcctacaaagtacaagagcactgtccatttacagggatccctcaaaaccatctccccacctacccccctcctggaaattacatttagatattgaatcagaactgtgactaaatttaccactacttacagctgcatgtactgtgacactaccttgctaattttattgattctatttaaagtgctcaattattaatatagctgcattcttttctctgaagaccacaccctgaaaagaaggaagaatgtgaggatctgcagagctcatccacactttccttgaatcagctaaacaaagaataatgctgctacacaaccaaattccacaaaccacaattaaccactcctcaggtaaaagaggatggtaaaaggggatgtatttcattttacagaaataggataaaaaataaaactaaggctggactgacaatctaacatttgcaataatgcaagaatttcatgtttgtttaaaaaggaactcaatgtctttcatcaagttttctgaacaaagaaaaactagtacactgttaaaacattttcaaatcaagtaaattagggattatttcagagttcagcttctgagtccattcttttctaagaattaacactaaagaaaactgccagctatagtcctaagaagatatattccaggagcacaccaacagcaccaaaatcatagaacattcatatctgtgtatgccctagtcaaagagcctggcacataaaaaggacttaaactaaaaagtaactgctaaaactgagtggatacactgtgacacctccacacaacagaacactagtcaggaaggagtggggaggagggagcactgcactgtttgttaatatcaacaatgtgaactcaaagaagcatctcagaaacattatggcaagtggaagaagccagtcacagagggctccacgctatacggttctatttgctaaattaaagaaaggtaaaaaccatacctacaacaatcaaatcagtacttgccaggggcaagggtgaggggatagatatatcctgtttactaacaaagtggttgtcaaattcaacttatacattttaaaagaatgatctttatgtaaattatactcccagaaactggaattttccaagtattatttcaaaatttcctgtttgggtgaaacctaaagtaattccagagaacgttcaaaaccctcaaataataatggatgctaaaagtcaaaatttaagcaaatcagttacataaaatcaaagttgaccactgggacaccatttaatcatttcccttttttcagtaagcctggactattagttcatcattccctgaaactaacactccattcatcactttattcttacattctctaattaccatccccaaaaactgcaagatcaacccaggaaatccaaaataaaggacattttcccctaaagactactatcttaatttgctcattcttacacaagaataaaaatctgaaaatcaagtctgctccacagccagtttcaacctattttgataattttgaaatgcacaaagttttattgcaattatcagtttttagccgtttaaaagcatttaattacatttttactaagattaaccctcaaattcagtttctttttccacagaaaccttgccaaaaatcaaaaccaaatttccaaatcttcaaaaatcgagtaatacacaaaatctaaacccactgttactgagagtgcaatgggcaagaatattcaggcacgtatgggggagggggggcgggattaactgcataaaggcactaccaaaaaacacaaatcaactcaaactgatcagatttcctacctacagtgagatgtcaaatagaaggtagacctgaaaacaaatatttgatgcagttgccagggaataacaccatgttcacgtgagcacagattattccaactagtttccaatgcacttaaatgcagggcctacaggaaactgccttccacgagatccttttccaaaaacaagtgtccctcccacctctgtccttgagacaaactcttcttccccagatgcccaaacagcacgtctggccggctggagtgctgggcctctcaacttgggcactactgccatctgggacctgggatagggattggtaggcggtctcacgcgcagcaagcctatcagtgatgacattagcgtgtcccttgcaggcgtgctcagtcgtgtccgactctctgcggctctatggctcctgccagggtcttctgtgcatgaggattttccaggcaagaatactggagtgacttgccatttccttctccagatcttcctgacccaggaattgaagccgagtctcctacatctaaccactgagccatcggggaagccccctaaagtaccccaaacaccgacaaatgcgggcgagggggccaaacgaccccagatgagaccccgttatctggaggtgacatcacaccagcggaatcctccagttgcaagctactgacacttaagtggctggattccggggcaggaaacacttcggcgatcgagatcgaggcggcccttgcactcagagcacccgacagaaacccggacgcaggctaccctcctcccgcccccagccagcggcgtggccgcaggttctctttacctttgtagaggttcgtgacggcggtggctgcgttttggaagggaacccacagagaaagtcctggttgctgacacacccggtctgaaaaacgacgaaaggaagagggaagacaaaaaaaatagaaacacacacagagaaacacacaaagacagagagaaaaagaacaagcgatgaaacttgggcgtcgat

SEQ ID NO: 51396 - DNA, 2259 bp, Bovine  19866880548594
  misc_feature (1)..(1): n is a, c, g, or t
ntgcataatagaagacaagatgtaattaagtgctaaatgttgggctgtggactggaagcaattggatgaagttgcaaagaggccaatttcagctcagtgcaaagcagaactttctggtggatggacctgctccttaaagatagggcaaattggtggtagcacatcaaaaacaacaataatagcagtaataggagtaataataatcatctgcctgccaatgcaggatacacgggttcgatccctggtccgggaagatcccatatgccaaggagcaattaagcccatgaactacaactggagagtaacccccacttactataacgagagaaaagcctgagcagcagtgaagacccagcacagccaaaaataaatcattttttataaaaggcttttacacagtaatggcaccgtggctttatttccttttaaaatttatttttattgaagtatagttaatttacgatgtagtgttaatttctgctgcgcagcaaagtgattcagctacacaaatatatattccttttttatattcgtttccattatggtttatcataagacagtgcatgtattctcctacgctatacagtgtcgtgtatccattctacatataaaagctgacacctgctaacccccacctcccgctccctcctcgccccgccccccgcccccttggaaaccaccattctctatggaaaccagtccatagaacggaatccatgcgctggtgcaccaatgcatgaaatggaagccagtccattctctaagaccatgagtcagaggctttatttccaagaatcccaagctggaaacaacccaaatgtccactgaccagagaatgaatggagaagaaaaataaactgtgatatgttcatataatgggatactgctgctgctgctaagtcgcgtcagtcgtgtccaactgtgcaacaccatagatggcagcccaccaggctcccccgtccccgggattctccaggcaagaacactagaatgggttgccatttccttctccaatgcatgaaagtgaaaagtgaaagtgaagtagctcagtcgtgtccaactcttagcgaccccatggactatagcccatcagcctcctccgtccatgggattctccaggcacaagtgctggagtgaggtgccattgccttctccgaatgggatatcaggtagcaatgaaaaaaaagaacaaaacactgattcacacaacaacatggatgactctcaggggcagtgttgagtgaaagaagccagatgcagaacaatacctactgtttggttccatttatactaactttcgggcagaattaacccgtgatgagaaaggtcagaacagttttacctctaaggaggtattatccaaggaggaacctaagggacccagctggaagctgggatcattttatatcccaatctggattttggctacacattgtattttatgtaaattttctccaagtgtaatgtttcagaatctttatttgataggatgaaaaattttggaaaaggtagtaatgatggtgatacaacatcacgacggcaatttaatggcagtgacgtctacaatttaaaataatgaggacgagaaattcaagatgtatatactttcctacaacaaaaaatttccaaaaaaataatcaagctgtacacttaagatgtgtgccctttactgtatgttatgtctttacacataaataggggggaaaaaaactgtcaaggactatttcacaatgtctacatgatacagctgtgatgggcacatttctttttttctgtttttctttaggaagacacatcctcaatgttatgtcatggcttctgtgactgaacacaggtagagaggtctgattcacttccttcttcattctccttctccaaggattctttctcttttttagatctcttttgtttaacgttcagtgaatcatcttcctctgttgtctgggtgaaggtttggcagcccttatatgaaagaaggtatcattggactcaagggaagatctgaaaatctgttgtacagacgaatcctttccctccaacacataaccttcccctaccccaatgcatttttggttggctggctggagaagatgtttataaaaagggcacaattaacatggcagctgcctttgttccatgcaaataaaaacagcagagaaaacagacatataattacttgggcttttttggtgcttgaatggtactactgctgatattagtaaagaacatgccaccgaattgtactctgagtgtgggggg

SEQ ID NO: 51397 - DNA, 2232 bp, Bovine  19866880709125
  misc_feature (1)..(1): n is a, c, g, or t
nacccagtgactctgatgcacattgaagtgtgagaatcactgcctagaaagtagtgttattattaccactttgcaatgaacaatggaggcccagaaaggtaaaatgactgtccgagttacatcgaaagtggatacgacaagaatcgaaagccaacaagtctaacaccatagcccagtcccttcatcgcggtgctgtcctgctcattatctaagaaatgagcatggattaagtcagtcaacatcaggcaaaaacaagcacaatgagcgtaggagtgatccttccaaatctcaacagctgagccataacgacagcctgctaagacaaacaatggtcctcagaaacataaaatttaacttaaatgtccacgaagatgggagtagttaactaaattatgacacagccacatgatggaatacagtgcagctttaaaagtgatgcttgccaagatttccaacaacctacaaaaatgcttaggacgtacgaaggaaagaaactcacatacaaactccaagaccaggagcaccagtgtgggcactttccccaaagagtaacatgctggtgaggatgtgggaagacgagtgatttcacacgctgctagagtgaacataagttatacagttactgagtgggacaatttgacaatagacacttaaagtttaaaatgcacacgttccatgaccccaaaagtctaactcttagaaacaactctagaaagatactcgtacatgtatatgaagaatcaggtcagggtgatcatcactgaagtttagtttctaatggagaaaatctgaaacaacataaatttctataattatgaagattggataaataaaccatgggatagccctattgaggaacacaatatgtaggttacaagaaatgtaaatattcctatatccatatatttacatatacacatgcatacccatatagatctgttcacatgcatctgcacatgtatgaattcatatgtatggttacatacatctgggcttccctgatggctcagatggtaaagaatctgcctgcaatgcaggagacccgggttcaagccccacgtggggaaaatcctctggagaagggaatggctacccactccagtattcctgcctggagaatcccatggacagaggagcctgtacagtccatggggtcacagagtcagacacaaagaacagatacaaagagtgactgtagtcactcagtcaatacatacatctacatatattcacgtttatgtacatgtgtagatatacacactgatacacaaatatatacacattcatacttaagatataactatagataggcggtggatagatagataggcagatatatagatctcaagcgtaggtttccaaggtatactgttgagcaaaaaaagccagttgcagaaaaccaaggaaggatgctgttacttaaaaataaaaggacatgagaagagaggaagaggggagaggagaatgaacaaacaagccaacagatcccacaggcggacatacaacattctctactctctgcacagttcagcaatgagcatgtatgactgttagtactgaaacaaacaaccacggcaaaactctggtcccactttgggggacaagcaaagagcccctcttactggtgcagcgtgtgcaggggggcctccagcttctccgtctgcccgtagcagctggccttggcctcggggatgtaggagaacttgtccaacatggaagacgcggccgtggtcaggatgcccagcccgtctcgcaccctcgcctccaggctgtagtcccagtcgtcataggagacggaaatgagtcccgatggaaactctttggggatgagctccgtgttcccggagaccaagctgggcacgatccagaagaaatcatacccagtgaggccgagggagcgggcctcgctcaggatgagaaccgcctcgtctttggaacagtagagcaagatgacggaagagtggatcttcttcagctggacttgggtctttgcgtcctcgaaggacgtgtccagcgtgatcacgttctgcatgtcccagcccacaaagctgttgtccaccgtggtcttgatgaagctgatgaagtccctgtagccagggaagatggtggtcaccagggagaagacatgccagtcgtaatcctgcatgatcttcagcatgactgtggcttgctgctggatggacgctccaaattggaagaaggtagacgtcggatcctgccaaggggtgaaaa

SEQ ID NO: 51398 - DNA, 1049 bp, Bovine  19866880719315
  misc_feature (1)..(1): n is a, c, g, or t
ncttgaaagctctaacatgtgtgttttacagcctgcatattctcctccccaataaattctggcatattgttctgcctctttagttaagtctgttgcaaggaacacttaagaatcttaagaatacacagagggagaaagaagtgctgtgatatcagagttcattttcaatgaccctgcaaccaaatgtctcccatctgtgaagtgttaggagaattaagcgctattgttcggttccttaatgtctccatttggagagcgttttagtttggtttaatttctacattgtgcacatcttacatctgagtttgaacaggagccattgctagggacaatcagattagaatatcaaacatcagtccctctgaattgcatggttcttatacaatatcacaacccatgcataccgaatcagcccacaggcacctggttttttggtaagaccatccatgtacccaccaaaaggaagtcaaattaaatccacatttaaaacaggtcataacactacttctaattcaagcctgaattttcataaccattttctcttccttctttccttcctccctccctctattccttcattctttcctccttcctttgtaaatttctttcttcacttcctccttccttcctttctttcttgcttcttcccttccttcttctctccctcctctacctccctcccttcctctctgtctgtcttcctttctttccttttcttttaagatatgtggccaaaagtcagcaatacagaaatgtgggaagaacgctaatttttagagaaaaaaagaactcgtggctgtggtcccaggacagtgatgagatacacttgtcttctgacagccttcagggttgctggggccagtgcatgctcccaagtgtgtgttttgaggatgcgctgagaatgtccttcctgtcatttgcagcaccccatgggccttcttttacaattggaaaagctatttggctcctctggggcctggtattcaacaactccgtgcctgtccagaatcctaaagggaccaccagcaagatcatggtgtccgtgtggg

SEQ ID NO: 51399 - DNA, 1877 bp, Bovine  19866880745058
  misc_feature (1)..(1): n is a, c, g, or t
ntgatgctgggagggattgggggcaagaggagaaggggacgccagaggatgagatggctggatggcatcactgactcgatggacgtgagtcttggtgggctccgggagttggtgatggacagggaggcctggcgtgctgcaattcatggggtctcaaagagtcgaacacaactgagcaactgatctgatctgatcatgtcctccaggccaatggaggaaaaaaagatggcagccaaatgatcataccagtaggaaacagaaggtgcccacttggccttgaggaaaagaaaggttggcagctttgggaactcaatgtgcccatcttaagaactacatttcccagcatcccttgcaactaagaggatgatgaaataagaggaagtcattgggtggggcttccaggaaagctatttagagggcactgacttagcttgccctcttgccacttcctccttccttctatctggaatacaaacaagattgcaagagtagcagcagccatctttgaccatgaggtaatcttaaggaaggaagctatatgccaaggatgatagagcagaaaggaggaagtcactgattaatttgtggatgtccctgggctaccactagactttttatctaagtaaaaaaacaaaacaaaaacaaaaacactgtagttggtataagcaactgtagtcagggtctctgtactaacagctaaacagaatccataactcattacagtatgtgaagctcatggcaatttgcacagtgctaaataaatgatatttgaggatgtttttgctttgctttcctcttagccactgtttatgccactcttccccattacaggagcatgttccttctatggctgttgcaggaagggggacctcttccagggccggaaactgggctcttgtcgaacactcagaaatgaattgtccttgaagacacatgtgctgacaaagcaagagactttcctggaaatggggtgccctgggtggagagcaggagggtcagggaacccaggaggactcctctgccacgtggctcacagtcttgggttttatggtgatgggattagcttctgggttgtctttagccaattattctgactcagagtccctcctggtggtgcatcccttgttcagccaagatggatgccagaaaggattctgggaggtggtcggacatgtgatgtttccttttgacctttcctgaactcttccggttggtggtggcttattagttccgtgttccttaccaggacctcctgtcgtgaaaccactcatgcaaatagttactatggtgcctggccagggtgggcggtttcaatcagcatgcttcccctaacatggctagtccgcagtctagattccctggtggctcaaatggtaaattgtctgcccaaaatgcgggagacccaggttcgatccctgggttgggaagatcccctggagaaggaaatggcaacacactccagtactcttgcctagaaaatcccacggatggaggagcctggtgggctacagtccgtggggttgcagagagtcggacacgactgagcaacttcacttttcagcctagatgtgtagctgcaagttgttgccagttatgagatagtaagtcgtcaggttaagaatgagatccctcattctgactgctatccgaggggagcatcacaggcaattaaacgaattttcagaaagtcagcctgtggccttcccaactagccataactttgcaggcagtaccctgctaaatgattccttgattgtcctgaaaactgtgacactgttttctaaaaacagaaacaaaggcttcggtccctttgccaatgtgggtctcaccagagaagcagcttctccctgagacaagatgtttacacatcaggcgcg

SEQ ID NO: 51400 - DNA, 963 bp, Bovine  19866880781649
  misc_feature (1)..(1): n is a, c, g, or t
ncaccctccatccatctctttcccctctatgacaggatctcagggctttgcattcacttacaacacagatgagttgatgacccagtccgaaaataaaaatggtttttatctgtctgtacaggagtgtctagaaatacttctgactgagaggctgtttgaataatttattcatctgagatcatttcaataatctattcactcattttcataattgatggcaatggcaaatgatcaagggtatggcttttgtcttacatttatatcatctgtcagcttaaaaatgccccatcaccctcagacagcttccttatcaagctgcgtttgtgaattgggtagagatggatactgcagatgacatactggttaattctagctctattagaatactgcctaggttcaaattctcccttcactactatatgaccttgggcaagtcattcatcccatgcagctatcaattcctctcctatacagtggagctctaatgataacttggaaagcaagaagatcaaaccagtcagtcttaaaggaaatcagcactgaatattctttggaaatatgctggccacctgatgtgaacagctgattcattgggacagaccctgatgttggggaagactgaaggcagaaggagaagagggagatagaggatgagatggttggatggcatcaccgattcaatgggtatgaccttgggcaaactccgggagatggtgagggacaggaaagcctggcgtgctgtagtccatggtgtctcacacttgtgccgcacacaacttgctgaccatacaataacaataactgaagctgtcatttactgatcacctactatgggcttccttggtggttcagatggtaaagaatctgctgcctacaatgcagaagtcctgggttcaatccctgggttgggaagatctccggataggggaactgatacccactccagtactctgcctcgagaac

SEQ ID NO: 51401 - DNA, 1056 bp, Bovine  19866880807981
  misc_feature (1)..(1): n is a, c, g, or t
ntttcaggagagctaacaggacagttctggccatcagttaccgaagccagactccccaaagtccaggccaacacagtaggatcatagcccaataggaaattagcatcccacaaaggctgggcagaatattaaacctcacaaaagacagtacaatgttgagaacaatgagagatgcgggagtcagcagagctggaattgccagcacaagatttatggaagataaacaaaatccatttgatcaaatgggagatgaaattgatctgttaaataggatggcgggaagtcggggatctctgaatacacatttccttgttgttgtaagtcattatatacacaaacacagatagacacacatacagaggcagaaatagttgtgaaatgtacaacaaaaacacacatgcaaaggcataaatattcacagagacatgcaccaccctcttacgcatgagtgcccgggtttatacacatgcaaaggcattcacctgtgtgcacccactcaccttcaccctcaccaccccagacaggcagaggggaatacctgtctgctgggagaaggtctgtccccccaggatttgtcctcagagttagagcatttcacctgcaaatcctgccacggaagaaccttccagctgatccttagagtcccttcccagcaagaaagctcagccctctctagccccggggccagtcctgaccttggctagaaaggatttaaagaactctgggcacggacttccctggcggtccagtggttaagaatcctcctgccaatgcaggggactcgggttcaatcccaggtcgggaaatattccatatgccatggagcaactaagaccttgtggtagaacacttgggtctgtgctctagagcccgggagctgcaactaccgaacccatgttgcagcaactaccgaagcccttgtgccctagagcctgcactccgcagcaagagaagccaccgcagtgataagcctgcacaccgcagctagagagtagcctctactcactgccgctagagaaagcccgcttgcagcaatgaagacccagtgcacccaaa

SEQ ID NO: 51402 - DNA, 745 bp, Bovine  19866880813286
  misc_feature (1)..(1): n is a, c, g, or t
ntggtaaagaatccgcgcccccagtgcaggagacacagtagacatgggttcagttcctgggttgggaagatcccctgggggaggaaagggcaacccgctccggtattcttacttggagaatcccggtggacagagcggcctgggggactacagtccatggggttgcaaagagacagacacgactgagcacacacgcacgcagcatgtctctgggtctgtttctcgattttaaattttactccagagcctcctagatccaattgcccagagatgggagaaggactcttgtgaagtattgtcagccctgagatgcctcatgactgacagctctttgcagataaggaccatctgccaagtggccctgagggctcctgccaagagaagagaggctcgagggagcaggaattgaaaataaccgagtttacacacacacacattcttaccaacctccctcgcatgcctaaaatgttaagctgcaacgacccaatcctcaagggtatttcagaaataattggactggagcagacccactgagtccatgccccttaaagataaaaaccaacctcaccccatcacatatccttatccataaacagtggacaggagctcaagagaaactgagtctgcttatactgacgctttgctccacttgagggaaccctctgttgcctggtggggattgtcctttcccttaaaagtgaccctcaagcctggaatgtctgtgaaacagcagaaaagatgagca

SEQ ID NO: 51403 - DNA, 1087 bp, Bovine  19866880936749
  misc_feature (1)..(1): n is a, c, g, or t
nggctcgagtatgggggtaggtgtttcatcagactctactttttgatactattctctccttaaaaaaaaaaaaagagtccttgttacctaaccctgggcttggtggctcagatggtaaagagtctgcttgcaatgtaggagactcaggttccatccctgggtggggaaggtcccttggagaagggaatggctacccactctagtattcttgcctggagaatcccatggacagaggagcctggcaggctacagtccatggggttgcaaagagttggacacaaatgagtgactaacacttccactttaacttgttacctgaggttgtctttagacaaatttctccaccttcatcagactgtacattctttaagttgtatgctaattcatgtgtgattctggaggctaacacatggttctctggatagaaggagtgatggatggaagacagagatatagtgcccttaaccccttccctaaaaaccaccttcttgggactctctccagctgctagtccttgccttgcctggaaaggtctcagtttctggaatgggtttaataaacgctgggccagtcgggaagtgtggcaaggaccccaaacacttgcctgagcgtcgcatgtgaactgaaccctctggtgctccttgggtagagagatgttttattaaacaccaggctgtggatgacggctcactgcacttaatgcattacttctctggggctgaaataccacctacaacattgctgcattcaaagcatgactcctggaaatagcaggccagcatttcagagcagtaggattttttttttttaaggaatggaattcagggtggtcactggagagagtatttgactgtcttgccaattatccttctcaaattccttttcctgtatatgttatatttcaattgccctacaattgagttatgtttccatcagaatcatacaaatattccagctgcagggcacttatgatggaaagtaagaattcattagcgcagcccttgtcttgggctggcagcaatcctgactctgtaacatgctcctatgcttcacaccaatttatctgagttccttcctgatacctggg

SEQ ID NO: 51404 - DNA, 1197 bp, Bovine  19866880941321
  misc_feature (1)..(1): n is a, c, g, or t
ntttgggctccctggcaatgcaggagacccaggttcaatccctggggactggaagatcccctggagaagggaatggctacccactccagtattcttgcctgtagaattccaaggacagaggagcctggtgggctacacagtccatggggtcgcaaagagtcagacacagctgagtgatctaacacttgcacacattctgatattgagactacctgccctttgctgcataatttctatataagctggcaccttccccttctcctcagagcagttctttcagggttacttaagatgctgccttctggagtcaaggtcctaaaaattcccactgattaaaacataactctcagctttcaggttgtgaatattttttaagtcgatatagacataaaatctcctaggggagactgggcttgtgtctttcatatctcttgtatccttctaacaccaagcctttgacagcatggtgtcatggggaaacaagctcatcctttcctgtatttaaaagataacttgcctggagagtaactttatgagaagcgtgcacatccttgcatttaatgacttggattttctgcctctgcctgctgcctggacatgactgtcacagggtagcatctgtgttaggggaaacacactgaccgaaactgcccaccctggtcaggcaccatagtaaccattcatgtgagctattttacaacaggaggtcctggtaagggacacagaactaacaagccacaccaactggaaaaattcgggaaaggtcaaaaggagacaccacgtgactgatcacctcccagaatccttctctctggcatccatcgtggctgagcaatgcctgcaccaccaggtaggactctgagtctgaatgattggccaaagacaacccaggaactaaccccatctccataaaacccgagactgcgagccacatgacagagcggtcttcctggcttcccttaccctcctgctctctgcctggggtgccccttcccaataaaagctctttatcagcatgtgtatctcatcagacaattcatttccgagtgttagacaagagtccactctcgggccatcctcctccctgcaacatctggacaagccaaggagtggctgaactttccaagaacaaacggagcatcaccgagcatcagcctagagtatgaatggggggcagtctgctgcagcctcacaggt

SEQ ID NO: 51405 - DNA, 1021 bp, Bovine  19866880960781
  misc_feature (1)..(1): n is a, c, g, or t
ntgtggtcaattgcaaggccttttaaaatatatggttttataacccgctcaggttacacaaatgtttgaaatgcagacacctcattcctgtagcagaaatattagacgttgctcaggcaaaaggcatcatctgataaaccagctactcatactttgtcatatccaagcattgtgataaactagtgcttaccatagtgaatgtatttataaaaccataagagcatatcagagtggaaactaaatcccctttttcttatctctatagaaatgttttcccatctcagcaaacaggagagcaccagggaagaaggaagggagatgctgtctctcttaagtttccaatctgatttaaaggtcattcttgcaagccaggcatccccttcctgcttctctgagctctgaggatatcagtctggggtcaggaaagagagcagaaaatgagcattttttccctagtgctcatgtttgctgacctttgcttaataggtatttatgagttgcatctatttccaaactgtgaagctctggcaggaatgatcagtttcaaagcatcaggtacctgttgaactattatgtgccaagcattctgcaaagcactgtgctttgcatgagtcattccatttgatctcccagcaatccaatgaggtcaatcgtttccttgtccccattttacagatgaagagactgaggcttaaacaggggaagtggtgtggtgaaattgtgcagctataatatgacaaaacttctcatacaaatcttttccagcagaaccttctgaagaccccagagagaccttttctttttagaaagaatgtttggttgaggcatttatccattagttcccattccccagtggttgaggatttttcctaggagagttaacccccaatactcccaggctttgtttaaacctggaccaaacagtttcctgaagcccttggagaaaatgctggggcagaaatcagaaagacacacagtgcggtctatggggtcagcttgaaaatatttggggggtatttat

SEQ ID NO: 51406 - DNA, 1620 bp, Bovine  19866881015674
  misc_feature (1)..(1): n is a, c, g, or t
naatcctgttggctcaacgttcaaaacatatccaaaatctgtttactcccactgcgatctcactcaccattacccctcacctggattcctgccaagcctctcaactcatctccccacttcttggtctgttccccacacagcaacttgaagggaccatttaaaacataagtcaaatcacatctttcttttggttaaaaacttgcaatgttgccccagttcactcaggcgaagagcctaatgtctcacaacatctagcatcacgttgtctctctgacccatttctcactgtctgtcatcatcataactgttaatacctaaagttgatcacatgctgggggctaaggttttacgtgtgttgaataatcccataataatcctataagatagatcctattgttatcccattttatgggtaaggaaactgagtcacagggcaattaggtggcttgcttaccacttatttctcacaagtgatcagccacgattcctacccacacagttttggtccccctctatttttagcatcactagtgaatcttgccctcagcaattagtacagtggtgtaaaaggattaggctttgaactctagcttcaccactcactcattgtatgaccctaggcagctcactttacctcctggcatcttagtttttcattcataaaatgggatttataatagggttggtattatcatgatgattagtgaaagggctggaaaaatgcctttcacacatttgggatgccactaatacaagacctcttttggttcctgtctcctcccctaaagaaatggcaaaatggtacattcatccaggagatgagatattgaaaagagcatccttctgataccagctgccagagtaccagaggtttcaagactcccagcaacacaaaacactccatcgatgaaacaagctgcagaatccttctacatcttgacagaaggacatctggggtttcctgtccatgtccagtaattcacattttctatggggcatatcaattatgcatccacttgcttctattaatatttcaggcttcataagcatcaataaaacatacattaattagaagtttgcaatcatatcatcccttctccatctcctcctgctcccagccttatttccaaagctgagcatgagggtgtatggtccacagccataatgatttttctttttttgaatttatttttaattggagaataactgctttacaatcttgtgttggtttctgccatacatcaacatgaatcagccataggcatacttctggcccctccctcttgaacctcctgccccatcccacccctctaggttgtcacagagcccgggtttgagctccctgcatcatacagcaatttcccactggctatctattttacgtatgataatgtatgtttccatgctactctgtcaactcatcccaccccctccttccccaactttgtccacaagcctgttctctctgtctgagtttccgctactgcccggcagataggtttatcagtaccatctttctgctaagtcactttcagttcagttcagttcaatcactcagtcgtgttcgactctttgcgaccccatgaatcgcagcacgccaggtactcccctgtccatcac

SEQ ID NO: 51407 - DNA, 1076 bp, Bovine  19866881040332
  misc_feature (1)..(1): n is a, c, g, or t
nttcagcagtttccttgtagaagctggtttgactgtagggtgcagtggggtcccaatgtgacatctagtttcacagactcctgctgtcttgaaggaaccttagattgaattgattcacaaacaaactgctagactcaactgcgaactactccaaatagaacgtatttcaacttggtatcaggtcacagtcgtggctcagacatctttgctgtgaagtttccagatcaatcaaattcaggtctgcttttggtttcaagcagcagccgaagacacagaatgactcgtgcataaccatgctatcacccactccagtactcttgcctggaaaatcccgtggatggaggagcctggtaggctgcagtccatgggatcgccaggagtcggacatgactgagcgacttcactttcacttttcactttcatgcattggagaaggaaatggcaaccctctccactgttcttgcctggagaatcccagggacgggggagcctggtgggctgccgtctatggggtcgcacagagtcggacacgactgaagcgacttagcagcagcagcagcagtgtgtatatttggagaaggaaatggcaacccattccagtgttcttgcctggagaatcccagggatggtggagcctggtgggctgccgtctatggggtcccacagagtcggacacgactgaaggaacttagcagcagcagcagcagcagcaaccgtgctatcagctcacttgtgtgttagatttgcatgggagtgatggtaattgatgatactgtttatgctaaatacggacattaagtcattttaaataccctcatggacattaatcttatgtcctttggaagactttatatttcaggtggagagaaattggcctcctgtttgctctgtttttctccttaaattcatcttcctgaagagttaatccctcacattttcaccagcttggaagtaaatcactgcttattatccagagtgaaatgtcttctggtgtttttgcacatgtgaagtgttagctttaaggcttcttcccccaccggttagaaatcacccaggagttcacggggccagtcaag

SEQ ID NO: 51408 - DNA, 1257 bp, Bovine  19866881074964
  misc_feature (1)..(1): n is a, c, g, or t
nctctgcctttgaatatgctatctaggttggtctaactttccttccaggagtaagcgtcttttaatttcatggctacaatcaccacctgcagtgattttggagtcccccaaaataaagtctgacactttagtcgtgtctaactctttgcaaccccatggatgtaccctgccaggctcctctgtccatgggattctccaggcaagtatattggtgtaggtggccatttcgtcctccaggggatcttcccagggatcaaacccctgacttatgtctcctgtattggcaggtctgttctttaccactagcaccacttgtagattccatatgtgtgcgttaatatacgttattcgtttttctctttctgacttacttcattctgtacaatagtctctaggttcatccacctcattagaattgactcaaatgcattcctttcttatgcacggccataaattattgagtaccatccttgtaggcctggggtgtgcccgccccccacaaccaggtctgaacaattggttcagagaaccttggtaagcagtcactgagcgacaaaagcaaccaaaatctattgttttctctcctttttagaagagattaaaattattcatgaagggctgctcagctgaacacttggatcttttcccctctggacagcagggacagatttcctggccagcactggctgctgaagaatttaacattggttaaaagcgaacatctcctccaaggggggacattaatacacttaatgtttagggagtcttggtagcctgtgctgcgaggctgccaaccgaattacattaggtcggtacttttgcttttgatggggtgaacaggtggcctggatgccccgtgcacacatctctattcacctggatcaagtgcatgcaggtgtgcgctcttcagatctctgaagagtgggttgaccggcatgctcaatctgtcctctgaccacacacgtgtagtcactgggtgcggcagaattgaggcagttctcatttctgctaactgagggcctgggtacctgtaatcattttttttctgagattaggcagagacaggaaggaggctgatgctgggattgctccagagcaccctccgtgtgctcaaacacccacagacacaatgagagcaatcagaaacccaaggctgggcagccaggacacacagcttgtcatgatgaagctggactttgaacacgggtctgtcggctcgaaggttttccaaaattctttcatacatacccagatccc

SEQ ID NO: 51409 - DNA, 1880 bp, Bovine  19866881131731
  misc_feature (1)..(1): n is a, c, g, or t
ntctatgtgctgtgctgtgttcagttgctttagtcgtgtccgactctttgtgaccccatggactgtagccctccaggctcctctgtccatgggattctgcaggccagaatcctggagtgggtagccattccctcctccagatcttcccaacccaaagatcaaacctagatctcctgcattgtaggcagattctttaccttctgagacaccaaggaagcccatgaatactggagtgggttgccatgctctcttccaggggatcttcccaactcaggaatagaacccatatctccagcagctcctgcactgcagacaggttctgcaactatactcccatataaaataaaaaaattaaaaaaagaaagctgagacttgaaatgtgcccgtgcaggtgggtgttttctcctgtgcctccaacacagccaggaaaagagcttctgccagctagctgctgccctttcagcctgagacccagaataaacacggatggaacaaagaccacagagatgatccctgggcttgtggcagcaggaggtggagccaccatggcccaaggcaagctttcccactccacctgtgctcccatgagcaaaataaatgccaattgtcatgttcttccgagatgtcacagcaataactgggcaacacagctacaagtcactacgacacagaaaacacgggtgttgatctgactgaaaggtaccaatgccctagagagaatccaaagattcagatgctctcatgtgggagttaaatataaaccacatttaggtttcttgatgacactgtgagaacccaaggtttaaatctgggagtagagggtataaggcattatgccctttgctcaagtttacaccaactgtacacacaaacctctgcctctttcaacactgtgtttggccgcagtggttgacagaccgtcctccccagccctggacaagagaagcatgttttcacatgtgtgcatgctcagtcacttcagttgtgtacgactctttgtgatcctatggattgtagcccaccaggctcctctgtgcatgggattctccaggcaagaatactggagtaggttgccatctcccactccaggggatcttcctgacccagggagcaaacccaaggttcttatatcaccctcattgacaggcgggttctttatttctagtgccacctgggaagccctgcattttcgggaaccatctccaaatgtagtctctgcccttgaacgcagcttctgacctatgccctgaacttctgtttcctactcacacttacccgtttctagggttcacctgccatctctgctgcttttgcttttcccatctcagtgttggcaaatccaagggctccaacatgccattggagccagaacaggattctaaaaccatgtcctggagcaatgggctatgttgaaatccccaactaaaaggagagatggacagaaggaaatgctgctggagagagtcagtccagttagctggaagctccagaaacaccctcattccattagactgcaagcccatgtaggcggaaatggtcttttttcaggataggcagccaaggggtggactgtagtggaaacccatggggtttctactaactcttcactgtatagcaatcacctgtccttcatctgcccataggaagacagtaggagctgtcgtgttaggacaatgtaaccctaccctttattcactcctgaggggtccaggaaagagcctttgacccaaaatcgatcaggaatcattcctctggaatttgaaatttagaattcggaaaatagagactgggacttattacagcctagttgtgtgatgtcactgctctagaaacagtgatggacaggggagcctggtgtactgtaatccactgggtctcaa

SEQ ID NO: 51410 - DNA, 2816 bp, Bovine  19866881164504
  misc_feature (1)..(1): n is a, c, g, or t
ntttgcgtgtatatattcttgtgtgattctttgactatgtgtgtcttcctaattagcctaaaaattcaatgcaagtaaaaatattgctgtttgcactacagtatctttagtgcctagcacagtgcttggcacgtagaagccactgagtaaatatttacggagtaaatgaatctctattaaacctgtctacaaaccccagactcagttacagccctttgtaaataggaatgtaggaggggaaagtgaaggttgtctgtttctccccatctgctagaaaaaatcttaaagagttgagatttttggtgtttggaacaggagcccatcagactccgagaaggaggtgcaagctctcaggatccagggcaatgttgacacagcaacttcaggtccggatcaagttttccacccactgcacatttccaccctctttggctgacccatgggtgcttacttagatgtgttgggaagggagggaggaacttagagaagatctcagaagttactgcactctggggactcataaacctttgtagcctatctctctgtgagtcagccttgggctggagcttttgcctgcctcccacggtgtagaatatgtgatgtggtcagtgacgtcaccgaagattctgctacgggctttgcctctatttgtgttaccttgggattttaggtggagaaggaaatggcaacctactccagtattcttgcctggagaatcccatggacggaggagcctggtgggctacagtccatggggtcgcaaagagtcggacacgactgaacgacttcactcacacttcactgggattttaggagttgtctctgcaaggaagagaggatcttggagcaataacatgattactgcagatcaattactaggagcactagtgggaaagtgcctttggattcagacgattccatggtatagctctggttccaccacttaaaaagctgtgcaagtttgggcaggttgtataacctctctgtgcttcagttccctgaactgtggtgttggagtaataatctttatcatatgggatttgtggggattaaataaagtggtaatattggcatatttccttagcacatagaagtgctcagaagtgacattgttttaattatagcatcagatgctatgggggagctgggagcaatgttctatattaccagggaacacgggaatgcctttgcaaattaagtcatatttgagctatattttacaagctaacttcccaggtggtgctagtggtaaagaacctgcctgctaatgcaggggatgtaagagacatgggttcaatccctgggtcaggaaggttccctggaggagggcatggcaacgcactccagtattcttgccggagaatcccatggacagataagcctatactccatagcgtcacaaagaatcagcagcaacttagcacaaccacaaaagtaacataatagtatctgccatgtatgttacatgctaaataaattctgtgctaagcgcttcatgtatatttttggctcattcaaatctcactatagttctgaaagcatatgctgtgtccatccacattctacaggcaaagcaaagttcagaaaggttaagccactttcccaaggctgcttagctaatgggtgaagccaggatcagcatttagtttgtttgactccaaaagccattgtcttggccactgaactacccagtctcttaaaggttatgtttgagttttctaagagagatggaaaagaaagggatggatgtagcatattccaaaaggaagagcctgaatatctcttcatctacttgcatgtttattattgttggcttggaaggcaggggagtgatcagttttatccctcattgttctcaggcacatgccagcacctaaccagcgttcagtaaatctgtgttgaatgaatgacggatgtgatgggctccattttctctctatcctgtgttacacatcacagcatgaggcgatgaatgtgtttatttgtccaaataactctaccgccttccgtaacttaaaaaggaaggtgtctgtgaagctggacagttttgtaattggccgcgtggcacgtttctcaacaagcagcaaacattttccagtccagatgctgaagtcatctctgagaacagactgattgccttctctcccgacaccctgtcccctctcctggtgtccagcatgtctgaattctctttaagggcctgagattcatttctggtgacacttacattccaggaggagaggtgagagggtcacatcaacagagacaagcccggactcttggcacttagctcttcagacaaggtatttttccttgaggttgatgctacaaataaagcgctgacctgcggtgtcaagcagttgcatgtgggagcaggagtaggaaggagaaagtgcgaagctgggggcagctttcccccgtgtgtatgcgcagagtgccaataagctgtcaaataaaattaaggttcaaaacatacagccttcaatttgattccgctaagatgccggctgctgcagggagggaacacaatcgattctgttttgacaggtctcggtgttcgctaagcagcaaaagtctccactctgtacctgattgataaaagctcacctgatttgcaacttaaatagaaccccatctgagcttgaagggaggcgctcatcttcccaccagacctccgtcccttttgctcttggacttcctcttccttttcctctttctctctttcttagcactttttaaatttctctccctctcactgtctctcttctatacttagaggaagagtttatacaagtccctaatacctgccaggcatt

SEQ ID NO: 51411 - DNA, 1020 bp, Bovine  19866881206151
  misc_feature (1)..(1): n is a, c, g, or t
naaggagaggggtgaattaaggactgtttccagggttgagatttcaagaacctcatgtttggtacatgggagaaaatattgtgctttttattaaaaaaataaaataaaatcactgaaggtaagatgatgagttctgctctgactctattaatagagtctgagctctcctggaggctgtgaagaggagctgatgaaagacagccatgtctgagaaaggtcaacatagagatgatacctgaagagtgagtaagagatgcctgaacatgaagtctgagggcaggagggaggggcagggagtgtgaaatgtgtggagagaaagaggggcttggattttggcagagctgcagaagtcaaagaggtgggaactcacccagaaaggggaagatcatgactgtctaggataggggactcaaggacaatgggagtgactttcaacgtcaagtggatgcacctgttggctttcatgatgagagaatcgctggtaaccttgatgaggcctgtttcagaggagagattggtgcagaagtgtgtccaggtcacagctgatgggattagtaggaaagagttccctgtcatcagtggaggaggggtgaaggatgacaggtgtgcagagacaggtaagcttgtggggttcatgggtcatccatagactgtgaaatcagaggcagattcatcagctgggagtgaggatggagctggcggagttgcggtccctcgtgggcaggtgtgaaggtttgaaatagttcccagggaatggaagatagccagtcaggaaaagggaaaagaactgctggtcagagagggaatccttacattcaaaagtgtttctgcagttatgtgatgttctccacctctatattttggtttacagaatgatttacagaggggaaagtggcccggattgactgaattgctgaaaggtggtgatgggcaggtgtgacaggaagacaaagtggggcatgatagctgtggaagtggcagaatgtctattgatgtggtagatgaataggtctgcgttag

SEQ ID NO: 51412 - DNA, 1416 bp, Bovine  19866881281595
  misc_feature (1)..(1): n is a, c, g, or t
ntggcctctaccggctctgagtcctgtgggagagacagtcatgtaaaccagtaattatggcaaaatgagatgattgaatttgcatagggctggaggcagtgagaaacatggcatgttttgaaatcagagaacagttcaaaattggcagggagaaagaagctatcaaaggaggcacttgaaagcaggagccagatgggtaaggagtttgggctgtcctgggaacagtggggtcattggatgagaccagctgtacgcttggtggacccaagattcctcacttgctgcctatatttttgcaacatgggtcagaaaccacatatatgatcaggaaccacatataagattggctgttacaggtgtgtgttgtactgtgctcagtcgctcagtcatgtccaactctttgcaaccccatggattgtagcctgccaggcttctctgtccatggggattctccaggcaagaatactggagtgggttgccacgcccttctccaggggatcttcccaactcagggatcgaacccaggtctcccacattgcaggcggattctttaccatctgagcaaatttggacaatagtgctatagcatgcactataggaaggtcaccagtaaattctatcccagtgatataacactgttagagtcctgccctggtttcaggagcaggcagtccatgcagactaaactctcctgttcccaggctatgtagtgactgggagatgctcacctgcaagaaattgctgatgcggattcattgtaaactgtcttcagtatcaccactacccctaacaatgtgctttggatctaccagctgcatggtatgctgctgaacatgtggcagtgcctgtcttagggatccagctcagagggctccatctccaggaagcctaccctgaatgcacagggatatgaatatgagactatgggttctccttccgtgacatcctggatatcttgtcaatagagaactgccactgaaatataactgccacttgcttctaagttctccccattgggagatgagtttattcagggtggaaatcttgtcttactcttcctgtgtctctagtccctggcacagggcctggcacatagtaggtggttcacgaaactgttcactgtagatgacacaaggctcctctcctacagcagcttgtgttctgatctgaggatcagctcgagccagggagaggaaggaatctcaggtagagggctcaggaatagtttctgaaacccagaagtcaaggctgactcttggggcaagtcattttcaatcaaagatcgcagcgacggtgtccagcggtcccctgcagagaaacagcttccatctacagcttagtgacatcaggggtgatgctgctgtcgatccagtgagggtttgctagaacaccgagagggaaacgaccctgtttcca

SEQ ID NO: 51413 - DNA, 1310 bp, Bovine  19866881439271
  misc_feature (1)..(1): n is a, c, g, or t
ngtctctactggcacagtgtgcttctggtagagcaagcaattttctataaatgaagaaatagagctgaactgcaaattttgaaaatggagttttcaggagattatgtgatctgggagatcatattgtttcccgaagaaggtaatacttgcctggcatgagagaaaagagatttcatgcgaagtgctgcaaagctctgaaacctcttcaaaaatcatctgttctagcaacaccaccaacaaaaagcctgagacttggccactgtggtattttttttcaatattgaattgctttttttgttttgttttgtctccagggaaaactcatctacaagtgtataagaaaagtctatgaaaaagttagacttactttacaaaatcactttcctgaaatatagctacctgctaaggcaacaagatgcctctatggagatgaataaaaatcagatgctccaaagtcagaattctggcaatggtcgaaagtagtgtcatatgattgtcacttcttccccaagctgttctggggacccaaggtggatactggggcaaacttcaaggaaatgtcccattgtgaacagcaaggaaacagctggtcgtgtttggagatcagttgctaaaaatacctccatatgctgaggccaatcacccatggtggggacttgtcagatttctcttcaataactcctcagcttgaagtgtgcatttgacaactccagacgctctactaatggtccgagatataactgggaggaaaccgggatctccatctctggcgcccccacacggatggaatgcagttgtgaagatggtattggtctccgttgaatattgcttccgtggtggctaaaatggtaaagaatccgcctgcaatgcgggaaatctgggtttgatccctgggttgggaagatctcctggagaagggaatggctactcactccagtattcttgcctggagaattccatggacagaggaacctggtgggctacagccctgtggggtcacaactaacacttccacttttcactttcacgtaatgttgcccattgctcctccctaaagtttccaatacgatttacggctcatgtgaagctcataaaacgaaagctaaacaacagtgagaattacagaatctaattccaatgccattttggcatcactgactcaatggacatgagtttgagtaaactccgggagttggtgatggacagggaggcctggcgtgctgcggtccatggggttgcaaagagtcagacacgactgagcaactgagctgaactgaacaacagtgagaattacagaatctattccaacg

SEQ ID NO: 51414 - DNA, 1310 bp, Bovine  19866881496555
  misc_feature (1)..(1): n is a, c, g, or t
ntcaacgtgttcttgtggtgtgttatctgtgtacacacatggcattgcatcatgattctgtttggtcacatgtgatctcattgaaggcatgcaaatgttgtagcatgctgcacaggaattttaataacatcctagagcatatccgggtgctcgtcagggaggctgctgactggctatgcttagcccatgtgttttggtgttttttttctagttttcaatggaattagttactagcatttaaaaattgagggacatccctgttcgtccagtggtaaagaatccccacttctgttgcagggggcacgggtttgatccctggttggggaaataagatcctgcctggctcacagtacaaccaaaaaattttaaataaaaatggaaagttttcctgtataatcagatggccattttctcctataaaaactgaaaattggccttgccttccgctaagaccatcctcagcaagagcagagaatcatcatctcctttgggtttgccacactctgtcatattttaccacagtctccattgctctctctccttgacacccaggctcagctgctatttttcattccatttgtgctatttttctcaggcccggcctgccttattcattcaccttccatttctggcttgcacggtcatctggctcatgaacacagaacccagtgtcctttccacacatccgagaagggatggtgagtgaggggaagggtggtgcagaccccccaccccctgcccaggggtcccaaagcactctgggcgcccccgtgcttttctggacctgcctgctgcagagagaagaagccatcggggatactgaccctgctgatggagaagagcaggcccggccggtcggagcagacgcccgtgaagcagaagcgcagcttccagtagaagagatgctcccagatgaaggtgatgaggctgagcgccatggcggccgccagcatgtagaacacgcctgccatgttgtcgatgtccagctggctgctcatcacctcgttcttctcgttgtggcagatccccgtgagccacagcgtctccagctcctccatctcccctggacggaagacaagagccacaggcagtgaggagcagggcccgtgccacggggcggacacccctgcgcttgcggcagacacgtgtgacttacagctgcacaacctcaaggggagggactgagctccgcattcactccctggtcagctgaagataacgatggcaatacctatgtaacatcgttgtaggagaatgaactgagatcctgtctagagagaatttggcgtagtccctaatctctctctctt

SEQ ID NO: 51415 - DNA, 1463 bp, Bovine  19866881516335
  misc_feature (1)..(1): n is a, c, g, or t
ncagctccaggtttaatggctccaagccctagaatgttccttcccagccttctcactgcatctctccatcatttcctcagttctcttctctagaggctgccccagctctccccaactcactaactcagctttgatcaaggatacaagaggggatgtgagcaaatgactagcttccagcccccctggaagccacctgctcacttatactgggtctaattagagaagccacttttctccatgaattacagagcttggttctcctcccctggagcaaaacaatggcaccatgatggaaagtgacctctctcaggcacacagctgtgggttctacctctgaaccacctgttcctctagtcagctatcagttccagactcaactgacccaaaaggggagttgccctgaaaacccaagactctggggaacacaaattaaaaacccttgctctgacaagaaagcaccatttggaagatgggaaaacaggatcagagagggaaagtgactgccccacagtcaccccacgaaacagtggggtctgcgagccagagcgcagacctccttcttcgcagtccaatacactttgccactacatcacttcaacctatcaaattttgcatgatttccttagacatccctggataaaactcaacaccatgtccaagggaggtgccctatttcaagctcatttagcattcagcatcagttggagctgattagagttctgattagaatgctgaaatcatttttacttccaagctttagtaatttagtatcaggtgggtatttgtcaatagggacttaaaagaaattgtaagcaaatcataacagaaaggaaagttcacacacacacacacacacaatctttcttacattagctttaattaggttgacacagattgatctggaaaaatttccaaactcaggatgaatttcccttttatgattgtgaaaatcatgaggtttttcagagaatgggacttcagagataaatcgacagacaaggcagctttgggctcctccagtgacagcagggagacaaagcccttgattaaaggcagacacaacagccaaagccagtactcttgagtcacacaaacatgccatcgggatcccatttctgtccatctcttgctgtgttaccttggttgcctcactttctctgagtctccacttccaactctgtccacaagccccagtgcacagttcattctttactaagtagccaagacttttccaaaacataaatcaatctgattaaaagccttcaacaaaatcccatttaatttggaacaaaaccaagattccacaatgcagccaacctgattttgcatcatacggtcgtatgttacatggctacatgtaacaaaaactttggtatgttcacataaccaaacaggggcatatttttctcacaggacaggaagtccaagaagtggtccattagaaggtccaaaatgcccttgaa

SEQ ID NO: 51416 - DNA, 942 bp, Bovine  19866881733456
  misc_feature (1)..(1): n is a, c, g, or t
natctgcggttttgaaagtctaatgaacctgctaagctacatttttccttcactggctcagtcatctggaagagccaaacattcgcaatctgattgcattgctcttcattacttcctattctctctcctccgaaaactccattaactcacatcggaaacacttgtaggtaatgcttctgagcttttgtgtgaaaatgtaaccagtgactcttcaaggacaaagatgacatctctcccagtgtttccattcagttagctctaaagacttcccaagaaggttagcatctttgatccacagacatactgagctggagtctcttctggattaaagttccttccagacagatgttgagtctgttttaagccagtagagagtgtaatccagagctatctcaaaatatttctgggtcacatcatagacccgacagatggcagctcacgactgctctgtgtgctcagccactcagtcaagtccgactctttgcagccccatgggctgtagccgccaggctcctctgcccatggcattctccaggcaagaatactggagtggtttgcctacaccagggattaaggatcaaacctacatctcttgcatctcctgcattggcaggcagattctttaccactagtgccacctgggaagccccaccattgttctaatgatttgctttgttgtggtgtgtgagtgtgtgtgtgtggtgtctggaaatagccatcctcctgggtacctgaaaccagaattctacagcagaatctgtcatgctcattagtcaagtgacagatgtcatcacttcgaagtgagaaaacatctgggataagctgtttgatcattttccatctgattttctgaacagttagtgattgggacatatcaggtgcccagtgaagttcactgcagtctttcagattctgccctgtgagtacaagaattcagggagg

SEQ ID NO: 51417 - DNA, 1113 bp, Bovine  19866881902401
  misc_feature (1)..(1): n is a, c, g, or t
natgtgtttgttatacttaaaaatggataaccaacaaggtcctactgtgaagcacagggaactctgctcaatgtcatgtggcagcctggatgggaggaggcggtttggggaagaatggatacatgtacatgtatggctgagtcccattaccattcacctgaagctttcacaacattgttaatcaactatactccaatacaaaatagaaggtttaaaataaatacataaatgcatttgttgataaattgaacagaaaattcaaattaaacctcaggctgacttttccatttctttgtagtctatgaagagaaacccatgggatttctgccaacaatgtttgaactaacttgatctgaaaatgtccctcaccttctgacaagacctttgaatcaagctgttgaaaagactctgatgtgacaaatacccacctagggtcttcctcctcctccccttggaggcagctgagtgatttgtcttcaatcaccttgggcacctgggcggccagcctctgagatgagcagagggttcttgtcaatcctccgctgtatacctcaatctaagttgtgctgggagaaatctcacaatgagcaagaggatttttttttttttaaggtgaggcaagatacttatcttaaaatcaaaggcagttgacaggcaggaaacacaattctctttgtctggacacatctcagatgagcagagaaagaatgaccaccgggaagtcctgactgatgtagaaccactccttttcagccaatgctcggggagagatttacaacaccttctgtttatctgttggctgtaaaatccctcaatttctgcgatttagagtcattgttttcaatttgccaagaggttcttttctccagggagttgtgatgaagtttcccttgaagaaatcactattcataaaccaggttggtgtcaaaaagaggctggagctcctcttactgtcttgggaatctctgatcagattcagctggacgcatgggagacaggagagcccaaggttaagagtatgctctttgaactctgccagaccccggactggagggctggctttgtccttcactagttttagaactttgggctagatgttgaatgactccaagt

SEQ ID NO: 51418 - DNA, 700 bp, Bovine  19866882037858
  misc_feature (1)..(1): n is a, c, g, or t
nccacctgcacttgcttcccttctagagttttctacctcagagcagagcaccatcagctcccactcactaggccaaaatcatgacagtcttttgactcctctctcttcccccccttcctccagttttggttaatctccctgtctatatcctcctacatgcctcctgctcccactgtctgatttccatctctcatcttctcctacatgaattatggtgacagtctaataactggtctccctacctccaagactgacccacctttaattctttctctatatacctgccactggaattgttctaaaatttaattctgggcatgtcatccccaactgaaagtcttttaataactccccatcaccaaatcatggaaagaccaagactgttggcatgtctgtcatggagtttcctggttggttctgtattttttaatatttgcttaattagctaattggatgcattgggtcttagttgcagctcacagaatcttggctgcatcgtgtaggatctttctttgtggcacacagactctggaattgtggcacgcaggctcagcagtcgcagcacgtgggctctctagttgaagcggatggctttagttgctccaaggcacgtaggtcttagtctccaccagggatagaacccatgtctgctgcactgcaaggcgattcttaaccacggaccaccagggatctcccagaa

SEQ ID NO: 51419 - DNA, 835 bp, Bovine  19866880142970
  misc_feature (1)..(1): n is a, c, g, or t
ntctgtcctttttgtgcccatttttgcatgaaatattcccttggtatctctaattttcttgaagagatctctagcctttcccattctattgttttcctctatttctttgcattgataacttaggaagactttcttatctttcgttgctattctttggaactctgcattcagatgggtatatctttccttttctcctttgcctttagcttctcttcttttctcagctatttgtaaggcctcttcagacaaccattttgcctttttgcatttctttttcttggaaatggtcttgatcactgcttcctgtacactgtcacaaacctctgtccatggttcttcaggcactctatcaaatctaatcccttgaatctatttgttttaattttttgggagttttgtttgagttttctgagtgatctcaataataaaacagtcttttatgacttgaatttcctaaggttctaaaaaacagtgtgtaaggcatgaatgattcatttatatttttcacactgtgtatctatctttaatgttgtaaaatggttcacaagtttaaaaaaaaagaaattaaaagtgaaattacatgtcactttgtgcagttattataccatatatgtacaaaagactatcgactgactcttttgtggcattggctaaccgaaactcttaattcatcactcctcacaaaagccctgctatgtaagaaagacagtcactgagcatagttatttatgtagagacagttttatagaacatgaaacagtgggctagaataccacctgttggttggcagcaagtgcatagagctcattagtactttattgctttttctgcttag

SEQ ID NO: 51420 - DNA, 1952 bp, Bovine  19866880646900
  misc_feature (1)..(1): n is a, c, g, or t
ntcagcccctccttttccctgatattcctcaatcctgaaggaacaggggcaagacaagaaaggaaataaacttttgtatacaaagtttaaccataaatttagcaggagaactcagggggattctgcaccctaccaggctcctccatccatgggatttgccagacaagagtactggagtagtttgccattgccttctctgtttcaacagtataagcatgcctaaatttaatccatagagtttcaaaagatccaaatggccttaatacttcaccagtctggaagaatttggggagaaatggatgagtttcagaggtttccagaacaacctgggcctagaaaggattttcaggaaaagtccaaattaatgtagagccccaatcaaccctgaatattcattggaagaactgatgctgaagatgaagctccaatattttggccacctgagttgaagagttgactcactggaaaagaccctcatgctgggaaagactgaaggcaggaggaaaaggggacgacagaggatgagatggttggatggcatcactgactcaatggacatgagtttgagcaaatctgggagacagtgaaggacagggaagcctggcatgcctgcagttcatggggtcacaaagagtcaggtatgatttagccgctgaacaatgacaacaacaagaatcttatactcaacctacagctgattgaagaaaccgttatctctaatgatccaaactgttagggaatccttgactgaaactgctgccatgcccacgcatgagttgcatgagttatctcacaacaagagctactaataaggaaactaactgggagaattcaggaggggccaaaaggaaggaggagctatcagtccatatcttctgccaacctcccagaatccttctctttggactccatcttggctgagaaatatgcacactaccaagaagaatcccgagtcaaaccaaataaagggccaagcaagataactaaccagagacaacctagataccaaccccattatcataaaacctgagactgtgagccacacggcagagcagttttcctgggttcccttaccttgcttctctccacccaagcacccctttccaataaagtcttttgctttgtcagcacatgtgtctcttcagacagttcatttctcagtggtagacaagagcccgtgcttggaccctggaaggggtccccttcttcaacaaaattggttctagagggaataagacagaggggacaactctgccccagcctccagctctctcaatatgtctcactatagttccctttccctttatgagaatttcagtccaaaatgctaggaaatttggaattcctatcaacaatactttaaatccgaataatcaacagctatgttctatgcccccttcccccatctcagcctgacaagaattctagctctttcagtaattttcttcattctcatttatcaagttctctctcatgctttctgaataattaagaaaactgtgtgaccttgtttgcccttggagttcatcacaaaaatatttccttttcggcagctgactcttgcagcactcggatatgaaaaacctgtctctagtgagggcagctatttttattgttttccttctgaaccagctctgctttgtcagccaaaatatttgtatccttttcaatttgccctttcaatactatttctcaaatggtatcatctgtgtcttctccatcctccaggcacagcctgaggagggcagctggcctttccctgctgcatttagcctaaagaaactggctgccaccacctcactgaacaaaggcttctgaatccacattccagatgtggctgcctactccttttagagttcctctgaaccatctaccccaggcatcatcaacctgtttcaccaatcacctcccaggggccaagcttccttcattgtccatattccccaaactct

SEQ ID NO: 51421 - DNA, 1827 bp, Bovine  19866880660869
  misc_feature (1)..(1): n is a, c, g, or t
ntttgcaggttgagagccactaatggctttccaaaaagccgtttcagtagaaaaggtaggaaagggccaggttgccatgataagggagaaaatctctaggagattctcactgcactctaggacatcaaagcctcagaaattctgcttatgtttattcatttacttttagcctagtccttcatgcttcctaattcacaaattcttttttcaagcaacatgaattaatgtaaaaatgccatctgtttttcattagaatgcactttaagaaagacagatttagaagctatacatatttaactacaaacttaaaataatgtactgaaagaaataatgtagaagagatcaatggaagctttgtaataaataatatatcatttcaaaaaattctgaagtgactattttaaaatctccttaatttttatgagaatactggtgggccctgatatttaccttggctaccccactccagtactcttgcctggaaaatcctatggacggaggagcctggtgggctgcagtccatggggtcgctaggagtcggacacgactgagtgacttcactttgacttttcactttcatgcattggaggaggaaatggcaacccactccagtgttcttgcctggagaatcccatggacagaggagcctggtgggctgctgtctatggggttgcacagagtcggacacaactgaagcgatttagcagcagcagcagcaatatatggaaaacatatggtgaaaagaagaataaagctatattgctttgggggatttttagatttgcttatctagatttgaacagaaactaaataattactaagtatattgttgtgagagggagggcagtgaaactgctgatgtaagatgagcaaaaaatttgatctatcattcatactccctgtaatgtgtcagaaacaactattttctttcctacaaaatgtgttactggattggaaaatatgataccatcaaatagcccagcaccagtgtatctagtccattactgggtattgtgggacttctcatgctaaagtggctgccttagttcagttcagttcagttgttcagtcatgtccgaatctttgcaaccccatggactgccacacaccaggcctccctgtccatcaccaactcccggagtttactcaaactcatgtccattgagtcagtgatgtcatccaaccatcttattctctgttgtccctccctccttcccaccttccaatcttccccagcatcagggtcttttcaaatgagtcagttcctcacatcagctggccaaagtattggggtttcagctttagcatcagtccttccaatgaacacccagggactgatttcctttgggatggactggttggatctctttgcagtccaagggactctcaagagtcttctccaacaccacagttcaaaagtatcaattcttcggcactcagctttctttatagtccaactctcacatccatacatgaccactgaaaaaacgacagctttaactagtccaacctttgttggcaaggtgatgtctctgctttttaatatgctgtccaggttggtcataacttttcttccaaggagcatgcatcttaatttcatggctgcagtcaccatctgcagtaattttggagcccaagaaaataaagtctgccattgtttccattgttttcccatctatttgccattaagtgatgggaccagatgtcatgatcttagtttcccgaatgttgagctttaagccaactttttcactctcctctttcaatttcatcaagaggctctttagttcttctgtgctttttgccataagtgtggtggcatctgca

SEQ ID NO: 51422 - DNA, 690 bp, Bovine  19866880926412
  misc_feature (1)..(1): n is a, c, g, or t
ncctgatgtgtcccggcctgagaaagttgtggattccaaaaagcttgttagtccctcccaggcagtcatcagtccattagacaaagagaaaagcaatactttctactccacttggcatctattttgcttattctgaaaagaaaaacatgttagctaaattataatctgacttggcctttatttaacattttcaggggggaagtgacaatagctttagtggtaagcacaactgatagacctgataactttatttttgcaggttcccccccgccccaagtcattagtgagtgagagcccttaggacaaaatactagggtagaaatttaagatggcaatgattcataaaatgtctttcttgtggagccctcattttgctttcatttatgcctagttagcaatctattattgaaacctttttttttgaaggcgaacactcatagtaccaaaacagttaagtatggcaagaagagaagagtgataccttgtctctaagaggttagttaagacttttccatccatgtaagtatagacttgcaatgaactttgtttttcttgctggccattaactttttttttttaatttcattgaacatgaacatatggtgctttcttgataaagagcttttattctaaagagttaatcctcaaacatggatggatgtttaaaaaataaaaattctctatgtgagt

SEQ ID NO: 51423 - DNA, 819 bp, Bovine  19866881220574
  misc_feature (1)..(1): n is a, c, g, or t
nacaggcctgattctatcccccagtatcctcagcttcatcttctcccagtcctgaccgtcctgatgtattctttaaaatcatttgcaaataagtttctgtagtggatactttgttcatagacctactttagaacattaatttacttttttttcgagatcagaactatagttcctttttttttaaagtcaaaacagtccttattggagtctctagtgcctctgaatctgaagcatccaaagaaacaagtggtctggggacacatgaagtttccaccattttatttgtagtttatttattaagagcaaaaaacagcaagtaaaatagggccctgtctgaaaatggacacccaagaatgccaagagactgagagcatgctcaataatgcagagtagcagccgtgctcggcaaatccattccatggcccactcgtttctgtctgcagttaacagactgaaaaaaatgaatgttgtctcaacccagtgaccaaaagatattcacaaaggcccctggattagcatcagtgtatttagtacttgaaaaatagaccactaagctaaagaaaatcagcaaatggaatgacatggcaaacatggatagaaagtgagaatttaatatattttaggcctgatttcttattaacactaaaataattcacttcttgtgaaaagtccttggcagcctactaataaggattaaggagaatcacctgatcatttctattagatcagcccagatgccactgcatttgatacagctctgattccccttgccctcccttctctcaggcaggaaaaaaatgtgtaaattaaaatcaagca

SEQ ID NO: 51424 - DNA, 1183 bp, Bovine  19866880465904
  misc_feature (1)..(1): n is a, c, g, or t
ntttgggaacttttttcttttgtaaatatgaacgataacttcaccaccaacaataatagtttgcacaaaaaagtgactatgattatttgtaccttacacattcaactgcgttgggatcatgtgattggtttgaactgtcatcaccatcagttagcaagtcactaagctgccttgcagcagctgaagagcagagcgaatggggactgtgtgtaacccaatgccaccactggcgccaacccacagagcgcatacagttgcccggagctgaggccacacgcccaagcctgtaactcaataatcttgtcaaagtaattggccacaggtggtccacacagctgggtgaacagctgagcctgttcactatttatgaggctgtcttaacaagttgcttgaagttgggtgtgctgatctctctactgtacatggttctcaccctggagtgatttttgcctcttaggggatgtctgaagacattttttattgccatgacttgtggaggtgttgctattggcacctagagggtagaggctagggatgctactaaacatcctatactgctcaagacagccccctgcataacaaataattactcagtccaaagtgtcaatagaactaaattggagaaatcatgctctattaaaacacagacctgggctccacctctagcaaatttgctttgctttgtttagcagaacacagtggctgggtgatgatcaggaaccacagagaagatgacttatccctgaactttccaggccttgaacttgagaaaggtattaatgggtcctgaatttggcaatggaataatgtgtttcctctcatatgtgtgcgtgtgcatctgtgtgtgtgtgtgtgtgtatgtatgagagagagagagagagaagaggaggggaaggaagggggaggggaggagaggggaggagaggcgttgttgcgaaaaataatttgcaagcagagacagcaatccaaatctgaacaaagaaaatcgttgaatgctaagccccgacagcacatgcatagcaatgccaggatagtgaatgattgggatgactctaacccaataacctccaataaaatgcacacaaattgtatacaaaaagcagaatccctcctcccgcctcccctgcaacagcaagcaacaaaaagcaagttctgtaaattcagtccttcaccaacatttatc

SEQ ID NO: 51425 - DNA, 2487 bp, Bovine  19866880467290
  misc_feature (1)..(1): n is a, c, g, or t
nccagcaacagggtcttttccaatgagttgctatttcaaaacggaatttaagaggtagagagaaagaggaaactctatgatgatgtacatatgtctcttagagttcagaagttaaggataagttccgtaagaacacagagtcctgaatgaatatatgtgaatgtagaaatacagaagcaagaggaccgtgtgttgcttctcaaactttgaacaggcatgagaatcacgtggaggagttgttagagcagattgctgggctttgctcctagagatgctgatttgatggttctggaatgagttaacatgttgtaaatccttcctctaagccaatgaggtaggcaagagccagtttttcagcactggctgaaaagttcttgtaagattagagggatccatcaaaatctgtggaaatttaaagccagtttccagaatccaaaagtagtcaagttggttcagtggttcctcaactttgccgcacattggaaaaacttgagaatctttaaaaaatgttgctccctggctcccacccctaggctttatgttttaattggtacagggtgtggcctgggcatcagtcaggatttttaacagctcctcaggtgattctaatgtgcagcaatgtcaggaagcactaaatcaattaatgctgcccaattctcctgtaaaactttatatgagaggttgtatagttttggtgaggttgggcgagtcactcaatttccctgggacctgacccctccaccctagttacctgttgatcatttccaggcattcactgtgacatgccctgttttcctccttgggaaaggaaatatgtttcacattgctactgaattattttactggtggtaaaagaattttgctatgaattcctttgtaaggctcatcttagatagtgggttcctttagtaaacttaaagtatgattcaaaatttttgacttacatccaactatttaggaacacattttattgagtaaagatatataacgtgtctaggaatctatattggagaaggaaatggcagcccactccagtgttcttgcctggagaatcccagggacgggggagcgtggtgggctgccgtctatgcggtcgcacagagttggacacgactgaagtgacttagcatagcaggaatctatatagttgaagacatttgctataattgtgtaatagctgagaattaaggaagctgaccctccatctccatagccacagtgtatatatggtattatatggtattggttcatagtggtcaccaccatctaggccagaccaattcttcttttgcatttgtatccttgtggcttctctgatttagtccagggaatattagaagtgaaaggaacttgaggttatcatctaatctgcttgttatagaagacagtgtaaaacagatgaagaaattttctaagcctgtgcagccaagagtaacagtaaatacataatattttctgagtcgtattgtttgctatgctctggactaagtgctttaaatgaattacttacttttgtcatttaatcttaaaaaatcttaaataattttttgcttatttaaataatttaaattaaataaataaataaattatcagatgggcattgtaattgtctccagattatagatgaggaaattgaggatcaaagaagttgaggaatgaaaagttgttaattttagcagtttatctccagagcctatattatatgaggctgcctctgtagtccaagtcaggatttgagctagagctcaggatttttgttcccctgttaatttttgcttgtgttctattgatgcctatgatctactcgtcctgttattctgttacaaagaaaaattagattaatgaaaaaatgacttttctgtttgatattttatgaactgatttaagcagtagaattgcattaaaatacattatgtttgccagcaagttattgttcaggtaagtgttacattcttaaaaatagtaagatttccttatgaggctgctttttgctttacataaaagatgatttattttttgggcggcttagatttgagatagcatctgtattaaaatacaatttttttttctaaaattagtttcagataattatgtaattgtatattttttggtcactttaaatttctagttatccatatagaaatggatgttttattttttaattttaattttaaaattttatttttgtcttaagtaagacaaaaatattagatgatttaaaatgagggcaaagatcctcacattgagtgtaattatattttaggaccagctaatgtcttatctcggagaaggcaatgggaccccactccagtactcttgcccggaaaatcccgtggacggaggagcctggtgggctgcagtccatggggttgctaggagtcggacatgactgagcgatttcactttcacttttcactttcatgcattggagaaggaaatggcaacgcactccagtgttcttgccggagaatcccagggacggcggag

SEQ ID NO: 51426 - DNA, 1298 bp, Bovine  19866880468231
  misc_feature (1)..(1): n is a, c, g, or t
nacacacacacatatacacacacactttcactctgtgtgtgtgtaactcagtcacactgctgtgtagatgaaattaacacattataaatcaaatatactttaataaattttttttaaaaaaagaataacatagatgcccttgctcatgtgagagacccaccatggagaaagcctgaaaaggaccaaaagatttcaaccctcagcaaggagaaaactaaccactaagtggactgaaagggacggtgcatgggaaacaaaaattaaactgctttaggattgcaccccaccagtcctgttagtcattccaagtgtgtgcatggtatggtagcatgtgcttcctatgtgcacacaattcctaaaccatggaaactgaatatctatgtcaacagatgtatttcctgaaactattctaggaaaatcaagtgtattcagtgagccaccaactgccaaatattgcaataccacttcagatgcacagtaacattaaatgcattctgcctctgctatctacacattagtatttactttccattaagactaaataccaaaagctaggcttgcagaggtcttcttgttacctttatagagaaaagaaaacaagcacagtttacagagctctgatctccaaagacactttgagaataggaatcagcctatggcatatactctgggaactttaataatagccacctaaagtgtaaaatccaatggactagttccaaattgggaaaggagtacgtcagggctgtatattgtcactgtgcttatttaacttatatgcataggacattatgcgaaatgccaggctggatgaagcacaagctggaatcaagactgccaggagaaatatcaataacctcaaatatgcagatgacatcacccttatgacagaaagtgaagaggtactgaagagtctcttgatgaaagtgaaagaagagagtgaaaaagctggcttgaaactcaacattcgaaaaactaagaccatggcatccagtcccatcacttcatggcaaataaatggggaagtgatggaaaccatgacagactttattttcttgggctccaaactcactgcagatggtgactgcagccattaaattaaaagacgcttgctccttggaagaaaagttatgacaaacctagatagcatattcaaaagcagagacgttactttgccaacaaaggtctgtctagtcaaagctatggtttttctagtagtcatgtatggatgtgagatttggaccataaagctgagcgctgaagaattgatgcttttgaactgtggtgtggagaagact

SEQ ID NO: 51427 - DNA, 820 bp, Bovine  19866880469417
  misc_feature (1)..(1): n is a, c, g, or t
ntttggatgattgaaattgtaataatttgggaaactatgttaggaaaataatgtccatatcctcaggctgacccatgatctattgcctcttttcaagatgatataatgtctgtttttcttttgttttgtccttgtccgagagcactccacaatctcagaataaaccaaagccatcatgcactcagatgtgtgtgcctaaacacactgtgtgcatctccctcacgctcacataacactgcatcgcttgcttatacaaacaaacacgtagctactcatcagaagtgctctattacgcctgaaagcaggcaatgctaaggccaactacgaatattagtcatcaagtctggacacattccttcagcctttttcctgctaacaatagatagagcctgattgtgtgtagagaagaatatctttagccgttagatacagaccaaatacatttgcaaaaagatatattggtgaatactgtgttgaaattgtgatatacagagagatgttcttcaatagggaaaaacctataatgtattaacaggagactggattatgtccacagggcacttgtctggtgtaacttgtaaaacttaaaagtcaagaggatttctcatttgtgagacccttgtgtaagggtatataaacattcctttgcatttacaaagagaaatctggcttctacgaaaaagagcctttgcacttaaaaagacaaaatctgatttctgtggttattttcctagtaaatttactatattaaacacaacttttgggaatcccctggaagtccagtggttaggactctgcccttccactgcaaggggcatgg

SEQ ID NO: 51428 - DNA, 842 bp, Bovine  19866880473474
  misc_feature (1)..(1): n is a, c, g, or t
nctgagtgagtgatatttccccccaccatggcagtttactagaaagggctgcttagccactgtcagggtgtggagagtattttgggagaacgcaaaggtttttttctcttttctttaagggttgaatagtcttctgaaatagcattggctactctgaaagctgcaccatttcatctgtcaggggaaagtcttcaagaataggtgactgcctgctggcttgaactgaaaagctggacctgggcatttgaaggctcctcacccttccccctgtttttggagtgtgtgcttgtttaccttcccggctccttgctgccagaacttcccaaggatacaaccttgggttaataatgtggtgatgagactatctggactgtggacgtgactgaactcaggcaaatcttccgaatagatttgtaaactcctgaggaagcttgagaaataacatcatcttaaaaataatattttgatcccagaccataccatgtttctggctacccaaattgacaagctttacccaaattaccatacacagtcacatactgtttgcaactgactccatttttagcaatgtcaaagggaagaaggaattctcaggacggtgaatacatttgatatgcctaatactgctctcagaaggtcaactccatgcatgtccttcccacaggccagcattccccagcactcttcatacagccccttcccgcatgaacaccccctaggctctgccaagttccccaccagcgcctcagccctcttctccttcaggtgtagaaggaaatctagacggtcggcattttgacggctttggtctccgtgatgcccgcttccatccaagataaggg

SEQ ID NO: 51429 - DNA, 2417 bp, Bovine  19866880544558
  misc_feature (1)..(1): n is a, c, g, or t
nacattttccctaatgcttagaggattgttgtgagaataaaatgagttgtacaaagcagttagaactgtacctgggacagagtaatggcttaataaatattagctattatttgctattatctgcctttctttcttcattcttttatcttttttgtaccatgttagtgaatcatataccttctaaagtctgcctttcagccctctcctgctaaaaaattatctcagtttgccaacacaattttgttcaaaggaaaatacgtttacaggttgtcacctcttttaccaaagaatgcttagagaattactatatctaaataccagttatctttcactattttcctagtgcctatgattacacagtaccaccgatggagaaagtgcttgtgaaaactgacattcagatagcccttccttctgggtgctatggaagagtgggtaagtgacttgagacacagataactatttgtcatgctcttcccttgtgatcagttctttcttcttggtttaaaatttggggtgtataaatgagggaagggatattgcttggactgtgtcctaaaataaagacatgccagctgcgagggcagttgcaatcacttgaaaactttcctttatgtagctacatttgcctctctttgcttttcttcctcccccagattccttacttaaggttttaggacactcacattagcctaggaggttgttctcacaactgttcactgtgagaaaaactgaaaatataggtgatgtttaactggtggtttttccagtggtaaccaattctcccctcagggatcagatggcatatgaagtcagatttctttgtgaagatgtttatttgttttataagaataaagatgcagggttaagataatggcacatggcatcttatatcaccaatataagtaaagtttctaagccctgagaatatcaggcccttagcctttcccccttgggtttcctcccatgaggtgttctaggtaagggatgctcttcagtgcactagaggaaaaggcctcattgtgggaggagagaggataaaatgcagggcaagccaactaaaaatcaaaccaaaaaatgcgggtttgattttttttcctgcagcgagtcagttatcactgtagaaagagtttaaaacttcttttcaagagtctaattacttgctgactgacttaagagtaaacataaaggagcaaatggagctgtgatcccagggggatcttgttagccagagtctgagaactgctgatacttgaccctttaaaagaaaactgaaatgagctctctctcatttgaactctttttggctgcactgacggcatttttagtgtattggggcgggggggggggggggtggatcaggagatgaggtgaaataacggtgaaggcaggaaggggtagcatttaccaacaaagtgcctgatttaagttactctggaataaaatactagaaattaggataattaattgtaggcctgttgctcaagtcagcaagagttaaggtatataacttagcttcttactctggttcatttgtttcattcagatttgtcttttggcatctgaattatgagtaggagtcccaagttcaaggttaacctctgctactctggttgggtttatgcccctccccttcttacccatactgcaacggatctcctatcttaaaagtcccttcctctgccccatgtcccttccagcttccatcctccctttgtgatcaaacatctggacagcattgtccacggttttcaccacttgttcactttccatttctttcctgcagaccacagcttcaacacttatcctcagttgcctaaagacatgctggagtggtttaagttggttttgaattaaaccttgtcaatatttttccaaacttttctactttgatcgtacaatgtgataaatacatttttaattcagaactgtctgctaaggttaagatacagatgttatagggatgagagtggcatgcttagattgtgtcaattttattcagtattgcccttcttaagatagtcaatttatttttgtttgtttgttttatagctcctcgttctggcttggcagcaaaacacttcatagatgtaggaggtaatatatttacatttttattctgtaaatatttacaagtgtttattttgtttttgcagtaatcaaatgacagattttatttttatcaagaaaagaaaatgatttttgttgtatcttgccttttagaaatttctgtccctaagtaaaagatgattatgatacagttttgaatgctatttgagtatgtctacttttttaatgaccattatgtgaaatgttgttattttactcacaagctagacactatctgacagataggattttgccttggtttagtgataatctgcatttagtccaaaaagactgttcacagaaggaag

SEQ ID NO: 51430 - DNA, 1115 bp, Bovine  19866880554694
  misc_feature (1)..(1): n is a, c, g, or t
nttaaaaaattatatatacatattttcaaattacatttttcacttaatctctgtatttttttaggtcactgtcagaagaagctattgaaaatgcctgcctgccatgcaatgaggtggccttggaagaacttcgtgggcaatacattaaagctgtaaaaaagattaagcgtaagtctctaaagagatccctaaggttttaaggtggtttgggtcttttttgtaactaatcgtagtaatttgggggaattttctgaactaccttaatctgagatattacctgtttttagaagatatcattgatagcttttctaaattatgccatcataggtgattttacccaagtaaatttggagtttgccactaaaatttgagaagtggcacaaggatagagatatttttatactgttaattatcctggggttttttggggactaaaatgtatgtgtgtatatatattttaaagtataactgacatatatcactatattagtttcaggcctgtaacataattgattcggtgtttgtttatgctgtgaagtgatcaccacaataagtctagtttccccatcaccatacaaagttacaaaatatacaatagtcccctcttatctgtgattttactttcatggtttcagttacctggggtctactgtagtccaaaaacatgaagtggaaaactgcgtaaatagttttaaattgcaggccattttgagtagcatgatgaaatcccagccatcgtgctgtgtctgcctctggaagcgagtcgcccctttgtccagcatattcgcctgttggtcacttagtaccacctcggttattggacccactatcactatatcgcagtggttgtgttcataacccttcttttaccgaataaaggccgcaaagtgcaagagtagggatgttagcaattcatatatgccaaagagaagctggaaagcgcttcctttaagtaaaaaggtaaagttctcgacttaataaggaaagaaaaaatcatgtggtgaggttgctgagatctaccgtaaggacagatcttctacccatgaaattgtgaagaaagaaaacaattcatgatagtcttgctgtcacacctcaaactgcaaaagttacagata

SEQ ID NO: 51431 - DNA, 975 bp, Bovine  19866880596890
  misc_feature (1)..(1): n is a, c, g, or t
ntgaaagtgaaaagtgagagtgaagtcgctcagtcgtgtccgactcttagcgaccgcatggactgcagcctaccaggctcctctgcccatgggattctccaggcaagagtactggagtggggtggcatcgccttctcctaatgaacatggaaagcttataaatgaaaaggaaaatgaaaacacatagcagcagcagcatggtggtggaattatcttctgatctaaattagctattcagccaaaggaaccataagagattatggaagagagagaaactttactgggaattccaagccaaatgctgtccattctctgtccctcctgtgacaaagtagtgccctaaactttagttcggagtgcccagaacttcccagggcaactcataatcttggaaaggggagtgagaggaagagataggacagacagctggggcaggagaacacccaaacttcacaaaagttctctcaatctaaaatgacaatccaggccaaagtcaaccacctcaaaccttccccaccaacaactccactggattcgatgcaactccaaaccaaaccctggaagagcttcagagagttcctgagccttttgtagggtgtcctgtactcagagtaactatgtttttcaaacaaaaaccaagacacattgtctgacaagaatgagtgtatttatggagtaaacacatacaacagggttaaaaaaaaaaaaagtaggtaaaaaagagtacaaaattcagtcctacaaagcaagatattcaaaagactttccaagatatttaaaaaatcacagtaatagacattctttattgttccttcaatgtttagaatcaacctatagacaaaacatggacgacactgcaatttacaatggttacaaaacaaaaggtaaatgttttaaacaatcatgggtcataaatcaagaaatagtggaaagaaaagcgggagagaaataaagcaatgattcaggaaacagagg

SEQ ID NO: 51432 - DNA, 1254 bp, Bovine  19866880610829
  misc_feature (1)..(1): n is a, c, g, or t
ntttcattttaaaatgcttaatttctgaatcaccctagagtttattgtgatgtttggggcgggaaaacaatttttccaaagtgctatctggctatcataagactacttaatatagaataattcctcattccatgttttgaaacaattaagtttttattcgtggttggacctatcttcaaagtctgtatagtactgaatgaaagagaattctatttttgtgactcaacactgtctgaattgttgctttccaatatattctattaagtgttagggctggactactatttcttttccagaatattttaaatttcttagccctttcagttttccaaataaatgttcaaattattgtgtcaaatttcaaaactaagttcagtttattggtattctgactagaattggtttatagtaataaagtaagttgggagaatacaaatggttgtaatacctgatacttctagtcaagcaacatgacatctctggaaagaagtgctgattatttaccaaggaaagtataagactactgacacagcacataaaacaacagttacatgtgtgaaaggatatatagctaactgctctctgattctcctaaaaatacggcaaagtagaaaaagattttgttccatgggtaggtccccagattgtgagagtttcattgactctgaaacacattctcttcccctcaactacatgatactgatgagaacagatcccactagttgggtcctgagctaatgcttaataggcactatcgcatgtaatccttccacaatgctgtgagcaggtaggagtccctgggaccaagatgaggtcctcgagaaggttgttcccaggagagctcttacccgtttggccactgactgctcttgtagctcctcccacttcttctgttctgctcttacaagtgctttatactctgcgagctctggcagttcttccagccaccgatgacgagcattctgcacagctgtttctaccttcaggagagcaattgcaagagacagggaggtaaagtaaggtatacaatttcagaaagatcccatttgcaggaagcctctatgatttcctgtgcattttacactgttttgcactggagtaaactgattttcaagtcgtccccccaccaacctttatctccagcagtgaattcaatccttctgttctaaatgttccatactggcccatgcaagtaccaaaccaggaagcagaaaactatacatgtttaatggccactacaattaatagaaagag

SEQ ID NO: 51433 - DNA, 2695 bp, Bovine  19866880623057
  misc_feature (1)..(1): n is a, c, g, or t
ncttatttacctctttgtaactgttttctactcactgtatttgttccttgtttttccctttgctttctctgatttgagttgaacattttatataattccattttctctcttagcaatgagacttcttttaaaagaaatttgattggttgacagttttaattaactgaagcctaccttcaaataacactgctgcacttggcacatagtacagacacctcacaacagaatatgtcccttcctactcttcctgtcccttacaacagcagtgcccttcacttcacctatccatatgacataatcaaccaatacatggctattatccttaattaaaacaaaagctatctatcaaaacaattaagaataagaaaaataactgattttaatatatggtcgtttatttcttctctgatgcttctcctcactttacacagtccaagtttctaacaatacaaatttccttctccctaaagaccttcctttaatatttcttgcaggacaggtcttttggcaatgaattttctcaattttgtttccctgagaaaagccttatttttccttcaatttgaaggacaatttcactggacatagaatccaggttggttggtttttttttttttcttctttcatcactttaagtactttgctttcttcttacatgataagtctattgtaataatttatttatttatgtaagcctcatcaggtggcatacagtatttccctgaccagggatcaaacccacaccccctgcagtggaagtacaaagtcttaacctctggactaccaggaagtcttgtaattcttacccttgttcctctgtaggtgggcttctctggtggctcagatggtaaagattctgcctgcaatgcaagagatgcaggttcaatccctgggtcaggatgatcccctggagaaggaaatggcaacccactccagtatccttgcctggaaaatcccacagacataagtagcctggcaggctacagtccatggggttgcaaaagaagttggacatgacttaagtaactaaacaacaacaacttcatttatagttattataaaatattggctatatttcctgtgttgtataatatatccttgcagcttattttatacctaatagtttatattgtttaattccctaccattattttctcctccctcaaccaccttttatattatatacatcaaatttaaatttaattgtctatctcctcccataagataatgtctatatgagaatgtaaactgtgtcagagcagggacttggtcagtatctccaatgtctagaattctgcctggaacatagtaggtatttaacaaattttttttttaaataaatgaacaggaagaatcactcggaatgcttacgcattccaaccataaataaaagctttgagagtaaaggcaagtgttttcaaatgattgcaatctgaaagggaagtttttcttggccatccacataagcttttcacaattatagtatacgaatgtggaatcttatgtcatgggtcatcaaccacaggaaaaattaaaataaatctcaggccacaaagcagcagaaagcaatacttaagggctagagaagggattcaacaattagtcaccacttgctttgccaggagtggttgagagcataagcgcaggggtgagacagacaagggtttgagtccttaccaccaggccctcactctaccactttgagcaagttagttactctctctgagtctgaattttctgttctgtaaaataggggtaaaactttcctgagttgtaagaactacatgacataacattcttagcacaacccctggcacattaataaacctttaatataggctggctttactcatgtattatttttaatatattgttatagtaagactcaactcaccatcatactttccattaagtaacccagcagttgcacacagccacctccagcagaattctccaaggggcaaggaactgtttactggctatactcataagaatcttcactttgtggtttggtaggtatacctaacaggaatctacatatcataccattaatagtttgttgatttcagacttcctagggagtacatgtgctttcccagtggcttagtggtaaagaatctacctgcaatgcaggagacacaggtctaatcactgggtcaggaagattccctggaggagggcacagcaacccactccagtatttttgcttggagaatcccatggacagaggagcctggtggactacagtccatggggtcgcaaagagtcagagttgactgaagcaactgagcacacacacagggagtacataaacattgaaagtaatggaacccatgctcagatgagaactctagtcaacaaattacagatacccatttggaatgtgttttccacatgcttcctactcccttgctctgtggagctggtgactagcttttacaatgaggctagagggggagaccctgtgctgatatggtcagaatttctcctctgtggagaggaaccacaatgctcttgctctattttactgcttatatcttttacttagctttagttctcctgttactaatcttatttctagctcatgcacttcttcaaagctttctctgagtcttgagtcttcttactgacctgaagagcagctagatgatacaaaagtctgtaacaatccttttttcctttattcattcaacag

SEQ ID NO: 51434 - DNA, 2059 bp, Bovine  19866880684180
  misc_feature (1)..(1): n is a, c, g, or t
ntaagcgtcttttaactggagaagggaatggcaaaccacttcactattcttgccttgagaaccccatgaacattatcattagcctttacctaatgcttattattctgtttgtccaaagttttatcacttcacaactgagaaactcatgcatataaaataggagtcccttgaatttgttttgattaccctggtcttgtctgaaaaatactttgcatttgggataggaaacagaagggctatcctggctataagacgccagactcacagaagtgggttctggcttaggaatgtggacacactgcagacatctcacacagaggccaattcttacaatgatgtggtcagacgtggtagagcccagctgtttgctccattgagaggggctttagctagcccacacaatctctgagactgtgtctgaactggatccaaatatccagcctgccgaggctcacccctcccctagagtgactggagttgggttgttgcagggctaacattcagagcaactggtaagaaaagttacaaagagtaattgaaaaaatgtaatgtatagcagtaaagtggaatcatatccttcccaccataaactattaagaatcaggtaaaacagtttatgtttggctttggtcagttgatggacattttttgatatttttaatctatgccaccattaatgctgctgagcgaatatcatcttattacctaaatacatctttgccttaagacagtgtgctctaaaataagatttcctgggttcaaatccccattctctacttctaagctatgggactttagctagctagcttgtttacccttcctaagatatagtttccttactgttaaaatagtaataatggaatttagctcagagagtttctatgaagatgaaataatgtgtctttagcacttggcatatcttttctctttgaattttacctttaatttgctgaatgctactgccacttgcatggagctctaactctgacttttgttagtgatgggttggtgggtatatctgatgaagtacaaaggaagaggtctgaatgctacacttttatttacacaaaaaagtaacttcattaatgatttgtcttctttattaatgattttttgtgctgaaacctggagagtaaaatcttttggaatggaaataatccaacatgtctactttagacttcaaatatcttagtgctttccaacttaaataagacattcatttctagaattaaaccttgtgtgtgtgtgtgtgtgtgtaagtagaataagtgccatccagttagtttgcagttctcaagaccaaagtcagcagaggagaaaacttatatctttctaatactttgtattcagccacaagacatagtagggtttagtgttgttgaagaacaaatggtaacaagacaaagcaattgtcatttgatgatatttgttgaagttaaataatatattacctattaaaaaggacaaagttattaaactccaaaaagtcagagcatgaaaagaaatcataattcaacactatatagaattttaagaaatgcaatgaaatgaaaatgtgataattaatgaaagggaacgatgaatgcttcattcgaatgaagcaggaattaccctgtttatgagataagaagttcatacgtttaaagtaaaaattgttgttttaaataaaagatgatcaaagtataacaggacatatttttaaaatgaatagttatagatgggtattaattgaggaagcaaaagaactttctgcttccccagatcttcatctcctgaggcaaccagttttaaccatttctgtttttatttcttctcatgtttatcctcctgacaccatgcactgtgtttgtaactctgtgtctacatttaaacagtacatattggcttcttgcggtgagagatggggacatagctcacttggatctatacttttactctctcttctctttcccattttaaaaataattattgaatgacttttagttattggtatttaaaaaaattaggttcttaaacctctgtttcctgaatcgattgctttatttctctccacgctttt

SEQ ID NO: 51435 - DNA, 2529 bp, Bovine  19866880723565
  misc_feature (1)..(1): n is a, c, g, or t
ntttaaatgatgcctagttagttttcttttctcgtggttggattaaaatatattttatttataaaataaaactataaagcaaagaattgaagctttttttgagtatgtggaagagactaatacaaataagtaaaatattaaaagatgttgattaaaatattaggggtagtttgatgctaaatgtgattattaaagatgtgtttgtgttcaactataatttaatagttgtcctgactggctttccttgactgaaccaacagctatgttcaatgggcagtttttgtttgatagacctatgcatgtgaaaatggtgagttcctgtgtatcacttcaactttccaacctcaaattttacctgctttcttctgtgttacagatcttttaaattgtatattaaccatataataaacttttttgcaactaggatgacaagtctgtccctcatgaagactaccgttcacacgacagtaaagcgccacagttgccgcgtaagtgacgctgctcctagagcagtgcaggctgtcctgtacgaacaggcctgtttctgcgctcgcatccctgctggccctcctccgtttgatgttttgagttatggaactagtttgtcctgattgattaggaagactgaggacataaatatttgccacttttcttttcctttttgtagtttttcctgattataaaagcagtatatactaaaaagtttgttaaggtcttatgtgggtggggagaaagtctttgtaattttattatccataaataacctccattataacatttttgtgaatttccttccagtgtttccttatatgtgtatttttttttttacatatttgagaactaccacataaataattttctttttttttttgtttagcattagaatgtaagcactattccttgttataaattctttctaaaatttttttattggctattaacgtatcatatggatgctccataactatttcagtgttacctatattttgggtatgttaactttttttcctttaatcaccaacagagttttccctttttcttttctttttgtatacaagtttttggtatgtttttggttatttcctcaggatagataccttgaagtagatttataggttttcaagtgatcagtgttatcaaattattttccaaaggattataaaacagcaatatacttaacatctgtgtctcaatgctccatcttcaaagtgaggatgcttatggtacctactttgtggattggcatgagtattacgtgagttactatataatacatgtcaagtgcgtagaacagctctggtataatgtaagcactcagtaaatactcttattctttttgttacatttttctggttattattaaagtttttttatcataaactgttaatttggacaaatataaaatcactcatgtagctatcacagaccatatttgttttaggtgatttttctttaaaataacattttatagataaagattctcctcttaccacctcccactagataactttacctagaggaagcaacttatggatacagtgtttatcattttatctacattttaataatttgattacacatttatatatccataaatgttatatgaaattgttttgctggattcaaaattgggtgtgagtgaaattatattgttcatattctgcaacttgctgtttttggtttaacattgtttttgagatttcatgtatattgaaaaattgtagctctaatcctttcactttaatggctaatgccacattttgtaaatatatgtgtgtgtgtattttaggttattctaatttttctgttataagaaacaatactactttcaggagaatttgttctctttccctgaaaatgctctgttctctcaacattggtaaaagtgtccgtggtgtgtagtgcttaggggaagatttttacctattaactttatttactactatttatatactattatttactatatttactgttgcttcttgagtccattgtggtaatttctatttttctgagaattttaccattttttttcattttcagatttgttggcataaaatagtctcttttaatttgtgccgcagctatagttctgtcatttttaaattccaaaggtttgcaattcctctgtttttcttagtcagttttgcttggagatttgtcgattttattagtgcttttgaagaagtaaattccattttttatatcttagtttatgctcttagttttatttccttttctatttctttggatttagtctcttagttttgtcctaactccttaagttgaacgtatacttcactaatttgtagcctcttttgtaatacaagtagttatgactatcaatttggccactatacacaagttgtgctagagtgtctttattgtgatttaatttttattaaattaccattatgatttcttcctaagtcatgtatttttgaatttccaaatgtataggttttttcttattaatttctaacttagtgtggctgtagatgtctgtatgattgtgattctttggaatta

SEQ ID NO: 51436 - DNA, 681 bp, Bovine  19866880730419
  misc_feature (1)..(1): n is a, c, g, or t
nccttctcaaagaaacattcattgtaaagctaaaagctccacagacacacttccaggccggagtggaggagtcacctaatcacaggactcttgacagctggcagacaaaccaagatgtcttctaggaccaactagaaacccagaaaactgtataactggaaacaacgaaaccacaactataaaccacttcattggatttccaacgcttattcttgacttcactggcaaaacaaaaccaaatcctggtttaaacaaggctatattcagcctataagctttttgaacaagacaatataacattccccaaacaggtcccatgttctctgcttccttgcccttgttctccgtgtctctcacttcccctgtctgcctaatgaatgtctactccatccaaagtctggcttagatgtcacttctcccacaaagattcccccagctcctttccctaactaaggcgtgagacccgcccttcaagcccatgctaaccccttgcgtcttcttcctcactccaagccctgtagtttttgtcatgctcctcttatcaccctccatagctcggagacactgggggagttctcagctttgtgacctagtgcacgttccatgttagagtcaaagggaatagctactgaatgaaacgaagtcaaacgaaatcagggaatcatccagggaattggtgga

SEQ ID NO: 51437 - DNA, 1131 bp, Bovine  19866880734400
  misc_feature (1)..(1): n is a, c, g, or t
ncctttccagtgaccttgtttaagaaaacaagggtctggtccagcaatcagccgggctctctttgtgccaaatccatatggctccgcaacctagtcaacatccaaaagaaacttcatggtttggaaggaaaacctgctaaatgacattggcatgaaacacctggccccagctgctttgtttttccccttcccaaaacagatcttttcatctccctagactctctgatccgaagataagtggtctttaatagtagtggttctccatggacgaaccaggcgtgtaccccagcaaggcctaccctccaatgttggcagcaggcaaagactcaaaacagcattaagagcatccactaataaagctggaaaggccccaggcatccttaggccaaacgccttgccttacagttgaggggacagaggcccagacagggaaggggactcagccgaggtcacttggctaattaataacagaactgggatcagaacccagtcctgactcacagcttgctttgcctctagctcttgaaaactggaaatgtgatagttagcagtatacttattgttagcaaattccagcatgacaaaatatttagatgactgagaaactttgttttattaaagctttctactctccttctgaaaggtctgaagattgttggcatatagaactcgttcgtgtggggttaaaactatagcaagtttattaatcttgtctttaagtataaacttttccaagttgaagttcaaatggaatccagacaggaaaagaaaatataatttttaatatgtgcttttgctatgttgcgcctaacaatggctagaaatttgacccagcctgttattgttaaacttgataatacatcacttatatttaaaacaaatgaatgtgaacataacacttcatgttttaacccgtacatagttcaagaatgtctgaaattttttttttgtttcttgctgatgatacatagttgtgatatctttgcctcactttttaacaacatacatgacaaatgtgtgcaaaatctaaagcataattacttatattcaaaatagaaatataccctttgatattctaagctatttttttttcattaaagagatcaatttgtcctaaaacaaaatcaagcc

SEQ ID NO: 51438 - DNA, 1465 bp, Bovine  19866880789423
  misc_feature (1)..(1): n is a, c, g, or t
ncctcgggtccttgccatggggcctctcacagggcagttcagaacatggtggctggcttccagcagtctgagcaggcaggagagccagaaagggcaaacaagatagaatccagggtctttttgcagtttaatattggaaatgatgtccctcccatcagccccgccattcaccaggtccagcccacactcaaggggaggggattacccaggggtgtgagtaccaggaggtggggctcattgggggccatcttggaggctgctgaccatgcctgtgggaggactaggtggagatacccagcaggaacacggacatctgagttggaagctctagggagatatctggactgcagatacagatctgggagttagaagcattttatgagcaggaggtgaaatcatgggaatagatagtcagccaagaagaacatttttttttttttaaaggtattcactaattactactactattattctactattaactacaaattgttaacttcttagagaaacttcagactgagagtaaaaacaaaaacatgtagaaaaagataaatgtcaccaaccaaagctacttgtcactcctaatgtgattaaaactttcagattaggccataaaaatctgggctagggcatgtggcttttcctgttatgattagaatattattaagattctgagaaaaagctcattccccccaaaaattccataaaataggtgactaattgaaaactggaaggtctcctgatgaagaaaaatagtccagttcattttctatcagttttaagctacaaatctcatggatctcagtgtttccaagtttggggtagtgaatattataaatattcatataatatgattaatggtagtcatttacaggccgactcccacaggcccacgatacacctccccttggtaaacacccagcccagggagtgtcacagaagccttggtgagctaaaaggatgtcacagtgaaggatgaaaaaacacctcctatgtcccctttggcccatgaacttttctccctctgtgcctttgcctcatgctcatttcttccttctggaatgttctacccagacagttctatgcagccaaatcctaccctcccttcaaagctctgctcagattttgtcttttccactaaggcttcctgactggaccaccccaccccacctccctcctctctggactcctgctttggtgccactcatttctgaagaccaatggctggggtcacttactctgcttgcttttatcttattcatcaggggttggcaaactatggcttgtgtggcaaatatgtcctcagtgtctgtttttatatgacttgcacttgcagagttgttattgcatttttaaattgttgagaaagcttgaagaatagtattttgtttcatgcaagaatgatatgaaattcaaattcaaagtccataaagttttatgtggtcaataaaatgcttgcggaaat

SEQ ID NO: 51439 - DNA, 1845 bp, Bovine  19866880793386
  misc_feature (1)..(1): n is a, c, g, or t
ntgaatcatctcatacaagggacctcaataagattataaacagatttaactttcagaggccagaaggcagtgggcagatacattcaaagtgctaaatgaaaaaaaaagtcaactgagtcccatatctggcaaaacggtccttcaatagtgagggtggaattaagagatgtcaagctaaacaaaaattgagggagctccttaccactagatgttccttgcaaataacattcaagggaggtgtgcaaggtgaaatgaagggacactagacagtaacttgaaggcttatggagaaatgaagatctcaattaaggtaaatacatgggcagttataaaagctggtgttatcctaacaatggttagtaactggaccttttgtttcctgcatgatttgagagactggtacatttaaaggaaaaatattcggacatgactaagtaactaacacacattttcaaagaactttctatgcttgctattttgaaggattctacaaattaagaatgagtttataatccttgtttttaaaatacaaaaaggacagtgtcgaactttcatcaatcagtaagtctttaataatgttgtaaccaaatctggacacatctataaaatcaaaatgtatctagaatacttctgttctattgtttcattagaaagttaagcagatactgccccaaaactactaactctaaaataactttcactttaaattgaaaaccacacaaatttctctaatttataggtatgaaggaactttactgcttttgatatacggattatatgttgtggtgctgtgttttgacattaaaattaaccaatatattataaagaaatgcagtccttgctgtacctgtcttgtcaaagcaatagaagagagaagtgaacaacagctactgatgggatgggaagaagaggatcaaccattcatccgtaggcaatcaagaactgacagtggaatatttcatgaagattctggctactcccaactttctttaagtttacatggtcttagtcaggtttgtgaaggtaataaccccatcatgaccactgttaagtctgttactagcaaaacttaatttcatttcaattcggcaagtactatatacttactactttaaaaatactatgggaatttagagatgatcaagaggcagacctatccttaaagaagtttccaaatatttcagaaaaaaaaacaaaatagctaaaatatgaacatttaaatactgtatagagaaagaaataaagtataaacatagttcctaaatgggacagatggtaaaaaaaatttgatgaggatggtcagataggaaagattatcacagagacaaactaagccttgtagaacagtaagattttaacaaattgatttacggtaatagctactgaagttttatcagacttcatatgtcataagtaaatgatgcagagctaagagtaaaaagcattccatggattgataaagaaataacatgggaaaaaggcttgtcaagtactaacataactggaggactgaatgtgcagaatggaagcagaagaaaggtggataggaaggaatacgacagtcttaaatgctagatcaatagcatttgcaggtttgcagagaaattatcagaactgaaatatgagataaaagacatgctgctagaccaactgatgtgtttaacagatgcttagacaaggtgaaggcagtgggaatacaagaaaatagatgtgagacaatgcagaggaagcatcaccaagaccaggcaactgaagggctacatgggagcagagataattctgaggcttttgatcatgacaaagtaaaatgagaataccacttacaaatctaggaatttaggaaga

SEQ ID NO: 51440 - DNA, 1960 bp, Bovine  19866880808001
  misc_feature (1)..(1): n is a, c, g, or t
naccctccaggaatttaaggaagaagctagaaaagccgtagaaggcattctgtagatgactgtccctcggttcacttcggcactgagttaaaactttgagagccattttcaggtcttcatcctccttccattcaatgatactaaggaaacagagtccattctgtatgggatcaggatttcaagaaaaccccagtttttctagctacctaaacaagccatgactcagtggctctccaattatgaccaccatcaccacctccctgaaattgctctggatcacagtattcttccccaggcaccccttcttttcttggttttcctaaaaactattatgacacaaagtcagtctctagcatactgcagcgagtctcctctccatggccatgcttctcccccgtgtctcacatcaccaccagcatcattccctctccccaccctgattgctcttagtctgccctgcccaagtgttaccaggtccgagcaagaggagcagaggggaagggatcatcctcagtcccctatctcctctctctgaatcagcttgtctggttttgaatatttcgcaagtgttcaaaatagacaaaaggattacacagggatggcatttgccaaaacccatgtcctaaatatctggaattccgttttggggatagaaactgaaagggaaatattcagcccagcatcagtaacgggcgagagactcttagtagggctgaaggaacatgctaagtttcgtgcgtgcagtctgtgcttgcgctcagctacagcgaggccagtccgcccagcgggggaagccgcagaagtcgcctgctccggccgcttccctgagacatcttgctctcatttgataaaataacaagctgcacatattaaatatatttccttaaaacctgtgtctgaatttttggttgacctgaggtcacagtagtgttttgttttcagttaccttcactggaatattttccctcgttccaaagttatattttctcctgatgacaaatttgaatgttaaatgtgttccaggggaaagagaccaaagactatgacatatttccttcctgagggattttgtttcagaagtggaagactatatttctaggggcaattataactggaaactctttaaaaattcgagttgggagcccgagattttggtgctaccgttttacagtgatgcctgccccacactggctcaggtaataactctggccctcggtgttcggttctagacgttaatgaatgcctggatccaaccacgtgcatcagtgggaactgtgtcaatactccaggcagctatacctgtgactgtccacccgattttgagctgaatccaactcgagttggctgtgtcggtaagatcttaaacacttttcagagaaacacattgttggttatttctaaggcaacatggaacattgcattctcaacttctgaaaaaagtaataaaataacacaacgaaatgtaaatatttcctgaatctggtttatattttcaggtccttttctctaggtcaattcccagtgtctgttgcggcactttttagtttaaattatggtttttaaacagtttcagaagtaggtttgaattttcaaccctgacgtagaaagcatttgcctgacacttcttttgtttgcatgtggtaaatagatacccgctctggaaactgctatttggatatccgtcctcggggagacaatggagatacagcctgcagcaatgaaattggggttggagtgtccaaggcttcctgctgctgctctctgggtaaagcctggggcactccttgtgagctgtgcccgcctgtgaacacatgtaagtggacatcctcctactcattattattgttagtccagctctgtccagttctcctgcctagctccagaggatagaagccacagagagacagagctgctactggtctgtattcttcagctggtggagggagtgggggttgagggg

SEQ ID NO: 51441 - DNA, 4516 bp, Bovine  19866880825987
  misc_feature (1)..(1): n is a, c, g, or t
ntcctcaagtaccagaagcagtctattcatggctttgaaaacaagtaagagcaagcctgtttgaaaaatagcaaatacctttttatgctaaactagtgggttaagattagaaaagttaccaagagtcaaatcatgaaagattttgtgtgataatattagaattaatgctgtggctattgcaattctataaacagattttagaaaggggagtgctatgattacattttggctttagaaaataaccataattcaaattaagcatgaaaaattaaaaataagtatttatataaactctcaagctgacagtaattaataaagctataaattaataaagcagacattaataaaggtataaattccaaaaagctgtagaggagacatcaggcaagaactgtcaactacattttggatgatggtaagccaaaagaagaggagtagctgactgagcagagaggagagaaagctaataaaagctaaaagcctaataaaatctaacaagaggaagccaagaagaagcaagatgagctgctctaaggaattttggaaaggtcaggaattgatggtccctgttgcttgtgaagatgaaggaaatgggtggagcaaaaccaaacaatttatgaattgagaatctgcataaattatagacccttctttatgccccaaagtcaagtgagtatctctgccctgccctggtagaaagcaagacatttgccctctgaagatgctgaaccagcagggttctggtctcaatgataccagaggactagacagaaataggttgaagtggaagtccacattttgaaggatgagacttggaaactttcccttagctccatgaatgttgacatccaagcttatactccccatagaggtgcctgaggagtcacctttctttggagaaagtgaccagtcttcccctccaaaacactaccagtactgacaggggagttacctaacaaaatgcctgggtttcacctcatgactctacagggaagctcaccagtcagtaagtgatacctgagtacaaagggcttcagttagctttttattccttgacccctaaatgtaagcaggcagccaaagacctcaagatatacaaggaaattctctaatatgaaagataaatttaaaaatcaaaagaaagtatacataaatgggagaaataaaccatggagaagagagagacaatgcaagagaaaaaactttcattaattaatagttattggatccatgaaacaacaggatgcaataaaaaggaaacagtaagtgaacaggaaaagcctcttgaaaatataaaagcagaactattttttaaaatcaataaaagaattggaaggtaaagttgagaaaatattctagaaagtaatagaaaaacataatgatgaaatataagaaagtgaaatacccacaccaaggcatatcattgtgaaatgtctgaatactagggataaagagaaaaccctaaagacttccaaagagaaaaacagttcccacataatcgcaatgacatggatttcataaaagcaataccagaagctaagataggaaaaatgacttcaagattacaaggaaaataattactttctacctagaattaaacacttggccaaactttcactacaatataacattaaactacaggtactgtcagatatgtgagtgtgcggcacatttacagtaaccaatattcgtttctcctttctttcctggtacacagaagactatacttcccagatctctccaggttaggctgggtcatgtgctctgatcaagtggctgtgagcagaagtgacatgtgtcgcttcctggacaaagcactgaagagagtgtgggctccatgttttctgaagagcctcatgttgagatggtggagccgcatgtttgaagtggtttgggttattgaatcaccacatgagaaacagctgcccgggagagttatcagaccttcagcagacatttgtgagccagaagagacataatacattaaaccattaagatgtcgagtcttatttgttactacagcacagtccaaaaatatttcaaaatgcaccatttctcaagaagctaatggctactctgtaacccagcaattccactcctaggcaatattccaaaaagaaatgggtacacacatacaatatgccacagcaaaaaaaaaaaaaaaaaacaaaagaataaaccactgggtacaggcaacaacacagatgaccctcgcaagtataatgaagactcaaaaggccagatataaaagaatatatacttgatgattcttttacatgaagttcaagagcaggtaaaactgacagtgatggaattcagaagagcagtaacctttttggggatggagtgatggtggaggcattgggaagaggcctgaggagccctgaaagcactagagatattcaatatcttgatctgggtggtggttacatgaatatacatatatgtgattgtgacacacaaaaattattgggtaggacatttatgtttagcatggatgtgtgagttgggccataaagaagacccagcgccaaagaattgatgctttcaaactgtggtgctggaaaagactcttgagagtcccttggacagcaaggagatcaaaccagtcaatcctaaagaaaatcaaccctgaatactcattggaagaactgatgctgaagctccaatactttggccacctgatgcaaagagctgactcattggaaaagatcctgatgctgggaaagactgagggcagaaggagaagggggtgacagaggatgagatgattggatggcatcagtgactcaacagacatgagttcgaccaaactccgggggatgatgaaggacaaggaagcctccgggggagggctgcagtccatggggttgcaaggagtcagacatgactgagcaactgaacaaaaataacaatactttactatatgtttgtggtacttcaactaaaaagaatgctttaaaagaaactactggagactgtgactcatccaaatgaggacataagcccaaagtaggaaagtatgggatccaggcaataagaaatcccccagaggacagagatgaagggaattcctaagcagatggtgggtctgagggtggcagctgtacaacaggctggagagtcatggctggagacagaggcagagggatcaaagagaagcatctagaaaaaaggaaaaagaaaaggaaactagattatctgagtgttcaactctattcaagggaatgttgctattctttcaaagaatttggggaggaattaatgataaacacatgaaaaactaagcaacaagacacaaaaaggctattattaatataaaaaattgcataaacgtgtcaccgcattaactatggctgaactataaatttagccaaaatattgttgtacaattacattgggaggatgggaagaaggatagcagggtgggaggagtgtgcagggaaggggtacggtgtaaaagctgaattttcatcagctgcagaggaaaaccagaagagactgcctaaatttaaaaaataaggaaatagctgccaatgcatattatttagcaacatgaaagcaaagaaaataacagttgaaaatgtttcaactcaagatggagaagggtagacagagggctgctatttttcattgcacaccttgttatatcattgacttttaaagctacatacataaagtatttcagcaccatgctgaagcaattaaaagacatctcacaaaactctaagaaatctaaaataaaagaaagtaactcatttcaaagtatattttgatccaattaattttttttaaagacacatttacagtacctagtaattttcatcggtggaggagacattgtaaaatcatgctgtaatcctttcggggatccaaaaagctgggacatcaaaccctgtcaacttcagatgtttacttcaaagaaaacaggatcatgagggagaaaaagttctatcagttatcaactctatcatagctaacagcatgataatattatactacaatttttagatgtaatcatttgtggtcactgttttaaatcctgcttatgcaatttaaatgtgctcttaaaaagttaggttctgtgttaaaggagtgtagtcccattaaaacaaggtaatttgtacctagaaggacctagtcttgcaacttatatagacctttagagtcaccaatgtaggcaaaatataattgtacagtgttggctaagatgctaagagtaacaagtaacaacaacaaaaaaaaaactcaaagtggcttaaacaattttttaaaagggggaatttacttatctgaaaatgcccagacgtagagctgctcaaaggatgtcacgaaatacccagtttcctgcgcttgctttctgcttcacacaccatggtgtcagctctgtcctaacgcgggcacctctcttggtttaagattgctgctgctctcttctggggctaatgcttccttgttcaagtacattgggaagtgtgggcatctttgacagataattcccagaaacattctcaaa

SEQ ID NO: 51442 - DNA, 876 bp, Bovine  19866880826873
  misc_feature (1)..(1): n is a, c, g, or t
nacttatcaaagcaacagtgttttattagaaaatacatttagtgagtggtccaattaggtgatctgggatattgaaacttggcctttttcataggcagttcaataatttgaaagacaaaattaatccataacaacattcctatcattagttgaaagtaaataaggtttgttctgtccaaaattgtaatgtcaaaatgtgttttcattgattccaatccctttctctttctcatcctttttccctctccctaccttcacggcaacatgtttaataatttaggtctctggtcctctctcactctttatgtccattgagaatttaatataccatagccctcctggacttcttgctgccttcttgaggttaattcagtgtatcatcactccctccaaaaaaaaaaaaaaaaaaattaaccccaaaagtataaataatttgatctaagaaaatctagtaagacagagtgggcctttcttggtagctcagttgataaagaatctgcctgcagtacaggagacatgagttcaatccctggattgggaagagcccctggcgaagtaaatggcaatccactccggtattattgcctggaaaatcccatggacagaggagcctggcaggctacggtccatggggtcacaagagttggacataaattagcgactgaaccaccaccacagtaagatggagtaaggataactttatacataattttgtgcagaatgtcttaaatgcaccttttaacattttctctataatgttttctactgcctcaaaaattctctttagcttctttaggcatacttagccttccttgcccgattagttactaattagttcactaaaacaaaacaaaaacaaatccagagacaagaacc

SEQ ID NO: 51443 - DNA, 909 bp, Bovine  19866880852174
  misc_feature (1)..(1): n is a, c, g, or t
nagaattccatggacagagtctggcaagctatggtccacaaggtcgcaaaaagtcagacatgactgaatcaacttagcacacaaatgcatgcagatgtaaatgagtatcttccctctccccaccccaaatctttacatataatcagaaagagtaatatcagaagagtattatccatagattgaggaggaaatggcaacccactccagtatttcatggacagaggagcctggtgggctacagttcttggggttgcaaagagttggacatgactgagcacaaacacacacgcatattatctgtagaatatctgactcatttgttcaacaaataagtccaacctctatgagaatacagcagtggtccagatctaaattctggcctccaggactaaggtaccacctgcctttgtgaggactatcacagtttataaagtacttttagtttatttgattgtatagccacattagaattgttagtaaaactgctgtagggtacagtctgtggaacaaatttcttcatgtggtgggggtggggggcctccttctgggatcctaaaacataaccagccatcagccttgaagtttccagccaaagggcagcaatcatgagtcatagcttatccccaaggcccctcttttccccttaatccttcaaatcaataagataattactgctcttgtctgaaggttttacattttctattattcttgttgactgcagtcaatttttaatgtttatttttaacttaatgattttcgtggagagattttctagttcattggaggtttggggttttatggtagatttaaagaaacataagaatataattttgtctgattttcttttctggcctaaatcttaatttggtgatgtttgccaaggggagtttttgtgagtgtgtctgtttc

SEQ ID NO: 51444 - DNA, 3134 bp, Bovine  19866880864527
  misc_feature (1)..(1): n is a, c, g, or t
ntttagaaggagatggatataattgcaataaataaataatcggtcaactcatctaccttaaggattgattctttcctcagcaaatggaggtcagagctatacaaggagaatgatgagaactggctccaactcccaacattttatctcagcagccagtccctggactggaagtccttactgtgtcatttctggagggggcctctgaaatcctatacattctagcacattatcaccaggaagagaagtggttgttaacttcacatgcaataacggtagtagatataattttccattagcctctagtctcacctaacagaagggtaactagggaatgaaagacaggatttttagataatcttaagaagcttcaacttgttttgtgcctcacttccaagagcagagtctgggaaccacaggtatcagcatccctcgggagcttggtagaaatgcagaatctcaggcctccctaactcaggcctactaaatcagaatctgcgttgtaatcatttgggtgatcattacattttgagaagtgctggctgaaggcaggagagggagaaagagagatagagagatcagttttacaggtgggagaaacctgaggcacagagaaggtggaaggtaaaagcccaatgtataattttacttaaagctggcttttgagtggtgtgtagaaactgactcatgacataaaccctggccaggagaggcagtactaacagtcttcactaagttccctgaagcccacaagcatcacgtcaactcagctccaggtgcagagctgcctgtcgacgacatgtttattgagctcagcgcgtgcagagcactcaccctctccctttaaattggaaacagattgcagcgctgtaggcagtgtcattgagaaggtggcaactgtcttgttccaaagtcacccagagtgaaagtgaactctaacaaccctgggccactctggttggagagtaactttctaaataaggcttcttcttcagtttttttttttttttaattccctaaattagtggttctcaaagcgtgatgcccagacaagtagactcagtatcagggaacttgttagaaatgtaaaatcctcaggtctcaccctagacctactgaataggaaacgccgggtgtgggtccagtgatcaggcacaagtccccaggagtttctgatgcccactaaagtttgagactcaatgccctatgtcattaaaaaaaaattagaaatgaaatgtcttttgtccagatttataggtaatggaaatagagattttcttcttggatggccattatatttctgtactaccaccaataaaggaaaaaagtcaggttctctatcttctaaagaacacttttgcaagtagtgtttctgtcctagcacagacacatacacacacacacttctttgtgaagcagatagagcatgtatccaacctccattctccatctcagtagacaaggaaactgtccccaagcaatcagatgtttgctctccaggagccaggctggtctgagttttgtattttcaggaaacatctgatgcagaaactctgtaaagtcttgaggaagagacatgtccccattgataaggctattttatctcatgcaatctgaagtcctatgatctttttggaggcctgttggactgactgaagttgtgggaaatcttggactagtttattatttttttaaatatattttttgttttaatgtcttcattaatttattacaatattgcttctgatctatgttttggttttgtggccatgtggcacatgggatcttagcaccaggaccagggattaaacctgcactccctgcattggaaggcaaagcttcaatccctggaccaccccaaggacatccctgggctagtttttgctttatttgtacagttcctttttaatacggctcagtggagctagtgcatctccagtttgttccaaagaaggggctcagcaacctgactctgccttcttatttgcctttgattgaaatttggaaggctccacaagtccctgggggttggggttagggactgcgggctctcctctaagagaaagactaccagcccatagaggtcatgggtgtgccttagtccctgccatgttcgtcaccgtgtcctgccaatttaatgtcctccccccatttctagaccctgagagtgtactgtgttaagtgcatacgtgactgggagtcaagaggaaggaagctcgaccaggaaggcggggccacactcttcagaccacagggccctgtggcttctggttctaggttatacatgagaggcagactctgagaagctgcctcgtggtggaggatgaaacactaacttggatgcaaagataagagctctggtctcagatcttatgattcactggccacataagtgtgggcaaatcatgtaagctcttggacttcattctctgcacctattaaatagaagtatttaattctattaaacagaagtattaatatctgctctgtatgtgtttccagaggtgttgcaagacttgtatgaggtctgcctctgaaggtaacctgtaaccgggggatctctgtggagaggtgggggctgggcattccataggatccctccagctgtgtggtctccactgcttgtccccttggggagacctctattgctcttctcccccatgggaacacacagaatgtctttcaaggggaccacatatgcttcttgcaacagtgcagtgattctttagcagtgcttgtgtaggcctggactcagagccacccagaggaactgcaagagggtccctcacccctctgcacccatgaggctctactgccagtgccctcttccgcccaaagcatagaatccgaccccatgaagacagtctctgttctgccgccacgaagctgaatagagtccattctgtttcttctgtaccttttatctcaaaggattgccgagcacacaatacacttcacagctcggtcctgtgctgttagacaataaagggtctttcactgaccggcgctgctgaaatgccaccacctccgccatgcagctggcagacagctgttctgagctgtgcagaaaacatctctcaattctaggtcatctggaatgtcatacacagagagttcaggaggacagcacgaagcct

SEQ ID NO: 51445 - DNA, 482 bp, Bovine  19866880883447
  misc_feature (1)..(1): n is a, c, g, or t
ngagaaggggacgacagaggatgtgatggctggatggcatcactgactcgatggacgtgagtctgagtgaactccaggagttggtgatggacagggaggcctggcatgctgcgattcatggggttgcaaagagtcggacatgactgagcgactgaactgaactgaactgaatactggaaagggttgccatttccttctccagggaatctttctgacacaaggatcaaacttgtgtctcctacattgcaggcaaagctaagaccagggaagctaagtccataatctatgattcttaactttttcatgttttatatttgtatatctcttgagttacattctgcttaattctttcagccctattattcactttgtaaagtcttttttcagctgtgtctaatctgctgtttctaattccagtttaaacatttatgtggttttcaaaaaatgacttctcactagtttttataaactctgctccttgc

SEQ ID NO: 51446 - DNA, 1018 bp, Bovine  19866880902729
  misc_feature (1)..(1): n is a, c, g, or t
ntgccatgtgtccgctgccttcaagaaaattaatcgctcctctgtctagccagcaagatagtggcttcgatagcccatttgtcaatctagactaattgttgtagagtatttaagaagagtcattaatatattgacaacaaaactgaagggaagacttgaaactgaaaatatttgtgggccctgcatattttgagatgttttagtaacatccatcatataagtaaagtattctcataaaactacttgagatattaatgttgccttcatcttccaaagactttggtggtgtgtgtgtaatctgcttctgtgtggtgcttgtatttggttgctaaaccatctatttttatacttataaattagctctctgtgcagttttaaattatttaaataaaccttgcatatggtctgtagaattgttatgaattgttttttaattcacaatgtagaaatgttatgttggcatatttgaaattcacccagaaaaatgtatcaattttgatttgttatgtatgatcagccagatttaatttttgaagttagctatgtttaatgagtctgtatatttgctctgcacatagtttacctggaaatatctgctcaaacttttgatcctgctttcagttactggaaatgaagtattgcaagcattgccacagactatgtacctgtatcctcacttcattatttcaaaattagcttgaattttttttagttggcgtttgtgttatttcagatctcctgtgacatgcagagactttgtctctcttatggtttcacagtctttccttcatctgaagcattactttttaaaaatggaaataatctttgtcatacagccccaaattttaaactcttagatttttatgttcatttatagtgcagaattggctaacttattaatgctgtggttgacggttacattctaaaccacgcagaaatgaatgaccacttaaatatggttgcctcttttttgaatttctagagatgggtataaagtattaggtgttgccctaaggtg

SEQ ID NO: 51447 - DNA, 1089 bp, Bovine  19866880928347
  misc_feature (1)..(1): n is a, c, g, or t
nctcttcaaagatgaaagagggagacatgatttgaaagagatcatgggagtcaagagagacagtgcaagtctaaagctgacttatttcttggacaactgtacagtttagtccatatagtccaccctcctctaaccctttcttctttgcctaatcttgcaatcaaaattgtcaaatatatcaagtttcttgttggttaaactttcattttacattctacagtaagtttcagccttttagtcctatctgttggtggggcaccttttgtgaccagctttaatggcctctatatggcttaaccaagaaacaagcagatattctgaatgatgcttggtctgcaaattttcttagtaaaattatactacaaatttatcattaagaacaaagacctaggacctgcctctatatataaggtaatggaatctctattaaaatgatctagagtacagtgggtttggtaaaatttgtaacattggttaaatgtgaagaaattctttccagcaagtcttgactgcaacagattttctagaaataaattccctaaagcagtggtgcctaactaagtgtgggcaacaataatcaccctggagattcttagtcagtgtgcagtgggatttggacacgtgcatttgaccaagctttttaaacgattctcacgtgtaccctgctcttaagccatctgttttatttgcttcctgaaaagttgatgatgctttaaaatgaaataacaatagtccttctctgagctgtaatcacagaaatttcaccttctggtactcctacacacaatggcataattcagagtcagcttttcatgatcatgttaattaacagatcgtgtactcagtgtatagtgagaactcagtgcatagttctgagtttgtatgttaactattctgattcccttgaacttttgtggaagtaatttgtgagtcagtccaaagtagttttgtagcaataaatgcttttgttgactattggctagttccttattgtttcctaacagacactcaccttagtgtcaatcttctgagctacttgcattcttaagatccatgtgctggttttatgaaattgaaaggctacatata

SEQ ID NO: 51448 - DNA, 1328 bp, Bovine  19866880930998
  misc_feature (1)..(1): n is a, c, g, or t
nccagttccatagagtggaaatttctgaaccatacagcattctcccactggctgcactaagcaaaacttagctataactggcttttcctatctgcctgtattatatagtattaatattttgctcttcagatcattaacctgggatgactgggacataattattatttccaaagagcttggtgcgtatttgtggaattgctatcctgtgctataaaacagtgatcacgtgcaagcatataaatgtccccaatcatcaaaatctgtgtgttaccagtaaagttgccaagaggccaccatggttgtccagttagtgatacattttcagtccatggagtagatcttgttattgtaaaataacagcagaaactcagttctgaggttctaagtgcttttaagttttcggtctctgccatattttgataccaatcaggcacagatttttgtcaggaatcttcttttgttgactaaatgggttttgattggtggcctagtgattgggttttgcttctgtggcctcgctcgtcccctctgctttggtgcctgccttctacacagttcactcacgtgttctgagtaatgctcgttctttcttccaacttgtctgtcttcagttgagttcagcgccagaccccgtgctggaaacagtctcaggaatttttcattcatcagacattttcttccaaagaaaaattctgagaataggagggtcaccttgagagtatattaatgtagttcagttgtgtgtatcgtgtgtgtatgtgtgtatgtgagagatgagagagagagagagaagcaacgtatgtatcacatacccataagcaattgaatatttggtaggaagccaattctagaaataacacttcccaaccagcatatcgaaactatctcactgtcatttatctgtcttgatattacagaaagcccatatttatatgaggcacttctcagatgtggttaaatagctgaacttttgtccttgctttaagttttcccccagatctctgagaattgataatatcactggaatgcggtatgtatctgtttcctgtagaatgaacttagggctggcagctagaatgctagtggtcttggattcccttgccctgtcatttcatagaagcagcagtgaagttcccctggaggaaatcccacccaccacgccaggattccgtcacatatcattggtctgagccgtgtgtacttaacactcaggtttctgggagacttggccaaatgtatctgaagtaagaattccaaccataaaatttatatataaatatctgaatgtgatacgatgaaaggcttgctcacagaggaaggaaaggaag

SEQ ID NO: 51449 - DNA, 1717 bp, Bovine  19866880999042
  misc_feature (1)..(1): n is a, c, g, or t
ngacctctaaggaaggagaaacaacagaaactttaattaaaatgagtttccagaactcagatcttgaaattttaaaatgcttcatctaccaccacaacacctgcctccttctctcttaatctctcctgttcttcctatgccataggtatgtgaacatctatttccactaactttattgagtaatggcaaatgttaatttgagtaggaatatgtctacattgggcttcccaggtggcgctaaaggtaaagaacctgcctgccaatgcaggacataagagacgtgggtttgattcctggcgcaggaagatcccctgaaggagggcatggcaacccatcccagtattcttgcctggagaatccccatggaccgaggagcctggtgggcgacagtccatagggtcacaaaaagtcagacatgactagtgactgagcacacacaatgtcaatattacacagagaaaagtgatacaagggtgtcttctccacatcaaaaaacaaagaatgggcctgatagaattatcaagatgtaattgttcctgctaggatctgcaactcaccacattttggctcccaagagtactgtcacatttcttgaaactgggctctagctgaggcttccttggtattcataaatgtgggtcttgctatttaaaaaaaatttttttatcataccgcacagcctgtgggatcttagtttcccaacaagggactgaaccagccccctgcattggaaggcagagtcttagccactggatcaccaaggaagtccctggctcttgctattgagtcaaatgttgatggtgtatttatcctgaacctcatcaatcacattttctgtattttttctcatctgccatcagctctttctttcatttgacatgaggcagttaattaagctggtgctaatacatctagacattctgcatggaaagtgagtaacgtgagcagcccagattctttccagaaggttgagtgtctgtgaagcctgtttagtgaggtgttttcccctctttcccatttcttaacccaacaaggcattgctggctatttttgtcctttagagaataaaaagttcatgtgttacccacatataacagttcaattatcaagcaaaaattgtagctttattctgtacattgaaaagttttccagattttatatttcttttcattatattctcaaattattctcctagtatcattcaaggaaaatgtatttgttctaatatgttgatcaaataaagcattgaaaaggggaaaaaaaaaaaaagaaaataacagcagtgtgatgtataatagcagggcttctaaccaatatttcattgtgtcatacagggaccacgcaagctgtgtgttaaagagatgaacagtggcatggcaaaaaagcaggcctggcttataaagaacaaaatcaaggcgttttatgcagcagtggcagcagattgtttcagggatggtgtccgaagtctccttcaggtaaggctggcattgagggaataagtacagaggctaaagacaattagcactccgtggtaatgaagctcccaaatggaactgtccagttaggcagatgagcatcagagatcaatacagatggttaaggaattcattttgaattcctggggataggcagagctaaaacagaagcagagaggttctattacagtgaactatgagtgatacacggaaaggaaaatgaggtgccttggccaacagca

SEQ ID NO: 51450 - DNA, 2446 bp, Bovine  19866881015126
  misc_feature (1)..(1): n is a, c, g, or t
ntggcagaactgggactcaaacactgtccttctgctccccagtcacgaactgctcccaccagcccaggctgggagttttgacctaagtcagggtttgtctgttcccctctcccttgcgtatttgtccatgaccgaaggcttatgggaggtcagaggtgttttgcagggctctggaagttttgtgtcccagccaagatcagtttagcattcttgttaacatactgtatataatggatgtctaaaaatccgagagtataaataattagcaataccgtgtcactgtttctttcagacctgcacttcaacttttatttacttttatatgttgctggcttagggccacaaggctttccatcaatagggatggctgctgatgggagtgatttgctctctcccccagtgctgaagagacccattctccaaagaaggtgtttttagatcgagatgggctattgatgacactgtagggaatacagttagtaaaaccatgccataaattgggctggtgtcggtttcctgattgaatgatttgctctatttggtcatgaattatatattcctttttggattgatcctttctcccactgataaagggacagtattctacccagtgggtttggcccctgacctaagaaatatactgatgcatcaaaattccctgagctaatagctgggatgaactctggagactgtaaatctgcaaaggcagagaggggccaggaaggcccgtgggctacaggtctcccctcactttgtatgcgtcgactgccatgatggctgagcaattcctcgtctactctttacccaatgtaatttgcaaattgattgttcttccttggaagtctttcttaattaaacagtaactgcaattattaccctgtgacaaaggggacatctttgtgtcttggcagaggatagccttagctcagaagattttcttttgtggaagtgcccaccatggactattgtgtacagaactctactggataagtccttcttgaagaatgagatggcacttcttgtccacaaagaggtaggattaggtgagttaataataaggtcctattacaaaatatatgtagaatgcctttgcttttcagtgcacttattgctaacattattccatttcacttgcacatgatgtgtggcaaacaactgcagtctccatttgttagatgagaaaactgaggagagagagcttagggggttgccacgctcatagagaaaagtgagaaatgagaggagaatacagatgagctccctcctgtgttaacctatctgctctccattttgaattatctccaaatgtgttcattcagcaccaattttaacgtgccaactatgattggtctctgtagggatgaatagaattgccatgagtgaacaggcatcttcaatggacatcagccttccaactgcagaagtggttctgaattcttgataggtatcagaaacatctgggaagctcatttcaaagcacagctgcctgggccacagcctggggttttcctaaatctggaatatgccccagcatttgtgtgttatgtgttaattgccgaccctgtgcaaccctatggactgtagcccgccaggctcctctgtccatgggattctccaggcaagaatactggagtgggttgccattcccttctccaatgccccagcatacacaatttcaaaagtttttgaggtgtatcagatgacgagtcagagtgtgaggcagagaactgagcttttatctcacccaggattgcacaaggaaaggtgacatagaatgaggagacccaacattggaacccagtcagcctggagacttgtaggcgaacgagtgtcagaaccaggggtgcctcagagcccatagaaaggcagggacagtcttcattccaaggaaacataccagcatctcccagatgaagctcttctgacttgagccaggtcaatttaacaggcaagaaaagaaaggaagcccacccccttcatccatactggatctttctctcttttactgctttactccttctcctctttgttgctttctcctttccttatccatattcaaaatttccttccttcatcaagatcctacttgccctccaatgcccagctaatttgcaaattttccccctgacatctttgatttattctctcaagaggggtctctgcgccttttagcactttgtacctctatggtttttacttagctgtcatatacaaggtatatttctgccttggagattgatcctctgttcatctttctccctcccagtacctaacacagaacctgacatactggaggtgactagtatttgttggttccattgcatttttcttactaaactgttactacttctgggctgtgtgtgctcagcttgcttcagtcatgtttgattatttgccatctatgaactgtagacaaccaagatcctttgtccatgggaattctcta

SEQ ID NO: 51451 - DNA, 975 bp, Bovine  19866881019909
  misc_feature (1)..(1): n is a, c, g, or t
naggaattgctggaacttgcgtatatccttacaagtcgttttcctggtgattgcggagcctttaaatgggagccctggtgtgactccccctgggggggatgcctccttttctgttaccactttatttcagttccactctctttggaggaaatgatgtgtgcaaagccaagggcaggatcgacctgttctgcaaacaagggaatcatttactatctgttaatttattgcagcggagtatcaggcactctgcagcagtgggccaggaataacgtcagcaggcagcggtaaggacttgttttgaaatttactaccttaagcatgtgcagaggcagccctgggccttcctgtgggtttccagttggtccctttacaccagtctgatctgaaccccttctctgactctcactgtgtgatctacttgggacacttggaagcccccagtggcagaatagaacagtggctcagtgggtcctagggttgctgggtgtgggtgtgggacttcatactgaagtatcgggtcctctcccagggtggtcgatgtgagcgagatacagtggctgtggtagctcatttatgagaaggggcagcctggccctcctttgggtctactgctgtcaagcacaattcagggttacaagttcaggtgaacccctgcacattttgaacattttcttaactaacaaggggtcagtcattaacagatggcaatagggatccatcttgtatttcgtagcaggcagtgatagcagttagctgaaagaaaatgaaatgtttaagtgtaggagttagaaccagagaaatactggtgccatgaaagaaattaaaagggagaattggaacaagtgtaaacacagataagaaagaggaagagattactttattaatataaaactaaatgatttgattcaagagaattatggctgaattgactgtcagttcattctcttggttggtttcatcagtgtgtatggatga

SEQ ID NO: 51452 - DNA, 1119 bp, Bovine  19866881032337
  misc_feature (1)..(1): n is a, c, g, or t
nttctggaattttatgtatatctaatgtctttattgataaggcagcaagactttggttttatcagatcttccacacaaactaaaagctggtgtcagagaatacttatacaatgaaaagaatacaactaatccattctacatgcacatacaaagtataccaacaaaactctgcctcagagttttgtgtgattaaaccgtacctctacttgtttatttctataacaatattctttggactctgtgtttttttgcctgcacgagatataaattcaagggtaagcaataggctttcaaactccttagaggttctagtttaatacgatgcatgtttcttaaagttgtcatgcctcccaaaactaggaatgacagttattctatttctgaaatctgaggtccttacaaagaacagcatgggttttgttttgttttgttaggaaaaaaagatatctagaaaataaaagctctgctcatatttgtggcactacgaaggagcaaagttttgggggcaaaaaataaaatattgcaatcctttgaatttgctagagattttttaaaccacaagtaaaaacataagtctcacatctattaaactggagaatgaggaaaggaagaaataccaaatgcaacttcaataatcatacatgacgttgtatcatagctcttttcacttatcaggaacataccttcccccagtctgagtcaacagtttctataagtaaggagagtatatcttgaaatgttttctgtatgcaggcctttagtttttcaaaatattgcacagacatccatttcgaagaacaagtcgacaagagttccaaaagaggcttactctctgaaccactggcttgctccttcagtgtgtcctttaagagaaactccaagacagttaggatgtcttcctcatgatgatggatttccagttggatccgcctggcttcctgcatagtccattctttgcggctctggtctagacacgtctgtaattctgtctccttctgaagaagtagttcagtcttttgcttcataaaatcttccttagctgcagcaagcacttcattaattttatttcgatggtcatctaaaaaatgccggtaatcttgctcattttgttcttgaatt

SEQ ID NO: 51453 - DNA, 1226 bp, Bovine  19866881097313
  misc_feature (1)..(1): n is a, c, g, or t
nttccgcatatggaggtaggcggcgggagccgggagctatccccgaacccctcccgcgccggggccccgccacaactggaggaggaaggcccaatggaggaggaggcggcccagccaatggcggagccacaggggccccgaggcctcgctagccggcccagccctggggagcagccaggccagatcgcgggccctgatttcgagagcgaggacgagggcgaggaattcgatgactgggaggacgactatgactatccggaagaggagccgctcagtggtgcggggtacagagcatcagcggcccttgaagaagccaacaagatgtttctgagaacctccagagccagagaagcagctctggatggcgggtttcagatgcattatgagaagaccccgtttgatcaattggcttttatcgaagagcttttttcacttacggttgtcaatcgtctgacggaagaactcggctgtgatgagatcattgacagagagtagttaaatgctgttaagagaggaggaagctgcttgaggagagactcagcattccactgtcttttgggttcattccaaatagttctgtgccaatgaaaaacttaatcttcccaaaaaaaatttttttttctgcagagtagaataaggtagtgactgcacagttatgaaaaaggaagaaaactgttaaagaagagtatcttagtactgttgaaacctgttttcaagaatgtccagagacacggctttgactttgttgtttactcagagtaatttccttgcatcgaggaagataatctttcatgtttcactgtaaggaatggcttttcaaggataagttatgaccaagatagactgccagtacaagagcccactggtgataattatatgaggaaaagtaactgatgtatccaccttaggacataagatgtctttgagttatttggactgaaagcatattgagaaaactttaaagattcaagtttgtaatctatccgagctgtggttatcaaaggctaaatttttagtgtaaaataaatctaccgagtattcttcagtatctcaaaggataatctacccccaaaagaagtatgtgtcttgtgtgctatatcttaaaacgtgtttccaagaacaactgagattttgtttgtacatatatcttgatcatttttaaagctactgtaatctttaattcaagaaaattcattgcctgaacatttttaaaaatcaaaacttaa

SEQ ID NO: 51454 - DNA, 1296 bp, Bovine  19866881146512
  misc_feature (1)..(1): n is a, c, g, or t
naaaatgcaattcgcctaatgctcctttgacatggatgcttaaaatcacagactgtgagatctggaagagacctcagagatcttctagtccaacatgctggattcacagatgagcagttggaagccagggaagatcagatgccaagaaaaacaactggtatctagacaattgtgactgttgattaacaacccaacaatctttgcaaaaccaaagtatgtctcaaagcaatttacaacagggctataaaaaatatcacatttattttattatctgtattatatttcatagccttcgtactcaaagtctggtccgtggacctgcatcataggcattacctgggagcttgacagaaatggaaaacctcaggctctgtcccagactactaaatgaaaatccattttaacagaattcccaggtgatttctatgcacattaaaggttgagaagcatgagtctacaccagcgctactcaaagttggttcttacaaagatttgtgagaactgtttgtgtccagtctgtgaggaggtaagtacagagactaataaacctcttgaatgttgctaagagagtaaattttaaaagttctcatcacaagaaaaaaaaattatatacttagtgatgtatgttaattaaacttattatggtgatcatttcacaatatatatatcaatcattatgttgtataactgaaactaatataatgttatatcaattgtatcacaaatttttaaaaagtagtaagcagtctgtagaaacttttgtgtaagtttcacagaataattttatataagctgaatccattttagaaatgaaactagtatttgtatatttttgtggcattttctactgatttattatttacagtagattaaaaattatttttttaagtggaattttaccatagataaattcttctatactgtccttccctgctctctactgagaccaactgaaaaaaaaaaaacaccaattggctctcttctcaacttattccatgagccagtgctaacctaatactaaagtcagaccaaaaaaatcctaagaaaaggacactacaaaccaacatcctttatgaacagagacacaaaaaccttcaacacaatattaacaaactgaatccaaaatcatataaaaaagattatacaccatgaccaagtaggatttatcccaggaatgcaaagttggcttaacatctgaaaatcaacaaatacaccatattagtaaaatgaagaacaaaaaccacatgatcatctcaataaattcaggaaaagcatggacaaaattctatgtacatt

SEQ ID NO: 51455 - DNA, 1339 bp, Bovine  19866881159298
  misc_feature (1)..(1): n is a, c, g, or t
ngacagcacgaagcctacaagttatagagaaagtctggatttttgtaaaacgcacacaacaaacccacactagtctcccaaccaatcctgagaaaactggactgactcttaaaacgatgttgatttgtttggcaatgaagatccaaactgaccctgtccaccaccaaagtggtctctttactgtaaacaattaggcctcttagaatgggaattgtataaataaaatttgagagtggtagaataaactttatttggtcttgcccccaaataactatggctatattggtatgaatgtgtcctatatgtgtgctaaattacttcagtcgtgtccacctctttgtgacccccatggactgtagcccaccagtcttctctgtccatgggattctccaggcaagaatacggaagtaggttgccatgccctcctccaggagattttccccaccagggattgaactcgtgtctaccatttctcctgcattggcaggtgggttctttaccactagcgccacctgggaagcagtatgtttttgcctaacttaggttaacgaagggtttgttatgtgacagagctgggctaggagctggtaggctaacatgaattggacattttctggcctcagcgtcaagtacattcagatgttcacattccctacataaaaggaaggggcttggggtaatttcagactcctgtctctttttcctttacaacagatggtctctcttagcagagcacacaactagaacagctctaatagccaaaggccatctcagcttgtcctcagattccttcttactactgaaaggaaatccagaacaaattcgtggaggttttcagtaattatttgcataaatgaccttatagtcacaataccagaaatactagtgatatttgagtttctttcaagaactaactacatctgagcacagcattcattaagttctcttcgaaaggatgatttaaatttttgttcagtgtggttcacattttatttttttaactgtctgagtaaatgcaccataatggaggaagcttgaattgtgattatttcattgatctatgcatgtgggtctaatttgatgcttagaggtcctcaccctttcatttcagctgctttttgtgaatcttagctattttttaagtcaacctgaccattttgcagactccttcatgagcacaatgaaggaatgaggggcttaagatctatccaaagaccccactctgtattttcagagagccacataaaacccatcaacaatttgttaaataccaatgtgcgccagagctatgctgggaacttgtcagaaacataggggataagtatatgagtcatataag

SEQ ID NO: 51456 - DNA, 2767 bp, Bovine  19866881163994
  misc_feature (1)..(1): n is a, c, g, or t
ntatactactctctgtgaatggactgagacccactggtgagttgcaccgtgataactacctacaacccagtgtcctagtttctttgaatgtcagggtccgggtataaaagagcacatgagacaaagtggagtaacacagtgaatccagaatggatgaaatatggtcttgaattagaaaagtaaaggtaaaaacctatctaaaatgattcttatggtgtctcatacaaagtaggttctgataacattaagagagtgttatcatttctactattactaccactactactgctactttcctcctcctattataattccataaaacagcataatgatgttttaataaaatactgatacatcttaatgacaatatcaatcacaatgcttttgacagcaagtaacaaaacaattacccaactcaaaatggcttaactaacaatgatgtattatctcacataagaggtccactggatgaggcagttcttgaactggttaattcaacacctccgctatgtaataaagaatctagttctttccaccttttctgacctgcttggctaacaatattcgtttttacactcataataatcctctaatgatcagggatgcctgaggcagctctaagcaccatgttctcacacattcatatttaaggctggaagagagaaacctatttccctgtgtccctttttaagaaaaaaaagaaaattaaattcttaaaaacttctctgcagacttcaacttcatcccagtggtcaaaattttattacatgaccattccaaccaataacttgcagaagaaaacataattcctataactgcactacagggaaggggcctatacttcctagatcctgtgtgctcctgatacttgaacaaagtcaaagtttggttaatgtggaggaaagaattgaggggatggtctttgtgtgcacaaccagcagtgtcaaccatagtgatattgcgggagctgtttctcagtgtaagcaatctgatttcagtctacatttttcacaagtcaatgctttagacttcttgagaatagtaagagtcttatttatcattagattcctccccaaaatacacggaatgattttgtagttaaataaggtgaatctattgtatatatatattttccatagttatatcttgtgttcattactgagatcttatcaagttaacaaaacaagattccaggagacttccttggtgatagagtggaaagaatctgcctaccaatgcagggaacatgggttctatccctggtctgggaagattcaacacgctgtggaacaattaagtccacgtgccacaactaatgagcctgtacactccagctactgaagcctgtgtgcctagatagagcctgtgctctgcaacaagagaagcatccacgatgagaagcccgtgaccacaacgaagagcagccccctcttgccgcagcccacgtgcagcaacgaagacccggtacaaccaaacataatttataaaaaaaagactccagtgattactggtcccctatggacttttctttttttttaaatctctatgctaagaaagcctgaaacagtcttattagggctgaatattgttgagaatagagtgtagacagctaaaattaagtcatcataaatatcctctttccagtcctcaaatatttattatcagagtttcaaataaaagggaggcagtaggaagagtgaacactttttgatggaatcaaaatacaaaaataaattttttaatagaagtctatgggaccaaagtgattaaaactaattttcatgaaaaaaaaacacatataaatcccagaatcagattgttaatatatttatattaaaatatactttaaatatataatttaaaatataaaaaggtgatatagggagatatgcagggtgggaaatctaaatctacttgtgaaaattaaaaaaaaaattgtacattgagtcagggaaagtttagcttacactgcaataacaaataacccccaaatcttgcacataatgcaacaagagtttatttttcactcaagaaagtgtactgcatgtccaggcagtgtgccagcacacctgtcctccatgtgttggctcaacattccggcttgattcaatccatgacacttcctaatcaacatatgcattgacaattgctgtgatggaaaaaagtgggctgcaaagttgagactgagtatttaaatgcctcaacactgaattgacaaatgagacctttgctcatttttcattggccaaagctggtcacatgaccatagagggtggggacatgtattcctcctatgtgcctggagaagagaatggaattggtggttaacaatcagaagtactgttcatttgcctatcacatacagtggaagtgagaaatagccttacgggactagatctgatgaactatggatggaggttcatgacattgtacaggacacagggagcaagaccatccccaagagaaaaaaatgcaaaaaagcaaaatggctgtctgaggaggccttacaaatagctgtgaaaagaagagaagtgaaaagcagagataaaaaggaaagatatacccatttgaatgcagagttccaaagaatagccaggagagataagaaagccttcctcagtgatcagtgcaaagaaatagaggaaaacaatagaatgggaaagactagagatctcatcaagaaacttagagatactaagggaacacttcatgcaaagatgggctcaatataggacagaaatggtatggaccctaacagaagcagaag

SEQ ID NO: 51457 - DNA, 926 bp, Bovine  19866881225734
  misc_feature (1)..(1): n is a, c, g, or t
ncactgcagttagttgcttttaaggaatagtcatgcttgatttgttactggatttaaccttaagtatgatcatttttccattagccttgtgcagcaagaaggcccagatgaagcgctttctaaagaggaggtcatcttaaagctgaaagcagaggtgcagcgtttgctggatagcaactctgtgaagcgtcatctggtggtctcagttacaaagtgatctcaaaaactctcataagaaaatcgaagctctccaagtggagaaggaggaaaaaagcactgaggtagaatttgtaaagctgtttttcaaaatttaataaagaaaactcttaaagttttcacatttaaattaaacctttgtctttcaggcattcatttgacttttttataagtaaagttaattaactaatttctaactgttctggatctgctttgctacacaggggctttctcgttgcagaaaatagggaatgctctttagtttcggtgcccgggcttctcattgtggtgatttctcttgtttcggagtgcaggctcagtagttgtggctcccaggcttagctgcccctcggcatgtggaatcctcccagaggagggatcgaacccatgtcccctgcattggcaggcagattcccaacaactggaccaccagggaagtccgtaaatgaagtttaaagaaggaaatgccacttaaaggaatatactttcttgttacttttggcacctagtaaatgagacgccaattaggtaaaattccatagccacaaatccagtgcagcgttctttataacaaggcatctgcatttcctcaagatcagcttgttccggtagtgctttcacatctagttagactctccacaaaacgccctcgcaatttgcctcacatttccctggcccatgttcttaaaagaatagtcattctacaatga

SEQ ID NO: 51458 - DNA, 1010 bp, Bovine  19866881273866
  misc_feature (1)..(1): n is a, c, g, or t
nggaggcagagtgcacacgtgtatatacagtgctggatgtttataagtgcaccccgtcagccttttacaggatcatttcatcttaagattgaacatagagtgaattttatatctttgtgtcagtgactgctgaagaaatggaaatcatgtactagcaggtcatctgcaagtcctgggtcatatgtaaatggggaattcatgtttaatcattgacagcagctaatgaacaatcacttacttgtttgaacctcccttcggcatttctgcaatgtggttccgagaattgtacttttctttttcttcctttctacccccaaactttccccagtaaaagagtgctttggcagcaataaacccctccagtgaagagtttctctcacagtaaattcatggcatttctacaggtccactttgatatatctctggtttttggcttttcacaggtcttaagtttcagaacttcgggcgagaataagaatgtaattagctaaacaagaaaatgagataagttaataaaacctcacatgttcatcaggctcctcaagtggcactagtgataaagaagccgcctgatccctgggttgggaggatcccctggagtaggaaatggcaacccactccagtactcttgcctggaaaattccatgagcagaggagcctggtaggctacagtccatggcgctgcaaagagttggacacaaatgagcacacacatattaatcagggacagtagagatctcagagcgctaaatcctttacctgattctgctgtgtatggagaaactgtcctgggccgatgtgcatggcctaatctctgatatgtatgcactgtaaccttcccagctcctcaggaaatgaatgggctcagatatctagctgtgtttagagaaggaaggcactgccacctacaggttgtaaaatcagtgacataatacattaatatttaatttgtagaaaaaaattattttattaatgtaacattttcatagccctaaaagcctcaaagttag

SEQ ID NO: 51459 - DNA, 1848 bp, Bovine  19866881286357
  misc_feature (1)..(1): n is a, c, g, or t
ngcagtaacatataaataagaaaataaaaaatcaccatataatggcacctaaagaaacctgatttcttttttttttaattaattttattttatttttaaactttacaatattgtatttgttttgccaaattatattatcctacataattttatatgtaagctttatcttttttatcacaaaattggaattatacccaacagtcaaatttgaatcctgtttttttttttttttacttagtattggcaaaatcattttcccatgtaaatactattccaaaatatgaccttaattgctgcataattttccatcaagttatgacaaaatttattcaataatttaatttaatcttatgcaacacacatcaaggcttttatgactatatacatcttatagttgagactgaaagatcacagcaacataatcttttacttaaaaaatgaaaacttccatgttaggtaacaaagaaagaaatttaggtttatttcctattttctttctaacttattgagacaaatgtaaatattttaatccaacagactcacattggtatgtcatttttcaatttttataaaacataatggaacatgaattttaatttatagttttcaacactgtttgggtttgtttttcctctttgttttgccaagatactctatggaattcttacaaatgagaactgcaaagattcagggtatatgcaaatacagtgttttctgagtgacacgagcaaaatcaaggcacactagaaaatgctaggaaaatctgagtcagtcctatctaacactggttccagacttcagacatgaattcctcactggaaggttttcatcaaaagaaaaataacccttaagacttttccagggtcaataatttttgccctcgtttcaatatgaaacacatggaatagaaacaatacttgttaattctgacaatattcattaggcatctctagagcccacagggatccatctttattaaatacactaaatatttggcaaagagttggaatatgtacaacagaaatcttttgacttgacacatttcctcactagatccttatcactacagacaaagagaaaaaccagctcatttgacagtgcagcttcgtaagtggatgtaagggtacttgaagagtcaagttttcaacaaaaatggttgatcacagagggagaggcataatctggatgaaacagaattggatctaaaaatctcttggaaggtaaatgctgtattaacatggttttcaaatgtcattcttatttggcagcatgtgccttttgtcctgtgcttcatttagattgccaaagttatgctgttttttgtccaatactccaaccacagaaaaaaatctgcccatactcccaattccttactaataatccaattatttacaattattcccatagcacttttgtgatactaggctaaatttacatactctttttcagacagtcccagctttagacagggaatgtgcctaattcaatgcttggataatatctgactcattcctgcaatgtaaatcattattcctagtgcaaataaaatatagcattaaaaatattttgtgttcacagattgctctgcaatcacttccttataagacctccatgaactagggcaatgggccaagcctttctaaaataaaaatgcaattttaattgtttttaactggctttctctagtgtggctagttcatgggaaattctgcatctacatgttcccattatgagtggttaggctcaaggattgttccccagtcccaacagatttggcctcaaggcttgggattgaaccaacgtacatctgcagcctcccatcctcacctccttcccagatctacagcc

SEQ ID NO: 51460 - DNA, 1003 bp, Bovine  19866881342895
  misc_feature (1)..(1): n is a, c, g, or t
ntttgctgttaggaaaacaatttctatactgcaatcccttaatgttcttttcctaagtcacatctggctttgtttgggtcttgggatttcttttcttcctttttttacagtcctcacgacggccaccccaatgctgcagtgtcattaacccagttgcagctttgattctactggctccttaccatggttcccgcagcggtcccagcccattgtcctcccccacagagtgctcaatggaagctataactcaggggctgaggcgttcaaagagatttcagggagccatcatctgggtgtcaaaataggcaagaatctaaatgctgagaactcatgctgtgaagaatcaggagaagcaaggctccttctacccctgctgctgaggtatccccttccaatgttctgagagaatgcgaagccccatgtgtcctgacatctagaaacagccttagcttctcctaagatgaacttcaggagcaccttctaggtgaccagcactgtgctggttgggcttccctagtggctcagtgataaagaatccacctgccaatgcaagacccgcaggagatactggttcaatccccggaagatcccctggcagaaaacgcactccagtattcttgcctggaaaatcctatggtcagaggagcctggcaggctacggtccatagggttgcacagagtcagacccacacactgtgctggttgctctacccatattatctttcattatcttccttttatttttcagatgaggaaactgaggctaagagacagaaagtgactttctgtagaggtcacatggtcaccaagagatcaattcacataaggggaacttattacatgtaaattaaggctaagtagggcccagaaagcagggtgaggccattagaacgtgaaaaaagggagcaaaaagagggaaactgaccctactcatcattaggccagatttaggtatcagggacattaaccttctaataacgtaaacttgaccctactttgtgcc

SEQ ID NO: 51461 - DNA, 655 bp, Bovine  19866881373928
  misc_feature (1)..(1): n is a, c, g, or t
nggtggactccgggaagttggtgatggacagtggaggcctggtgtgctgtggttcatggggtcacaaagagtcagacacgactgaacgactgaactgaacacatttttccccctctctatctctatacaagactctgctcctaaatggcatgggttgcttcttattcagctccatatatctagtgattggccagagtgcttggattctattaagtattcaacccatgtgtgaatgacaaataaggagacaatgcataaagaggtcctgggcagccaagccagcatgggagttccgggtgacatagacacagcactgggtggagagacggaaaggagaaattaagaaaatactgatggcaaacgtgccttgaaatttgtgtaagaagtcaagtgcagattccgagagaaaaatgttaaaacaaccctctccctttcgtgactcaccatgcaaagttaatcccacagcaggtcttctcagcaaggcaccctcagtgtttgcctctctaacagataatgatcccaggaagctacaaacaggattcctggggagacttggccctctccctgcctgggagcttgccctaggatgaaccacctgattgccaggtaaaaatagaagactctcagcttctgtgttttctcactcttttcacag

SEQ ID NO: 51462 - DNA, 1147 bp, Bovine  19866881440060
  misc_feature (1)..(1): n is a, c, g, or t
nctggctcagtctttctcatacccagaaggacacagccatgtgtagaacttccttttcaaagtccaagagagaagcaatcatcctaagttctctgcatgttacttcccacttgctaaccccattcacatatgggtatttggggacaaccttgctttcttgagctaaaatcgtcaaaactaagtctgatgtataaagtggataatacatagcactatatagttatcaattttgatgtaataaatatacaccaaaaattataccagaaatgaagcttgaatgacactgataaactttacctacttcattttctgcctgtgcctgcccgtttctggaaatttcagatatgaaattattaatctgaactctccaatgaagttagagacaaataattttatattttcaaaagacaaagaatttgaaagaaaattttgctgtatccttatttgtagcatttgtgtactatgggtttggatagattttatttagtcaagatagttctattgtagattatacacagaattcaaagaagggctaagttattcattaagttgacacaagatttctaaaattactaggatttgtaatatttttattaaaataaaaaattagaatagttagtattttaaatgctctcagacagtcaaaattatttggtcatatcaactaaatcctttagcagttcgtcagtataaaacatgttcatttcttgtttcaggtggggcctactatcttatttccagaagcttagggcctgagttcggtggatctataggcttgatctttgcttttgccaatgcagtggctgttgctatgtatgtggtgggatttgctgagactgtggtagatcttcttaaggtaattaaaagcttttgttctcttcatctaagcaagataattcagtttaatttgcttttccagggcaccagaggatatcattatggcaagatgagaggaaacagatttattgtgcagaatgtggaagctgaatatagttggcatcagaacttcttagagtcctggctctcacacttaccagctgacagattttggaccagcccttttgttcatctggaccttgcttttcaaatccataatatgggttaataatattgtcctatgtctttcatataaatgggtacagatcaa

SEQ ID NO: 51463 - DNA, 1059 bp, Bovine  19866881483514
  misc_feature (1)..(1): n is a, c, g, or t
ncgcactgctctcatggctctcatttatgacatttaacttgaaagcgattggtattactgggcgtggaatccagaaatacattggaagagttgttcagtgacatcttccaaatagatttttcactaagctgactattttacggttgtttaaaaaaatgtgtagatttgctctccaaaacagacactgaagtgctacattagggagctcttgacttttgtcctagaacaacacaacaaatagattcttgatatattgtctcctatacaatcttcagaatgttcttcaaagctgtcattaaaagagaaaattaatcttgttccaggtaacatacatatatttaagtagggttgaggtatgagggaacagttttctttcataagacttaacaactttaaattcatttccttaaaaacgacctgtctatgaacctggtagctcagacagtaaagaatctgcctgcaagttctgcaggagatttgggttccatccctgggtggggaaggtcccctggagaagggaatggctacccactttagtactcttgcctggagaattccatggacagaggagccttgtgggctacagcacctggggtcgcaaagagtcggacacgactgagtgactaacacttacacttaggaactttagttacctaagcaattaaatcctgtaataaataactggggacgtgcttcagcaaacagaatttccaatggagtcattaaaatgccacctgcgtttctagtatttgcttgtacttaatgcaggtggattcaatatgactttagaaaagatgaaattctaccaaacaaatttgagtgaagactaatgagaatattttcagcctgaaacacagtacgttggcagtactaaatgtggaaactggaaagtatattatgattgatattaacacatattacatcatgagtaaatttctaaaatatttctagaatttctaaagacaaggtcttgtagggttataaaaatatatcctgtcaagatgtctctgaattcttgaatcttttactagtcttcaaaatatttcatttgttcataca

SEQ ID NO: 51464 - DNA, 1303 bp, Bovine  19866881489846
  misc_feature (1)..(1): n is a, c, g, or t
ntcacagattccatcacaaacttgacactcagtttggctgaagttccaatccccgtcaagggcctgagttggagttctgagttgctcagggccatgagtcagaagaatctggactgatttatgattttgggtggaaaccctgtgagacttggcagttccacaaggggtataccccaacgcaggcaaaaactggcggtcttctacaaggtttcactttgactctgagcacagtaaagccacagggctttctgcgccagtcttcccagtacaactaaacctccccagggcagccacaaagcaaaatgcctgtcccacaaaactccatttttaaggagtaccagacctggcttctattgctctgtgagctataaacatactatggtcttcttcccaataattattctttggaatctcagctgctccaaaccacctaagggcggagaacacaccctgtgccttttgtctttctcccagcactcatcagactgcgcttatttcaggcagtcggtaatcacttgctgatgtgcctgggtgtgcacatgcagaaacaaagcatatgctaccgttcactagttagagcagtgtgggtcagacggtacttgctggagctaaaacattctacagtcgtcactgaactggttctttaagcagatgagggaggccagatccaaagatcataagccaccgtgagaagacttttacttccaggaaaactggaaacattaagtaaaagcaactagtgatggagatggaactcagagaacatggcttaagtgctttagaaagagactaaagaaaataagaaatggcataagctacagaacttaccaacacaaaacagcctgtcaggggtagagtggtagccagggttgcaggcacactggtactttcctatgaggttcacgcagcggccatgggggcagaggtgtgcacttagttcacactcgttgatgtctgtttaaaaataagaacagcaaacatgcagccatcagcctctgactctgactaggatgtgggccgaatgactggccccaggtcagtggtcttcctccttacctatacacgccgagatgttgggggccagctgatggccagggggacattcacagcggtaacttccctcagtgttcaggcacacgcctcctcggcacaacagcggatctctctgacactcatcgatatctgcaacatggaaatgacccctactgatgatgtgggaaggtgtcctgccctagacccccatgacctggtcagtgcattcagcacccagctgctggaagtcctggctgctagtggctcacag

SEQ ID NO: 51465 - DNA, 1476 bp, Bovine  19866881501775
  misc_feature (1)..(1): n is a, c, g, or t
ntcagacttcacccctgaagcaaatgcatcattcatagaaaaagaatattctgtggtacaatgatttcttgtcactcctgcccagtcactaaaccacaaactgcagggaagacacaaggatataattttgggcaccaggctccaattattttaaacacatcttttcataaaaattataaacaaaacaataagatatcaatttatccacaatacagagggtcacagcatgcttcttccttccaggtaggttggcctaggacacattaagctcctgacatatagaatttcaatacagcttttcgaggaaggagttcagagaactttcagtctgagcaaaatgaaggcaaagaagttccatgatcataatcagtctcataattgctactatctcttcttattctaatcattcttagccttaggacctaaatcacctggggatgttttgcaaaacactgatgcttggactgcaaggagatccaaccagtccatcctaaaagagatcagtcctgggtgttcactggaaggactgatgttgaagctgaaactccagtactgtggcaacctgatgcgaagagctgactcatttgaaaataccctgattgctgggaaagattgagggcagaaggagaagagaatattggatggcattaccgactcaatagacatgagtttgggtgaaccccgggagttggtgatggacagggaggcctggcgtgctgtggttcatggggtcacaaagagtcggacatgactgagcgactgaactgaactgaattgatgcctgagcctcagccctgtcctgccatacacctccctcatggaagatgattcagtagatgtggcatggtgcctgggcatccataagtgagtttgcaaagtgcttacaacacagctgactgctcacctgaatgtctaaccttagaaatgtgagacaggccataaactgggatcactgccatgcaacataactgtgtctctcaatgaggatgggcattctaatcacaacaaagtattcatttccatagggttgactgattatgaggcactttattatatcccttagtaattatattgactacatgctcactaagccagacaacaaatcaaaatttaagagggttaaccaccaactattccactgtcctaacagtctatgaattcacattgccaagctctctctttccagtgtgacagagcacatttatatacacgatatcactgcacgaccataaactcccatttctagcttctttgtccagtatgggtgctggtagttgagtaaaattccagggggatccaaagacattgatcaaacttcacgtcagtaacaccaaaagttaacttttcatttcctccagaattgccctacagtggaacactttgaaatcttcccacacacctgttgatatgatgaaatatgaaatactaaacattatctaataagtggatgccaaaaacagtgaaaccttaaatcaa

SEQ ID NO: 51466 - DNA, 899 bp, Bovine  19866881530534
  misc_feature (1)..(1): n is a, c, g, or t
ntcaattcacacttggttaagcatgtcaaactgaatactaagctggtttcacattggtattaatgcctccacaacagttgtttaaaaaaaagaaaaaggaatcactggtgcctgctgtagtgaatactgtgcaaatagactttagagcatatgggtattttttatattctttaaagagagagaagacatgtatatgattcagcattttatcacttcctcttcaaaaccttgcccaaggttcctgcaggcacttaagcatataaaagtaactaaattaaactttactaaagaagcagcagaagtggctaaacttttcattatttaaggaatatggccaagctgttagaagcatgaggcagcactttttctaatctttagcaaagcatgtaagcttaatagatttcttcttctgtaacttgttctaaaatatatcgatgcattttattttcctgctcatctggaacatagtttggaatgaatagcactctttatgtgatatcattaactactatgaagaataattatttgtctcatatctaaatgcactctatttttgcctagggtttaaggtaaggagaaaaaaatggctgaaacaattcttttcatatacattcattcattcaaccttttttaaattaaatgattgtctactccagggattctaggaatactgctaatacaattctaataaaggtgaaaagctccccttagtttctgctcatctttcttacctcaggaaaatccctctctataaccaattccccttggctgctcaggatcctggaccctgggtcctaactctggagactgagcaacatgcagagaaagagctatgccctgtctctttacccctctccccaccagaccgtacttgtgcggtgtactatattaccaacatt

SEQ ID NO: 51467 - DNA, 818 bp, Bovine  19866881719972
  misc_feature (1)..(1): n is a, c, g, or t
natataactgtgttttgattatgtttttaagcatggaggagaaaaattctgggaggaaactgttaacctttaagatacgaactttttcagtgtgtcattttgtaaattaagtttttagagttctgaatgaggcccagacagttaattctccattaacggtggcagttttaatctaagaataaataatctaagaataaaatcacccatttccctctcttgttaggttctaacaacatttattaagtagtatcatgggaaaaactgggtttgtttgaatgctacagctatttaatatggaaacaagaagggttgttaaatgagaactctggtaatatgctaaaatcattgctttgaaaagacattgattggataatttcaaaggcaatagttgagtctccagctgctttccttaggtctaacttaggggagaattttgtgaagtgataaatgtgaaatacttattttaacatagacttccactattggaagcaccactgaggttttctttttgttgttctgttttgtttttaattcacagggagaatgatgaatcagtcaaagaagagaaatctgaattaaaagaaaaatctacagggaataagaaggccaatagattccatccttattcaaaagataagaattcaggcactggagaaaagaagggtccaaatcgtaacagagtttttattagcaacattccatatgacatgaaatggcaagctattaaagatctaatgagagaaaaaggtaactatttttgataaactcattgttggatgatcttcatttagaatggggagggagataaggaaacgttt

SEQ ID NO: 51468 - DNA, 1556 bp, Bovine  19866881820055
  misc_feature (1)..(1): n is a, c, g, or t
ntcgtgtccgactcttagtgaccccatggactgcagcctaccaggctcctccaccatgggatttgccaggcaagagtgctggagtggggtgccattgccttctcccatgtcttcctctgccatccccaaaccccactcctccatctagtttccatcttccaaattttggttgagatcctcactgtctttttctttgtccttgtaggtttatacttctttattcctctgcttttatttgtaaagagaaataaacatgtgtgcaccattcaccacattaaatcagaagtatgattaaaggcagctcagttacagatacgtaaagagaaatttgcaaaagcataatcaagtcgaacacagcaagatcttaagcagcagccacaaaagcagtgaagatttgagttcaaggatagttctcattatgccagtgccaactcacagggaccttttgaaaaggagtggacaggatctgccccaaacccaggctcctaactagctctgtgatgttgggctaggtgttgactccctcagtggcttctttggaaaacatatgtattggatcagcccaaaagttcagttgggtttttctgttaacagcttatgggaaaatccggaggaatttttttgccaaccgaataattgtccctccctcggtgggttctgaaggttaaaggagatcatggatgtgaaagagcccagctcagtgccaggcacatagaaaggtggtcaaccgcagccaaagctgattctcccacagcccttggaatcaagtgtgggcccagagggcgactatttgtctctgcttactgttctttgccccattggtaagggggttttagggaaataaaagtaaagtaataaatcacgcacactgtaaccttccaagtctgaagaacactgccccaggcaactcatgcaccatccaggaaagcatgctggcccttctttctcaccccactctcacgggaggcttcctggctctgctcaccgtgaagagcgggacttaggggggaaaggacattttcttaacctctcaagcatgatccttcccctgaggatatggatcagatgacctctggggagaggagaagggaaggcaaaggcattgcatattcatgtgactcttgacccatttaaaggtcacacctcccccagctgcagcacccttcctgggaactctcagcacctgactcccaaggggagtggtcggcccactccttgtgacttagtcacccagagggtggttgacctgaagcccacattccacacaaggttgtaactggaaggaaacttcaagatcacacattcagggctatttcctccaggacatcctcaacaagtggccttgtttggactcacccagtgataagaaattaaataaatttaggggaaaactatgctgtctgtggatagctcggagagctgcaaagttcttatttaaatcatatatcccttcactgactttttaacaactgaaagattaggaccagcaaagaacatcagaatccacccctgccatcaggggagctgtgtgggggaggagacagatgtcaaacaag

SEQ ID NO: 51469 - DNA, 1363 bp, Bovine  19866882012815
  misc_feature (1)..(1): n is a, c, g, or t
ncttcctcaaatatgaattaaacatgacttttaaaatgttatttatgattaaaaagtagaaaccatcagaaaagaatttatatatcctcctccccacctaatttgtgactctatatccatcttctatatccatcttctccattccttttgtttcagggaaagaagcagagcttctccagcaaaagtccacctaccctctggagctctgaaaccctgacccccagaactgtctcagggattcccttctctcttctgcatttgcaattcatgcttgtttttgaatcatccaaatcaatgcaaaaacatgctatagaatatcccatgacattcaaacaaaaccccaaatccctcacccaatattctcctccagttgctcaatttccctttcacatacataaaacaatccaaaactctctacttttttcctcttcatcgtttattccaacttaacttttacccactggactccactgaaacttccctcttgaaaatcacccatgatctctgtgctgccaaatattatggactattgtgtatttcaccttaatctctaaccagtcctcggtgcaaacttcccatcttctgctctgacaatatcacattcctttggttttcctcctgcctcagtgaccctctttctgaaattcactggctggctccttctcctctacctggctgcacctctgaactgtgtgcatgtgtgctaagtcgcttcagttgtgtccaactcttttcgacactatggactgtacagcctggctcctctgtccatgggattctccaggcaggaatactggagtgagttgccatttctttctacaggggatcttctctacccagggattgaacccgcatctcttatgtctcctgcattggcaggtgggttctttaccaccagtgccacctaggatgcgtgtactatcttctactgcctacttgacacacaggtgttggaaggacagcgggagtgggggattgagatgacatccttgtcaggaggctcctgtagtagtctgggcaacagacaatagtagcatggatatggagaggagtgtggacctaagggatgttcaggagaaagagttatttggactcggtgattgatagagatggtagaggatgggagaagtaggaatcatggatgacaaccaagcagtatctttcactgagtttcagctggaaggaaaatgggctgcatacagcacatcctttagaaattttccagaaacctgcccaaggaatcagtggcattcattgcttcaagaaaacgatagacacagtaaagaacaaaggagttactccttaactgtgagcttcaaattcaatctgtttttccatctataggcaacaattttaaagccaa

SEQ ID NO: 51470 - DNA, 1118 bp, Bovine  19866880589204
  misc_feature (1)..(1): n is a, c, g, or t
nccccatgttgctttaaataggttatactaaacacatcttcttgcaagttcttgtcatttagttgcataatatcccatgaaaatatgtatatgccaccatttaactgaatattcttttcttgatagacattcaaattatcatactctgttttcagtatgtcccactgtctcgctccataaactatgtctgtgatgtccatgttaatgctttgggctagaaattttcgtggatggttttgtgatcccctcctgacagaaggtatatcttctctttttgtctattgcaaatccttttctgtttcctaccaaacaatggcacattctgaagggttgcccacatctctggttttggagtcactcttgaccctctcaagccctcatctgaaaaaccattgtcccttgtgcgctgaggcaagagtattgtgtgttgctcagcaacataggggcagtttgaatgaaaataggacagttagtagagattggccagaaacacgttcacaggcccggaggatgggatgaggggaaattcagaccaggtctggaaaaggcagtggatagcccgggttcatcatattaaatggtactgtatagtatttgtccttctgtgtctggcttacatcacttagcataatgtccccatactcattcatgttgtcacaaatgacaggatttccttaataaagaggttaaacagagaactgtctcctaattaataaaaggatggatatttcatttcagggttgaggactcatctatcctgaactgtttaaacagacctggcagaataatagttaatccagtgtttagtgtttccccaaattcttacatattctgtagatttctcagagcaggtatggaagtgggaggcagtctccatccctcagaggtgggaaatgggtgctttgcaaaggagtggagccctgccatgtggtctagaattcaagatgaagttcttgggaagtagggaggcgatcagatcagatcagatcagatcattcgctcagtcatgtctgactctttgcaaccccgtgaatcacagcacgccaggcctccctgtccatcaccaactcccaaagttcactcagactcacatccatcgagtcagtgatgccatccag

SEQ ID NO: 51471 - DNA, 3108 bp, Bovine  19866880623575
  misc_feature (1)..(1): n is a, c, g, or t
nagagtctagcatctgttttaaccgccctccggtgattctgatgcgtgcttacccttttggcagagtaccagctctacgctggcatgttaagtatgtgttgagttgaactgagtggataactgttcaaagaacatcagctctagagccaagcttaaccctgaggagtcttagttctaccttcagggaagatgaaggcagtaaggaccattgagtggggctgatgtttctttaaagccttctgacgatcccctccttcatatctcagccctacctgcatcttcagctttctgggaaactgaattagaaagcattcttgttgaataattgcaacataagcagttccttcaaatcgctggagattctgagttcctgtgttctattttatgacatctttgtctaacccaagatctcaggtatctttttcctctcttgttctagacattttagttttatcttttacattttggttcaagatctattttatttttctgaataatgttagataaggatgcatgttcattgtcctccacactgataaccttaacatgaggtgggaaatgctgtatttagagcaggatttggggatgccaagagtttagcattgcacatggtaagtttgagatgtctcttggacatcttaagagaaatactgactaagcagcctgatttatgagtctatagattaggagtgaattctgggtcgaagatacaacactgagagtcaccagaaatagtcatgacattgaatgaaaccaagggtttgtgtgcaaatagagaagaggtctgaggactgggattttgatactccagtgttaagagggtaagaaaagatgagcatctacagaataaactgaaaaggagaaccaatgagatgggaggaaactccagaaaagtcaagtgaagaaagaacatctggtgagtggaatgaatgatgatgggaagtgctcctgagagttcaggtctaatgagctcaatcatttataccaggatttggtaatttagaggtcactacagataaaaaaaaaaaaaaaaaaagagcagtttttatggagcacatttaagagagaaagagaagagaagaactagagatagaaaatgtagaatactatacattttactgccaaggagacaaaagaaataggacagaagctatcagtagaaggggcatcaaaactctcatttttctaatgggagaaatcacaacatattcagctgtaaacaccattttctccccctttcactgaatggtgtgttttataccatttcctacagcagcccttttctctttcaacatttttggctcctgaatctctctctggcttgaactctgaaaacatctggctgaaagctcctttttctctcctgagtcattaagttgcaataagaccagaagcagaaggtaaagcctggactagtgagcattcctttgttgccttcttacaagtgactgtatttggtctatttccacccactggtaccagttttcagaacatcatcctttaagacctctaatgacctccttgaccacccccgtcacctcagggccctggtttcactgtttcccaggactgtgtacttattcatcagagcactattgcaagtttgttattgcttgcatgtgtgctaagtcatttcagtcgtgtctgactctttgcgaccccatggactgtggcccgccagtctcctctgtccatgggattctccaggcgagagtactggagtgggttgccatgccctcctccaaggcatcttcccgacccaggaatggaaaccatatctcctatgtctcccgcattggcaggtgaatccttcaccactagcaccacctgggaagctccccatattactaaatattcaatatgactgaatattacatttcagtaatatgatgatttaattaagttctaaatggaaatcttcatgtcaatatacttccttctccaatcccagttccctggaactcattcaaccatctttttctatatacttagtgtgtgccggactcattagggtaactgagacaattaagatatagtattaatacctgccaatgaggaactcatatttgataaaaagagttaaatatgaaaacctaattataaacaatgtgttgttgtattgggggatcccagagatacccaggaatgactacccaggcacatgagagaagcaatttaatttattgtatcagaaaaatatatgaatatggatttttaaaagtataaaagaatagaatagaccataaaaaagcaacagtcatttgctaaatcgtttctcccattttttatgccatatctttatttttcaacttttctatagattttatttttttaattaaaatttttgagataattattgattcacatacattgtatgagatatgggagatccattcagtgtacactttaaccagtttccctaataataatgttatataaaactgtagtgtaatttcacaagcaagttattgacgttgatacaacccaccaatcttattcctcattcagatgttcttatttttacttgtactcatttgtgtgggtgtggatggttaaatctttgtgtgtgcacatttagttctttacagttttatcacacttgttggtttgtgtatccaccaccacagtcaagatgctgaacagctctgttaccacagggatccttattgtcctttcatagtgacagcaccccactccagtactcttgcctggaaaatcccatggacggaggagcctggtaggctgcagtccatgacgtcgctaagagttggacacaactgagcgacttcactttcccttttcactttcatgcattggagaaggaaatggcaacccactccagtgttcttgcctggagaatcccagggatgggggagcctggtggctgccatctatggggtcgcacagagttagacacgactgaaacaacttagcagtcacatccacctccatcttccctccccaactcattttttgtctccacttttaaccagtatcattcttagctctctaggtggtaacctctatattttaagataatattcttattgtattattttttatttatcaactttatacttttttttgacctctcattgtgtagatggt

SEQ ID NO: 51472 - DNA, 1194 bp, Bovine  19866881028610
  misc_feature (1)..(1): n is a, c, g, or t
nctataggatgcttctagatgagcctctaaatgatccttatgtgcaccctccccatagtaccatttttgaaggctaatgtgaaatttccactgggagctcctccagcctattgtagaagatgacctttggcagatggaaaaacaagagaagagaaatggagggttaacagaggggtttggaggaaaagaaagggggaaaaaggaggcatacgagtgagtagtagaggaaggaagggaggttggtgggaagaaatgggactaacaagtagggtgaaatggggtggagtggagggaggcgatttgaaggaccaacagaagagagatagttagaaagggaatagaatgggaagtcttagatgattcaatttctgcaaaaaaaatcagcgtggaaaagtccccaacaatacattctgtgactaagacattatgcagagagatgagctgggggctgaaggacagaattaatatagtaagtaattctatccttttagcaatgtctttctgcatgaaataatgattttatgtctcacttctctccagtccgcacattcttcataacaaacagttccacagtgagtgactatttatgtttcaaggcaacagcctcggcataatggactatgctctgaatctttttctgcaaagaaacccagggccacctgggaaacctgggagagctttccagttgggaaaaatcctgctactgctaactagaggggcttggagtttagaatctggaatcaggcagatcttggtttaagcccttccagtgcttcttacctcttacttaaccttcactgcatctattttctcatttataaatggggatgcttgggggcttccctggatgtccagtggttaagactctgcaattccaatgcaagggacgcaggtttcattcctggttggggaactaggattcccgcatctcacatggtcaacaaataaaatacaaatggaggtgctcatatcgggcttacacatgaaagcatacagcacagtaaccctgaagtacagacaggggttcaaggatggttgattgggaaaatatcaaatctccaatttctgtgcctggaagaacacaaagctgggatggtgaaattccagtccatgagtacagagagaagacatggggtatgtccccacacctcactatgaaagcttacctgattcattccacaatatttaatacct

SEQ ID NO: 51473 - DNA, 1471 bp, Bovine  19866881164580
  misc_feature (1)..(1): n is a, c, g, or t
nttggacacgactgagcgactaacacacacacactgcatatctgttaagaaaatgataaatggtaggtgctcagtggtcagttgttgcttaatacactgagagccttccactgccctaatcattcctaatgttgtatatgttgcgtggggcagaaagaatggagcagacttgaagaatggaaaatgatggcactcaactgcctctgagaccacagtttataaactgctggtgttctatagagctctaaaaagggcttatgcattctccaggacttgacatagaaaggcttgccttgcactgaaagttcaacagagacaggttaagtggcatcttcacattctgcccaatcccaagaaacaccttgtccttgaaccaggacatattcctggttaactggaagagcaattacctcctaattaagtttcatcccaatactttgaccatctatgctaagagccaactcattggaaaagacactaatgctgggaaagattgagggctggagaagaagtgggcagtagaggatgagatggttagatagcaacaccgactcgacatgaatttgagcaaattccgggagatagtggaggacagggaatcctgatgtgctgcagtccgtggggtcactaagagtcaggcatgacttattgactgaacaataagaaacagcaaatttcatcatgaggctcttaggccattccatcctcagggcacaggaagaaggcagagacttatttaagagacttcagaatcttcttgactcaatcatgaaggcctcatttgtctacattactggttttcagctgtgtcagtagagtcctaggtaggttgtgatggtaccttaaatgggcaggtgaaggagcccaggagaaacataagcagttggtatttttcttgcctgctaatgaacttgtattccattcattactctgataataaacaaaaaatataaacaaagcagatacaaacaaaaatacccagctctaccattatcagtcaaaaacccacccatgtcagctacttttctttaaaaaatgaggtgccagatgttgggctaaatatttataagcattatatcagtaatcttcccagatcccttagaactcatcattgagaacttagaaaacattgaattaggcaaaatttcacattagccgtggacaggatttctccctgaagttgtagaaaattacaagttgtgcatgcacagtcctgtccaactctttgtgaccccctgaactgtagcctgccaggctcttccatccatggaattctccaggcaagaatactggagtgggttgccatttccttctccaggggatcttcctgacccagggattcaacctgcatctcttgcagctcttgcattggcaacaagattctttaccactgagccacctgggaagcccaaatatttataagcattatgtcagtaatcttcccagatcccttaagggaagtgcaatttta

SEQ ID NO: 51474 - DNA, 940 bp, Bovine  19866882033160
  misc_feature (1)..(1): n is a, c, g, or t
ncagggagaaataaaggaatgagtaacaaaactgagattagaaaccaggaatttatagagacccccccatctgcattctttgccaagagctccagagcagaatatatagatgatgggattcatcctggctggaggactggtctgtgagtctatgatttagactcagtgctcagatgtgctgcctgtggcataaacagttcccatttcattttattttatttattttttttgctttttcttttcctctcagcaggatggccagagtaatgaaagcccttatttccagagcccttcccccaagcattcccagaagcagatcctctccccagcaccctttagaagcccttctactgggataaaaatgaagaaatcttttcttcctgaaatgacagaagagaagctatctcctgcttcatcacacaatcttgcctttgatcgtcgaagccacagtggaatttatagccatcatctcaaatgttacttgctctttcctcttgggatagaaggaagcaaagtgattgctaaatattgctttttccatgagttatcaaaaagaacacacacaacttttttttttaaaaataccatttattggagtttttaaaaaatttttatcattcccaaggctgttcccatgatcttagaaacaaaagctcatcccctaaagacatgtacattgaaggggaaatatcctttattacacagacactggtgtaatcaagttgctagtaaagatatggcagaggcgggtctgccaaggggattgaggttcttgaatttttttagggaaaaaaagactaactccttttatccagcacagagctgagtgaaggctcctctgtcctgtcccacctctgccttggtgaacccactctcaaggtgtgcaggatggaaggagaggcttttaacctttcaagaactgccattgtcatttttccaa

SEQ ID NO: 51475 - DNA, 2923 bp, Bovine  19866880488025
  misc_feature (1)..(1): n is a, c, g, or t
ntctaggcagattctttaccatctgagccagcggggaagcccgatgtaaaacaaggtgagatacaaatattgaaaagaagatggccctctgcagaggcaaaaaggggccaacaaattgaacatgtcatttatcaaggaagaaataaacatataaaaattaatcttatttgcaaaaaacaggataatatttttcatctgttaaattggcaaaaatgctagaaatgatcatcaccgttgttgagaaatgtctggtatgtgtaaagagttgcatacacagctattaggaataaaacttggcaaaatgtttctgaaaggcattttaaaattacatcagaaccttaaaagtgttcatattcattgctgccttagttctacttctaggaatttactataggcaaagtgtcttcctttgcattgctaatccctttgagaatctgattaaagtgatgactcctctcttggaaaaatgcaaatgtacaatcaagtttgcatttaattcctcaggtcatgtggtgaatgccaaactccagcaaagttgcactaccgtctatgacaatattaatttgtgtaacatgtaaaaaggacttttcctgttggctcagtcataaagaatttgcctgcaattcaggagaccagggttcaattcctgggtcaggaagatcccctggagaaggaaatggctattccctccagtattcttgcctggagaaccccatggacagagaagcctggcgggctacagtccatgggatcccagaagagtcagacaagacttagcgcctagaacaacagcaacaccaaaatactgttactttagaaaattataaagaaatccataaaacaaaatctgtgagaattcatgttaaagtatatttcatgtagaaaattaaaagatttacatttataaaagttaaaatgtagcatagcacaaattatccttttaacttatgtcatcagctgctgctgcttctgatcttccctttgactccacagaactggtgggatttcagccccttcctgccctggttagcacccctgagtagaactttcaggatcagtcattgagttgcttctctcttctggctaaggccttggagttgcaagttttgttttgtctcctcttttctggagaaggaaatggcaacccacttcagtactcttgcctggaacatctcatggacagaggagcctgggaggctgcagtccatggtgtcgcaaatagttgaatatgactgagcaacttcactttcacttttcctttctaccaaagatgaaaatgtgtaactcagatagggactttaaccccttgaccagaactcaaaacccatagttttccaactgagaccacaaacctggtttcaggatttgatgaagctcaggttcttgatgtctcatcacagaaagaattcagtgagagacaaagtgataggtaagaagtggatttatttagagagaaacataattcacagacagcatgggccatcttggaaggagagagtgccatcaaaatatggtgtggtcagcttttatggactgagtaatttcataggctaatgagtgggaggattagtccaactattttggagaaagggtggagatttctaggaactgggtcaccatccactttttggtcgttggtggtcagccttgaagtagtcatggcgcctgtgattgtgtcatttagcttgctgatgtgttacaatgagtgtatactgaggatcaagatctagtggaagttggcttgtccaccatctcagacctgtgtatgtgctcagtagcttagtcgtgtccaactctttgcagccccagggactatagcccgccagattcctctatctatgagattttccaggcaagaatactggagtgggttgccattccctactccaggggatcttcctgacccagggacctaatgcgagtctcttgcacttcttgcattgacaggcagattctttaccactgagtcacctggaaagcccattttggacctgtttggttctaatcagtttatggcatgtccttataaagtttgtgcccttccctcttccttcctacttcaagaggtatttatgggggagaataaacacatgccagcctaagatgaatctgattcctctttgcaactgagagacctgtccccttaagcaagtgcctgccatcagggccaagaaagagttggcaagaccacatgagtaggaactgagcttggtggtaaagagggttgggatatgttcatagtgctattccaaagagaccctttggtcaggagactctccacgacttatatccattagggagatgtttcaatgagatacaataattggaagtaattgaggaacattcagggctgtctctaaagagaagggataatgagtagcagaattgtagggtgtgagcaagaaagagagaacagatagatggtggtcaattggtgaatcctaactttatttactggggtcctcaagagaaattgaaccagtagaatgtgtttgtgtgtgtatgtgtgtggatagatagatctagatctagatcacatgatctatttacccaacccttggagagagactatttatctattacaatccagattgtttcttcagaacttgtcatggcatgaaagatttggaccaccagctaagaatccatagggagcatggagagggattataggttaggctgtgatgacactgaagactgctgtgctcatcccagcatccaccagagtcagtcacagtggtcttctctcaggacccagctggcctttggaatgtagcaggtatagattaatgaatagactcatctatataaaggtcttccttgacttacaatgcagttgtgttcatgctaaatctcccagttgtgtctgactctttgaccctacagactgtagcctaccaggttcttctctccatggaatttg

SEQ ID NO: 51476 - DNA, 1254 bp, Bovine  19866880670461
  misc_feature (1)..(1): n is a, c, g, or t
naggtttgctttgaagtctttctagcattttcattatcccccagggctctgaaatatcttgtgtttcttgaagctgcactgaattctggaatccattacatattctttttctttttttaatttggcagaaagtcatttaataacaggtaggatgcaaaattaaagccatgtttgctaagtctgaaacaccagaaaaaagcaaaggtgtctagtcgagggaagctattttaattaaacatctttatcaaaatcatccaatttttatttccccttttaaatgtttccaaattatttctttcccatcgtttatatatatcttgttgggagcaatgtggctgaggtcaaatgagtgatgtgatttctgggaaagaaatggagacataccgcatgaaatttacacttggtgaccttggaatgaaaattaggagaaggtcccaaagctgatatcttcaagagaaactgtttgttttgatgtgctgtttccatagcatatgtgtggcttgaccttgtagctgaaaacaccttagatcttatgttattcttcattcagtaagagaatagcatcaagccacaaatatcacttaattataagggaaaatctttatattactcttcccctaaggtttctgtcttttcagaagttcaagcacatgttcagaacatgaagatattctactccatgagttgtgttaacactgttgttgttcagtcgccaagtcgtgtctaattctttgagaccccagggactgcagcacgccaggctcttctgttctgcactatctctcaaagtttgctcaaatttatgtccattgagtcgatgatgctatctaaccatcccatcctctgctgcccctgtctccttttgccttcaatctttctcagcatcaggatcttttccaatgagttggcttttcttatcaggtgaccaaagcactggagggtcagcttcagcatcagtccttccagggaacattcagggttgaattcctttaggattgacttgtttgatcttcttgtagtccaatggactctcaagatcttccccagcttcacaattcaaaagcattgatcctttggggctcagcattctttattgtccatctgtcacatccatacatgactactggaaaaaccatatcttttaccataggacctttgtcagcaaagcgatgtctttgctttttaagatgctgtctgggcttcccaggtagcgctagtgggaagaacccaccgacaagtaggagatataagaga

SEQ ID NO: 51477 - DNA, 1089 bp, Bovine  19866880765070
  misc_feature (1)..(1): n is a, c, g, or t
ncacagtcacagtgtaatcattagttaataagtcaaatactgaaaccctacagaatgcagtcaaaccactatggatgagctaggtaaagaacccatctattctgcaaatacaatgaaaataacattattcttctttcacagaatcctgaattttctgtattttagatagtgctgatcttagcatatttctattccaaaaacctgtgttgtgatctattgcacaagaacaaaatactcccaagtctaaacacctcatcattgagaaagtctcgtctactttctgcaaagacatcttgatccacaaatgtcaagtttgccctagctaatgaacttcttggttataataactgcctgctaactgtcaataaatttcagagcttggccaaagcaagatgagcttgcgtttcattggatgcctttaacatccacatgagtgatgatgatttcttttcttatctcccccacgatacagtaaggaggagcagtgtcactggattggtccagaaatgaagaaaatgaaatggtaattctgattttccacccctttgttaagaacatcactcagcctgatgggtctagactttctcatctgctacatggaccccaagaaggcactggtctgaatctaagtatctgacaccagcctatcactttttcctcctgaaacagcagcaaatatcaatgaatgatcctggcatggtctcctgcaaagccaagaagcagcctcaaggtctttaccactgttctccaggtcctttgtctccaaagtacaccctgggaagtgtgaattgaatcccccaggttagggatgttatgttagaatttctatttagagttattttatcttcaaaaatgttaaataaactcaccacagctcgtgtttaatatacaaatggaccctagcacctctggccagtgcatatctcagatgaccagtgtcacatgaaaaactcaaagtctccaaaggagactaccacggaaaaggagttgacgagccatctcgctgttatgatcactcagaatattactgtttacatttgctcttctcaaggatttatgggtttcataaccggttttaacaaagcccag

SEQ ID NO: 51478 - DNA, 1229 bp, Bovine  19866880892557
  misc_feature (1)..(1): n is a, c, g, or t
natgtccttgaaaagagatatatatatattgaaaaattatctcctaaaactctgtctaaaacaaaaggtgatgaaaactaagaagcaaaatggaaaagttaagctctaagcgtaagtaaaaataattcaactatatatgctatattatgattgtaactacataaaattattcattttcatggaaaatgtagaggaaaatgaaaaaaaaaatttattcaaccttcttcaaaacaaaataagcaaaagaaaaactacttggttgctgagattccctggataatgtagaaaagcaggatgttaaatgcctagatttgacctttattcaggacaggagtgaagtgtcattctgcagcccctttgtaacaaggacactattcttatactatttaggtaactgtcatattcagcaaatttttctattactttgaggtcagttaagaaacaaacgtttggtccagaatttttatttaataccagacaggttttccatggtcaccagctataatataacaatggtaattaacatgtatggcttgtgtctggtactattctaattcaatttcttcaatccccacacattctaaggaggtaaatagaactgctgtcatctccttgttacaaatgtgcaacttgcaactcaggcctggttatattattgcccacataggtagtggcagaactaaattcaaaacccaggcagactagtgccagggtccatggtcaaaaccaagaatcagtgaacttttattgtaaaaggcccatgtatgtatttcagactttgcaggccacatggtctctgttgcaaccactccactctgcagttttagcagaaaaacagccatagacaatatgcaaaaatgagtgtggctgtgtgccaataaaactttatttgtagacatggcatttgaatttcatgtaattttcttatgtcatgaaatattcctctcgattttttccccattatttttaaaatgttaaaaaccgtttgtgcaggcagtgggctggatttggtttgagggtcataattcgccaaccccggctctgtactgtgactgctaccctttgaagtctgtggaggaggggagaaaaggaagggcctccaggagaagaggcagggaacaagggaggcaccaatgtggcacttacccaccagaaatctgtcgcataaggatttgggagaagcttctagaagaaaagtcattaggagaggagaactccaagtagtgaag

SEQ ID NO: 51479 - DNA, 1064 bp, Bovine  19866880940946
  misc_feature (1)..(1): n is a, c, g, or t
ncctggtgttgctgcagtccatgggggtcacaaagagtcgaacaagactgaacaactgaactgaattaaggttattcatgggaaagaaaaaaacctgttatttttatttccatgtagaaatcctcaggctttccaggtgggactactggtaaagaacctgcctgccaatgagggagatgtaagagaagcagatctgatctccaggtcaggaagattccctggaggatagcatggcaacccactccagcattcttgcctggagaatcccatggacagaggagcctggcgggatacagtccataggatagcacagagtcagacacaactgaagtgatttagcatacatgcagcacacatgttgacacatttacactactatatgtaaaacagatagctagtgggaagctgctgtagaacacagggagctcagcttggtgatggcctagatggataggatgggagcggaaggcaggaggttccagaaggaggggatatatgtatacatatatctgattcacttcaatgtaaagcagacactaacacaacattataaagcaattatactccaatttaaaaaaacaaaacaaaacaagactggagtaataactcaagtgtatcaggcaggggccaagatcagtgaactcaggcaaaccaccttccctgttagcaaggattccttctcacactggtcaccatccaaaaggcatttccagaccccactactgcttagagatcacactagatatcacctgccacctgtaagggtcatggcaggtccttggcaactccatgcatggtggccctgctccccacgatgtccattagactccatgctctcactttctccatccttgggagatttcaatttgtgattttcttagagaacacgtggcctatcacttaacactgtccctgaaagataacttttccatgattgctcactgctgacattttattatttaatactaaaatcccatcagagctccctagcctgataagctaaaaatgaagtctgaaaataaagcacctggcaaatctgatttgcagtcatatccaaatggcat

SEQ ID NO: 51480 - DNA, 770 bp, Bovine  19866881165025
  misc_feature (1)..(1): n is a, c, g, or t
nctaaatttgtctttctgttctcctaaagagaaagtccttaaggtggtttttactctcttaaatggattctcttaaaaatgaaaagccacattttatatgtaattgctgtgggccttttacgtctgatggctttgtaattgcttttcctagatattcctcgctcttcctctttatcttacataactgtctgctttctgagaaccagaacaaatgtggtctcaattaagttttccacaaacatcagccaaaacctcttctctggttctaatatcattccttgtcctcctccgcccagctgagacttgggcttttctttgaagcccagcacaaaacccaactctcccaggaggttttcctggcctgctgcaccctcgtaataatcctttctttggaatctctgccattctagagcctgggctacacacactgaccccgtgttgacagcctgggccagtccctccaacctcacgttacactggaatcgttcagtaaaatgtttgcagaaaaaaaaagaaacgacctcaagttgttcctgcatcatcctaggtatgccctcctggtcgcttcaattaaaagatacatttttgagagtccaagctcttctttatccttgcttccctttgctgctcatcaaggcacttagatgaactaccccatctcccttcagcttgattcagcaataattcacttatacctctatcattaaaaagggaataaccaatcatctttttcatgtttcctcaccataactccccaaacttaaaacatc

SEQ ID NO: 51481 - DNA, 1148 bp, Bovine  19866881356487
  misc_feature (1)..(1): n is a, c, g, or t
ngatctgacactcttaatgatgcagacactctggcgggccccttggctccatggcctctccacattttcgcatgccacgaatatcctcaaatacttaaactgggactgggcaaagcctattcacacgcattacagacgtctgtgtctgggcattggtttatgccattgaatgacacagaggggaaaacttttcattttttttttctctgtttgtttatttctctctgaatgattcattcttaataagtttcttgcccaaagcctgtttctgcaaccatgggaaagattccagcatttatttccaatgggttgtgactcctcctgaagaatcttctcgtcttcttccaagtccctttgtcgcagcacctcgggaagttatcttgaaaaatgtctgtctaccattctggacgtttagggaacaatttcgtgactctgtgtttctcatctgctttgcgactctggaagcttgcgactcctgagaacgaggctcagaagggacttattcatggagaaaacattcacctctttcatagatggccaagatgacagggtactcattcacagacccgccatcggtgcttagctatgtcagtggtagaagcctcgaggcagccttgcacattgagtcctgtgttctcgctcacaaggaggacgtgcctggagaggggtgtgcaaacaagtctcccacacgaggaagactggggcaagaagggatctctctatatgtatatttagagtaaatccctgctggagtgttgacataagaggatacctggctaaaaccccatatttcagggtttctatttattgagacacatgttctctgtggtcccataagcaaagagggtgcggctgcatgcagagcatcactaaatctttggtattttgagagaattaatttttaaaatactttttatttatttcccttgaaaagcagagccataaggcacagttctgttaaactaaatataaaaaattaaagaaaaaatcactttaaagcctgaatttttttttttttttccactgacttatagtcaacagtatgggtgaatgccagacactggggaacttaataggagaattaggaaatctgcaggcaggtagtaaataattggcatattaggggaaagggctcagagacagaattc

SEQ ID NO: 51482 - DNA, 875 bp, Bovine  19866881448841
  misc_feature (1)..(1): n is a, c, g, or t
natctgctgctatccgtttctgcttctggtattcaggacatttgccttcccttgtctctctgaggttagttttggctataagacttgctctggccaataaaactgagcaaaagtgatgtgtgtctgtctttagctgaagcactgaagaacgcatgtgttgttccccatgctctcttgcccattactgagacctgtgaaattctatgtgcaggagcctccagcagctggggcttcagactacaggtgtcatgaatcagagccctccaccagtggctatgtgctgtaagaaagaaaactgcacagttttggtcactgacacttgaggaatgtttgtcatcagagtataatgtcccatcctgactaatgcaggcagggaaaaaaaaaaaaaaaagcagctttcatttttggtccagtccttcctccacacacttaaacattctctatcaattattgaggcaagtgacaaagcaaatcaaactggatctgaccttcttctgcctcttggaactcgaagaaacaccaaaggaaaaactgcctagaatactgaaacatataagcagctcttccttgccttctcccctcataccctaaaaacagaccttggagcctcatctccatgaaaatgaaggatgagaacagacaattcagctgaaatcatcccatttcttaaatacttaagtatgggccattgagcatttaccatccttgctatgacaccccaagctcacttccccatgtgcaccgtatgcctgtgggaggctggtcttcagacgggcagctggtggaccgctagaggctttctccattgaagtatgtggagcaagcatattggagcaaaatgtgaacccttctgtctctcagcaacaaagttactg

SEQ ID NO: 51483 - DNA, 3037 bp, Bovine  19866881449171
  misc_feature (1)..(1): n is a, c, g, or t
ngaaaagtttttaaagtaatgcttcatttcgaatttactagaaatagtattgttgaagtttctgaaagctttcacatctaaccttcttatactaacctttctttcttcaccctgagattgcttttacttctgcaaaaagaatttgaggaggcagaaaagaagtgagaaggtcaaggcagaaaggaacttctggaacattttatttgatgtcatttatgcacatctcctcattgaattgtcctgacaacccttcgaggtaggtattcctagccctggtagtgatttaaatttaatcgatattactatttcagccaaagaaatcccttgtagaccagacagacacactcaaacgacgagtgcgcaactttttaaggtgtgagtgcagaaatgcacatcgatagactgctttcttcactgaagttttcggtttttttaatgtagatcatttttttagtctttagtaaatttgttataatattgtttctgttttgtgtcttggctttttgactccgaggcatgcgggatcttagcgtccccatcaaggatcacaccctcacccccttgcgttggaaggcgaagtcttaaccactggaccactagggaagtccctcaagtcttactatgaaaaaaaggtcctatgaactgaacggtgtgctgagagatgtgatctatttacaatctccttacctcacccagaattgaacaagcggttcccagaagagcaggctttgctgcagtgacactctgaggagcacactgaagaagcaggatgctatgaatcagagcacagcttctggcattaaggtccctatatgtgtatgtgtataatatgtatgtgtgtatatacatattatatgtatgtataggcttcctaggtagctcaggggtaaagaatccccctgccaagcaggagagagaaaagtgaatgtgttagttggctcagtcacgtccaactctttgagaccccatggtctgtccatgggattctgcaatgcctggagaatcccatggacagaggagcctggcaggctacatacagtccatgcggttgcaaagagttggacatgactgagcacgcaaaaaaaggtggggggtggggtgaggaacagatggagcttgctgacctcaacattcctaaattgcacataattatttagaaaagtgaattccccatccaaggtaaaaaaaaaaaaaaaaaaaaaagccaagtaagaaaaaaagatataaggccttgcctgggccaaatgtcccatcagtgttacaagacttggctgacacgtgacacagggctatcatagtgatgagcgacccggtgaggaggactcactgtatttcacacactgtgttctagctggaggtgacattgttatatgcatgatttttgcaaaaaaatgctacattgaaatgtcaaatttccatcctatttctgcttttttgaaatcttttttttttaaatctctatttctgctttttctaaatctctgtttcacaccacaagccttgagtttattttaaccaaaatagaagcaaacaacttgaaaaacaagctctcaatatttttcacatcttttattttgtcgtcaaaaaaggtcagtgttttacatattccattcttttacttcagacactggtaatgcggctccaacattccatttctagaattagctgcaatttacatgtgatctgtcttgcttgaaatgcaggctggctgtgtacttttctttgattcaaataacagcaatttgtttcccttaaaaagcatatttctctttttcaatgttttctttcattacactggacaaaatactggttaaggggaatgtttcaaagtgtggtttgaggacactctgtccaggcctgatgtcttcgcaaatagactctgctttctctgaggaggtcccctgtgtggttttgcatcccgagttcccagaaggaagcagtggggctcagagagtcacaaaggtaagatgctcatactgacacgtgaaaaagggatcactaagacctccaaatgaagtcttggtgatgcttctttaagggacatcctgacaggtttctggcaaacatttgcaagcttttgttgtcacctcaactacattaccacaattccatgtcaccaggtactctgcgtcacccctcctgttgtgcccaaaataaaagggttcacgttccccttgattcactggaaaactggaaggggtagaatacaggaagagaatttagagaatgcatcttcctcattctgaatacaaatatttggggagatacgtcttcaaccaactcaaacaaggatctgaggcttcctggagggttaaacaagtgttggggtgacagagatcctgggccaatggccttggggtggacttaaccctcagatctcaatggcctcatcaataaaaatgagaggagagaatgaaattgcttcccaatatttctctccaaaggtcatttttatttgcctgtctccagaggaatatttatttgaaaaatattcttgcaccaaaacaactgcctataaaatagcagctctattgtcctttcatatctttattcaaatacttatatacaacccagttggccttccaaagccacaggttccacattggcaggttggttggatccatggatgcgaaactgtcagatacagagggccaactgtaccatgtcattttgctctctaagggactctaacatcctccaattttgttatccacacacggtcctggaaccagtcccctgaagataccttaggacagacagttgtaactgctcactggggcttgcaatcagcaaacatgagcaaggttagccaagcaaactgataaatgcttgtccaaagcaaataagcttatttcagttggcctgcatgatcttatcataaaaaatgacatggtttctatgttctcagaaaaaaagtgaaatcagcttaggaactcctttcactatgcaggcagactctgaagctgggagactttgggacagcagattctcatgttttaccaccaatgatgactactgcagttctggattcctctat

SEQ ID NO: 51484 - DNA, 713 bp, Bovine  19866881603082
  misc_feature (1)..(1): n is a, c, g, or t
naacatttatactgcaagcccacacacacacacaccatcacataaacacactatacatacacatatatatatatcagtctatgtgtatgtatatgaatcattatataatcttgattcacttttcatttcctaaactttgcctggcaataactgactttcatctaccaattaaaatctactccaaattcatgtcttcaacagattaatatgtttttcgaaaaagaacatgtaatctggtaacaggatgggggtggtggtggtagtggtggaaagattttgttcaatgacaggttaaaacaaatcattattttctcaaactattttaccagaaataaattatattcaatccttaaaagatacactttctttgtgctatatcaggaaaatttagagttacaagatcagcaattgcaagcccaggattttgtaaggtaaatgccaccatttcgcatcccaaagtcaattcacagtggcgatttaagagatgcaaaaggcctggcaagagtatttatttcctccaagaatcctctgcaagcaaactgtgcattcagcaattctgcaggccactgtttcaccatgcgacaggcccacttattcacaaacaaatcattaacattcttgacagtaaatccatactggaccattaatcccagctatgataatgttttagtacatttgctctgcccatcatgaatggcagtgttgtttcccag

SEQ ID NO: 51485 - DNA, 778 bp, Bovine  19866880420776
  misc_feature (1)..(1): n is a, c, g, or t
ntgtatttttaatgtagggtgttaattaagagagaacatagaggggaaaattacataatttccaaagctctcttcaggttccagcctttctccaactccctccacctcttcaagaaatcttagaaatctacctttgtgactgtcctacttcagctttaagaatttgatctcagaatttgaatgaaagggattacaaactataaatgagtttattagatcatttagtgaataggatatcagagagaaaaaaagaaagagggagggagggagggcagaaggaagggaaacagggaaaggattgagtagacccagcagagaaaataatctcaaaccgctctcagttgttcttatgctaaacaaactaattctaccaacttaagcaagtatgttaccataaagcatactgaggattccttaccctgtcatctgcgcattcaagtaggtcaccatggcagcattccttgtggacttttgtgagatctgtcactagcttggtaacttctacaaactcagccttgggaaatttctggctcaggcgagctactgacctaaaaagaaaattctcccatcaaaatattattaacagacaacgttttatgtgaaagcattaggaaaatactacacataactagaaaatttaggctcaaataacacacagaaataatttgtaagacatattagctcttattttaatgataattctgaaccaaatgttagagcaaaatgtttccttagggcagtacatatgggaggttaaaagtccagcaattcataaaaa

SEQ ID NO: 51486 - DNA, 1184 bp, Bovine  19866880496926
  misc_feature (1)..(1): n is a, c, g, or t
ntaaataaaataaaacaaacagtttaaaaattagcaatgttctaataaggagaaaggtatggttcttaaaaatacacttaatataaaaattaagagaatcttagatattcatgtgttagaaatgctctatattttcagctacagatagagagatcagataagttatctaaaccagaatatttctgagatttatagggagctctactaatgacagaaggcacaggcatatacccacacttctctggacaaactgagatatacgatctcccagtcacgagtacaacaaacacactattgctgctattttttttttttaatcaaagaagcaactgcttaaaagaaaataaatttcagcagcagcagaaaatgtaaaggctgacttttggagtaaatgtcacaggataaatgaagaatataaattcaagacaaacttacctcttcacaaatacctgcacaaccttctgcacccacttttccttggggtttaagcagacctcgtttccattggtaagcttaacactgaaatgagagagatatgattaaaatcaatatttcatgggcttcaaacaccaccttgccattcaagtcatggttccttgagtacaggcataaaatggaagtccaaactaatttttagctattagagtcccatattaaatgccatggagacaaagaatttttcctttctatttttctcactatgtactcctagtacctagaactttgctggattcttccacgtctcaattctaggctgactaaagtaaaataatcacttttgaaattacttacatgatttctgaattttcacagtgtggcccactctcaataactctcaattctttgataaatttggggtggaaaggtgtggaatgtgtttttatgcattggcatcgaagttctgtactcattcttgacagaactgcagctgtggaaaaaaattaagaatttatttcatccataagcacagcttggctagcttcatgcttattaattccagtgtgatcatgcttattaattccagtgtgatcatttggtgagtatctgtttggtaaacatcacatcttcagcaaatttatccctgaaatcgatggctggatattctcccaggctctgacttcaatttttctctttgttttaaaaagaatcattcctaacaacattgaatggtgtaaaggcttcga

SEQ ID NO: 51487 - DNA, 937 bp, Bovine  19866880571943
  misc_feature (1)..(1): n is a, c, g, or t
ngagagaaggaaaaatctacgtgagttgggtggcccatttgggggtcggggtgggggcatcggcacggtgggtggtgatgacgaggacagcaacggaagtgacacttacatgacttcggtttggtcgcagtgggggccgggggttgtcaccttcacgctctggatgttcttgaggtgaatcccctgcaaggtctgcaggcactggcagcgcagttcgttgaccacgggcgcccctgcgggaaggacagagtgggttaggggctgtcctcacaggcacccacccacccccgtcccgccctggggatccgggtctcacctgctgcgcgccggccggcggccaccaggagcaggagcagcattgctgcgcggaggagccggggggcggagctcgcggctggagccatgggtgtctgctcggagggtctgtgtctgcggcggcgggaaggctggcgggagcgctggctgagcgggctctgtggctccccgaaccgagtgaaccccttttatcctgatcagaagggcgttgctagccccggggtcagggaaattcccggtccggaaggaagggggccccgcccgcctcacgcgtagtcagcgcactgaggtgtcatccctgtacccaaatccccacgcgacggtgagtctccctccaccacgctggggctccagcccagatgggggctgtgcgtctcaggccaccctggtcgcggggcagggagaggggaaagctctgggaacactggggagagacccccacagggttggggaggtggtcttagagacttcgttttctttacttcagactgggggaattaaagagaagtaagcatgtagatattgtttagttatctatcctctgcttctatatatttctgcctctctatattcaattttgcttatttcatacatgagaactgggatcagtgtcaaaagctga

SEQ ID NO: 51488 - DNA, 1203 bp, Bovine  19866880573909
  misc_feature (1)..(1): n is a, c, g, or t
nctgctaagaacatatacatagaagttaagaatccaccaggcttccctttttcttaaattcttactctgctttcaaactaatgtatccttatactaattaagagacaagtaaaaggaagtatatgcttagtaaaataattcagacaaagacaaatgctgtatgataccacttatatatggactctaaaaagtaatataaatgaatctatgtacaaaacagaaacagactcacagacaaaaacaaatgtatggttaccaaaggggagagaaggagcaagggagggacagattttaaagagtatgagattaatgaaggctgattactgtacataaaagagataagcaacagaacttactgcatagcactggggattatacctaatatcttataataacatataatggaatacactctacagaaaacaaaacaaacctgaaacagtactctgtacacctgaaacaagcacaatattgtaaatcatctaaacttccatttttttttaagtgtataatatgatgcagtagttctcaaactttttggtcggtctcaggaccccttcacatttttaaaaattagcaagtatctcaaagagtttataggtagagttatatctgtcagtatttactgagacatttaaaaaattatgtattaatttttaatgaaaatagcagaatcattatatgttaacaaaataaaatttttcagaaaagtaattgttttccaaaacaaaataatgcaaaagtaatattgttttatatttttgcaacttctacttaatagaggaaagttaggttctcatatctgcttctaaattcattcctgttgcagttcattgttctggttgaagtacataaagaaaatctgttggccctacacagacataattgcaaaaggtagtttcttaatgcttaattacaatatacagtctaaaactatgtcagtgaacttttcatattcttttatattcaaatctatcagtctctcttacactttgaatggctcttttacccatatgtgattttctgatgttgtaattggtcatttaaaaaatatcagtgcattgaattattcagatctttcaactacgaaacatttagttatatatatcaaaaaatcacactcattaatatcaccactgatctcatgcagaaattctttaagtattgagaagctgccaagctcacactggcagatacaatttt

SEQ ID NO: 51489 - DNA, 3476 bp, Bovine  19866880600060
  misc_feature (1)..(1): n is a, c, g, or t
nctaggaagtacagtgtgcagtaagcttgtccctgtctcccaggtatgattcacttatatggtttaggacttgtccaagatagaagataaaatgtaatttttaccctggttagttactcactagtgtttccttccaatttacaaggagacaaaatcagaagagagaccctagaaatgggcaatttttcaaaggtctcaagtaataatacatttagatcagtcagcaggtggtgaatgggttgaaacaacagtgaaagtgacaagagaacggctgataagtggtaagaaaaaaaactcttttgctataatttaagtaaagatctacaatttcgggtaactccctgtccttttaataagtgtaatacctacctgtgttaaatggaatgaatatatgtaatagtaaatggaataaatggaatgcccacctttgtttgaaagcagttagctttttcttgttcttcacagcatgttttagtcatctcctcaaaacgagcagcaacagttagaagtgtaggagcaaaaacgaaggggttccttctggaaacttcataaacataacttcaaaaggaaggaaggagggaagggggaaaaacaggaaagaagtgaaggaatggtaggcaagggaagggaaagagaagattaaaaaagacagatcaagttgtgaaagttaagttgagaggaagaaggatttcccattactgaaggcttcaaaggaaggcaacattactgagtctccaaaaatgtcataccactgaagttgccaactcccaaataaaaatgatgattgcagttctaatcatgaatgcaagaccctggctattctcttttcttccccatgacgccagatggtccgcagctctccttgtcatgctcaaagaacagctacctatacagactccatctgagattcagagatcataatcacttacatgtaaaaagaaaactttgtgatttaagctttccagaaaaagtctctgcttctgaaactattgcactgctaaacatccattgactgaatatttatctttggtaaaagctgcaccttcccttttgaaagaccatatatttcctgcagtactgcttttgtaccatgcacacacttgggttctggggcttatcccattagaaaatgcacatcattattgaaaggaccttgaaagcaggtttcatatcttgttcatcttctcaacaatgaccacagaatctgacacacaaatgcatgttgaataaactaattgatccgtaaacccagctatgttcatttggaatagatactggatttagcctaagaataattcttcaattagattatttttctactaaaattcaacttacttattcaaaaaagattccctgttatttttgtaagtctggcatttctcctcaggatccagagtagggagaggaggcaaaagtcctatatcagctttcttattatggaagaaacagagtcttctttcaaagtcgaccttatggcagcagtgtgaaaagttatatttttgtggcagtccctccatggcacatatattttccagtaaaacctcattctggacaacagaaaaggaaaagacacattttattcattgcaacatttttcaggcttctgagatgacacagtggaaacaatgagtgctgagtgtcactctttgagaaagagattccaggatgttcccaatattaccagcagagcatctctacccacagccttgacaaccatcctacgctttgggaaactctatcctatcctgagtccccttaacctcttcctatctctcttctgcctacacctcctttacatagtggcttttttttttttttttcccctctctctaggtaacagggtcagagtgtaaagggttggttaagtatttagcggtaatgtttagtaatagctttctagagatgcaggtggttactctattgggaggatgccaagaaaaggggggtgtgacagtagagtacatattgagaggcaggtaaagaaagtaactttacttctgtgcactttgccaagctatcggtttagtcttcctgcctgtatacttatggcatggactgcaagctcatagtcaagccctcctgtgcatcagtacacagaattgcatctctcctaagaaagggccttatcctaaatactgaagtcaggcaaagtaacaacaagagcatagagcatccctctatattttcaagccaaaaattctctcagtgttgacaaataagcttgtttgtttaagaaatgcaaacaatgtacttacagctaattttgaacattctgggagtgtcctgtcagccaagcatttatctctgtattctgtcatggctttaaccaacatttctacttcttcaaaggatgcctcctgaatatattgagcaaatgcaatgatggtgctgcaatagtccacacagagtacacaatgatgacctgcagaatttccagttatgtccaaccaaaatctcataggaacacccacttgctgactaaccttagaaaattatcaaaatgtgaagtctctaagttttataatttcttgacaattcaattgcctcatctgaatttttctttaatactgtattcactttttaatggcatatatttaattaatatattagcattaataattctagaatatatcagatatgcttatataagcaccatcatcatcaaaacaagtttagaggaactcacatatatccaatgttatcatctataaatttctgggtgattctgacatcatctgaaagcaaagatatttaagttattatatatcctggtattttaatattttaccaataaattactatatgtaatacattttaaaagtataaaataaaaaatgatatagaaaaaaatagcatatttaatatgaagaagagacatcatatgagccaaatattacatcttaatcacagttgattatgtgcttaaaaatattcattaaattgaattggcttgaattaatctcaaactcactagactttatatttactattgatggctccccagccacaaccatcaaacacaagcaccatttccatgctagataacaggtatgactagaaaagtagtatgaagtttcattgttaagtgatataatgctacagttgtgcccagcaagagatgccaggcatgctgatggtagtgtaaattatgatgcttctgctgctgctaagtcacttcagtcgtgtccgactctgtgcgaccccatagacggcagcccaccaggctcccctgtccctgggattctccaggcaagaacactggagtgggttgccatttccttctccaatgcatgaaagtgaaaagtgaaaagtgaaagtgaagttgctcagtcatgtccgactcttcgagaccccatggactgcagcctaccaggctcctctgtccatgggattttccaggcaagagtactggagtggggtgccatcgctttctccaaaattatgatactagccaaaattatgacacagatatttag

SEQ ID NO: 51490 - DNA, 1527 bp, Bovine  19866880628619
  misc_feature (1)..(1): n is a, c, g, or t
ngcaagaagcaataatcttataaaataggcagaatagtaacagtatagctagtaataataaggccataaatatttacactaagaacttcccgtctgaccagtctgttcagcaccaaccactatctttaaaggaaatgatacattggcattgttcaccaaagttcaccaaagaggtctgagcatagaaggcgagtggtgggtcattgtgaccctttgtagaactgagaaagaaatgttatcttctaaaggagtttcatggctggtgccagaagaaaaatggaaatttgtggctgagcaggtatttttgccatcggggaggtctggttaatgcataagccagacgaataatgcacactagagaggaggtaggagactgaaatgggcagagaaaaaaattgatgttaagtttttcttgtcttgccttaacataggaattttatttcgttagttcagagcgttaatgagaatgacactattataggagtttgttagtgaaaggaaaaaaaggattacccagtggggttttagtacctatatcattttttacattaaaaaagttctaaagctaatataatatgttaatattgcttaatttcagaagtggttagatagttaattgttaaacattttttttttttactttcatttttaaaggttttattattgaatgtgtgaaggcttaatatgcttatggaatttctttctcttagtggggaaaaagaagggaatttaagtaattctttcatcaaaaatccctttgagcttttatttgtcaaacttccttcttcctcgttatgggatttagttaacctcaaaccatatttacttctgtggtttcattctgaaaatgaaaatttggctggtttagaaaaaaaccttccattaacctagattctaagctagagattctcagaggaaattattttctctggcagagctgaagagaaaagccaaaacatttttatgctaacacagcttctggtgaaatgccatacaggtcaccaagtttgtgatccttcatgtcatccccaatgttggccttgaaactagccctgtcccacccatcgcttggaccagagtggaaacattctgagagtgtgcgtgatgctctcctgtgattaataattattttcacatactgcttttacttgtccccaagttcttcaaaattgcttttacacttttactctgagtggctatctcattgtttataagacaaaggaagtcagccaggttgctatttctgatggtacagtgcatgctaacaaaagttttttggcttatacaataaatttatattttagaaaatggaaattttcttagaggtataagtgtgtctaagtgtgcacttgggatggaaaaccaaggctttttttccatctgtaaaatcttatgatcagtacaatgtctcgtacttttaatgagattgaatcaagtttcctccatatttatcatgggtagttacgttaaacaaacatgagaagtatgattttgcagacataaaaataatatctaacctgtattatt

SEQ ID NO: 51491 - DNA, 1209 bp, Bovine  19866880754236
  misc_feature (1)..(1): n is a, c, g, or t
ncagtcctgtggccactgctgagttttccaaatttgctggcatattgagtgcagcactttcacagcatcatcctttaggatttgaaatagctccactggaattccatcacctccactagctttgttcgtagtgatgctttctaaggcccacttgacttcacattccaggatgtctggctctagtaaatgtgctgggagttggataaacattaaagttctaaggtccttattttttgactagaaatgtagagttaagaattgccaagttggacttcttaaaactgattgttgtttttattgtataatttctgggaagttttcaaccattcactttaaatgttgacgctttactctctcatcggcttgtaaaaatccaactggacatcaataagtctttatccctgattcttctatgtctttctttctacttttctaatttactacctctttatagctctttgtatctctttaaattccagataaagtctttgggtttatttctgatctccaattttctttgcagctgtgtctagtctgttataaaacttatccactgagttttattttgttagattgtggttttatttttaagagttttgtttgttttcaaatatgctcggtctttaattatattttaaatttctttgtctcatatgtatcagttttcctcaattagctgagaagtgctttataatgcgtgccctcttccctctttcattgagtgtcccgttgtgtcaagctgtacagacacctaggttatctgttgaaaatctgaagtcaccttcatttagtaaaatggtatacagtgggaagttgagaaaatttccatcattctatggaaaagactactgattgtaatctatctctggaaaggagttatgtttatctgcaaatatatttcccacataatatataaaatattaagggtaagtatttatgttttttaaattgaaacatgatttttaatatgaatgaataaagcaacaaatcttaaaattaccaaagaaaaatgaagacaaactcctgatgactctgacaatgaattttattttaaatgtcttatagttatattcatattttcatactatcaaaaccagtagaaagaactgtgaacatataaaagcatcttaaagtaaaaaataaagtttatgttcgaatacacaataatttaaagtatgagattctaattgttcagaataaataaataaa

SEQ ID NO: 51492 - DNA, 1146 bp, Bovine  19866880769715
  misc_feature (1)..(1): n is a, c, g, or t
nacataattgattgctgttttaataagaataattgtgatgtgcttatatgtgtgtaatttatgtacttcctagagaatcagaactctgttggcctcccttgtcactacttgaacaaatactgaaagactcaacatttgacaagtaatactttggacacctgatgcaaagaactgactcatttgaaaagaccctgatgctgggcaagattgaaggcaggaaggagaaggggatgacagaggttggatggcatcactgactcaaaggacatgaatttgagtaagctccaggagttggtgatggacagggaagcctggcgtgctgcagtccatggggtcctaatcctgaatatgatggtattaggaggtcaagcctttggaaggtgaggagggctgatctatcatgaatgggattagtgtatacataagagaggctccacactgcttccttactccttttcattgtgtggtaacacagtgagaaggcaccatctatgaaccagaaaacaagatctcaccagacactgaatctttcaggacctggatcctaaccttcccaatgtccatagctgtaagcaataaatttatgttgtttatgagctacctaggaactttgttataacaggccaaagggactaacacaaacaggagcaacaccaacaaaacaaaattaaaaacagaaaactaggaatggactatatagtgacatttaccacaaaactttccataaaccttatcatgaataagcacttttatgcatttttgaaatattattttcataaaaattgggaattaggaaattgagcccagtgacataagaggtgttgcaatgccaaaccaaaagtcacaaaatcctagaaattctggctaatgatggactatgagtagcttactaacctgttggggttttaaagcatggcttcctctggagggtaaactgaccagaccattaataaaatgttttgctttgaatcattttggttaaaaaatttttttcagttttagtaaatcagacggaagtaattttctttggaacagaatgttccttgggaacaactttcatttttccctagtttaaatttgagaactaaactggtgaatgctatgaccaaggactatatcatagaaaagaaaaaataataggggtaa

SEQ ID NO: 51493 - DNA, 1608 bp, Bovine  19866880853382
  misc_feature (1)..(1): n is a, c, g, or t
nccttgaactccaaagtaaagtattctatgctcacattagctggggctaaagaaagaatggttgactaagtgttacaatggtcatcggatgcttactgaaaagttttaaagactagtttgtgatcagttcactttgggagctaagaaaggacttcaagggtcggttggtttatgaattttaaatactgtgataaaacagaacaagtgacaaccttgtgcttgctgacaacaagaatgtgtttattctcaaggcaacaaaaacttggcctcacttggaaagatgatattcttggactaataatatttagaccctgcaagagcaagtcttagaataaataacttagttagaagtaagctagcacttctgttgatcttgagggagaaagaactatgaggacgagtctcctttctcctgaggacaagatgcatgtgaggagagtgagaagggagggtgggcactaaaggggaacctgtcccactgtcaggaggtggactgatttcaattaattgcgtatttgtcattgctgttgctgtgtgtacaaaaagatccttacttttgcttttcagtttgtaattcctcctcttgagctttgcacaagtcctctttaaggttgatgacttggtcacaggataaaggtgaagaaatgtaagttccatcaacttgcaggtcatcaaagcaaggctttctgaaggcatacgagtcatcacagcagtgacccacagcagcattgatgggctctgcctcgtgccttctgcataaagctccaagaattaactttgccttccccagaaaagaattaaaataagagccataagttttgtggtcattaagattattttttttatccatagaaaactattctcaaattctggtttttgctaaactcaccctgaattttatcatctgggaaagagcaagagtgtcaggtgaagcctagttctcaactttgacctccaccttcctattatcttcaaggtgagttcccttggaccccatctctcaaattccttcccagaccagtttacagacaagtgttggcttgaggcaggagttctttatgctgcatcaagttaaaatcaagcctctggtcaacacaactgctaatttgatccagatataagactgatgattggatttcttacttaaaatgctcaaatccaatgtgtttctatgttttataactggacattggtaaccaccatcaaacttggtatatggaaaatcctgtataaacatttgttgaattattggaaaaaatgaataaatgaatggtgaaaggaatccctgaatcttctttcagttacctctttaattttcttgtcttcttctagaacagtcaccttgccttgctccccttgtggtgtctgatacttactctaatgctgactgcaagcctgctctatgcccctctgagtatgaccacacaaattccctgtcacttatgtatgtggggatgaagtggctgaaaccatagagcatcagcattcaatttacaagtttatacattttcacagtaaccaaagagatcacttaaaagcaaggttttaggaatataaaccacaagttccctaaggaaggcatgattgttaataaaaatttaaaataaa

SEQ ID NO: 51494 - DNA, 1308 bp, Bovine  19866880994864
  misc_feature (1)..(1): n is a, c, g, or t
naatcaattatgttctaatatatattaaataagaatgaatgatattgtaagttcacgcagaagtggatattctccttaaaaatgttacgaagataatggtgttcaaaaacagtatagtaaatgaccatcattaagtgcaatcttagaagtctaacttccacaaaggatctctgtagtatcaaaaaaatgaagctatttaaactagctgatcccctctaagattttcttttcttgctgagcccagaccaaatttctgaaaacttcccatttctgagaagcccaaagcttttgacaacatttaacattttaatgcttatcttttgtttatttcctgtgtagtcatctcttgtcaaaaaatttctggcaggccaggattgcaaggctgaacaaaaataactagctaccccgtatgcccaggagatggcaaggaaaagcccacctactgttacttggagccttgcttagtctagactcaatcaaaattcagtactaatttaccccaggagaaggcaatggcacccgactccagtattcttgcctggacactcccatggatggaggagcctgctaggcttcaatccatggggtcacgaagagtcagacatgaccgagcaacttcactttcatttttcactctcatgcattggaaaaggacatggcaacccactctagtgttcttgcctggagaatcccagggatggaggagcctggtaggctgcaatccgtggggtcacacagagttggacacgactgaagctacttagcacagcagcagcagcaagcagatttaattgtaaatgggtagcaggaaaattatatcatgaacaaaagtagggaaaacattcttgacatatagtaattctggggcaactttgaagccaagttaatccctaaatgatgctcctttttcattggtctgtcaagcctaatgtggaaggagacgaactgcattgatgttgccaagttaaccccaaagtaactggccttttccttttcttttgttacttgcatgcaaacaagtaactattttccacttcagctcttactgattgataaactgctatctttgatgtgcttaacttgataatgatatgtctacatcttttcttactgcaatatataccatttcttaaaggtaatacaaagaatagtagacattaaaaaaatagaaacttagaaaaatatgtgaaacggcctgtcacaaactaaatggcctaagtcatatactaaatcattaaaggcctctctgatttgttggaagaaatcaatttagaataatatccccatactgttaacattcaacacagt

SEQ ID NO: 51495 - DNA, 1025 bp, Bovine  19866881144663
  misc_feature (1)..(1): n is a, c, g, or t
ntaaaaataaattttgttttgcattagtcgaaaatttgctttgagatgatttctttattttcagaggactagattggaaacaaaggttaggtagattatctgttgaattatttgactaaattttacttccttacttttgtgacctaaattttatacacttaatgactttcattctaacattctcatctttatttttctacctaagctcatgtgagtattcaccttatcacctcctagacacaccgggaaatgttagacttgtattaccatcgattatggtctcctgtttgcatgatgctataggaagcctgcacacaatttgtagtttaaatgcaagtcctggtgcagacatgctcaattcagagatcagactcttactagctatgtgaccttgagcacattacttaactgcttagagttaagtatgtatcagatcactctcatgtatcagatcactttttggttctctgaaaacaccatttctgttttggctcagggtcttacaaacactgttctctctatctgtaacatctttcagcttctccccacctcctcgctcattcagctgcttaatttttacctgtttttcagctcttagtgtagaaatcacctcctgcaggaggctcttcctgagccttccaagtgttaatgagttaatgaagtgttctaatgcttatcattttattttcacactggtttgctagtgctaggaagtgaggaaaagggaaatcaactgacttgcccaaggttacaaagcctgttaagggcagagcgaaaacatcatgccaggagcatcctcttccttttctttcactacatctgccttggtggggccagctccaccctggttgcactcagattctatggtatgctgagacataaaatctccagaaagagtccctctttgtgtttctgggtgaggcgcatttcttccccatgacatggtaagtcatcaggtcgtccaagacatcctgactgctactaccttgccagctccaccagtttcccttcacggatcatcaggt

SEQ ID NO: 51496 - DNA, 1210 bp, Bovine  19866881165657
  misc_feature (1)..(1): n is a, c, g, or t
natttaaaatgtgtgaattatttctggaattttgccatttaattttttcatctctctcaggattttattttaaaataggaataaaattatgagtaaaaaatgtatggttatatgtttcttatagtttttatggtgcattactaatccccaagagagatgtatcagatttattggatcatggcagctgtttaccaaattttatctaaagggccgactattgattagagcaacttgtgagaaacattgttctaaatggtcaattagcagcacttttacccaaatcctcagttgagatttatgctaaatcacatgaaattgccaacactggaccatttctgaccaactggaaaggaatgatttcatatggttcaaataaaaacaatttagaacaattactcccaaacaggagggaattttgaaatcttaaattacagtaaagaataggatgattatctaatgaaaatatttcaaatattctcaaacgacgctttacctaacttactctagaaacaatataaagctgcttaaaggcatacatagtactcaacaaccaaaacaaagaaagtaaaaataagaaagcaaaattttaaactcatgatcttggattttttgtgcaaaggaaggccagattcaagagacagactcttgttagtttgtcacatatgtccttaaaattacaaaaatcttttttatttttcttctagacgtcaattttcactccagtctttggatcagaaactaaggtcagagtaaacagtaatatgagaactgaagaagtaataaagcaaattctccaaaaatttaaggtaatctttatcagtgaactgaactataaatatcttgtgtataatttaattgtaaacacataaatggatttttctgaaaaagacataaaagcatgtatatctaaattaaatattcagttccaaaaaattctttcctatgtatagttgactcttgaaaaacacctgtttgaacgccatgggtctatttaaatatggattttttgttaactttttattttgtattgggatatagccaagtaacaatgttgtgatagtttcaggtaaacagcaaagggactcagccatacatattcatatacatggatttttttcttcaatgcatatattactgtttacaatacatggttggttgaatccatgaatgcagtcctgacagtacaaaaggccaactcagggactagagt

SEQ ID NO: 51497 - DNA, 943 bp, Bovine  19866881205151
  misc_feature (1)..(1): n is a, c, g, or t
ncctacctaaaagctaagaaagagccgaggcttctaggtagagaaaaatttcctctttgggtttgtttttaaaatttggtgatcactggtcctgacttacaggttagcctagggatcttccttcccctgacatgttggacagttcccacaaaacctagtctccttatctttcaaatatgtattcctctaatggctctgatgcaggaagaaaggtggtttaagagctgccccatcatctatagttggtactgtgaagaccagcagatatacgaagggtcaatatgaccttttgcttctctcagttcatagaacctcttatgtcacagtgtggcagccatgggaaggatgctcccactaatgctaccaacagacatgtatatctgagatggggagatgcaactcctctcttatgcctgagacatcatgtgagcccctgtaatacgcaatgttgaaaatcttaaacataagcatcaaggctataataagttaggtagacaattggcatgttagatcctattaaattataaaatctgctattccctagaaatgactgatgaatttacatcatccttcacccctaaaccattttcaggtgtgtttgtctccaggcagttaagttgccctcgttatatttgatttatcaggattcagaacagcacagtataaagataatgtgctgtggcagtgtgtttcatgctagccttttgtcttgttcttcctcaatgtctaggccaacagtttaccttgtataaggagtcaaaaagcaccagaatttatcattaagacagccttattcacttctttctttgtcccttcttatctcagcaagacctacctgaggtgctggtccacttagctctaaggctggtaccagacttcatcctggcccagtgcctgttggttgatggctctttcatgtaaactacagcggcccatgtcaaga

SEQ ID NO: 51498 - DNA, 1107 bp, Bovine  19866881277104
  misc_feature (1)..(1): n is a, c, g, or t
naaattgtttccccccccatttgaaaaatgttttcttcctgttcttcagaaggcatttgattgaatttaaaccagtatttgtaactagttgcttcccttttttattaaaaagtatctgaaatgttaacaataaattatattctactaatttcttttttaactgcttggtcttatgatttcttggctgtccttttcttggattcattttagttgttgaaggcataaattctctaaattcagaactgtttgtggtttttaaattttaaaagtacttgcatgtctaaaaattattttgttctacagtttagtttagtttagtttgttctacagtttagttctacaattttttaaaagttaattgtgcttcacttcttttcagattgtcttctagcatttagttttgtatttgagaagtaaattttaccaggttatgactctaggcggggtgtgtgtgtaatctgtgtgtgtgtgtgtgtgtgtgtgtaatctgtatgtgtgtgtatatttgcatgtacattttaatgccattttacaagaaattgttttattttgaggctctttttatgataattgatgaataatgatatataccagaagtaggctaaatttataactaaattattttgtactgttgttattggatttaaggaaatccttgaaataatatgtatctttaattctgttagcaagaaatctacttacaaactctagatatgaggattccatagaatttttacttattttaaccattaataatttgtccactttataaagtttatagtttccaaattttcacactaaactgttgtaatttcatagtgagctattggaggcagataagtactttgaagcataagaaaagaaatcatgttgtactattgggctttgtgtttctttataccactgattcttagcatattcccaggtcttgactgaaatttattagaaggatagataagtatgaatgaaagaatgtagatattaatcaatcataaatcaatgaatagacttttgaaagctaaatttattttagtcaaattttcttcagttttatttattttaatcttaagataccagtaccataatgtcaggctctttgttgatatt

SEQ ID NO: 51499 - DNA, 952 bp, Bovine  19866881302260
  misc_feature (1)..(1): n is a, c, g, or t
ntagataaatatgaatactccttctagtccctggaaccttacctttatggtagagttgtacctatccacttgccacacagaagcaaaataccctttctgacttagtgtttttacttaactttttttttcttttgtctttagaaactatttttatccagtcaaagtgcaagtggaattgtggagcattataggtattattttatcatgatttgtaatttagggttttaattattgaaaagggacatgctggaaattttatcttccccaataatgctgtgaaaaaatcgatatagacctaattattgaaagcataacttcggttgacttctgtcatcctgtgaaactcataaacattacctgatctttttagagttggctttttaagtttctttcagggtgaagctagagataaaagtgggtcaagtagaaaaaaatgtaaagatcacggtactttacgaattctttatagagccgatattattgtttttataaataattttgacataataaagtctcaaagtatgcaggtattgttgaattgtgctgatggaaatggacaacaagatttttgagaatagattaaaaaggttaaatagggttatatgagtcaggtaaaaaatgagcttttttgattaaatggtctgaaagaaagcctgctttttcagtaaaagtgcagtataatgttgaacaagattgaataaggttttggagataaccaaagccataattcttattttaaataatgataaggtacaactgcacaaaataggttatatgtatttctgtctgctgtaccatgaaaatgaaatgatgaccaaaactaggcaagttctagagcgagagctgaaaactgattggatggggatggagtccatgatcaaggaggactgcagattatacagttatattctcattactccagtactcacatagagtcacaaagtaagaaaat

SEQ ID NO: 51500 - DNA, 1341 bp, Bovine  19866881344154
  misc_feature (1)..(1): n is a, c, g, or t
ntttccaatgagttggctttttgcatcaggtggcaaaagtattagtttcagcttcaacatcagtccttccaatgaatattcaggttttatttcctttaagattgactggtttgatctcattgtagtccaagggactctcaagagtcttctccagcaccacaattcgaaagcatcaattctttgacactcagccttgtttatggtccaactcccacatccatacatgactactggaaaaaccataactttgactatacagaccttggtcagccaaatgcttagtatttggcacaaccctgactattgactggacataataagaacctaggtagtgacaaagtagggtcactagagtggggtctagaccagtggttttccacatatggtctggagacacttaggagatcttgaaacactgccagggtgactgtgaggtcacaagacttcataacattagaatgtgtatgcctcacaaccctcccaccaattctctctgagtgttcagtggaagtttcagtgactatgtgatatgtgatgatatcattgctctggtggctaatggaatatgagttggtattttaaactttctgttttaatttctaatacagtaaatatcaatggctataatccatatcttaaagaaaactctttagctcagttcagttagtcgctcagtcgtgtctgactctttgcgaccccatgaattgcagcacgccaggcctccctgtccatcaccaactcccggagttcacccaaacccatgtccattgagtcggtgatgccatccagccatctcatcctctgtcatccccttcttctcctgctcccaatccctcccagcatcagagtcttttccaatgagtcaactcttcgcatgaggtggccaaagtattggagtttcagctttagcatcagtagtttagggccctcaataattttaacagtttaaaagtatcttgaaaccaaaaatttacagttctggaacaatgctgtccagtagaatttaatgccataatggaaatatatggaacttccatagatggcactagtggtaaagaacccgccctccagtccaggagatgtaagagatgtgagttcagtctctgagtcaggaaggtcttctggaggagggtatggcaacccattccagtattcttgcctggagaatcccatggacagaggcacctggcaggctacagtccaaaaggtcacaaagagctggacatgactgaagcaacttagcacagcacgcagcgcagcacaatggaaatattctatcaaactgcactgtctcagataatagccattaggcatatgagactgatgacacctaagatgtgg

SEQ ID NO: 51501 - DNA, 837 bp, Bovine  19866881385143
  misc_feature (1)..(1): n is a, c, g, or t
ngattggagtggaggattttttcccctctggcttctgttgtcccagtttgtttacatcagagttggatatctttattttaatccatttaatctataaacatgtgaatttacccctagctagtagagagttaactgtgtcgtgactagcatagtcatctactttttaatctgatgagtctttttgattgagtttacttttatttttttcattttttattagtagttgatgtacagtattatataagttacaggtatacagtatggtgattcacaattttttaaacgttctactccatttatagtattgactatatcccccgggttgttcaatatatcattgtagcttattttatagctaatacctcttactctcctccctcctttatctcccctccctccttatctcccctccccctttcctctccccactcactggtaaccactaatttgttctctatatctgtgaacctgcttcttttttgttatagtcactagtttgttgatgattcttttctatttttaattttcagggtccagcactgatttcaaaaactcgtgctgctttgggagtctaaattacttcaggtaacaaaaagttcagaaaaggctaactataatgttgattctccccaaatattgatccatagcgaaatgcatcctaagagctagcattaaatactttcttaagtcagtcagtcagttcagtccctcagtcatgtctgactctttgcaaccccatggactgcagcacgccaggcctccctgtctatcaccaactcctggagtttactcaaaattgtctctactgagtcggtgatgccatccaaccatctcatc

SEQ ID NO: 51502 - DNA, 1844 bp, Bovine  19866881506723
  misc_feature (1)..(1): n is a, c, g, or t
nttagaatgcttcaaattaatgcatcaccctcctgaaaatttcaaaagaagctatgtaggcagtagtactgcaaattctagagcatcagttccaccttctaaagtgaattctcagagattagtgaattagtgaacgctcagaaattagacagtgctgaacatatgagcaaaagattatgatttataggacataactggaggcaagtcaagttgactggtaaggttatgagtatattaacaaagacaatatcatattgaatataagcacccatctcctggcaatctaaaaatacaagttcagaatgccctggtggtacagtggataagaacccacctgccaatggaggggacacagtttagatccctggtctgggaggattccacatgctgcagagcgattgggtccgtgcgccacaactactgaagcccaggcacctacagccggtgctcggaaacaagagaagccatccattgaagagccaatgcactgcaaccaagaggaactcctgctcactgcaactagagcaaagcccacacaccactgaagacccagcatagccaaaaataaaataaattttaacatatgttaaaaagaaaaaaaagctttgactattagtaaatagtgatggacagggaagcctgatgtgctgcagtccgtggagtcacaaagtgtcagacatgactgagtaactgaattgaactgattagtaaataagaaggaaaaaggaaaataccaagggaaagccaaaggtaggttgatgacctaccctggaaggagagatatgtgcatctactttgtgaagaaaagtatggtgtagggtctcagccaggcagacgtttaaagagaggtcatatattctgcaaaaacttcttttggaagaatattcatcattgcctctcaatcatgtaattattctttcctattaagtaaatgaacaaaagaacttgcatgaaatctctgcatgatctattctattgttttagtgattatcatttataggtgctgctgctgctaagtcgtgtcagtggctgtagagctaataaaacattctccgtcttgacaggtaaataatcataaagaagtgtacaatcctttctttcttttcaacccagtagcttaaaattattataaaatattttggaagttaagaatgatgtaaaaataatctagtaaatagttgttctgctttaggaaataaaaaattataccacagttgaagtccctgtagatgctcctcgaatgcatctctaggagttgcccctattttgaatttgatgatgaaatgtgcagaatcacctggaagttctttctattgggcaaccatgatgacctataaagtcagtaagtaagtgaaagtctttcagtcgtgtccagtgctttgtaaccccatggactacagagtccatggaattctccaggcagaatactggagtaggtagcctttcccttctccaggggatcttcccaacccagggatggaacctaggtctcccacattgcaggtgaattctttaccagctgagccataagggaaacccaagaatactgtcccttatccagcatatcttcctgacccaggaatcgaactgaggtttcctgcattgtaagtggattctttaccaactgagctatcagggaagccctgatgacctatagaactattttaatagtcaatgctttggatctggctattggcagtagaaagtttcaaagtaaaaaatgttcagagagaattaggataatgagctttgacttattcatagtgaaaatttgctaatgttctgataaaacagagaatagcaactcaaaataatagagaatagccaatcaaaaataatttagt

SEQ ID NO: 51503 - DNA, 723 bp, Bovine  19866881561331
  misc_feature (1)..(1): n is a, c, g, or t
ntctttttactttctgtcaaactttttatctcccaagaagaacagaagttgaaatcttggctttctagagttcttatttatccaggatacctagtcataccatattaaactttggatatgttttccattctgtctcaaaaagtcacaatttgctctgagatggctggttaatagatgacagggagaagataaaattaagcatggctagggtgtaagacagtctcaaggatgtattgtataacaggaggaatataaccaatattttgtaataactctaaatggaaagtaaccttttaaaatagtataaacattttaaaaattaataaaaaggaaagtaaccaaggcttgtttcaaaatacaatatatgttttactccctaactcttggctaaatgtggtaatgtgttttgcatttctttctttaaaagtttctttccaaaaccatttgtcttaacttattgtgctccactgtactgatagactggacatgaccatgatgattccgtaacggtcagtgatattagaaaccacacagagcccagcatggaacacttgctgaataaatgtttattaatacatttagatatttaatagatttttcattgtgttagtcctaggatgtcttgtttcaaaacattagctgaaagatttttccagtgtttactttagccttcaaatcctaacaataataaaattgtagaatgtgagttttgtgagcagtggt

SEQ ID NO: 51504 - DNA, 1322 bp, Bovine  19866881611209
  misc_feature (1)..(1): n is a, c, g, or t
ntatgcagggcctgtaagtgtttagcatcaactgatggagggctctgctacttccttcttcccattgcctttgtttcgcagaccttggagaatccagaagacccccacagacagtacttccagaagccaatgaatgagcttgaatggtgacccatggatttaatctaattaaccttaaacacactaagactaaacagattagcttcccttgtgggtatcacaatagttcctgttcagtctccaagtcatgtctgactctttgcaaccccatggactgcagcacttcaggcttccctggccttcattatctccctgagtttactcaaactcatgtgcattgagtcagtgatgctatccaaccatttcgtcctctgttgccctcttttgctcctgccctcaatctttcccagcatcagggtcttttccaacgagccaggttttcgcattaggtggccaaggtattggagcttcagcttcagcgtcagttcttccagtgaagattcagggttgattttctctaggattgactggcttgatttccttattttaaccacttaatcctttgaaaatgtaatgaaagctctatgccctctccttaccactaaatccacttaagcctaagtgtacaaagttgtgtcagcaattttcaggaattcactgatctctgttaaaaagtcttaaggagtaaaaccaataaaggggatgctggaggtaaaacactagagaataatgaaaggatcctgagtttactgtctttaagtcaactgaaagagaaatgatattttctgcctgctgcttgctgtccctgcattcaagacaggggcttcaggaagaaattcatgatgttgtcaaaagaggaggtagagattggataaggacaagaatgagaaagaggaatagaatcttcatattcaataaagatacgaatgacctatagttttcttattgcccataagagtaaactcaagtcagtaaaaatggtgagtgctgctttcaactgatgctaaaaaggagcaccaggagcaaaaggcagctaagatagagaaggaaagttgattcctttcataattcccttcaggttgccaaatatatacagaatttaagaaaaatctgtgtgttttcacacaaaaagaaaacaaaattagaaaataattcagattgtgtatgggtttagagatgtgagccagtctctcaaaattccccagatttatgcaaaattaggatataaaacttctttatccatctcccctcaatctgatgccctgtgttatctgatttccagatttgtgacccttttgtctctaagctgtttattttctcat

SEQ ID NO: 51505 - DNA, 1302 bp, Bovine  19866881733679
  misc_feature (1)..(1): n is a, c, g, or t
naaattttgatgagatctcaaacttagtttcggagagaaacatgtgccctctgtcttctatatggcctcatatgggcctctgaaatgttctttgtccattattctccatggccacatcctatgtgaatactggggagctataaagcatttatgtcctattttctacttatgcaaatttggggttgaacagttccctcaagtgagcaaacttgaattgggttcatgatttgattagtggtaaaattccttcaaaagtttagtcctatcatctatttgcttccagtaactacacccaaagttcttgcttatgtaattctcaaaaatgatttacttcatttccttgcccccatgtcagttttgcaagaacatcatcccagctatcttgagaccatctaaaataatggtcttggatggaaaggccaaagtcttgatctgatctttgttccaggactaaatcttgacaggactgtactcaaggcctcttctagctttatattttactcttcaaggtctagaaaaactctgcttttccaatctttccaaatacttttatgcatgttcatttctgcaactgttttctgagcttatctgtttagtaatatcttactaaaagtaaaactcaaaatacagtattactttgactcttttcaactatttcctcctattgagactctactgggtcacaatctcaataggtggataatatgcttttaaattatcatgggtaactgtttaaacacctcttttgccactgcaaaacatgggtgtccttccgttctctgatgccagtatctctaacatctgctacatcaccaaggcaatgtaacatattttagggtactgttttagcagtactccacttccagtaccaatttctgggttagtcatggtcattcaagctctggaacatctgaattctcaaatctcaattttctctcatacaagaagtccaaaaaggagtgtttctaatttggaaatatctatattccaagtagtaatttagccactcatgatctttctctggctctggcatcttcaacatactcactagcttcaagttgatggagaaagagtgaggatgcaaggacttcattaagcctggaaatgagcacatcacttccacttacatttcacaggctaaaagtcaattacaagaccacaactaactaaagggaagttgggataattagtctagctgtatctccaagaataaataagtttcatgaatgactctgctacaaggttctaaaaggaaaaaaaaaatgctagataaaaataatagaaagtcactccagaggcttt

SEQ ID NO: 51506 - DNA, 2009 bp, Bovine  19866880376649
  misc_feature (1)..(1): n is a, c, g, or t
ntgacaccacccttaatggcagaaaccaaagaactaaagtagcctcttgatgaaagtgaaagaggagagtgaaaaagctggcttaaaatttaacatttaaaaaacaaagatcatggcatctggtcccatcacttcatagacaatagatggggaaacaatggaaacagtgtcagacttcatgtttttggcctccaaaatcactgcagatggtgactgcagccatgaaattaaaagacgcctgctccttggaagaaaagctatgagaaatatagtcagcatattaaaaagcagagacattactttgctgacaaaggtctgtctagtcaaagctatggtttttccagtagtcatgtatggatgtgagagttggactataaagaaagctgagcactgaagaactgatgcttttgaactgaggtgttgggagaagactcttgggagtcccttgtactgcaaggagatcaaaccagtcaatcctaaaggaaatcaatcctgaatattctttgaaaggactaatgctgaagctgaaactccaatacttttgccacctgatgcgaagaactgactcctcctcagaaaagaccctgatgctgggaaagattgaagacagggcagaggatgagatggttggatggcaccaccgactcaaaggacatgagtttgggtaaattccggagttggtgatggacagggaggcctagcgtgctgcagttcatggggtcgcaaagagtcagacgcgactgagtgactaaactgaactgaactgaactgagtacagtgaagtctttgggaaaagtcaataaagcctcagtacatagttcttaattctcacaaagaatatttgtgttaattctctcatgagtcagataattaatcttgacacatcccaaataaaagtgtgtgctagcctcagtggattcttaagtgactttttaaggttttttcaattaaataaatgttaaaacctccttaaagtgtgctctagttatataacagaataactaacaagaggcatagtcccttagtagcttcatagcaacttgtcagagacaaagtgttttattctgaagaggagactaaggttcccctaattctttccccatctgtgcaatatgcattctgtaaggccctcaggaagaatacaagcctacttcttacaacctactgttgctgttgtcagaacacttatttactataccacacactgagtatggtttaaatttctcttgagttaactttcttgtttatatcttatgttttcagtgagcgaggcaagaggcagactatcacatacttttttttttttttaattttccctaaattagatctcagagtacatttttcaagtgcaattgaaattaaccaaattctaagtagaagatgatggttatcacctcatcatcatgttggtgactattaatctacatagacaatcctattaaaggaacagaaagtaaactgatgggaattgaccaataaagcacaaaataagatagagagtcagatgtttaatgtgctgtgatggattcattagataattttaaaaagacacaaagacatggaatcaaatctttcagtactgaccaaaaggattggaactttttcttgctggccaatatacccaaaaacacttttgaaggaaaaaaaaaaaaaagaagaagaagaaaacatcactgtgtctagtaaaaacagtttgtctccaggatatttctcattctcaattgtctgagttttccaagtcaaaccagctgaaatagaaagtccttaaatggctataattcatgagccataacctgggtaatttatggtttgtagtccaagagttcaaaatgggaaggataagcaactatacttcccatctaaaatgcgtgtgggagtgcgggagtggagggagctgccaccctcaccgccagggctttggagcatcatcatggtttgaaatgtgcacatcacccgttagtatacaatgttgcaaggtgtaaattcctgaatgcagtcaatgtgggaat

SEQ ID NO: 51507 - DNA, 3458 bp, Bovine  19866880473263
  misc_feature (1)..(1): n is a, c, g, or t
naatattcaggacaaatttcctttgggatagactggttggatctcctttgctgtccaagggactctcaagagaacatagtaattggttttgaacaccacactgtcagagggaaaagaactgaagtatgtcaaaagtttataaactgagatgctgaagttattggacaaccaggaaacgtttagcttgaatgaaagggaactaaaaagtttaaaagctatttttgcacaagaggaattagagggttctacaaatcccccaaagataaaactgggatgaatagaaattataggggaaaaaacagggtaagggaacaggacagtacacaaatgtatcaccctgagggcaaagaaagctggtgatgtgatggaaaaaccatattgcatgatcctgactctcatgccaaccattggacaggaccattagttcagggcagtgtggttctcttcagagtaaggttaatggcttcagggtggtgagggagctgcaactatacatcagtaagtgaaacactaatgagctacctctttgccagtgtagttaacctactttcttcttcctgtagatattgttgcacctaaaccatctgagaaagttaggaacatggcatattcttaagtctttcaaaaacaaaatccaaacattttggcacctatgtgagcatcagacaactttcccagttgggaagttttccattatgtttagcctggttgtttcttttatccctgttgaggttactaggaaatctcatggaatcatccttgaatacagttttcttacaggttgttctcagtgtgagagaaaaattactgatcattttcaattaaagggatgatgtaggtgaaagatctttgaaaagtattaagtgtaataaaagtacaacctatcattatcattgtttagattatatgactattatgttaatttgttctttagagtttactctataatttcttagaccttgttatttttctgtattgcatctgttcctcttcaaaatgcattacaatgtctcaggctgaatatattaatgtgaactaaaaattagatcatggaaacactacatggtccccttaccatctagctctggtctttcagagtaaaacctaaagtaaaacctaacaaatataacttgattttttagcgagtgttgattttgttctcagatatatggtagtaacatggaaacactcttgtgacccttgagttctaagataatatctacataaatacacaacaaacaaaatatagtgtaaaacttagtgaatgaaaaaaaaaaaaccgcatctgctaaatcccatttttcttttcattagcttagttatgtgtcggatgagaagagaggtgaagttgggaaaagttaaggagcgactaaattgaaacatgaatttctttaacagagattaatagggtataaataggggaggaaatgactaccagaaaaatttgaggaagtgcatgaataatactggtatatatttagccattattgcctctaagagcaattcttttctttatgttccctctttactgtaaggtacagcagaaagcaacataacattgtaaagcaattttcctccaattaaaaaataaattaaaaaaaagtacaaaaaaaaaaaaaaaagaagattagggttccttgggaattccctcgtgctccagctctgtgttttcactgccgtgattcacttttaatccttatttggggaactgagattccacagaccacatggcacagctgaaaaagaaaaaaaaaaaatgtttgaaattcctcagtgacttgtacgggaagcagagactagagattgtgaagttaacagccagcctcacactaacctgagaggagtggactacacttcaggtcatcggacaaataactgaacatccacttcaccacttctagctaaggcgaaactcactgagacctctggccccatcccccacctcaccacccctcccccacaatatccgcaggattccagcccgagtcccaggcctctatcctcagggtttacagaagacaagggccaccttctggctgcagtgatggcagtgggggctggggggatctctgcttggtttactggcaactgctgctccgtttttgtttttgtttttgttttaacctcaggttccagaggaagtcaggtttgtaacttctgcctttattctttattgctctctcagaaatgctgctttggtggagtagacggcacacaggtagcctggaagctgccacccaatgggtgagactgtcaattaaagcaattcagccctccaagtaagtattgattgcacatttacatttgtttcttcaatagaactctgaaaaaataactctcagtgagaaacaatttccatgaagatgcataaatgggaaaaacaacagggagctagattttataagaaataatctgagtagtctaagtactatagactataatgggcttcccaggtggcaagttggtaaagaatctgcctgccagtgcaggagacacaagagatgtgggtttgatccctggggtaggaaatggcagcacactccagtattcttgctttgaaaattcatggacagaggaacctgttaggctacagttcgtggggcaggaggagaagagggcagcagaggatgagatggttggatagcatcactgactcaatggacatgagtttgagcaaactccgggagatagtgaaggatggggaagcctggtgcagcacagtccatggggtcccaaagagttggacatgatttagcaactgaatagcaacaatagactataatacaatgggtatactaagtatagtatcattgatatttaattaaaacataacatactatactatgggtaattatatatgataatgtgtaatataatatagaaagagctttgggcttgaataaaagagatgagttctagccacagttctgccacttgctgagtgggatatatcaaaaacctaccaagacaatgatttgatccgagtttcattttctttctctgaaaatggagatattcatgcatcctctccttgccttcacagaggcattctgagtcattttatataaaatgtctcactccattttttcatttagttatattcctaattcacttcataagaaagcttgtgacaaaaactatcaacagaggagaatgaggtgcaaatagagaatcaagcccatgcaaaatataaatagttggaagttagctacagtttgcttgcctccgtttgtaatcacacagagtctagtcctagactgctctcttggtagcaggagaattctggatgcttcaagcctgctgcttgggttaatgctcaggctccagattgctcctgcagaagtcttaagaacttgggctgagctggcctagggtgtgaatggcacagaaccctcccttcaccagagtgaggaaggaggagtcagcttcaccaaaacctcatgaaccaagcacaactg

SEQ ID NO: 51508 - DNA, 2550 bp, Bovine  19866880620738
  misc_feature (1)..(1): n is a, c, g, or t
nggggaaaagttttgattaaggagaactggccgagatatggataatagttaagtgtggtgaagttttttattaatctctctaaacaaaaactattagaaagacttgaaactcttgaattacatttacttgcttcattctaaaagagctttgctattcctgatatatctgaacagagcttctagaatgactttggattgctgaatgctaccttggaaaccttacagaatggcaatttttagcttttcttttccattttagagctgttgtatgtgctttaaaaataatccaattacattggctggaaggcggtttttctgtgaaagattttctaggggttgaaaagcagaaagaacaacaaataagaaacacttgctgtttattgaatttagtaaaaacaccttatatttggataagctaaaagggatttccacatacatcacgtcacttcatcctcctatcagccctagatttagacagagcaggtgttattattaccacttactaaggatttggaaaattagagcccagggaagttaagtgactggaaagtagtgaagtcaggtctcaaacctgtctcttgactctaaattcattcccctatgtctggttaagaaaacgctcagttcaagttaatgtggattgagtaacacgtctgggctgcctatgtggttcagggaagtgaagtgaaagtggctcagtcgtgtctgactctttgtgaccccatggactatacagtccacagaattctccaggccagaatactggagtcggtagcctttcccttctccatgggatcttcccaacccaggaatcaaacccaggtttcccacatgaaaggcagattctttaccagctgagccacaagagaagcccaagaatactggagtgggtagcttatcccttctccaggggatcttcccgacccaggaattgaatcggggtctcctgcattgagagttctttaccaactgagatatcagggaagtcaagctctgtgaaccatggtggttcatggaaacaccagtttattcagataggtcatttcttacttagtcttagtctaagacactggaccaagactctcaaccagggttcccatccaaaccttggttctttcactatttgccctttctttttcccctttctttttcatttattcctcaaataatcgctttctttccacttcaatccctctggcttaacttgattttaaaaggactttactattaacatcccagaatgactcagtgtgaaggaaaccgcagcagatgcagaaaaggaagtggaggagggagtgtggaaggaaggggggcgctgagggcaagggcaggtgtggagagcagcttagcgtagatccgcagatctgagaatttctatgtccagactggtattctgagatgttccctgctgctctggaatctctgtaaacagagggatttgtctggaatgactttacagctcagcaggaagcatgctaagtgccaggactctcaaaatgtgagtgcagctcagaaatccagggatgaggtgcgctgagctctgcccgcacccaagcagggcatgagggctgaaacaaaccttgcaaagagacaccaaccacatcttggtgctgttatgatgagccacacctaaaatatcccagaaagccattaaaaaaacagccctgaggtctttagttcttttttctttttttcagggtacgaacatccatgatttaactcagcaatactttttcttctcaaaattcttttcaatgagaggaatctaaatctttcctgtggcagtttatttccctttcctcttttttcctcaatggtatatgtcttctgagagcgacatcgagactcaagccttttaagaatttttggagaagatgagagaagaaaagcacgggtactgggggtctctgggctatgacatgcagagttccaaggcagtctgtcttccttgtaaatacaaggtactggaaggggattagggacccagggtaaagccacagggaagcactgttgtgccaaagagagagtccttgggaaggccagctgagctttctgctgtttgaccatgtgcatagcatggctgcccagtccatctcctgtcagatggccactctgtagattagcatagctgccacttggtaattcatcttatttttgtaatggttacaggcaatgactttataggattcaaatcctagtaacactaattactagctgtattaggtttttccagagaaacagagccactagggtatcagtagctctgtctctgtctctctttctacctacctctatgccttatcagaataccagtctctatatctttatctgtctattgatcaagagttttactttaaggaattgattcatgtgattgtgggaactagcaaatttgaaatctatagggcaaactggcaggctggagattcagttaagagttgttgcagtcttgaggcagaagggctggaaacccagacagaattgctatgctttactctagaggaagaattcttttcctcttcagtaaaccccagtctttgcttttaagac

SEQ ID NO: 51509 - DNA, 3046 bp, Bovine  19866880686248
  misc_feature (1)..(1): n is a, c, g, or t
ntatagatatggtaagtaactaacagaggcagaagagataaagaagaggtggcaagaatacacagaagaactatacaaataatgtcttaatgacctggataaccatgatggtgtggtcactcacctagagccatcctggaatgtgaagtcaagtgggccctaggaagctagtggaggtgctggaattccaactgagctatttaaaattctaaaagatgatagtgctatacccaatacaccagcaaatttggaaaactcagcagtggccacaggattggaaaaggtcagttttcattctaatcccaaagaagggcgatgccaaagaatgtttcaagtactgtacaattgtgctcattttgaatgctagcaaggttatgctcaaaatccttgctagtcttcaccagtaggtgaaaggagcatttccagttgtacaagctggattttaaagaggcaaaggaaccacagatcaaattgccaacatttgtaaaagcatggagaaagcaagggagttccagaaaaacatctacttctgcttcactgactatgctaaagcctttgactatgtggatcacaacaaactgtggaaagttcttgaagagtggcaataccagaccaccttacctgtttcctgagaaacctgtatgaaggtcaaaaagcaacagttagaaccggatgtagaacaatggactgattcaaaattaggaaaggagtatgacaggctactatattgtcaccctgcttatttaacttctatgcagagtacatcatgtgaaatgccaggctggatgacttacaagctggaatcaagattgccaggagaaatatcaacaatctcagatatgcagatgataccaccctaatggcagaaagtgaagaggaactgaagagcctcttaatgaggatgaaagaggagagtgaaaaagttgacctgaaactcaacattcaaaaaactagtataatggcatccagtcccatcacttcatggcaaatagaaggggagaaagtggaagcagtgacagattttattttattgggctccaaaatcactgcggatggtgactacagctatgaaatgaaagcacacttgctcttcagaaggaaagctttggcaaacctacacagtatatttaaaaacagagacatcactttgccaacaaagtctgtatagtcaaagctacgatttttccagtgctgctgctgctgctaagtcacttcagtcgtgtcagactctgtgtgaccccatagacggcagcccaccaggcgtctccgtccctgggattctgcaggcaagaacactggagtgggttgctatttccttctccaatgcatgaaagtgaaaagtgaaagtgaagtcgctcagtcatgtccaactctagcgaccctatggactgcagcctaccaggctcctccgtctatgggattttctaggcaaaagtactggagtggggtgccattgccttctctgattatttttccagtagtcatgtacaaatgtgagagtggaccacaaagcaggctgagcaaagatttaggaactaaacaacaacaaaccagtggaactgtgtgggagttgtttgaagtcacaccattagttaggatggagttgttactagaatccacatctgaagacttacagttctatgtctatgcacttacttatttttggtgctctcccttcaaacttgaaacttctttagtcattgggaaattgcacctgtgttgatggtactcctccttggaaggaggtaagaggtagtgaagaaacttgtattcacgacctctgtggtgggctgacatatgtgggcatggaatggggtctctttactgaactctaagccaggttatatctcctttatttgaacttcccactgctcacttggagtttaatcttgaaagaccaatcttgtgttaccagacaatgttgataaaggtcattgtttcctttttcacgcgtgttgtcctgtgtatgtagcacagcagggatggccactgcagagccaaaagactgaagtggggataccatgagatttccctagacatctccagaacaggctggtggactctgggtttggtaggctggggtgtggcagaacctgtgagataccattttgacgctgtaattgtgataacattttcacatgcctctgtcttctttgttcttctggcaaactcctattcatcctttaaggctgagtactaatgtcttctcttctttgaatcttcccaagactacttttctccttggcattcccagaaaactgtatttgaaataaggcatttggtctgaatggtttctgagatcacttctagtcttaaatatttcctaggccttttgacttttaagcatttcaagatactggactctggtacccatactgattttttaggagatgaaatctttggaacaactcacgtctctgctcggttggcctagcaccgcttgatcctggtgaccaagccctccagttggtggccagcctggcactggtttcaataaggattgggaggaatttttcttccagggcacacttgctggggtgagttgcttaaagatgctgggccctgcaagtccagaccactcctgttgagtgactctgcagctggtgtgggaggactcctgtcactgtctcctccagctgtgctccttctgtgcctttctataaacagatgggttggtcacttcagagccattcttctcttccctcttccctttctttccatgaagtgggtactaactatatctgctggaaaatcggtgacccaccccatcatcacttttcttctctagaggaaattgttttctttttttaaagaaaagttttattgctttggcaggcaaagggggatacagtaagctcgtattccacaaaactgtgtccctgggaagtgtttcttaagtctctcgtctctggactctcgcccctcaatactactcctctgccaacacgcatgtgcacgtgtgagtgtgcacacacttcagttcagttcagttcagtcgctcagtcgtgtctgactctttgcgacaccatgaaccgaagcacaccag

SEQ ID NO: 51510 - DNA, 1056 bp, Bovine  19866880793156
  misc_feature (1)..(1): n is a, c, g, or t
ncgatgtggatcacactggatggcacataattgcttagcttttgcactaaacaaactcttatggctgatgatgctatattttaaatttcaatactcagcagtggtgttgcacatagcacttgcttgataaacattaatatattaatggataaactcattaggtaaggcggacataagaccttattccataaatgactgttgctgattaccacagaacttttgaaccataaaagaaaaggctgattctaccatgaaattctgcatttgtaaacattaatcattgttttttctgactttccttccttccagtcactaagaaaggtgtaatactcagtttttatggcaactaaaatgcacaaagtccctatgttcaaaatcaatcatcccaccattcaatcgtggtggtttcactctggtaagttcctcctaaatcactctgatgatgcctgatttttataagctgtgaaatctattaattatcttttctattgctctttgtgtcttgttacaagtgagagaaaggagaactaatccttttacaagtaagtagcagacatgtaacacacccacaaccaaacctgactctttttctcttcccacccaccttttcttctttcagaagagtttaaaaccaaaaatccagattaaagtcagactcttaatgttaaatgcatttttacagaggcaagtgtctgtgaaagaaattttataggaacaaatgatcaattgcatttttaagagcaactcctacacacgctgctgggtaacttgccaaagggctcattgtatttcccacactagtactaatggctaaggacactcaggaagtgagctaaatatttcagatgcctgggtttcacagctgagaagcttaattttttaaaacttaagtgagataaagtaatggcagtttccaaataatgactgttattcagattctctttcctgatgtcatgggactatgtttttaatccttccatgcaaaagttaatcattcatctaattagataggaaataagtatattctaaaggcgagcaacagattcattctattaa

SEQ ID NO: 51511 - DNA, 2139 bp, Bovine  19866880799415
  misc_feature (1)..(1): n is a, c, g, or t
ntttaatgagagcaaccactaactctgaacccccagtaagtgaaacgttatcacccccccccccataaaaagagaattccattcttctaattagtagacctgtattacaaacagagtgcactcaattactatcattagattttaatgtttatcaactgaaaaaaatctgtagagactgtttcctctccctggtcatatcaggacctacatactacccatgatactgcatctggttccacaaagttaaaatatgtactatggactctctacagaaaacgtttgctggtccctgctctagtttaatgggaaatgctgatccgttaagtagctcatttaggttcaccagtggactctaatcaatgttaccaggaagaggaagagaggacaggatggggggtgaggggtgttgaaaaagagcaggaagagaaaagaggaagcaggaaaaagtataggaatatgatgaagtaagcatacagattcatttatgaatgaggcaaaaagaaaaaaaaaatttaatgcaccactatgcttagctctcccaccaaaaatcaagaatcacagcccacaaaagagacaggaggtatacttcaattctaacttaagcagtcatgactttaaaaactcaataaatatttattgagtatctctctattatgacagcttggcactaatataaggataaccaagacagctaagattcctacctagacagagcttacacacaagtcaagtttttttgaaataacaacattgttgataaattatacctctctattcctataagaatggaggaatgttaaaaatcccacataactgtaatgtgtttttggtcacactttttaatcttaaaagctaggatattttagcttaacttcctcttgaatgaatgaatgagatgaaattatcattctcaaacacatttggttgggagctagaaatgaatcaagcaattccagaaatctgagttctctatgcagaagcctagtaatgaatggttcaactaagactgtcagttccagaagcttcttctcacacagtatcacaacagacatgccaagcatcccactaacacttctgaactcgggaagagcttgcatataacagataagtctctgtgtttaactctcagatcatttacaaactagaaggcaatggcaccccactccagtactcttgcctggaaaatcctatggatggagaagcctggtaggctgcagtccatggggtcactatgagtcggacacgacagcaacttcactttcacctttcactttcatgcactggagaaggaaatggcaacccacttcagtgttcttgcctggagaatcccagggatggtggagcctggcgggctgccatctatggggtcgcacagagtcggacatgactgaagcgacttagcagcagcagcatcttacaatttcactgaactctgctaaacctcagtttccttacctataaagcatgagtcatagtatataatgttaccaacttgtatttaatataatggacacatggaatgaggtcactcaaaccaagcccttatcatccccatcttgtagtaagcctgcacacagtgggagtggtccctgtcatcctcacacagagtttccatcaaaacctcaaaagcaatgttttcaggacttgttcaatgtgtcacatgcctaaaccaacacattaaaaacctgctcctatggtttctggaaaccaaaggatggtttttcaaataaaatgaaaaacttcaaaacatctggagataaatctatagttgaacatttatagttacgtaaaatcaggtatatgatttgattttactggggaggaacaatgatttttcctcttccagaaactggtgtcctgggaggaatctaaagtctaataatgaaatcaggatcagtattcacaaaatggcattaagaatgcttgccttagttatttcacagagggacttcaagaatcaaaataaactaaaatgatctcaaaagaaagcacacacataaataagcatggtcatctatgtatactcactaatccagttactctctagcgtcaaaacgggaatgaaggctactgggtcaggagagatagggtcacattatgttagcatccaacatccgcattttcagaacatttaatttt

SEQ ID NO: 51512 - DNA, 1827 bp, Bovine  19866880802194
  misc_feature (1)..(1): n is a, c, g, or t
ncttaatgggttattatagaaaatgctcagcagaacacaggagggacatgtgacactgactaatgggaagtagtcatttcctcctttcccattatgtaagaaaaaacaacttaaattgctactcttagattccaaggattgtctagggtatgtcaaataccagtgtgaattttggcgattaggttattctgcattgagactggcatatattattagtattttcctgacttcgttatcaaaagcaaccaagcaagttagttttttgaaagaaatttccaattttgctttgggtttataaaaacaaattcctttaaaaattctgggaatagaaaggtttctgagttcttggagtattccattgatcttatgaatagcaaaaaggtcaaggattttgcttatttgttttccataggcactctaaattttaaaagatttggagactttaagagacttttaagagacacttaatttgttacagatgcattaacatattgaatttatgtgaaagagtgaaggccaggcaaaggatattgggttcattatttattagtggagctagtcaaaacttccctgttttaaccaagtagtggtttggcttctattcaagaagccatcacttaatattgctgtccccagcaattaatgtaccctgggaggggggtgtgcctttactatactcaactagatgggactctagaccttgcaggtttgtcttgcctgtgtctggattggacatgatgcttctgcgtaattagctcaaagtacatgctacccttcctttctactcaaaatgaaactcatcagcaagcctacaaattatgtggagtctgaacctctctcctcatcatatttcaatttccatcacatccccatgctttctctattcctggcacactgaccttttctcagtgcctctcaacatgttccttcatccagcatggaaaactattgcctcatggtcacatggcttactcctgtcctgctcagtctctgtctttctcatgaaaaacttcccttcctgactgtgccatatgcagttgtaataagttctcatattaccatgttcttcacatcacagcatcagttttatatcacgtcttatgtgattgtctctctttaccactattttgagagcttcatgagagcagagatggggttgagtctggctgactttaatttctctaatgcttaggaacttgcctgataattagtattcaattaatatctgtagaatgaatgaatgaataacattaaggttctcttgacctgcacctgatgagttcatgtaggaggtcaatattttattctgaatctcatacttttgggcatatctgcatttcctcttttgtattattaaaattcagagagtggacactggctttcagtcttctgaggtaagtttctcttgtctagtgctcagttcagtctcagacagtggtaggggccagaaccacccctaagggttgtagaacagagaacccagtaacacacacccctcttcttcctatacagagttgttgttcagtcactaaatcatgtctaactctttgtagcgccatggactgcagcaccccaggcttcagtgtcctttaccatctcttgaagtttgctcaaactcatgtccaatgagtcgttgataacatccaatcgtctcatcctctgtaatccccttctcctcctgccttcaatcttaccctgcatcagggtcttttccagtgaattggctctttgcatcaggtggccaaagtattggagcttcagcatcagtcctcccaataaatattcaggggttgattttctccttgcagttcaagggactctcaatag

SEQ ID NO: 51513 - DNA, 3155 bp, Bovine  19866880822641
  misc_feature (1)..(1): n is a, c, g, or t
naaaagaaactgcaactcttaaatgacaactttctcaccacataggaaagccctcaacttgccccttcctcttatgtagggaaaaacccagttcttccctactgcctttctccccactgtgtcccctttatcttcacacagaaacttcactttaggcacttctggcccctgaacgtatggaggttttcccccacaccgagaaattctccatgacaccagttgggtgacactttaactcagttctgacactctctacctggagatagtgtcagatcctgcaagttaagagctccatcccacaagatgtcccaccccccacacttcagatgcagactgcaagaagccggtctccagggcattcaccacttctgtctaatttggcttcaaatctgagattcttacaattgctccttgttttgttttttttttaaagatatatttatttattttattttggccttgttgggtcttagttgcagcacacaggatcttccttgcgttatgcaggatttttccttgcggtgcacagactctctagttgtggcatgggatctggagcttgcagactcagttgtctcggtgcacgggcttagttgctctgcaacacgtgagatcttagttccctgaccaaggaatgaacctgagtcttctgcactgcaaggtgaattcttcactactggaccaccagggaagttcccccttgattttgattgatttgctcgaatggctcatagaactcaaggaaacgtttaccagtttattaaaggatatgacaaaggatacaagcaaacagatgaagagaaacaaagggcaagggatgtggcaaggggcctggagctcccacgccctctccctgcatctccatgtgttcaccaactgggaagctctcttaatcctgtacatttgggattttatggagacatcaccacagaggcaagatcaatcactaactccattttcattccttctctcttctcaagagaatgaaggggtaggggcaggtctgaaaacactaaacttctaattaagactcagtttttagggtagccaggcctcatccagaagacacccaggagctgaatcacaatctctttattaaagcaaaaggcacttctatcacccaggagattacaagggtttcaggagctcagtgccaggaactgaggcagggggcaagggggagagtgggcagagaccatattttctactatatcacactaataatctagggttgaaaaatagtaggacccaggcccagctagggcattgtgggcacagaggaagctctaccatccagaaggaaaaaggataacttttcccccattaactctataaatttacaatagtttatcaaattggtaaaggcacaaagagttgaaactcataagaccaatcaatgtcagtgtatgaaaggtctggagccagaaaatactccatagtagttcccatataaatctggtagaaaacaggaaggacagaaggtgagagaggaagtttccaaaaagagattctagacatgagttgtgtggaagacaaactctggccctatcaattaagcagtaaatgctttgactctctaaattcacccataagttaatatcatcaacaaactggaaaagttgtcataaagatgactgacatgaggttataaatcatataaagagttcctatttgtagattggaaaagctaataagctcccatcaaaaaactgggcaaaatctacgaacagaaaattagctgaagggggaataaaagcttaaaaatgcttaaaagaattggataaaagtttcatttggcacattaacaaaaccaaatataaggtaaaacaataactactttccactttgtgccaagcaaagtttgtttgtgctagatcatagaggctctcaagtactgtccttgtgtggctagaatttattctgtaatactaggaacacactgatagaatatttttttcagcagaagagtaacatcatttcagcccgctccttgatggggaacacatgtatacctgtggcagattcattttgatatttggcaaaaccaatacaatattgtaaagtttaaaaataaaataaaattagattttgcataaaaaaaataaaattggggaaaaggatggattaaagaagatgagattgtctacaacaattgtaaagacgagggaacagttccaaagatggtgtgtgcaggtatgttgttggaaatctaactctggaaaaacccatgaggaaggactgaattatgtaccgactgcttccatccattataccgtctctcagtagacctcgttgcttgatcagtgatgctaatgtatcatgaggctctgtgtaagtggatatcacaagagagcagccccgaacacatttctcaaattgagcaaaggtgtccttctaaagaaatgttgtctttccacaaaagctaggaggcaccagcatcaagaattagggcatttccattttcagaaagtgctttgcatttttttttctcaatgtttatgacccatgaggaacaatttttctcagcctccttaaaatgtcaatgctatccatttttaatggtcctgcttcattgcaaagatagcctaccttaatgagagttcctgaagtttggctttactccaagaacaaagagttttcagatacatattttaaaagatattgcaacctcttagatgactttctccaaatgaacataaatattattccttctttcacagaaataactgaaaagcaattcaatttgatgggcaataatattgagcaaagcccattttcctgctcagatttcttctgtttacttcctatgctttaaccatgttctctacagcttaccatggacgtggttatgcaatgatggcttaccctttaccctgctgtcatctggcccgacagctgtactcaaatgactggagagctaattgactgttttattattattgtttattactattacatggaagtatttttcagaacttttccaggcagagtgctaggtgtgcaaaagtagtatttgggctatagcaacttcctctttctttttgtaggtgggtgcagtcggccttgtggatcccagcagtccttaggagggtccttcacagaaatggaaggataaaagttggtactactgacagagatcagggaaagcatgtgta

SEQ ID NO: 51514 - DNA, 812 bp, Bovine  19866880923240
  misc_feature (1)..(1): n is a, c, g, or t
ntcggaatataattctatcttccttttactgttacttaactcttaagttactcctcttgttttttgtgttttttttatgcctctggtcttccagagatcagagaccatggcagctattgttttgtattccctacaatacctaggtctgtgccttgcacatcgtaaagcattcattcatgtattatttatccgttcaacatttatgtactaaactgtgtgccaatgaatgagaagcaaaatgcctcatgtgatctaaaaactgaataattttattcttaatcactcagcatttatccttctcatttcagattttctcttttttaacattatcgggtaatttctatattggcaaatttaaactgcaaatattctcaacaggcttcaactataagatggttgttatattgaaatatgagtgatattccaagaataattttttctaattggaaatatatataagtatagttttaaaactgctaccataggagaggagaaattgaaaactaaagtgaagctaacccagggccttagttttctactccagaaacttatactattattctctaaataaacattttgtagcctgtggtggttttcacaaagggtttttgctaattctcattcagttcagttcattcgctcagtcgtgtccaactctttgccaccccatgaattgcagcatgccaggcctccctgtccatcaccaactcccagagttcacccagactcacgtccatcgagtcagtgataccatccagccatctcatcctctgttgtccccttctcctcctgcccccaatccctcccaacat

SEQ ID NO: 51515 - DNA, 1730 bp, Bovine  19866881004752
  misc_feature (1)..(1): n is a, c, g, or t
nttcttgcctggagaattccatggacagaggagcaactaacacaacactttaggaaatgaacacacaatccttctataccttcattaaaattatctcaagagcacctgtggattatagtttctaacctggaaatacagtaatatgagtgccaaggtttacaatttccaatttgagaagtgtggtgatacaaataacctgatgaagaactctttgttcaccatcactgctaattaagtattaggttgaatccgaactgccaaacataagaagcgaagaaagaaagaatataatgacaaggccactgtcacgcatttctttttttttttttctctctttgcactaggtctttgttgctgtgcatgggctttctctagctgcctcaagccggggctcctcttcttgtggcatgtgggcttctcttgctgcagagcacaggctctagggtgcaggcttctgtagctgcagcacacaggctcggtagttgaagttcctgggctctagaacccacaggcttcagtaactgcagcagacaggctctgtagttgtggcttgcaggctctacagcacagggctcagacgctatggcacaggagcttagttgctccacagcatatgggatcttcctggaccagggattgaatctgtgttccctgcattagcagacagattcttatccactgcaccgtgagagaagttctatactcatttctcgtatttaaaatagaggttgttaatcttgaagtttatatttctgaagaaatttgctttcctaccatcctattttaatttattaatgacctcacactagcaactgtttagcatgtttcaaaaagccaataggaaagctgtgaaaaagctagtgaatctagaattacatattgttcaaactgaaaccttatatgttaaatgctgatttgtgatataaggataaatatactttcttaagcagcagttgcaaaaacagtgaattgattctgccattcagtcctttaaaaactcagcaaatcacccagagttactctaatggaaatctctactgaaacatagcttctttcttctctgctttttctcttgtcctatgaaaaccagaataaactacacacatacaagattctgctttaagattaggctgattctttctcagcctaatattatgcctattaattattttgcattgaagacccatatgagttatacattatatactttgtgaataaataagtactttcactttatcctcagggtgagctaggaaagaatcctaaagcaccaaagtcatcaaatgcatctctaatggatacataatgtggacctcacagcagcctatggttatagcccaactcagttttatataatgaaagatcagggagacagccaatctcctctttctgatataaataagttgatgatgattttgtggctgccaccattaagtatgcaatactgtattgatctaccttttctttcatttggatacataccttcaatataaactttttcattttaacatataccttcaatactgttgacctttatgtccagaagaaatatttttaaaatttatgaggttttgataagtatagttttgtgggtagacctcttacaaatcgttaagtaaatggatttagtaattctacatcttaagtgtgacttcaattaaacataaaaacaaccatcagtaaaatagctctagataataaatatttgttgaatgaataaacaaaaggat

SEQ ID NO: 51516 - DNA, 662 bp, Bovine  19866881150400
  misc_feature (1)..(1): n is a, c, g, or t
ncctcactgtcctaaagagaaggtactgttttaagccctttgctcacccactgcaaagcatcagatggttgcaaactgagccctgctgctctataaaaaaaaccatagcttttcccaaatgtttgcttttccacacttgcacctgcactccaccataataataaaaactaaagaaggttaaatagagttgtgtctaattcagaacacaaatgcttaaggaaagatttctgtttttagaagagattcctataaacgatttagcaaatttgagcatataacctgtccaatgtgctagcacactttgctccaagcagccaattttgcaggcaaagctgtggttttcttgttccttctgtgagtgtggctgccatttcctcacggcccagcccgcagtgatgcacaaaccagggatgtatttctcatttatgcataaaagtggtttccttaaattacgagccccaaagttccaagacactcacagcctgggtggccacacaggtataagtgcataaaagtctgttcttagtgtggctcacggactgaacgtattcacttcaaacagctcgtctctctggaacacgccacacagcactccatcagggagaggcatatttgtggtcataatgtactacagcaatggcacaaggagacacacacccaga

SEQ ID NO: 51517 - DNA, 935 bp, Bovine  19866881165822
  misc_feature (1)..(1): n is a, c, g, or t
ngaatgtgacactattgagactttaccccctttttcctcaagtttggattccgggaacagaaaagggaatataatcgattgagctcttgctgaaggcctttaactagctgtttgaaatcagaaaatatcaaattagaataatcacttctataaaggttacttctaaactcaaatatgctaagaaagaaaaatctattactagccagatatatctaggttattaaaattacctcagctgcttcagaaccctacaggaaatgatgtaaggtaaaagtgagtcactcagtcatgtcagactctttgcaaccccatggactatacagtccatggaattctccaggccagaatactggagtgggtagcctttcccttctccagaggatcttcccaatgtaaagatgtacataatattataatccatagcaacactaaagaacaaagacagatgttacccacaaagattctttcagtccttaaaccaactacttaagccaacagtttcatgcgttaaaaaaataagttccatgtagattctagtaagatttccaaaaagcctctggatattttttcttcattgtaacggagttatatgttattctaaagtcttgtaccttgtactttttaagccgcagtaaatttaggaaaagaatatctgagtttatgataacagggttactaaaatattataaatgcaacatactatatacattattactttctgcatttagataacagtaacgtaatgaaaagtcactgtataactaaggaaaatggttacgttgatgtacttgatatcccaaaattcccatcacattggtaataaaaagtattttaaaatacttttaaaaagttctattttaagcaagtaggaattttttaaggtttagaagttaataatgtgggaagtatcttagccatttttatttataaaactg

SEQ ID NO: 51518 - DNA, 1894 bp, Bovine  19866881408992
  misc_feature (1)..(1): n is a, c, g, or t
ncacgtgggctaagttgccctgtggcatgtggggtcttagtcccccaaccaaggatccaacccaggtcccctgacttggaaggtggattccaaactgcaggaccaccaagcgaagtcccctgaattcattttagcatatcatggtgttgcaaaactgagaccaaatttcttttaaacaattctttttttttcatggaatatagaattttaaaaatctaattttaagtattggattatgtcagacctgacatcagtcaataaatactaagtttgatatgacaaggaacaaagaatttcagactttgtgctactccccagaccttaaattctactggggacacaaaatattaagcctttcaataacatagctcaatgattaagtgaaatattttgcagtattattttgagacaccctttaagatctgctaagtccatctataggtcagagagattgagggaggcaaagtgatctatttgaaggctgtggaacaaagatggaacaaacacaaaagggaataagagagttgagtttagagagaagaactgggcataattttgttcaaaatttcgttctttattagcaataaattaaaataaggtggtgttttctgatgactcataagatagatgttgcatgaaaaggtactggaatcaacaggcacaaacaagacagccaaacatggaaaaatgatcataggtagagcatttgttccacttgccttttatcttttacacctgtgtttgaattcatccaaacttacataaatcctttacacagctgtcgagatcgcacctgaaaaaaggctgaagtagtctcagacgggctaacatttcatcattctgaatacttaaacccaaacaggtttaaacactttgccaaacccacggataacgggcttcgcattgatctttgctctgttcaaatgttcagccgtgtgccaaagtgtacactgcagattgccttgtatagactcccacaatttttagccacagaaaagctcaaaaataacattttagggatgtcaggtctcctttgaaatctactcagtaataatacactttgatatatgtcactagataaagagcagttggctgcttgtacaaactgatctactgaatttaatttttcttttctttttttttttgtaaacaagcagttaaatgcagcatacttcaagagcttatcaagtttccggtatttccactagactgtttccgatgtctattctgacctccacaattggattacttgtaacttggggtctgtcgttaaaatgttttaaaattataaatatgtacattggcattataaaaaatgcacaagtacagaaagatatagaatgaaaaatgcaagtcctcctatactatctttccttccaactcttctccctagaaaaacccctttaagagtttgatgtatatccttccagatcctttgtaaaatgaattactttgtgtgtgtgtgtgtaaatatgcatgcatgttcagtctctaagtggtgtccaactctttatgacctcatggactgtggcctgccaggcttctctgtcctgggatttcccaggcaagaatactggagtggattgccatttccttctccaatgtaaatataaatgctatcataacacaaacattattatgccactatcttttccttaaaatagtgtaaagttttaccaatttaaaaaaatgttgccagactaaggagagactgttgctatctctgggtataggatttgctctaggtgaggacaagtgtgcatttaaaccattttattcaaatttaatcccacactttaatccttccttatttacactaccaaaaattaagaggcttgctttcttggtaaaaagaagaagtctgaacgctaacctttaaggaaatttagggcta

SEQ ID NO: 51519 - DNA, 864 bp, Bovine  19866881793109
  misc_feature (1)..(1): n is a, c, g, or t
nttggcctgctcttctgcatttctcacaagctttcaggcagtttccttgctgctggtatgtgaatcaagaaattatacacgaaggtctgtagggattcagttctccaaacatttactgggcctttcagcaaatctagctatttttttctctttgaatccccaggtggaccatttctgatcattttatctttcagcagtcctaaacactgtagatttatgaagccttaacttagctctatttccctcgattagtttatcttatgttgatatttatcatccacttagaatttcagtcctaatatacgtagctgttgctgtgacaagcagtatatacacatatagaaatgtatagtcaactgctgtgactctcttggggccactttgctttcactggcctttggattctgagttcccttttgttggtctcgccatcagattcatggttttgtcaaactcagtgatatgcaccacctatcagagtcccctttggggctgtctgtttttggcactttcctggataactctcacctgcataaaagaagctctaagtctttttttttttttgtcatctgctccattgtttaatagccccacagaagcaagctaagatgttttaattaacctgtgtgatggcacagcaaacccagccaggtcttcgcttaaatgtgatctagcagagagaaatccctgagcaatgcacataggagagtgacagctgtgcagcctgactttctctccagggtatgcatccccacctgagggcatttacattttcatttgttggttgcttggatcctcctatctacgtgtaatcttcaaaagagaagacttttctaggtacaaataactacctacaaaacagaa

SEQ ID NO: 51520 - DNA, 1675 bp, Bovine  19866880459895
  misc_feature (1)..(1): n is a, c, g, or t
natgttagctgggtcattcctgcccaaggaaatctagataggagtgccataaaacttcaattccatggcctaaggaatccctaatctctggattccaggaatttactctttcatgggcctttgtacttcttcctccatcttcgtttgctgtatgatagtagcagatgggcttacacatataccttaacaatcctagttgttgttcagtcgctaagtcatgtctgactcttttgagacaccatggactgtagcctgctaggctcctctgtctccatactcctcttcagtattctttcccaggcaagaatactgaagtggattgccatttccttctccaggatcttccccacccaggggttgaacctgctactctcctgcattggcaggaggactctaccactgagccaccagggaagccctaacaatccattttgttgttcctgtttaatccttaggttctgtcttaaagatccatatgaaagctacaagggcaatatagacctgtatgaagactctatggggagtaagggaagactcgacagcatgcaacctaaaaatgcttatttactgttctgttttccaaagatgctcttcactgctctcatactccagtgaccccatctcctgtctccttccacacagctctgagtctccttgaattctctgtctcccttccaaattttcaattcctgtccttccatttgccttagttatttaactcctactgccaatttttgcacataaacatttcaaggtgctctgaaaaacagagcaatgattttagacagaagttattgttatgagtgccgattattatctgtcatgttataccttcctccccttgaaagaaataaaatatttgtaattcttaaatgcttctgattcatgccttgttgcctttccttatgcttggagtcttcttgactggtgctttctacctaacacggggagtatctttcaccttcatcttcaaggttcttattcaccacttattccctccttcaggctgtaattcagctgtttcaggaaaggactttgcttctcattatttctgcatctgggctgagtcatccttgcatgaacactacttcctcagttgcttccagttctaaggatacagttcaattttgttctgtggtgaatgctgaagtcatcttcctatctcctcatcccaaattatctccatgtactatgataatttatggagacactcagggctctcagacacagtgtgcctccctaaaatattctgcaccaaattgcttctgcagtgtcttaccacaaccaaaccagatttttgagactgagttcaatagcacctacttgtatggctcattggaatcaactttgatttgaaaatatatgcagaggactcttcaggtaaacatcatctacaattgtgaaaaaagaaccctgaattaacaccaaatgttaatcaatactgtaataaataaataaatatatatatatatttcattggaatatccagtgggatgaagtgatggagaattaacgattgagagctgtatgtagtctcctggatgaatctcatggtagaaatactgagtgggagacaacttacatatgaatcagttcagttgctcagtcgtgtcctactctttgcgatcccatgaatcacagcatgccaggcctccctgtccatcaccaactcccg

SEQ ID NO: 51521 - DNA, 1588 bp, Bovine  19866880595567
  misc_feature (1)..(1): n is a, c, g, or t
nggaacagctacccactccagtagctgctcctgcttcatctaagaccccattttcttcactccaaccctcatgagttttcatctaaaccaggtaaattccattttgaaggacaaacagtacctccttactcttcattcggatataaagattcttaagaaaccaaaatttggtcttcttggaaagagaggctggagatgtgattctgcttttaaaaatgtttaaaaaaaaattactgagcagagatatgtgtatgtatttctgcaggtcctaagaagacatgggttccactatgcttccaattgttttcatgaggaagagacctggtcctcttttagccacagtgaaaggtcttgggggctggaagccaaatctgcaaaagactaaactatcaatatgttaatcaaattataatcaagagtgaaatacggcatctaaaagatctcataaatgataaaaatgattttaattaggaaatgaatgcaatattattattttgtacatcaaagaagatctagtacacaaaaattaaaagatggacactcattcctaactcttatcgtaattctacagtagaattataattctatgtaattctctaaaacagaattgtatctgtgtagtatttcattctaaaatactgtattttttagccttagatccagttgattatttttaatgtctttcctgaagaactatggctcacctccagtaggttctggggatgaaattacttgtgccatgaggatgaaggaggcaggcatataacaaggggttgaggactgtaactgaatattctataagcttgattttacatattttctaggaaaaatatgatagcttctacactgcaaaattctataaaagtacataatttaatagattctgtccagcatgctcacaatttactaaataaaatttaaacacttgtattaacccagatagcaattttagtaataataagtgcttactgggtccactgaagaaataaactcagagaaattacagggcttttgaaaagttaaaaacaaagtcagggatgcagcttgtgtcctatcactgattctcaaatttaagcatcataatcatttggaggggagtaatgataaaacagttgttgcagtgcaatccacatgtttctgcctcactaaatctggggcatttccaataagttctcaagtagtgctgatgccactggtctagggaccacacttgagaaccactgtcctacattaaggaagaacataaggacatcaaagagggagctccatcttcacctccaggagggcacagccacaaatggtgtcagactaagcacctgagaaaaatctagaagacatggttccctaataaattattgaaactcactgtattgaagaaagccactactgaagacaggaactatgggaagtgacatgagaagagaggcaaagtgatgtgcctgagggggaagaccaaagaccagtggacaacagtgaatgcacaaagatgagaaagacaggctgggacctgggaccttttgttgtagtgttgcattgcttggacttggacaaacatctcctcgagcaacaaaataaaaaggaaatataa

SEQ ID NO: 51522 - DNA, 1968 bp, Bovine  19866880688671
  misc_feature (1)..(1): n is a, c, g, or t
ntcatgaaacaagtaaatgtttgttttagtacatattttactctataaagacaatttatcccattactaatttttccatttattataaataaatctacatttttaagtgctcctctttttccatatccgtttttgctcagttcctttgtctactcatcctatcttctaaaacactaaaaattctaaaaattcagctgataccatctataaaatatctcctttgaggtagccaaattaataaaaacaaactcatagctataatttattaattgccaactatatgccaggcactatattaagcactaaacatagaatattgctatctttacgactaacctgcaaagtagataatattaaaaactactgatactactattattaaaatcaattacagatgaggaagctgaagaaaagatagattaagcagctcaatcaaggattataaaattggtatgatgtggagctaggacaacctggtgctctgtgacaacctacaagggacgggatgggacgggtgggaaagaggttcaagagaaaggggagatatatatatacacacatacacacacacacacttatggctgattcatgttgtatgacagaaatcaacacaatattataaagcaattatcctcaaattaaaaataaatttaaaaggaaaataaatagagctagaattcaagcttaggcttccttctcaaattttttcctaatttgcatataccagttttttcagataccccaaattttcattcattcttatcccaaatttacatgtaatgtatttgtaatatataataaatattaattattctcaaaacaatcacatataacaattataatatgcataagccatatcaatggaaacagtacatttctacaaaagaatgacacctttttcattacacatgtaatctactatagttcattacagaaaaaagggaaagtatgaagaggtttcaaaaatgaaaagaaaaataacctgtaataatatttcacagagaaaaccactgctaattatgttggtatatatccatctcccaagacaaaattttttattttgaatatttatgagttattcataagaggatttaaataccagaaaaagttttggaatcaaaataatttatcaaagatctattaagactatttccacaatcactttttaatgaaataatccatattccaatgttatctttcactaaaatcgtctatcagtaagtcaatcaaataacccactcagatctattaagtggtatcccagttctttccccatgaaaaaagtttaatgatgagcaattttgttagaaaacaagattttccaaccctagtataatgagttgatcaccctattgctatgtgccaatgcttgacatattatatttaaataactttaattatatcactattagactagatatactaaatattttaattgtacttaatgtcaaatgaccaacttcaataatcaatgtcttaagaaattgatattcttaagaaacatatttaagtagaacagtttacaaaatccactcaaagtccactcatacctcacattacctgtttttctatattgcgaagaagtagtgtagggctacttggtgacatttcgaaatcttgttctggtaaaggatcttgactctcttgaggaatctggggagtcccagaagtgtttaaggaagctggatggtctgcaaattgtacttgctttttcaatatgtcttttggaagtcgacattcttctaggatcactatcccctagacaaacagcaattaaagagttgcaatgaaaacaaattgattgctggaagaacttaaatgttacaatgcatgtgaaccatgctttttattattccctagaaatcagaaaatagacagttggaagtactctttttttttttttttttgaagtgttaacattttttaaatttatttatttattttaacggaggctaattactttacaat

SEQ ID NO: 51523 - DNA, 1550 bp, Bovine  19866880697802
  misc_feature (1)..(1): n is a, c, g, or t
nccggcagtggtgtagggcttcagtccctggtctggagaacaacaggaacacctgtgtggagcagaggggtcagaggttcagaggtagtcagcaaggaggcaatttgtacagaccaatggatgacccagagaaggtagagagtagcattcagagcagaaatattcagagggacagagggcatgtggctgataggtgaaagttgacatcccgcttctggttactaggaggctgtaatatcagagaagggctgagtacttgccacaggaaaggtaggctttcaggacttcactcgggctgcaaagtcaaccatgaaggaggggactgttacccagattttctgccacccagaagtcaccattgggaataagatgtggttataccttccatctgttctctcaaatgtaatttttctgctgaaaaagctgggctgttttgtaagcacaaatacaaattaaaaattagtctttgttctccctgttgaaaataaaaatttccctcccttcctttttttagagcattgacctcagaaaacttgtgagtactttttcatcgctctgacatgcacgtttcatcagttttatgacccagggatatctttctggaaaccatctttttgaaatgcaaacatcaaggggagggagcacgctgattacccagttcccatgggagggtaagagcctaatttcagtaggtgctttgctccaatttacaaaaccacctcttgtcataaagagatgagaaattggtttctcttccagataaaccagttagctaacacgggtggtctccccaattcccacggtaaagttaggatgaactatgtatgacaaaagatgatgttaagagctcttacttgagaattagtgattgtttatccctgtgtctaatgatttgtatctgcctggctctataagggagtgtgaatcctttctgtctttgaaaccacagggtaaactgcctgtgatacacatcacatggtttaatgctttttcaacaatgaaaatgttttccttcttttttacttttgtggaaaggttttctaggctaggaagaggatttgttttttattctattttcccaacagttttcagtagaatgagacctaactaaaactcttaaacatgcctggacctgttggtttcctccactgagctccaatgtcctgggactacctcctcaacagtaatgccctgtgttatcaactcacccaccctccaggggcataagcattcttcctgatatgccatggggatgatagaggatgagatagttggatggcatcacctactcaatggacatgagtttgagtaagctctgggagttggtgacggacagggaagcctggcgtgctgcagtccatggggttgcaaagagtcagacacaactgagcgatggaactaaactgaactgaactgagatgccattcacaggctacagccgaggtggagtttgagctgatatatggattacatcccatcacttatgtacacaattttattcaacaaaagatgcattgtttcatgtgtgctaaaaccgttcatccagtctg

SEQ ID NO: 51524 - DNA, 1739 bp, Bovine  19866880747133
  misc_feature (1)..(1): n is a, c, g, or t
ntttcctgatttttaagaacagaaacttatttctgcaatacctccgcggatttaatcttctttactttcttctctgttcttggttatggcagagaaaaattgtgggccattcttatgttatgagagttttgtcagggcaacagtttaagagaacaaaatggattatgaagttggctatgagtgattcccttgctgaattttttaaatgtttttcttaattcaatcaacgatagcaggccttctacttaaaaaaaggtagtattttaaaggtttggaaattggacttttgaaattcagaatcaattttcccctagaaacaatattgtaagtagggataataaaatcatggtaattcacagcagcctggcccataatataaactgtaataaaaacaaatgaaattataaatcatatagtgaaaacttatatttcttttgtatacaagtacttgtgaaaaacctgctagagacttgtacaaattttgggtagatatttcagatactttcaagcacttttgagtttgatgatactatgtctgtcaaatctaatttaatttttaaaatatcaagtaaaacagaagccacttttaaatacatttcttgagatttctagagagccatatttgtacgttctataaaaatagtcattgaagtaggatcaacagttggactcccttatctttataaaagttactagtgctgttaaagtatagtttaagaaatgttacttttactaagcatcatttgtaatatattactataaaatactaaagtggatacttaatacagtatctgaatatgttaattctaaagtggtatattctctcaactatagtgtaaactaaaattattgatatataacatataatctataggtagtttccaccctatgtatagcacttatacatgatataagctagccatggcaatttaatttatcccatcttgaaatactatacacttgtataattgttttagtctgtttttgatttcaataatatattttagccacattaggcatttaatacctttgcaactagccaataggaacttactgacattttgccagaaaaatagtaatatacacatatgcacacaatatacacacacacacttaaatgtttcataataatatgtattatttgcaggggcaagtgtaataaaagggataggaagggaagaaatactatggtgagaactatgaaaccattcaaatgacacttgtgcactcctttttcccctttctctcatttctttgttacttctaagggacctaaggataaggacagttggagtgaagatgataggaaatgggggagaaaattcagcaagccagttgagtagtatgtgtgtgtatgaatggtaggcagggagaacagaggcagctagatccctactcatttctccagttacttacatttcagaaaataccccttaaagttgaaaatttgtgtctatattattaatccatctactctgcaagcaaagagaacttgattagtttagagagtactttttctcaatagtacagtccaatccatggttgctggctggccacaacagtgtttggggttctttagaatgctctgaaaggagttaatataaagttagcttattgttttggatgtttgtaagtttgatattttaatttatgaaatttggttgttgttcagtcactcagtcttgtccgactctgcgaccccatggactgcagcactccaggtttcctgtcttcactat

SEQ ID NO: 51525 - DNA, 1859 bp, Bovine  19866880776557
  misc_feature (1)..(1): n is a, c, g, or t
naataaaattgaagagatcttaaataaataatggagcataagttaagggagggtagaccactttatacattagaaacttaataaagaatttcaattcctcaattttaactatctttatattcaatataaggctgctgtagaagcttttttttatggaaactaacaaggttattttaatagaaatgaatatagccaagaatagaccatgtcatcctgaagaagaacagagctagaggatttacacttaagtgagcgaaagcaaccagacacaacagagtacctagcatatgacatgcatttcaaaaacaaacaacactaatcttccatgttaggatagtagttaccaggaagggagggtagtatttggcagagggcctgggtagggcttctaaggtactgctaatgttcttcgtgacttggtggtggttacacagatgtgtctactttatgagaatttattgagccgtgcacataggttttgtatgctttttaatatgtaggtgtgacttaactacaaagttgactttaaaaatagttatctcagagattctcaaaatcagctggttctgggaatcagccagtttcaagggctatccctgtacataccaggcagtgtgacataccaggcagcccttatctgaccctactagaagtcaaatgaaagaggagatggagacattccataactaacatcaataacagtgctgccagtaccctgccaactgtggatcttacatattacttcctgagctttctcttcctttcttcatgcccttgaagtacaacctgtgtttgggactccctcttgcctgtgccctcaggagagccctttgaggtgtgaccttaatcatagaatctccatgtcctggtttacagtttggtagaatgcagactcaagactgacaccatgatcttgctctcagcacttgtgaaaacttgtgtaaaactgatcatgaggccttgactgtgttacccgagttctctcgaccaccaacctggcctggtccctcagggttctccctgactgactcacaagccaaccataacaaaggacccttggtcttagataaggttcaaatgaatacagtccagcagaagacccatcttagtgaggatccagaggttcagctgaaatgtgaacatatagatttctaagaggctgaaatggatggatatttttagtatagtcttttgtcctctcttcacagatctgcccccagtgccaaaagaaattgatctcagggctctttctgagatgcctacttacatgaagccatgacatgttcctgtggtaattttcctccacgccggctgtactcatgccctcgggctcaatgctgggctcacttgcactccaaggactcccttcttcaaaagaaaaacaccaagaaaggttgtactgttctgtctccctggagagcacattgctacggtatcagggtccatgcttttgaatcctagggcacactaccatggccaatgggttacagggcatagcattgactttagtggaggaatattaataggaaatgttccctttaccaccagctgaaccagcaattacaaagacatttatgatctctgttacagtggcttccattttgagacatgggagcagaggaaaaaaaaaaaaaaaaaaaacacagagccaagtccttgaattgctgagatgagcaagttattggttgagtgtgcccaaacccattccagactgcccagacctcgcaggtgtaggtaagtagggacgccagccaacctgcagtgggcacaaagggtactgccacctccactgggactgtgacctcagctagtgtaactgctcttcacaccagctggctttgctatcagagctacttcaa

SEQ ID NO: 51526 - DNA, 1117 bp, Bovine  19866880818904
  misc_feature (1)..(1): n is a, c, g, or t
ntttaactattaaattgccctgagaagactaccagaagatgaataaaaaacccagactgtgctatgtaaggcttcccatgtaggttggcttggcttctttagcaaatatgttttatttgcttaggaaacttaaggcattttgaataaaaaacaattttaattctctgctctcaaaagcttcttatgataaaacccagacattatcagttattggccctaagaaatcctactttaagttggaaaacagaactgagaccattatcaaaataattcccattaattgactatatagcacaacattaaagggaaggttagttattattgataatttgattcatgtaaattgccaaactcagtaacttttggaaatgtcactgtctgcattaagggatgatgacacagagtaactcaaatattgccttcttattataaacctcactgaatcttgtaggtgaaagcagacttggggatcctctagtcaagaggacactgagtactaacaatttctgtggtactgtagtgtgtgttactgtacggacaatggagggtgctggtgtagtataaagctaaggactcaactgtgcgtcctcatagaagatccttggcaataagaaccgacttcacactgtgtgtgaaagagtagtcaaggcattatgttgtgggtgtggctataggaattattttccttataagttcctttcaaagtgtaagttagaaagtattgacttgaggagcagggttatggaataccttagacaaaggattctgcctggacataaaggaaagttggtttttcctcttttgatggacttgcctcttaatggctcagagcaatctcatgaagcagcaaaacaatggagacacgacagaatgggcaaggatggattcacatcacggagaaaaacagcacaaatggagaaaaatgaatcagaagaaggctgcatggatgaagagaaccatggagtttcagagacacagtcaaaactgaacatcaaaacaaactgtggtaccgttggtataccacagagaattttgctggtggtcctaaaagaaaactaggcagatttaaattctttcgattaacatgtctgccagatcacctttctattctgtgttc

SEQ ID NO: 51527 - DNA, 1700 bp, Bovine  19866880822693
  misc_feature (1)..(1): n is a, c, g, or t
ngaaaaatcgacggtaattgtaatcagggccaattaggcagaatgagttagagaaactcagtctgactcagccaacacttgaattgataaatgttcatattgagctacactgtttttaaagaacttgcactctctatgaagacattctggtggtattatggggtagatcttaccctaaagggcaacagcacagaagacttaacaaggaacccaaatatcaaatgagagaacctttcagagagtgaggatttactgaggagctttccaggctgaggcaatagtgctcttaaatgcatttcctttactattcctgagtgtctcagggctgagctgttcaatgtttcatgctctgtatttcacatttagtctaccaatctcaaacaggtatgttagctatgccagaacaggagagtcacgttggttaaagcccttctatatgagtaaattgccgtttcacttgtcagtataatttcaaaaataactattaatctatacacagttactgacttttgtattctggataaataagaagttacaagtaagaataaaaaaaaaacagcaatatgaactctaagcataatcacaaaggacagtgcattttaataacaaaaaatgtagaaagtctcctgaagcaaagaataaaaatgtcattaaaataaactgagctttataagttttcttatatcatcttttagcctacatttggtccatatttcttcacagactgactccaaagtacagagtgcttggtaatacggaagtaggctttctctaacttgccagcttcattctgaccatttttctcactatagttacctggtaaaaatttaaatcttcacgcacataggtctgcataactttcaagtctccttctggttttcattttcttataacctgaaactactaccgactttaaagtgttcagcataaaacccaaattgtgcttttattcatttacaacagatggggtcactgtgaaaagggggagcagattatagcttcccttttctgtagctcctttattaaaatcacttgcatcatttttataagactcacactttcttctaagatgtgattcttacaaaggatacacactttattttagaacagtttagtaagcagtaaacctgggccctcaaagtctctataaaaaatttatggccaaaatgacattcatcttaatcacaatacccaaaccaaatagttgtccaaccatgcaggaaccctaagcagaaagaaattccaataacatatgctgaagttacaactactgacaacaaatgttaccagtcctaaaagaaccaagagctattgcttaccagtgagaaatgggatgagcatgatatattactctttttaactttcaatatcttgtcagtctgccaaaggactggtgcttaaaattcattttaaaattgtgcttctgggaattttagtactatcgcttataataaatatatcttttttttttccaattttgactataatatgaaggaaagacttgagaaaaaggctatgaaacagagatgtaaaaaataaataggtacaaaacaaattaaaattttctttgacttatgatggaattgcaccccaataaacccactataagttgaaaatagtcttaagtgaaaatttgtttaatacacctaacctaccaaacatcatagcttagtctagcctatcttaaatggttcagaata

SEQ ID NO: 51528 - DNA, 993 bp, Bovine  19866880887624
  misc_feature (1)..(1): n is a, c, g, or t
naattttctggtggagtctttagggtttctatgtagaggattatgtcatctgcaaacagtgagagttttacttcttcctttccaatttggattccttttatttctttttctgctctgattgctgtggccaaaacttccaaaactatgttgaatagtaatggtgaaagtgggtacccttgtctttttcctgactttagaggaaatgctttcaatttttcaccattgagcataatgtttgctgtgggtttgtcatatatagcttttattatgttgaggtatgggctcatataattctaactaaattccaaatcagttcttaatggttctaatttggctcatttgtctacatttcttagatttttttccccctcttttgttgatttggagttatttatatcatgcttttcttagaaaaattcagcaaagtaatctttaatgtggtatctttgaatctgaaaaataacatattcagcagaatacaagggaatggtattttatcatactgaatggctactttggcagtttcttattctaccattgattttttttccaaaataagttcttattttttttaaagaataatttccaattccatagtaatcacactaattagaattttacaagtaggtatattcttagaatttgttttaatgacattataataatctgaaactcattgtgtacactattgcagcttaaagattcttgacctggaaaataaacacttcagtgcattatctgctgagaaatagtactgtaataacctcaggaattattagaacatagctaacttgctaccatggggtggtttcagtacacacaaaaaattggattctaaataatccaagagcaagactacaacattaaagtgttgactaggtaattttttgaatctcagaatttgagacctaattgttttataagatacatacagactcctatttataagttcatcacattgaaactgtattattgtctcagatcattaggata

SEQ ID NO: 51529 - DNA, 1678 bp, Bovine  19866880902433
  misc_feature (1)..(1): n is a, c, g, or t
naagtttaaaaaacctaatttgttaatagtttcttaagataggtcctcctcacattttcatcacacctgaaagctatagtaaatagtgttgactaaatatacagctctcctgtgatttgcctgtaacctatagagtcagtcttagtttttatttttaaaaaatgtctgactattgctgacacgactgaagtgacttagcagcagcagcagcagcagactattacttaataacttcatatgctagcttctaggaaaaggtgttacagttggcttaaataatttatcaagcatcacaaatactgtattaaaatgctgaacataagagaaatcaacatgtgggcaaaagtaagaaaaattcccccaccttgcttttcaaaaagttaatattatttcctacaacatggcagctgaatgagacatagattctgttgctctttcaggatgagttaatgtacatgctgcgcaaactgctcctgaatatcggagactttcctgctcagacctctcacatcctattcaactacttggtgagtttcacctccagtaggttataaatgttcatttccaagtaagaagcaacaatgcaagaaaaaggtcttaggggattttttcaaataaattttcattaactgtgtgcctgaagttgcatcatagtcagctgaattcaccactgattatatgggaaaactcctcctggcacaatccctggcatgtgatgggcactcaataaatgtctgtttcctccctgtctctctttagcattgtagaacttcctcatgttggtccttaattttagttttctgttgaaaaatgtatgtgtcatttttagtcattctttcccttttcgtatctcactgtttaaaacacatacacacacacacagaggaaaatgttgccctagatacaaagtatttgtgagtgtatttttccatagcaactatctgtgctttacattgtcctcacagctccttcctgaaccctccagaatttgccagtttcttcacattctcctctttataccctaaatgaatatgcagtttggggactgttggcttgatgactgttcttttaaactacaccttaattcaagcagacagatggccaaatgaatttcagtgttgggagaatgtcctttcttcctaaccatcactggtcttctgcgagtggggaaatagaagagttatccatatgcatctgcaggaggatgataaatttaactcaatgctactactctgatgtgcaaacaaaagttgtaattccttccctgtgtttatgactgaggtggttttcattatgaatgcccacctactggtggacaaggggaaaaatataaataagtgtccaatccaattttaagttcagactgatagaaatatataaatagtacctttggatagtatttggtctctcttgtctaaaaatacttaacctctaggaattctcctcccttctaacttctttcatctctagatgttatttggagttggggagaaaaaagacccttgttcagaattctatctcctgtccaacgtttgccccagctcctccacttgttagacagagctctctggctggctggttgctgaacgcctgactggtggaagctgaagcccatggcttctgtaacttgcaaaccttgtctactcccagcagtgcttgctgggagactccatctcag

SEQ ID NO: 51530 - DNA, 1192 bp, Bovine  19866880965710
  misc_feature (1)..(1): n is a, c, g, or t
natggctatgtgcctgtatatattcatatatatgtgtgtataatatatatacacatatatgcacacatataatatacacaatgtaagatataaatacatatatttatattccttataagaaattaccttgtttttatggcatttttgtctttcatcttactgtttggctcataatatgatctcagtaaatgtttttttaagatttgttgttgttattctaggagtgtctggagttttttaatatcccagaatcgcagtcaacacattactttctcatggataaacgatggaaccttatccactataataaggtaagcctgtggagtgatgacgctcatggagagttgtgtcaaaagcctgttatgcctttcctgagggcagcttccctcaggggtgtgtcactgtttaacggtggggagtatggctcttggatcacactgtcttactgtcaacataggtttggactggccacttgaccttcatacccttcagtttgcttgcctgtaaagtgaaggtgatgatggtgtctactttagggttgttgtaataattgaagaagtcaagcaaggtatattgtcactcttattacatctaagtgaaagttaagttcccatattgtaaggacatatatctatttggaatgttaacattattcttgttccactatattaagcatgatcatggaaacctgatctaattagcaaaaggaagcctcaagaccactgacagcactttagaatgattttcttcctcttccagaatgtgttttagtaaattgcctctggctcccttgctcctgacagggtatttgggattgggaaagtgtatctggcttggggagtttgaagctttcctaaggagggggtatattcctgggattttgtagaatttggcaggagggcaaaatagtaagaatggaaaccattagaaaatacataacttatgtttgtctgccctttggggaatgagaaaatgagagtcagagtttagccgtttgaacgattttgtctttgtgtaaccccaccacagacctacgttcgggatatttaccctttcaggagatccgtgtctccacagctgaaccttgtacacatgcatccagagaaaggacaggagctcattcagaaacaggtgcctgaccaccacagttttatgctattattgtgtcatgttactgggatagactatctgt

SEQ ID NO: 51531 - DNA, 1681 bp, Bovine  19866880966112
  misc_feature (1)..(1): n is a, c, g, or t
ntaagacacaggcaggaaaagattatatatagttaataaatgttcaaaacttagatctggtttgttccatagccctgctcttaaccacccccaatacactagtctccattagaaatagaaggtaaagagatgtaaatcctgaaataacagcgtggtcaaagaaaattaccactgcaataaatggattgccttattttcagtaatatgtctgaaaacatttatacaataatcagatatacaaataattttttaaccaacataaagctccttggcttcaagatgatataaaaggttctgctataaatgaaattaattcctgtttttcataataaacaaaaagtagaagtttaaaattttattagattttagaaagccaaacaaagaattgtgatttacatgttatatattatggctaagacccagaacactgtgatatcactcaaattatttgtcataattttaaaattcactagattccttttttcctttcagtaagaaagaaagaaacactttgtattgtctttggtcttttgaaagtttaaaaaacatgattaataatataaaaaataaacttgcaaaataagaaatacaaaagatttataaatatgaaagaagctaaatatctttaatacaccaaattaaaacaacaaaatatttcatctctatcacttgttaaataaagaaaaagcaatatctagtaatactgaatacaagcatgttcatatacagctggagtacaaacaagtctacaacctttctacaagacaattgtgcagacttcactattagaaaactaccaaggaaatgtatatggacacattcagccaaaaaagatttccatggtaacaccactaaaatacagaaaactgtttgaataccaataggaaactgataaagcatatcactgtaaaagtataaaatgcattatatagtcattaaaatgatgtataagaatgtttaatgacatagaaaacttttagtgaataattaaaaaactgatacacatcttccatgtttgttattaaacctataaatgtgtagaaaaattaatatcttgcatcaaaatggtaactgcagttatatttagataaggagataataatatatttttacttatctatattgtttaaaattctcacatataataacaacaatgaaaaagtgctgtaaaatatagtgtggtgttgattacaatggtttatcttgattctatgaaaagcaaataaattgagttcttccatttttctccatatcattgtggtgtttcatatgtttcttcttactataacaacagaggcagccttcatcccagctctaccctcactagctaccatcacattccagaagataccaggacatgctcgaatgccattgagaatcatgctgggtgagtgaatgatttaagagagtagatgtcgaaaatctaaattttatctaaaattattaaaacgctgccactaataccaaagggaacttcaaataaaaaataaggaaagaggtattttactcacagagactttgtcctttgcctgtttaaatacactaggagcctgagctgattcagcacctgctgctgttgaaagaggagacacaaacaaccccaaacttagtggctaaagatcacataaatgcacttttcataccttttggatattcagttctgtcaacagactaacgtaaa

SEQ ID NO: 51532 - DNA, 1413 bp, Bovine  19866880982227
  misc_feature (1)..(1): n is a, c, g, or t
ncattagaacggaaaaagtaaaactctccaagaactgaccatggtcttaaacctaagggcatttaccaactaaactatcatttagactgatgtggaagccataaattatagtgctggcaatactatataagaaaatgaaatataacttaaatgccaagtatttacatcctagagtgggaaaagtattattgttctttgcaataacatattagaatggaaagaattttaaaatccaagtttacttttcaacatgtgctcactttatagccatgcaattaacatatcttgaagaagagactggaaattcatttttaaatttttataaaatgccatattttgtgtgcccctctcttattgtgatagaaactataataattgttatatgaatgcattttgcctttaaaatgggaagaaaatatttatagcgaatgatatattagtcaccccaatgatagattactcatccacattttttattctattttaaatgtggcttgaagattaagtttatttttctttcacttctatttttttaaagtaaaaagtatttctggaattacataactcacatttattttctaaagaaataaatgtctaagtcaacctttctagaccttagtcctaactataaaatcatattatacaagaaagtgttagctgctcatttgtctccgactctgggaccccatgaactgtaactcaccaggcggctctgtccacgggattttccaggcaagaatactggagtgggtagccattcctttctccagggaaccttcccaacccagggatcaaacccaggttttcctgcattacaggcagattctataccatctgagctaccaggaaagaacatacaaggaaagggactgaattaaatcttctctaagccccctttccagctctatgattatattaaaccatgacctttagaaacaactaaagtgcccaacagcaaaaaaatggttagagcccactcatgataaaacgcatgtagcaatttatgacatgagatgaacagggtggcatatagaatagtgtacaattattcacacacgcaattataatgatctgtgtgttttagtatacaaacacacataggcacagccatacacgttaatttaaaatagaatactttttttaaaaaaaattacaaaattatttcagttgttaggggcataaaataggcaattttattatatatctttgtattttttaaattttattcgtagtgcaaaacaactttatgtaattagcaaggctgtttttaaaaatccacattttttaatctttattataagctgggtttttttaatctgggcatttttatcattaaaatatgagtgataaacacaggataagtaactaaatgtaggctagtcaattgaatgctgaattagaacaaatcaatca

SEQ ID NO: 51533 - DNA, 781 bp, Bovine  19866881029524
  misc_feature (1)..(1): n is a, c, g, or t
ntagaagatagcagtgcacatctgagtcaacaggaatgaaaagaaaacaatataactcagcaagaaatcaaatggagaggattaaaaagactgaaatgttgaatttatgtatttcactgtatctaagatgtcttcagttataagacaccgttattttatgtatgatctaaaaaaattctgttaagttcttagtagtgaggactttttattttatagttattaaaaaggtctacttagccttatttatgcagaccttttgatcatatatccaccccatgcatgtgcacactcagtttttgtgtgactctttgcgaccctacagactgtaatccaccaggctcctctgtccatggaattttccaggcaagaatactggagtgggttaccatttccttctccagggtatcttcccaacccagggatcgaatctaaatctcctgtatatcctgcattggcaggtggattctttaccactgagcctcttgagaagtataaatatatcccatgtatatgtaaaaaggaaaatataagtgaaataaattggtgtaggtattcctaaaatgttttaacatttataaatttcaactcagagctgttgacatatatttttcctatagaataacttatgctccatcaagagtgttatttcttaaaaagagtgttccactatcccctctgacattctcctaagccactgacccttatactgcaaacttagatgctgaaatgatcacattttgctgcacaagaatgacaatcacaacaagatttctaccaggca

SEQ ID NO: 51534 - DNA, 1244 bp, Bovine  19866881050687
  misc_feature (1)..(1): n is a, c, g, or t
ntggagcagaagaaagtgagagtttctagtggtaaagggaagatatggggactttacatatcatccagactttatctcagactggaggaaaatttacttattcattcagtgaatgtttattgagcatcaatttcatgcccttttcctgccctaatggaagtttctttctagacaggggaaataatcagtggataagcaaaattaaaggattacggagtcagtcatatagagaatgggcaatcaggtataagagtaggtactgggaggtaaacttctcaaactttacagcagagttgaatccactgagaatcttattaaaataaagactcaaatcagtgggtccaaggaggggcctgagtttatatattttaaccagctcccaggtgatgttgggattcccaggtggctcactggtaaagaatctgcctaccaatgcaggagacatgggtttattccctatgtcaggaagaagatcccctagagaagggcatggaaacccactccagtattcttgcctggagaatcccatggacagaggagcctagtgggctacactccatggggtctcaaaggaatcagacatgacttagtgactaaacaacaggttatgttgatgctgctgaaccgtggaccatgctttgattcgcaagaagttagatggcaaatgtccagacactcccaccgcccccaaaaaacttcagaataactggagttgttgttatgagcaagtcaaatgtgagtccttctcttcctgcagtagcactgcaaacttacaagcctctttgatgatgtaagagagatttgttccttttaacttctaaactttttcaatttcagccagttactttatgaaagatccattaaaccagtcctaatgagctactgacatttccttctttctgcccatgctcaatgcttattatgctgtataatgaattcttgtggctctggtttggggatgtgattgcatataaccctgggccgtttcttaattccagttctgttccctacttcataatttctttggacttttaacctcttctctgcctgaatgttcagcaccatcctggcctgctaaattctctgatctgttagcacttcacatcccttatgttcctctgtgctgagtagcaaagcttcccaattttcatatcccatcttcttgccacccataccctaacataagtcttggaggactgtgcatagtcacaggaggctattgaagatagtctctaatttcaaga

SEQ ID NO: 51535 - DNA, 1459 bp, Bovine  19866881112767
  misc_feature (1)..(1): n is a, c, g, or t
naatatgtgggtaaaaagctagactatatttccttaataatatagttcttctgcttaaatgtgtttttcctattttctgctgaacccataaaattagaagcaaaattttccagcaggtactatttctgatctgtgctttgcttttctaatttcctttgcttccataatataatacccttaaccttctgctgatggctcagatggtaaagaatccgtctgcagtgccggagacttaggttcgatccccaggttgggaagatctcctggagaagggcatggcaactcactccagtattcttgcctggaaatctccatggacagagaagcctggcaggctacagtccactgggtggcaaagagtcagcagagcacgtggtatccttccactgataaccagcctaatttacaatgacttccttcttaactaagtttaaatgttagcctagctccattcaagttttgaagactccatttgtgtagattaagttgtcatgctaaacaacaatattaattcctataatccaagaaactgtgatatctgtttatttcttagaattatcttcaacctccctcatcagtgttttatagtttttagagtataggtctttcacgtccttggtttattcctagatattttttatgtaattttaaacaaaatttttaaatctttctgatattttgttgatagtatttaaaaaactgcaaccaggtttctgttggttcattgattgtaacaaatatactgctctacatgggatactgatagtgggagagcgtatgcaagtgggggtacgaaataaatgggaaatctcaatacctctctctcagttttgttctaaaaaaactgtattaactggatactacacaacacttagaagaaaacataggcagaacactctttgacataaactgcagcaacatcttttttgatccatcttcaatagtaatggaaataaaaacaaaaataaacagatggaacctaattaaactcaaaacattttgcacagcaaagaaaatcaaacaaaatgaaaagacaacctgcagaatgggagaaaatatattcaaacaaagtgactgataatgaattaatctccaaaatttatagtctatatggctcaatatagcttccctggtgcctcagatggtaaagcgtctgtctacaacacgggagacctgggttcgatccctgtgtcaggaagatcctctggagaaggaaatggcaatccactccagtactatcgcctggaaaatcccatggacagaggagcttggtaggctacagtccatggggtcacaaagagtcggacacgactgagcgacttcactttcactttcatgactcaatataaaacaaacaaacaaacaaccctatcaaaaatgggcagaagatctaaatagacatttctccaaagacatatagatgaccaatagcacaggaaaagacactcaatatcacaaa

SEQ ID NO: 51536 - DNA, 983 bp, Bovine  19866881132394
  misc_feature (1)..(1): n is a, c, g, or t
ncgacttagcatcagcagtgcatgtctagggactttcaatatttaataaagcttcatgcagcccctgcatatctaagagaaaggaatatctcaatctatcatgtaaaacactatttctcaagatgagactagcttatgtatttgaaacatttaacaagaacattatggttcttcttgttgcctagagtaaaattcaaattttcaaatggttttagattctaatcatagtaaagtagttctaattctagacaacagcagcattctctgttccctctcagggaaacctggcatcacaagctggttagattgttccttatctgattggagctttgtcagtaattctcatctcttacacctgtctgtaaggtctaagaggcaacgccacttcagatcattgactcatggcactggaatgaaactaacaattgggaatgaaactagaagtcttattgacaacaatggcatcgtaggctcatgaaccagagctatggcttcacgttgataacaagttgtggctagaacattttccctgcaattaaattcctgagacacttctttcttgaatcagatcaaaactcacattttaaagcaggtatttctgaacttcttccagcctcacctgtgagtataatatattaaaaacagagctgcaacctggcgcagggtgaaaatgggggggagggaagaaggggaagtttgagagggagaggacattcgttacggtaaggcagaaaccaatataacattgtaaagcaattattctccaattaaataagcaaagaagatattgtataaaaggaaacataaaaacattagagctatatgttccagacaagtgttgcaactactatagggtgtgttgtttaaaagtgaaacatcaattatcttattctattgtgaagacaaagtaactatagaacaaaacaagatatatggacctaacaattgcccttacaaaagaaaatggttctgctgttaataaa

SEQ ID NO: 51537 - DNA, 1281 bp, Bovine  19866881139038
  misc_feature (1)..(1): n is a, c, g, or t
ntccaacccagtccatctgaaggagatcggccctgggatttctttggaaggaatgatgctaaagctgaaactccaggtactttggccatctcatgcaaagagttgacttattggaaaagactcttatgctgggagggattgggggcagaaggagaaggggacgacagaggatgagatggctggatggcataactgtctcgatggacgtgagtctgagtgaactccgggagttgatggacagggaggcctggcatgctgcgattcatggggtagcaaagagttggacacaactgagcgactgatctgatctgaatactaaggcatctttgtttccatagttcatttaagttccccaaacttactaaacgtgaagagaatttcttcagcccctccaggtgttttgcacttctcagccctgacatttttctattagtgactacaacattcccttacgtaagtaacgtcctgtttaccttggagctttgcctgatgaaagacaggcggtccacagaactgatgtccaggaggtcttccacgccgtctgccaggcccgagagagacgaacgtttcagccagtttcctagttaataatttttaaaaaaattagaccattatagcattttctcccaaatggattagacaaaaatgttggcatgggcccaaaaagcaatgaaaattacaggacccaatgtaaacaaaagtgaacaaaaattgtttttaaaatgtacatgctttgaaccaaaacattcactgttggactataagatcacatgactaagatcaggacaaaaagaacctgggcctcttgggtgattaaaagtgtaatccatgtagtccttgtcaaatttcacatcttccattaagtcctgtcgattttacctcctaagtatctttcaaatatgtccatttctttccgtctacatggtcaccacccagtctaagctactgttacttatacctggaccataatgcagctttctatctgatctcccttatccactcatgctgcctccagtatgttttccatgcagtgatcttctagaaaaaaaatctacttgcttatggcttatgttacccccctgttcaacatcccatctggcctctgtagggctaaaagatgaagagccaggtgacctgcaaggcccacaatactctggtctctatggctccaccattgtcatagagatgctcttgtctcagttcttccatgtccctccctcctaatacctttgcatattgcattgctaccacttggagtgctctccttcctccttctcccaa

SEQ ID NO: 51538 - DNA, 769 bp, Bovine  19866881143088
  misc_feature (1)..(1): n is a, c, g, or t
naccctactgcagtcccggggggttggaggttggcatgaggaatggaaccaaaaagtcagtgctctggtattcctgaactgttcctctaactttggtttccagtgtctgcacagcccatttcctcacactctaaaacataaaatggaactctttgtaggtaaaatatgttttcaagagaaacgtgtccacatttggactgtgaaactgcaccgtttaaatactatgaaatggagttcctcctacagaccttatttaatttcatgttatcctgaacctttatttttctgaattgtcaccttcacaattatattgagactactcttaaaatccaagtaagtcagccacttaagcgtgtttaaagtcaagattaatctataggcctctatgagtgttattaatatcaatattctaattatactgacgtctttgtaaaagctcagaaacacatctgttaaattttcagattttcattttttatttattttttaatatttatttggctgtgccaggtcttagttacagcatgtagcatctttaggtgtggcaagcaagctcttagttacagcatgtggaatctaattccctgaccagggattgaacttgggccccctgtgctgggtgtatggcgtcttagccactggaccaccagggaagtccaaattttcagatttttaaaggtcatcgttttgacttatagtgatttaaaaaagataagaaccttaaagttggattcagttatttttgttctttcaacactatacagctata

SEQ ID NO: 51539 - DNA, 1165 bp, Bovine  19866881166297
  misc_feature (1)..(1): n is a, c, g, or t
ncttgttttacagacccagcaccttaagtgggaagtgtaactgggtcagcataagtcattcttttttgattgacattatccacaaataagcaagtttcaaaagtgtggtataggaaagaaaagtgaagtaactggattgccttaaatgatgaaagacatctactaatctcatgctagatacaaaaccaaaataaaatgaacaaacaaacaaaaaaatctcaaatgaaatgaaagattatattgatagatcaggttcacaataaagatcagttgaaaaatcggagagaactgttctgatagatacagtgaatatcagaggtaaataagagttaatcttgggattttaggaaactataggaagaggatgaagttataaggaaaaggagaataaatcagaaaaagttagaaagaatggtggtctaatcgctcttcgtcagtagattgagataggcatttacgaggaaaaaagttaggttttgtttggtttctgtacaagtgtgggcactgaatgctaattcttgttgaaacacatttatgaaaataatttgaattactagacagtcttggaagcaacacagcacagtaagtgggtaatgactggagccatttttatattctttgcataaactgttataattgttgaccattacattatgaaatcaaaagaaaccgaagctattgcacagaatgtgctacgtttacagcctcactggaatgcaaattcttaccaaattgagtaggatccttgattttgatggttgattttctagttagatgttaagaccagtaattctaacaaaggttaagctttcatattaaaaaaaaaaaaatcactgactgttgcttttctatgctaattagttcttttgaattttcatttttactttaaacttgaaagagaaaaaaatatattctgaaaatgactttaattcaattctatttaatggataacaaggtaggaagtattcatttcttccattagttgttttgactcaaataactgttttgtacctactgatagtctgaatttctaattcttaaacacaatctgtttttaatacatgttttatttgaaaatgtaaaatataagtactaaggggtttaaaaaactgaatgaaaaggaagccaaaccaaaataaaaccaagggacttgaaaatttcttaa

SEQ ID NO: 51540 - DNA, 816 bp, Bovine  19866881172564
  misc_feature (1)..(1): n is a, c, g, or t
ntattattaactaaagttcatagtttagattcccttagtttttacctaatcttttctttggttctagaatctcatctaagattctacattacatttagttccatgtctcttcaggttccttcaggctgtgagatgttctcagactttctttgttgtggatgaccttaaaaaatactggccaggtatattacagatgtctctctgttgaaatctgtctgacattttttcatgattagtcttcgattacatttttgggagaaagaccactagcagtaaagtgttcaaataagcttggccaatgctgagttacatgggcatgtataatacaagtttcctgacagcttttgctcttttactgcacacggcaatctcagggtagggcactggtgtgcgaagcatcccaagtaattggctacagaaccttcatttgatgctacgtttattaacatctctaaaaggatttggaaaatacttagatttgcatttcagtccatgtttacctctgggagttcttgccacagacattcaaaggacataaaataatatgagcacccacaacttccagcaaaatgtcacaagttttcccccagagagaggtggaaaagatttctcagtggctaaaaatcttcatcttgaacctaaaaatccaacactgaaatgagcagtgtgttacttgataatcatccatttaaaacattatgataatttgttttcaagagaacaggtatgcaaaagtgaattccttagtctttaatactttcaagtttttaattctttctttatagttagtcgaaaactaacgtggaagaaaggcaa

SEQ ID NO: 51541 - DNA, 735 bp, Bovine  19866881279902
  misc_feature (1)..(1): n is a, c, g, or t
ncatacttacagctaattatttttcactattcctataagggtttttcctagatagagcaattgggtaacttatttttaaatagtatgtatatattcacacagtcatttttaacaaatgaaacatttttaaagttcaccaaagttttataacttagagattatggcattaagattttagaaaattgctttccttttaacatattttgaaatcaagaaaaagttgctgctatacacagaacagtaaaaggtctaataataattttgcacttacactgatacatttttcctaacggtatactcatccaaatcgtcatcagagctgctatcagttgcatcagaatccagaccctcttcaacatgagacaacaggcctgtagcagacagtgcaaatctttggatttctgcagctgtataccgtgcaaagccattttttgtgtcattccacaatttagtctctgcagtcaatatgttgatgtctggcttaatttcagtgcatttaggtaaactgttatccaaaattgtggtaggttcatgaaaaatctttactttggggagcctgatgtttcatagaaaatttcatttgttgaccatagtgcttaacaacatgctttgccaggagcatctgcaaatgtttctgagttcttctagcctggctaagtaaaattttctgtttacttacacactgaagtaaacgagcattcacttcctcctccttttcagcagcggaggaactaa

SEQ ID NO: 51542 - DNA, 1182 bp, Bovine  19866881314248
  misc_feature (1)..(1): n is a, c, g, or t
nccctacccaatagaaattgcaaagtgatacccagtagatactagaactaaaatgctatatgcaattcaaaagaaccaaaaattatatgttagtagtaatattaaaataagcgattgttcatggatatgtttttttacctaatggaaagacaaagataaaagcagatcaagaatgtagtgggtataatatagttaaaatatatgtaaatctaggtttagcataggatatacaacttaatatgatcattttggttggtaaaattaagaatgtgaatatttaggtaataatgaatataatatagtacagttaattagctgtcacaaaaatattatttcatatgggttcagttcattgaagattttcttctctcagagaggttgggacttgaagcatctaataaaaggaaaaaaattttaataacaataacagtagagtggcttaattgtaaaaattgaaaaaaaatgttaagacaaaattaaatgtagaaaaagtcacagcgatctttgatgtcagcatactaggaaccatttgtggaaaattgataaaaggggtattttttcctaaattattaatacttaagcccagcatcttattgataaactttattattagaaacaaactgagaacacgtcaaacagacaaaacgtaaaatactgtgaaagtatgtggagtgatgcatataggatgtgctatctgactgctattaattctcattttctgcatgcaattattattcaaaagttgaatgtctgtagaggataagtcaccagccatagttaaacgttaatggatccagtgacataatttaaattcaaggcctcattcaaaggaatgtgaataaaatgcatttgtttgggtttttatggccactattaaaagtaaaggaaatgaaaccataaacaactatgttcaaatattgtcatagctgaatcggctttgtggcagtacaaaaccatagttattgaaggggacactctgtttaacttacccagcccatctagattgtagtttgaggttaaaaaatgtacttggcaacttgggcaaaatgcagagtgctatttcatgagttcattttgatgtggttcaattttctgtcgttttaaaagcctggtacaatttacacattttattttttttcctaagccatacgtaagaccttagctcataattaatgtgataca

SEQ ID NO: 51543 - DNA, 829 bp, Bovine  19866881650250
  misc_feature (1)..(1): n is a, c, g, or t
ntgttctttctttctatctagaaaaaaaaatctttaattcgcatattgattgccctaaatctcatgggaaactatgcaaggaaataatcatgaatttgtgtagagagatatgttctttattttttgatttactttccaaaattttctacattactcttgaaatttagaaaaatgctatgtaacatgtgaaaaaggcatattttgaagattcatttttttcaaagggcacatattcttggttcttgtttataaatagactgtgttctaaagttaactgtttattaattacattacatagagcagtgataaattagaataggatgccctgagttctctgagtgatgtttgtgatgatgatactgatgatcaacaaggtaaaaaacagactaaggtccaaataaggaaaataagagcagtcaactcagttctttttcttattcatccagggtcaatatcgttcacttttggatagcatgctgtgccatgcttagttgctcagttatgtccgactttctgcgaccccatggactatagcccaccaggctcgtgtgtccatggagattctccaggcaagaatactgaagtgggttgccatgcccttctccaggggatcttcccaacccagggattgaacccagaactcctgcattgcaagcagattctttaccgtctgagccaccagggaagcaccttggatagcgtatataggttaaataaattgttctgtaatcaagagcagcaaaagtgctaccttgggctaagaaatcagtgcctaattgttttaatagctttataaggcagctgctgcttgaattatagaacaaactgt

SEQ ID NO: 51544 - DNA, 3247 bp, Bovine  19866880945732
  misc_feature (1)..(1): n is a, c, g, or t
natttgtggggactggaaggagctaccacagaacatttataaaatgtgttatgttcaagaaatatttcttaggagacgactgaattgtattatattccaaggcttccgagcatgtgaggcacagcaggtccaacttctgctaacatgcttaaaaatgatatttgggtgattttatgcctttagaaagaaaaaaaacaaagttttgcaacaaaggctcacactcactagtcttggcaccacaaagctttggaaaagagtctggtcaaccatcaaaatatggcttttcactgatgaaagattcagtatacagattttcatttccagagggatatttaaaaacaatgtaattaaaatgtgggttagacagaaaaaaaattgctttttccttttcttaacaagtacgtttatttgaagagatttaaccagtacttcagctggtttcatgagaaacagccttttctaagtctaccagagtctctaatcatgagggcgattgtgacacacgtattgctccattcaatcaataattctgttcagcgccccctccatttattacaggattctcattaagtgactgggagaaggcaatggcaccccactccagtactctggcctggaaaatcccatgggcggaggagcctggtgggctgcagtccatggggtcactaagagtgggacacgactgagcaacttcactttcacttttcactttcatgcactggagaaggaaatggcaccccactccagtgttcttgcctggagaatcccagggacggcagagtctggtgggctgctgtctatcgggtcacacagagtcagacacgactgaagtgacttagcagcagcagctgggtttactaggtctactgcatttctaggactgtgacactttcctgatcatcttctcttactcaaaaattatggacttaatttgaattattgacaattaggaatgcatcatgggatggaatggcagaaaccaacaaagatcctttcctgtgtaaaatataaattctaacaggaacagataatctttaacatactaaatccattatctatatgttagagatgttaagaattatgggacattcatcttcataggaagtacttagagtcaggaaaaggaaagttgcagtatttagtagagtaataggatagtcagatatttatgtaccctcaaattcactttctggcttaagctaaaaagtggatcttttataaattaaaaatcctgttcccagagaatgactcagatcatcacccccactaaataagtaaatatgtttttattttttagggatggaatatctaagaaaccatgaaaaatcttagcactattgatgaatttgtgctgctggggttgtctactgacccggatatccagaccatgctctttgttctcttcttggggatttacctcctgaccctgatggggaacctgatgatgatcctggtgatcagggctgatcctcacctgcacacgcccatgtacttcttccttggtcatttgtctttcctagacatatgccactcttcaatcaccatacccaagatgctgcagaatttcctgtctcagaggaaaaccatttcagtgtggggatgcattacccagagtttctttttcattttctctggaggcacagagagctgcctgctctctgctatggcctacgaccgctatgctgccatctgtcaccctctgctctacactatgatcatgaatggacctctgtgcactgcaatggtcagtgcagcatgggtgatggggtttctgaactcactagtgaataatctttgtacccagaacttacagttctgtggtcccaatatcatctcccacttcagttgtgaactgccttcactcttccctctgtcctgcagtgacaccatgcctaacaccatcctgctggctgggtccactgcatttctaggacttgtgacacttcctccgatcctcttctcttactcaaaaattattcttgccattttaagtatctcctcctctaaaggccaaggcaaagccttctccacctgctcctcccacctcaccgtggtgctctcgttctatgggacagctctattcaggtacatcagcccctcttcaggatcagtcctggagcaagttgtctccatacagtatggtgtgatcacatccttgataaaccccctcatttacagcttcaagaaccaggaggtgaaggcagctctgcagaggatactgaggcagcaaatatgtgtctcagggtaagaaatggcaaggagacctttcttctacaagagaagcaatctgcaaaggaagagaactttgtaaacttagagctcctgtggaacttgatttttaatgtagctaattatgtttgtttctcattcaaattgaaaagacttccaaaagctgagagaaatatagtcagagaagtatttggcccatcctgcatctgacagaaaaggttcagagacatcagctccttccatagcctttggaaactaatacagaacagtgacttcactacagtttaggaggcagaacaaggacaaagctctctgagcctaggactttacctatggagttaccaaatgaacccattagtagaagggcaaagaacaagtaaccttgacagatttaacattccagaatggacagttcattaccttttgttcactggagctggtggcaccataggcattagatggcaatgtgtgcctgcaaatcatcagagaatagtgaaagcaaagaatgaacattacatctatgagcaaatgaatggataaagaaaatgtggtacagtcttacagtggagtggtactcagtttataaaagaaggaaagtctgcaatgtgtgatgacatagatgaatgttggagatattgtgttacgtgagaaaagccaatcacagaagagaaaaactgcttaattctacttatatgaggtatctaaagaggtccacttcatagaagcagaaagtagaatggtggtttccagggcctggggaaaggggattgggaaactctgtccaatggacatacagtatcagtcatgcaagataaaaaagagatccattacactgcaatgtgcatatacttaacagtagtatacataaaaacttaagagggaaaaatctatgttgtgttttttatcacaataaaaaataaataagagtgaacatatcattacactaaatatcagtattgcattttgcaacctcttgtctgaaggcacacttcattttaaaacatatcatcatatttga

SEQ ID NO: 51545 - DNA, 1200 bp, Bovine  19866881166810
  misc_feature (1)..(1): n is a, c, g, or t
nctatgacctttttctcttaaagatccaggaccctaccattttatcgaatgtatggcttttagcatattctccagttagtaaaaataatgatagattcatgaaactaataattttactaaaacagatgtttcagaatgagaaaaatggatcaatttgttcataacaaagttttctagacaaggtgattattttaaaagaaaataaagggagctttccttcctataactttatgccattctctcatgtatttctaatgtaggttgtagcatctgacgttgtgagtactcaagagtgctccttactactgcaaactcacctaatgtccttttctatgcagatttattccagttcttcactatcctatattttcatttcagcacctgatatgctgcaaatacttttccaaagttcttttcagagccaccttcacctccttgtttttcagactgtaaatgaggggattcagcatgggcatgatgacagtatactgcacagagaagatcagttctgcaggggatcctgaatttggcataagatggcggagcaaacctgagccaaagtacagtgtcactgcagtgaggtgggaagagcaggtggagaaggccttgcttctgcctgaggtagagctgatgctcaggatggtggtgataatgtgggcataggatagggagaccaaaaggaaggttcccagcccatgtagcagagtggaacagagcaaggcaatgaggtttctggagatatcagagcaggacagggagaggagagagggcatttcacagctgtagtgagggatgattttggcctcacagaagatcatgttcacagctaggaagatgttgatgagtgcgtccagaaagcccaggccccacgagccccacacaagctgaatgtacagctttttactcatgatctgtccatagagtagagggtggcagatcgcagcatagcggtcataggccatcactgagagcagacaggcttcggtccctgcagcaacaaacacaaagaagacctgagctaggcagccctctaccgatattgttttccttcgagacaggaggttctccaacatcttgggcactgtgactgaagagaagcagatatcaacgaaagagaggtggctcaggaagaagtacatgggtgtgtggaggtgggaatcagccttgatcaccagcaacatcatcaagttccccattatt

SEQ ID NO: 51546 - DNA, 2238 bp, Bovine  19866880149141
  misc_feature (1)..(1): n is a, c, g, or t
ngcaaaatgataggatactgaaagaggagttccccaggtcagtaggtgctcaatatgctactggagatcagaggagaaataactccagaaagaatgaagggattgagccaaagctaaaacaatacccagctgtggatgtgactggtgatagaagcaaggtccagtgctgtaaagagcaatattgcataggaacctggaatgtcaggtccatgaatcaaggcaaattggaagtggtcaaacaagagatggcaagagtgaacgttgacattctaggaatcagcgaactaaaatggactggaatgggtgaatttaactcagatgaccattatatctactactgcagacaggaatcccttagaagaaatggagtagccatcatggtcaacaaaagagtctgaaatgcagtacttggatgcaatctcaaaaatgacagaatgatctctgttcgtttccaaggcaaaccattcaatatcacagtaatccaagtctatgccccaaccagtaatgctgaagaagctgaagttgaacggttctatgaagacctccaaaaccttttagaactaacacccaaaaaagatgtccttttcattataggggactggaatcctaaacttaactctacttctaatactaacttcaacccaaccctaaccctattcctactttgacctgaatcctaaatgtatccttcatgctaaccctacccctatctcaaactcaacctgaactccaactctaaccccatcttcctcttaaccctaatctcaaccttaactctaaccctaactttaacctgaaacccaatcacaattctaaccttgtattagtcaggttctccagagaaacagccaatttgagtgtgtatatacaaagaaattttcaggaattgctcacatgattatggaggttggcaagtccaatatctgcaggctgcagacccaggaagagctgatgttgcagctcaagtccaaaggctgtctattggcagaattctctctggctccagtgaggttggtcttgttctggacagactgattagatgagccccacccacactggtgcttcccaggtggcccagtggtaaagaatgtgcctgacaatgcaagagacgaaagaaatgtggcttcgatccctgggtcaggaggatcctccgaaataggaaatggcaccctactccagtactcttgcctggagaatctcatgggcagacgagcatggcaggctacatttccatgaggctacagagactgggacacaagttagtgactaagcacaagttagtgactaagcacaatgtacatatgatacaatacacccacattatgaagggcaatctattttactaaaagcccctgatttaaaggtcaatctcatgcaaaaacacccttacagacacattcaaggtaatgtctgaccacatacctgggcaccaccacccagccgagttaacacataaaattaaccatcataaacttcaacccacatcccagccctaaccctaatcacctatctcttctgtaaagagtccattctccctaccaagctgactgtctctgcaataggctggatgaccagactcaaggggcccacctggtgggtggagtgggtggggacaccactggcctcatgcagccagcccgccttggcacagggggttattaacagccagcagtgaggggaggtgggcagaaccacagcaggaatgttatgttctcagacccgggcccaccaggcagcatggacctaggaggtatttgctgtacagagtggtgtgacttcagaatgctgttttaccatttgcccttcgcgttgcatttaagtacaattgtagccaattatgctgatttctatttcacaggcttagatttaatggattttgaatacatattctcaatctatgtaaattatctactctggcctcacatccagcgatctttatgagaggactctggtggggtttttcttctcttttgaggactgtaatttttataggaggatttttttaccaccttctgttagcaccggctcactgggcatggacccaagaaagattcaaaggcagaatgaaagagcattagtgaaattcatcagaacaagggtacactttgtggagagcagaagaaaagcaatagatggccctgattgcgtatgagtcaacgcctgtgttttggatacatgcaaagaactaggattggcgctgcaggaaatcaaatacaagagagatggttaccaggcatg

SEQ ID NO: 51547 - DNA, 1362 bp, Bovine  19866880365755
  misc_feature (1)..(1): n is a, c, g, or t
nccagggtcatattccacaccagatgctaattccttttttagctgcaagatcagatcaaacccatttcctggttggcaatgggcaactttggttagactaatgcatgagattagaagtcctcagactgctgtgactcgtatgccaagaaagtctgcaatttaattaaaacaaaaatgacaacaacaaatcacagaaaaagtctccccttcgggccctgaattagaaggaacctgaacctggatctgccatcagttaaccaagatctcagggctccttcctttggccttcaagactcattgttgacattgtccttgcacaaggacatcagtatgggtggtcccttattcctgactcagactttaggaaaacaaacaaataagcagtggaggaggcccagattctcagtctctaactgccctttgagcccaattcaggatatgcttctgggaaagaagtgtgtctctctcctgggctaatgtaaacggatgaaaacttaatgatgcctcctccccacgttatttttacaggaaaatgttccctgaggtgtacacgactggcttgttacctctgggacacaaatctcccaataagatggtgactgtgtgtcctcatcataaggatctgattctggaagagacctcacagataatacagtccaaactctataatttttctctgccttcttttagaagactccaaggtaaagggatcaaaggacttgccacaattacagagccatggtctgtaacgtgtcctctcagtgtagctcccgaccatctgacagatacagcctcacctgggaatgtactagaaagggaacttctcaggccctgtcccagactttcagaatgagaaaccccagggatggggcccagcaatctgttttaaccacctgaccagatgctgtaaagtttgaggaccactggattgtggtcctcaaaaaaacatatatttacaggggcagaaagttggggtggggaggcagactttattatctgccttgaaagaaaagtgaaagtgaaagtcgctcagtcatgtccaactctttgtgaccccatggaattctccaggccacaatactggagtgggtagcctctcccttctccaggggatcttcccaacccagggatcgagcccaggtctcatgcattgcaggcagattctttatcagctgagccacaaggaaagcccaagaaaactggagtgggtagcctatcgcttctccagcagatcccgagtcaggaattgaaccagggtctcctgaattgcaggcagattctttaccaactgagctatgaaggaagcctatctgccttgagtgtgggtataaatagccttgtttttctcctttctttgcaaca

SEQ ID NO: 51548 - DNA, 2667 bp, Bovine  19866880376672
  misc_feature (1)..(1): n is a, c, g, or t
ntaaggaagatctgctgctgctgctgctgctaagtccttcgtcgtgtccgactctgtacggccccatagacggcagccaaccaggctcccccgtccctgggattctccagacaagaacactggagtgggttgccatttcctcctccaatgcatgaaagtgaaaagtgaaagtgaagtcactcagttgtgtctgactcttccgaccccatggactgcagcctaccaggctcctccgtccatgggattttccaggccagaatactggagtggggtaccattgccttctccgcctaaagaagatcaaccctgaatattcattggaaggactaatgatgaagctgaagctccaatactttggccacctgatacaaagagctgacttattagaaaagagaaaagaccttgacactgggaaagattgtgggcaagaggagaagcaggcgacagaggatgagatggttggatggcatcactgactcaatggacgtgagtttgagcaagctctgggagacagtgaaggacagggaagcctggcatgctgcagttaatggggtcgtaaaaggtccacaggacttagcaactaaacaacaacagcaacaaaaatgttctgcaagcctttaaattaggagagcgccagaaacttgagcacacctctccttctgtgaccagaaaggaatgagggtgagtagagagcgtggctgagtgtatctcttacttggggtccatgagccaccttaagtctgtgggctgaaggggtggagtctgcagggacttggatgaggaggggctgactgagctgtttggggagcacctgtcttagactctcaaaggtcactccctgtgttagccccagcttttcctcaaagcaagagtcagtcaggaatattactggctgtgtttgagtgtatttgacatcctggagccagataggggtgacactctggcacacagtccatcttcacgactcctccctccttcccacaccgtcactacatttcctaatctgagctagatggccttgggttctgtcccaggtagaagtgtggtgtgaacacccaaaaggagtgctgagcccaagaccaaagcccctgctcccagccctcctgtctgcatgttgcctgggatgcctgagtaaacatccacctgccctgggagactagcggagctgaatctgacttattctccactccctcaaccccagcctgatatccagcacatagcagagactcggcgcacttttcattatgataaacacctagcaggtcagggcgccctggggcctggcacattgcacaagctcgggggtcctgcctgctctgggtcaggttaccagcccccagggaagggtgcagattcttgcgtttgttttcactttagtcttgattagtcgttggaccttgggcaagggctttaatgtctccaggctttggttttctcctctgcaaaatgtgcccgcggagagtagaggcccttccctccccgccacccactccccacctccgaaaaaggcttttttttttttaatatttatttatttggctgcaccgaggtcatagttgcaacatgtgggatctagttccctgaccagggattgaacctaggttccctgcactgggagcctggagtcttgaccactggactgccagggaagtcccctgagaaggctttttaagctgggtagcccgggccgtgtgcacgcctcggctgacatggcaatgaacactccaaagactgcgcatggagcctctggctggtgcttaggacattactggtggtgctgcagagtgagtgaggcagagggaccctgtgcactccctttggctctgcccacacgccctcccacccgccatgacctccactgctgggtctctcacatctcacatgctgctttgcagtgttttttcaggtgtcctcatctcggctcccatctggcctgtgagctcccagagggcaggtccctggtgtccgctgagctccggggctagctccaccgtggctgcacgggcagtggttatacgaggctggggccttcggctcctgagggtacgaaagtaagggggttgcagcacccaccccagttaccgagacgcaagaagacatgggaggctgtccaagccaaagccactgtctggtccaccagctctttctggaagactcagtggggtttctttcagcgcctgcaggtttctgtcaactgatttatctcaagaggaactagaggggggacaaggagaaggcagcaactgacagcttcttccagagcctcagttttgccagcagtgaaatggggggagtggtacctgtctcctaccttcttcctgggggttctttgataggtgaaacttttcacttttaaaaggctcagatgaaaggctctgatgggatgaaaggatcttggggccatattaagtttctccacagtttttgaagcctgagaggagctgctggaggaagtggtcagctgacaggtacttgtgaagccgcccagaaggtgatgctgggcagaattagcatgccaatcagccacacctagggcgtgagggcagcagggagcggagcccttatctggggcaaaacctgtcatttccctgaagagggggttggggcaatgttctgagggagaggacaaagcccagacaggcaaagcctcgggcaagccctcccctc

SEQ ID NO: 51549 - DNA, 1420 bp, Bovine  19866880379026
  misc_feature (1)..(1): n is a, c, g, or t
ncttccttcttacttgggaactggtactcttgatttggacctttcagcttaagtgtcccttccccaggaaaacctctggtgaccttaactagctcccatctccatattatgtgctttcacactgaaatggacttttctctccacacagtacttaccacagccacaatttacattgtatgtgtgttattttgcttcacctctgtaacccaacacccagaaaatcttgaacccattgttgaatgaatgagctgcctgtgaaaaggtaagttagacctttgaaaatctaaattatcttaccggtaacatggttcttctgtctcaaaaaatatattgtgaatatatggtaaagagcctacaagtttgcccccagtgatcctcaccgtgggtattcatggccttgtaaagtcaccacccaaaattcaccaggagcaacagaatacagcagcagtgctgacgtattacttccaaagctagggcatgagggacactgccactcttgctttgttctcctttgcatcatgttctctggaggaagacagccactgtgttgagaacactccagcaaccctttagagaggctccatggggcaaggaattgaggtcctcctgcatacggccagcatgaacttgccagtcatgtgagggaaccattttggaagcagtctctagtcccagtcaagccttcacatgaggcttgacctcgtaagaggtcaacataaccctcataagagaccagaaccaccaccactcagttagtgtgtgtgtgctagtctcagtcgtgtctgactctttgcgaccccatggactgtagcctgccaggctcctctgtccatgggattctccaggcagaaatactgtagtgggctgccatttccttctccagggaatcctcctgacccaggaatcaaacccaagtctcccatggtagacagattctttaccatttgagctaccagggaagcccaccgctcagctaagcagttcttcaatccctaatccacagaaactgtgagagagaataaatgtttattattttaagctgctaaacttgggcacaatgtgttacacagcaacaaacaaccaagtatataaaataagacaacccaaaggtccaaaggacacctcatgtgctcttctgaactatcccaggagtcaccagaagcatcagattcagattaaaaagagtgaaaaagcattcaactctcacaaatatgtaactgctctcgaaagttaattaatctgactttctgacttttgcttttcacgagtctgaattatagtatctggatggaagtgcacatacaaccaccataccttttggtccattctccagggcttcttcggcggcttctggttcagtctctttttcagtgttgtcagtgtgggttttggcctgtccattaacgacatcatatcgctg

SEQ ID NO: 51550 - DNA, 960 bp, Bovine  19866880388198
  misc_feature (1)..(1): n is a, c, g, or t
naacagccctgacaggttactagcagcccccacagagggcagaggcttgtgctcaggagcaggttgttcagatcccagctccacctgctgcctaggggctgtgagaagtcactgggatctctttggacctcactttcttcgctgaactggggaaaagaaccctatggggctgctgtgaaaattaaatgagctactaacggcttcttagaccagggtgtggcacatgtgaacacccggtaaacacaactatactttttattcctttaagggaaaatggagttaagagacattagagtgtttgctgctgcacggcacagtggactctgccacactaacaagtccggtcattaagctccttgctttctacaactacagaacaaggggcctggcagacccttcttaagttcctgcctgtgggtcacgtctataattgagcagcagactctaccaaggcagactggaggtccccagctgggaggtgggagaggtaggttgagactcagcctggcccgtggccaaagtctgtgctctctgccagtcaacacccaattatcattcacagcagggtctgcaaaacatttcacttcctctgttccagaaattgtgtgcagcttggtagtaaggtcaggaaagggccgtgcggcaacgctcaccttaaccaccatggttgtgccttcatctttaaacaaggctgtgtggtcacagaggcacacagaggcttcccacacaagtacccacagggctcaagtggagatggctgcagagatgggcagagtccacccctctcctgttatggctcccgggccaggcacgtaccacaggcgcttcaggtggggctatccggagaccctgggacaggatgcccgcgaagttggtggtcctggacccgtgccacagcagcctccggttatgcagctgcttaaacggcttgtaacgctggctttccccttcgcgctctat

SEQ ID NO: 51551 - DNA, 879 bp, Bovine  19866880424763
  misc_feature (1)..(1): n is a, c, g, or t
nctttgtagaggctgccttcttaacaagggacacaagctctcaagtttgcaacaaccccccccccccgcccagcccactgggacagacaccgttcttggtgtttagtgtgggcctgtagcttgggctactgctcattttatattgactcagtttatattgctacttgcctggctgttgtaggcatttgtgtttggaacttcctaatgcagaaggaagagaatggtatattgccaggagggtttagagatggcctcagagaggagataagtatgatcactgtgcatgcttacattagaggaaagtagaaacgacattccaggcagaggggataccatttgctaacttcctgagggttaagagagctggcaggtttggttagctttagagaagtagagaaaagcctgaagagataggaggggtcagatgtgcagagcctagaagggtaggccagaggcagtcttgaagctggtggggagtcactgaaggattttatgcaagggagtttcacaaataacttaggcagtggtggaaggagaacctggagaggaggcaggaggtagggagctcagaaagaagctgctgttagcccaggtgaaaaccaggcgatcctggagaggagcagcttaaggagatgacaaggaagagacagattccagagatgtacaacagagccagccagagtcagtaagggcaagggactgaatccttttttatttaggtggtgtgaacttagggccattttctggacctctgtctctttatctataaaaagtagaaattgtttctgccctggcctttcaaaatccatcaagatgtgaaaaggcctaaattatactgtgaaagtgctttagaaactgtaaaattcctaacagataaga

SEQ ID NO: 51552 - DNA, 2500 bp, Bovine  19866880489792
  misc_feature (1)..(1): n is a, c, g, or t
ngaagacgagcctttactagcagggtttgatgtcttccctgggaccaaaataaggtatgaacttaactctattgtccataagaactaaagacaagtaaagtaggagctgattatttctcaacccaagagaacttagattcaccctttcatctagccaagggcagatccacattttgaggggcctgaaacaattttagaggccctctttaaggaagaccttctttctctaccacatacaacttccagtgccaggagcctaggccatggtcgtttttgtgacaccacatcagactctgctcctttgtgacacgctgggcaagtcttcaaagtggttggtgggagtgttcctcgaagctgttcctatacgaggacagctagcaataactccacacaccacataactgtgtgccccacaccccatactaaattcccagcacagcttcttcttagcccagtccccaaatgcctgtggccactccaatatcccttgacaggagggaaaggtgatggagggcaagttggagtagaaataggccttaagtagttaaaatatctttctttggtaactttaataaaaacatataaccacaaaagcacatagtagggtccctcccagagccttggaagggaccggtgaaggaaggggcttaagcttcaacttcttttacttcacagttaaaagtgcttctgaatccaacacctgtttgttgattatctattgtatgccaggcgctgttgccaacactaggaatacagcagtgagtaaaataatcaatccctgaccttgtggcacttacattctacttaaaatagatttgtttccctggctttggaggacaggggaaatggatgtgttggccactactgcttccctggttgctcaactggtaaagaatctgtctgcagtgtagtagaccccatttgattcctgggtcaggaagatcccctggagaagggataggctacccaccccagtattcttgcctggagaatccccatggacagaggtgcccggcgggctacagtccatggggtggcaaagagctggacacgactgagcaactaagcacagcctgactttcagtcaatatttgtggaatgaataaatgaatgatgaaatgaatgaaacatctgagaactaagaactcttatgccactgagacttaggacctcaaaaaatgaagttgaaatgaaagttgctccaaattaaagttggagcaagaaaatgaaagttgctccaaaagccaatgaaaaattatagggatggtaatgacatgggcgttgcaccacgattttccaggacctggcaggactattgttctgacatgccttggcaggtaaccagagattcctgctttctctctacattggcagcctggctagtacacctccaaggcaggtcctccctcgggtctgaaaggtgaaaacagggagagacaagcgagaaccactcctgtgtggccgccgtctctgcttctgctccctggcttccaggagctgctgaagacatggccctgtcacagctgcttatttcacagaactcacagaggcgggcaacctctccctcccctctgccctcccacggcccttcccccatctccagttcataaagacagaagacaatgcacacggattcctgtcaccaaatctgcctgcatctgagtccatcttctcctcttccgctcctgttgagactgaagtcccagctccatctctaactagctctgatgcaaattgtgtgggcttcagtgaaacactggtctccactttaaaaatcgggataatgatagtacctattttactggatgattatgggcattaaataagataatggacataaaaggcttggcagagggcctgacactgtgagcatcagtccagggccctcctcgttgttctgagttctatcccatcctgcctcctcaggaactgcttttctatcagttcttcactctctacttcttcagcgtttcttgtacaggctcctatccatcagcattttttaaaactcaatttatcccaattttttaaaatgacaatgaaattaaaacctttccttgaccccacatgcccctccatctgtcattctcttttctcctccacttaaccttctttaaacagtggtcccctctcactgtctttccttcctcctctttttttctgaatccacccatcactcctccaagccagtcttaccaagatcactaaaatcttcctgtggctgcaagacccaatagacaatcttgagtcttttcttccttgacttctcctcagcttctaacactgttgattgtcccttcgttgaaatgccttttcttcccttgaattccgtaacttcacactctttcaactttgcctcctacttttcctcctattttccctcgtcggtctcctgtgtgagttcctcttctgtgggtccttcagcctctgccctcccctaagtggttagattctctcctagtctagtctcagtgtgcttctcttctattctcctctctcc

SEQ ID NO: 51553 - DNA, 2559 bp, Bovine  19866880516363
  misc_feature (1)..(1): n is a, c, g, or t
ntgattttaatatttacctgaggcctcccctttgtttactacccctgcggaaaagtatacaagtcataagtgatgcttgatgaatttttgcaaatgagtacactgtggtaaccaaccccccacaagatgtttacttttgtcagttagctaaaatgagagcttctctgcttaagtatttagaagttgagctctggagtgaatactacctggggtactacttcctcgttctgtcactcagttatttaaattctgccttcctttactcagattatttataaacttttagcagagtacctagcagttggtatcctgtgactgcctatgttgaagaggagagattaccaagaatttattatggagtgtgatcaacttttattaagcacttcatgcaggctaggcagtttacagggttgcatattcattaactcagaaatactgcatttattatactttattataagtagtacaagaatatatcaaatatataaaaaatatatcacttttttccttaattgaacatgggaaaaatgtggttttaattttaatatttctaaaagatggattttattcgatgtgtgttctctgccacgcaacagtgatagggccacaaaagaaaacagatttgagcttcggctgctttggtggaagtacagtatctggaatgagagaagagagagatggtcctgctctcatccacgcagttcagacaatcgctggatcctgctttcagtttgagggatcgttcacagagttaaagacaaaatggagctaattcagaagaaagcaacttgtatattgtgggaatttgaatccctgccatcattataatagctgctgcttagtgagtgtctgctctatgcaaggcactgtgtcaagactttggaacacattatttccacccctcacaagaaagagaagttattttctccattttttgatagcaaaactgaggctcagaaaggttatctgtattttgtacttagtaaataacagaactgagatttaaacacaagtctttaggagttaagtatgagtgaataagctgaaaatattttgcctaaagaatagagaactcagggcaagtataatgtgcagtattttgtggcatttgtttgtttttgaggtctgatctgttagatgtgttttatttaatgtcgaggactagaaatagacgctgtggataaaattgagaagaatctaatcagaataaagagctaaaaattacagctatccatccaaacatggaatagactgtttgagacaatgaattcccatcaccaggaagtgttcaagcatatgttaacaattactaggtggttatgcttttgatttctttatcataatcttttatgtatctgcctcagatttttttctttgctcttactgtgagggatatataaaatattttatagttatactgtctaaactgataacattcatagaatacagaaactctgtactttcatttctcccttcctcacataagttgtatgatgtgtccagtaacaaattattgtagaccaagtggttatgtagagaggatttgaactttgtgcagttcagccatctatctttaatatcctttccaacccatagattttattagctttcatttcataagataaagactagaaggaacgttgaaataatttgttatatttctctatctttccctccagagagaaaataaaaatatttatcagtaaacttactctagcaattgatgtgtgagactaataaccttttgtataattaatttcaggtggaagggtaatcatttagtgctttgggcgtggtcgctgtgattataacactattaccaaaattatttatgctgtcttattagaactgtaaagttaaatacttaaaatttaataggaatgtaatctagaagccttttcatactgtcatggggttcttttgatgagggtgaaaaagctggcttgaaactcaacattcaaaaaactgagatcatggcatctgatcccatcacttcatgacaaatagaaggggggaaggtgaaagcacatttttattttattttcttgggctctgaaaccactgtggacggtgactgcagccatgaaattagaagatgtttgctccttgtaagaaaaactatgagaaacctagacagcgtattaaaaagccaagacatcactttgctgacaaaggtccatatagttaaagctgtgatttctccagtagtcatgtgggtgtgagagtaggactgtaaaagaaggctgagagccgaagaattgatactttttaattgtgctgtagaagactcttgagagtcccttgaattgctgtcaaaccagtcaatcctaaaggaaatcaaccctgaatattcattggaagaactgaagctccaacactttggccacctgatgtgaagagcagactcattggaaaagaccctgatgctggaaaagattttgggcaggaggagaggagggtggcagagtatgagatggttagatagcatcactgacgaaattaaaatgaatgtgagcaaattccagtagatagtggaggacagaagagcctggcatgcgg

SEQ ID NO: 51554 - DNA, 2591 bp, Bovine  19866880553951
  misc_feature (1)..(1): n is a, c, g, or t
nccctggtggctcagatggtaaagagtatgccttcagtgcaggaaggaaatccatctgggttcaatccctgggtcttggaagatctgctggagaaggaaatggtaacccactccagtatttttgcttgaagaatcccatggacaggggagcctggtgggctacagtcaatggggtcgcaaacagttggacatgactgagcgagtcgcattcatacacacacacacacacacacacacacacacacaatgctatggttttaagggaaagtggagagtgaaaaagttggcttaaagctcaacattcagaaaacgaagatcatggcatcggtcccaccacttcatgggaaatagatggggaaacagtggaaacagtggctgactttatttttctgggctccaaaatcactacagatggtgactgcaaccatgaaattaaaagacacttactccttggaagaaaagttatgaccaacctagacagcatattcaaaagcagagacattactttgccaacaaaggtccatctagtcaaggctatggttttttccagtggtcatgtatggatgtgagagttggactgtaaagaaagctgagtgccaaagaattgatgcttttgaactgtggtgttggagaaggctcttgacattcccttgaactgcaaggagatccaaccagtccatcccaaaggaaatcagtcctgggtgttcattggaaggactgatgttgaagctgaaacttcaatactttggccagctgatgcgaagagctgactcatttgaaaacactctgttgctggcaaagattgagggtggaaggagaaggggacgacagaggatgagatggttggatgccatcaccgactcaatggtcatgggtctgggtggactccaggagctggtgatagacagggaggcctggcatgctgaggttcatggggtcgcaaagagtaggacacaactgagcgactgaactgaactgattctaaattaaattaaactgaaaaaagcatgccttcaaatataaacctttgctttctttctccaaaaccgcaattctattcatctttaaatttaacccttgtatcaagttcagttccaaaaaaaaatcaattgcctccacagcctcaaaatgtacatagaggcattcattacaggcatgcctggctacctaagtgctatgagtcatgcttattttcaaagacaacactaagggaatgtcaatcaaaaaaactgtgaaaaagcatattaagaaaaacgttgaaagtgaaagtgaagttgctcagttgtgtccaactctgcaaccccatggactatagcctaccaggttccactgtccatgggattttccaggcaagaatactggagtgggttgccattgccttctccaggagatcttcccgatccagggactgaacccgggtctcccgcattgtaggaagacgcttactgtctgagccaatttaccaaatgtaaagttttaaaatttagattatcagccaacacacaaattggtaaaacaaatcatttaacataaaattttgcaaatttaagtagcatatggctatgggtttaaattaaaaatgctcattacttaggattgtaaagaaaagactgtaaaatcagaaatgtattataaaaaacatggaagtactacccaatagcctttaaaaaatcaggttttaaggggtcaatcttactctaaatcttatttattcaattacaatgtaaaactttttgtgggtatggttaatctctgctagaaacttctaataaaacttgtctataggtcaaaaaatcttcagtaacagtacacattataagtaaaaataataacactatcattccacgaaataaacatagaaactcaagctaatttcagtggtagacataaaaactggaattccttgtcttggtccattttgaaaacacccaactcttagggggtaatccaggcataattaaagtccacgctttttcaccattttggccagtgaaattactactgctttgttttcctttggatactgtcaatgacttatgaacggatgggcaaataagagaatagggaaatgaggcttactaaacaaaagtgggtaaataagtaggtgggaaaacatggactgagtggctgttacaaaggaagactgcttaccaagtgatttgtccacaagcaatacgcaccaacatttaaaaattgcatgtgttagaaaacaaacatagataccaaaggcagaagtgaaggaataaattaggagtttgggattaagagatacacactactacatataaactaggtaagtagcaagatttactgtgcacagtaaactatattcagggaactacattcagtatcttgtaataacctaacctataatggcaaagaatagatacagatatatatgtgtgtaaaactgaatcactttgctgtacacttgaaactatcacaactccgtaaatcaaataaacttcaataaaaaagaaaaacagacaaccaccatccaaaacctaaaacactggaatatagtacaaacagaatataaaataccaaatagcataaaccctgttttattctgctaaacagcaccaaaaaaa

SEQ ID NO: 51555 - DNA, 739 bp, Bovine  19866880600571
  misc_feature (1)..(1): n is a, c, g, or t
nactgatgaaaaaaccatattctaagaaacatgagtcagtcctgtgtcagtctcagcatagaacttaatttagttagtatctataaatagtttgcaaatcaccactactacctgaaagttataagaggggagtaataacccccgcacagaagtaggagttgcagcgatgagagtgtactgtcctcaggttagccttcagaggcaggatggaccaagagttgaccgccttctcttgtgagtattgtctcctgtctcaggagttttgtaattttaaaaactttattatcttgtttagttttatccattgtttgtttgtttactaatagagatttgaaatgcccacattttatttatgtggttttattttctgtcaaatgttggtagcattagtgttactgaatgttagcaacctggagtatttttcctgatccactctcctcctttattatgttgaaatttaaattacttttcatttacctagtgctatttttttgttatacataaggctgaatgaaatgtgttttcaaatttttatatagattgtgcttgctataagaaaattaaatctttgagttaacataaactaaatatgtattcaagtatataaaaaagctattgatcttattgttgcctggtgctttacaggcaacagttctctttacatttgggggtaactcttctcgggaagaaatagattttttggtggtgggaagaatttttcccgatatttttaaatgct

SEQ ID NO: 51556 - DNA, 1491 bp, Bovine  19866880715745
  misc_feature (1)..(1): n is a, c, g, or t
nccgggggtgaatgaaccttgcaagttagcgcttggcattcacctggcactttgaaaaaggccgtgaaaggaaacattaccagtgaattgatagctgcatgaccccaagggaggggaagcccagccaaggcgctctggacaggcatccaggtcagagcacaaagccttcctgggaattctcaggactgcagcaggctggagccctggcctcacatttcactccaaaggaggccatcacctaaatgggttgagatgctcctttctgcttctccgtattcagaggttcaaatacccaggaaaagagagaaaaggacaaatcagccgaattagcatctgtttactcttgggcttcactctgaagcagcactggggtatgtcaggaccggaggagtctagaagctgcttcctatgttggaaggcattcatgacttaatttcacatttttttctaagctctggattatgtaggactcctctatgtgattgttacctcggattaatatttcaaattgtgatcttactatgccttggagatggctcagatgctaaaaatctgcccacaatgctggagacctgggtttcatccctgggttgggaagatcccctggaggagggaatggcaacccactccaatattcttgtctagagaattccatggacggaggctacagtccatggggtcacaaagagcaactaaaataataaatatgcctcaaaaaagagagtttgaggagcctgttaggccaggatccgtgtcttttagagggaggtgtagagactccttcacaggtgccctgctgtggcccagatgattttgtcaactttcctcacacccagggactgagtatctctccctctttgctttttcctttttcaaaactcttcacagctactaaggaatagggtgaggataatgtacatcagggctctgccaacattcaaaaagtcttatttatttattttctgctttggccatatctcatggcgggcagcatcttagttccctgaccacggattgaacctgtgtctcctacagtggaagcacagagtcttagccactggaccaccagagaagtcccactatcaacatttaaaaatactgatttatttggctgtgcttggtcttcattgcaacgcttgaaatcttcgatcttcgctgtggcacacagcaactttagttgcaacatgtgaactcttagctgtggcatgtgtgactctaggtccctgaccagggatcgaacctgggccctctccattgggagtgcagagtcctagccactggaccaacccaggaagtcccctgctgtcaacatttttgaagaaaaggaactctttcagatgaaatctttacccaaccccagtatagaaaacaagagggtcgaggtcctctggctaacctgggaagcgggcctggttgacctcaccctctctgcccctgggaagccaacctgtcccaagtcccagaatcctgccatcacccaaatcacaattt

SEQ ID NO: 51557 - DNA, 1887 bp, Bovine  19866880811443
  misc_feature (1)..(1): n is a, c, g, or t
nccttgtccacgatcggggacctcgctgaggtgcagctgctgcagcaggctgtccaggatccgctcctcggtcagggccgcccctgggccggccaggggcagcacccagagggcccagcagagccacaggggctgcatggcactgctggggagaaggaagggcagagtggacgtgtccccggatgaggctccaggagggtcccagcagcggggtgtgctgagagccaggctgggccagctttatagcagccctgggctgggccagggtggtgggaggggggagaggctgggaggaagggagggtcacacccctcagacctcctgggagctcagcatccagacaggtccctgagcccgaggaggggggctgtctagactgtggacagatggtattattgtggtcaggtgcctctaccttggctgggattgctggaccagttaaattaaaaagcttgttccctgatgaagaggcaaggatctctaagtgctctcttccctgtccttcagtcacagagcaaactccggtccctggtgtggacttagagtcctgattcttgctacagctcctctgtgtgcacaccaacaccttggatctctggctaaggaccaattctgcctacaaggatgagcatctgagcctggtgctcaaaggactcctagggactgttgagcttctgggctgtccacaattggaaaacccaatgtttttcccagtgcttaatggggaaggggcgaccttcctagacaagggagcctggggtaatttagtaccaatgggattttgcccaataaggaacctcatcctctccttttccctggctgttcacagattcagagattggagttgaaaaaaacatccagcccgttccctccaccaatttttgagctaagaaaacaaaggctcagagaggcaacaatatccctggctcacaacagttaatgatggatgcctgcctaaagtcaagtctgattcctagcccacagctctttccacaacctccagctgtttccagccagagtccttgttcaatcctctgaagcagccaagtggactcagcccaggtgaccgggggactctatgtgggtagggggcatgtccttcaatttcctgaggcttcaccaaatgaatgtggatttgcatggtagaggagttttagtggggaattaaaacaattgggcaatcagccaggggtagggctgccagataaaatacagaacacaatttgggacatactttagcacatcatttgttgtttatctgaaattcaaatttcacctttcaccaggagtcccatatttttaattgctaaatctggcaaccctagccagaggccaaagagaaaaagccagtgtggattgggaaacttctgacaatgggctgattacccgtcaggcggggagggcagcccccaccctttgtcatgcagaagaagccaggcttcccctacttccactctcacctgtgtctggcccaacaccctgccaggtcatgttggctggagatgctttagtggccccagaggtagatcttctgtctggaaggaggaaagaggccaagggaatagagagtttgggctttcctggtggctcagatggtggtaaagaatctgtttgcaacgtggaagacccaggtttgatctctgggtcaggaagggtcaggaagattccctggaggagggcatactccattattcttgcgtggagatttccatgcacagaggaacctagcgggctacagtccatggagccgcaagagttggtcacaactgagcaactaacactttcactttcaccccgatgaaggaccagtttggacctcgcctagagctgagggtagcacggagggcaatgggctggccgtcttgaggtgggggccacagacccggc

SEQ ID NO: 51558 - DNA, 1451 bp, Bovine  19866880923304
  misc_feature (1)..(1): n is a, c, g, or t
nctttgcttgggttgtttaattgggtctcttcctgattttccctacaggatgaagaggcggtgaagaagttgacagtaaaccctggcaccaagtccaagctccccaagccagtgcagaacctcattaagatgatctttgatgtagagagtatgaagaaagccatggtggagtatgaggttattgcacttttgttatatttatgagcatttgctggggtggatgattggagtgctgagttggcaacgagttcaatggctggtcttcagcctgagacatataggagttctgtggcctggggtacctacactttcacagagaatcattggcctgttgtgaaatagatggtatgttgtccccattgcactttttcccttgaagttgccataaaggagtgtggggcatggttcttttgtggctcaaccaaataggccacttggagttgtcatggaagtccaagatggagcccatttacagtgaaagaactgctgtgaccagcagagagcttctgacacttgcttcatcagataaaattcataccagccaatcatagggtggaggggagggggaagtgatgactggaaaagtggcagggaccaccagccagggccaggtgctctctgtttgtcccctgggagatgaatgttcttgctgcctctaagcttggagccgctttgaaaaagaagcagggaccagcggagtgcaggcgttgcagattagccttgaccatcctgccccttcaccagcttgcttcctctctgcttcttccagccagccttaaagaaggcaagacaaatctgggttgtagagaccactagcagcttctcttcctcagccctgcatctccctgtcttaagcccagcctggcaggactgctggggctctgctgttgttacagtgttgggtcatgacttagacacccctaacaggtgtgaagatagctagggcttctgcagatgtcttgttcaagtagatatacaaccaggcttcttgctaggaggtctgacaggtttgaacagcttatgggcaggctcagcaagaatgcctagagaagaggtgtaccagagtgggcaggggcatcttcatttcatgaatctttcaaaagaaaggttccacataccctttctggctttctgtactctggcttctctgtgattcatagaatttctcagctgtcatcagacccagtctctctatgtgaaatgacttttttttttaaatattgttttatactctaaaaagggctttccctggtggctcagacgataaagaatccacctgcaatgtgggagacctgggttgggaagatcccctggaggaaggcatagcaaccccactccagtattcttgcctggagaacaccatcacagtggagcctgatgggctatagtccatggggttgcaaagggtcagacatgactgagcaacttagcacacatacactctaaaacag

SEQ ID NO: 51559 - DNA, 1460 bp, Bovine  19866880949184
  misc_feature (1)..(1): n is a, c, g, or t
natgggagttgtcagaaaatgacagatatgaaaaataacaactcaggtggaagcaacccaagtgtctattgacagatagatggataagcaaaatacagcatctagatgcagtgaatattattcagcctttaaaaggaagggaattctaacacatgcatatatattcggacacatataacatgagtgaaactggaaaagcattgtgccaagtaaaataagctaatcgcagaaggacaaatattgtacgattccacttataagaggtatctagaatagtcaaattcacaggcatagaaagtagagtagagattattggagctagaggaaggagggaatgaggggttattgttaatgcgcagggaatttcaattttgcaagataaaaaagttcagtagatggctgggggtgatagttgtacaacaatgtgattgaatgcactatttaatgccactgaactatcacttaaaatgatttcaatggtaaattttatgtatattttaccacaaacaaacaaaccaaccaacatctctctttagaaagtttaggaaaccctagtgacttttttttttcccaaaagacctaactcacacaaacagttcagatttcctgagtgttagaaatcaaagacagtgcttattacttctcaagcgtatcctgttttgttccattcattataggactggcttagccagtaaattatatctttatttctcactcacaaatcaacagaaattctaagcggataagtagaatttgggcatctagtgaaagtataattgtcttataacttaactctataaaatactctttgcaattcaggaaattgctagttgcttttcctacgccctgtaaaatgtctacattttcaaaaatctcagatatctttgaaccttttaaaaataagatagctattgtgctttactacatgcctgtctccaaactgatttgtcttaatagcaaataacatgatggaaccccaaattcagttatttgaaacgtctatatacattgggctgcataacaagaagtgcagataaatacttggtttaattataacatttggtccaacacccctaaccttgtttgaaggaaagatctccttattcaggggaatgacttatttaacaatgaaccattcattcccctgtgattgcaccagaagagaattaccaattcttccaagtagcttttgaaagcaagaaattagccttttgggggtaaggaaggctgggaacaggcagggggtaggaaaatggatctagattaattcaatctgggccacccaggaccaggaagccagttccaaattgtggctcagcaataaagaatccgcctggtcatgcaggagatgcggggtttgatccctgggtcgggaagatgccctggagaaggaaatggcaacccactccagtattctcttttttttcactccagtattcttgcctggagaatgccatgga

SEQ ID NO: 51560 - DNA, 1870 bp, Bovine  19866880959929
  misc_feature (1)..(1): n is a, c, g, or t
ncacttctcttaagtccttaaattcttcctgtactctttcattcaacaaaagttattgactccactagatgattggtcttccctcacagctaagttggtaaagaatctgcttgcaatgcaggagaccccagttcgacccctgggttgggaagatcccctggagaagggaaaggctacccactccagtattctggcctggggaattccaaggactgtaaagtccatagggtctcaaagagtcggacacgactgagcgactttcactttcgcttttagatgattggtccaggccaaatagcatcctcatttggttccccttcctcatatttactggagcaggaggtactggcgcagcagcagatgtcctgggcctggcattgctcaatctagatgtcagttgggacagaaagaataacccaaaaccctggaacaaactgggtcccaatgatcaatacaagttccacccaaatgtagattacagcaacctgaagatagaaggtccaaattcctaaatgaaatgtttcactataaagctgcttagaatgaaggtcttccagaagccatctgcacaatttatcacttagccaggaaatatatccccttaaatgtacaaaatcatgttggtgtattgtgttggggtttacactgattaataaataatctgaaaaatttttaaaaaggttattgagaatctgctagctgttcgacatactaaagacttggtagaaaagaaatcaaagtcccttctctccaagaacatcccttctctccaagagcagcttcccttctagtgagagagccaggggggtcaatgtgagcccgcaaaatggcaggtggtgatgagtttcttaaaacaattagagcaggataggaggatcaatggacttcccaggtggcactagtggtaaagagcctgcctgcaaatgcggagacagaggttcgattcctgggttgggaagatcccctggaggagggcatgacaacacactccaatattcttgcctggagaatcccatggacagagaagcctggcgggctgcagtctatagggtctcaaggagttggacatgactgaatcgacttagcacgcaggcatgcacacaagaggatcaaaagtgacagcgggggacttccctggtggtccagtggttaagaatccaacttccaatgcaagggatgcaggttctttctatccctgattggggaaataagatgccacatgccatggggcaactaagcccatgcaatgcaactagagaagccccttcaccccacaaggaagacccccccacagccaatttttttttttaagtgacagtcgggatgtgctgcttattctctgtttgctgccccttcctcccatacaattcctgcaccaccctccctcccagccctgttccatgccccagggactggcccatagggattctttcacccaagctcccccactctctgccttcctgttggcttgggcagaaaaaggagatgagaaagcaggaggcagtggagtgctagcaaatgtttatcagccagctcactgaagaaaaacatcctgatgtgtagcatttgcccatttctgtggtgcaaagactccaccttgagagatttcaaactagcttgatattagagcttaaaagagttgaaatacaggaggccctgaaatattaactgggttcaacacagcattgatgggagcagagggaagtgtgagagcatcttcttatctgcttcttgtcctcagccctggcaggggccgcaccatgccctacagcactgcagctcaggacagcagtgcctctcgggccactccagctccaatgagatgctgaaactcattccttcctaccaccgcttcaggcctgggactggg

SEQ ID NO: 51561 - DNA, 1168 bp, Bovine  19866880962611
  misc_feature (1)..(1): n is a, c, g, or t
ncttatatctgacactgaaaacctgctaattattaggattgtgatcccttactttgtttgtcatacttgatgaactgaaaaccatctaaatcagcaggaatcagtatgtctattttcttaaccttgagtaaatgtactgctgcattccccaccagaggacgacaggcagcccaggagatgcccctgcccccagcatggggcagctggaggagaggctggcgtcttacctgctggacctcactgaggatggagtatgcagcctggatctgccttttgctcagcttccccaagggcatcttctgaaggtcaatctgaggagacaggggggattttttccctttgaaagctgggcactgtccggcgtgatgatgggagagccggactgaacatcaccccaggccttctgggctccaaaagaagcagacacagtctgtttggccctcctaaggagacctggtgacccaattccacaggctgtgcagccctacccccagtgcagtggatgggagtctgtgagagaagactctttgttcatttacggcagagataagccaagcccccacccctgtactgggtttgaaacagtcccacacttctggaagaaaacacagcaggactctcatctaattcccaagtgaggccctccctggggtctcagagccaaggccatccccagccagaaaataaccataaagtggtgaaaattatttttaaaacgacatgctcctgaacatacatactgacatcaagctaacaatgtacccctcaaatcagtcaccctgaaggttaaacatctgtccctacaacagtgctgctcacaacaccctgggaaccagcaggaaggcagggagctggctgcagtgggagaagcatgaactctgtggccaggggtctggtcaccagctatggagcgaggcacccactccctatgggaacgacctgcctgaatgctggctaggccccctcctctatcagccccccacggggccccctgctctgaatcctgagccgctgtctctaagggttgtttccagcagaactcctgagctcctggccccgggactgcacttagcccatctttggggctagtgtctgcggggcctggaacaaagatggagctggacaagcgctcaagaagtggaactgctatctgattagatgaaatatt

SEQ ID NO: 51562 - DNA, 2036 bp, Bovine  19866880975011
  misc_feature (1)..(1): n is a, c, g, or t
naagatgaaaatatgtggagagaccaaagggaaaagttgattttagggaagaccatttcaaaagcatttgaaatttttggtagatttcaaatggtaacacttcacctgaatgtgatggtgcttaactgaaatccacacaacaaagttgtttggttaaaaagcactcttttgtatagaaacagacttagggaagatattcgaaaggtttcagaaaatatacctttttgctaactctgtgtctcctcacatataaaagacaggagtgtggaaatagaggtagtttccctgaactgtttatagaaatcagattctactgtgagaagcacattcgaacaactattgactgagatgtcttgggggagggaggcactaaagaaagggtgatgcacatgtttgtcatcttcattgtggtaatgggtctgacaggtatttgtatgttcaaactcatcaaattgtgaacttggaatatttgcagtttatttgatgttaattatacctcaataaagcgatgagaaaaagtttcctaaacacttgaaatgcagcctgtagacagcagcatcagcccagaaagcttatgagaaatgcagactcttgggcctccctcctaagtcagaatctgcagtttaacacgacccgtgagtgattctcatacacgttaaatttgacctcttacagtgaatgtctggaactcatttcccaccatgagttgttaacggaaaattatattccctactctgttttagtcactaagagcaactccctactgggcattctttgatggttacattagaaagaggtttacctgtttgctctagaggatgagcagattttcaagaattttcaatatgttaaagtccaaaccaatttttaaaagtcaataattactagtgtatcatattttacctgtccacctttctagggtgtgttctataggctttaatatttacagtgctttagaaaaaattattttctgatcacaaaagaaatgcttattatagtaaacttgggaagcagaatctgtaattctaggtagtagagttatatttaaccatctcattatcaccctcaaaagttactgaatactaaagatagactacaaaaaggtaatgtatatatgacttcttggaggcagcgccttgtattctaacatgcatattttttaaataattaaagctaaatctgaagatcccagctaagtggaaaaactcactgggcttggaatagcagaattcattttgagacatgggtttaccatagattaatgaagcttaagcttcaggatgcctaacacttgctcgggtcacttccaaagcccttggagagaccctggcaatatattcactaggtcaaatgtttctgtaaaagtttctaaattatttaagaccatcgtcacattgtattcaaacttccatcatttctcttctgcagtaaatggcgcaggaatagctactggcttttttgagacctggctaaggaaacaataattgacttagggatatatttcatttgggtttagtggcatgcattgacggtttgcagtcatttccgtctactgttaaattattattcattgtgggtgtaggactggctttctggaattcacctactgcccattatgccaactcagccagcaccatgtcacagaggtacggggctagaggcgagagctctgtgacgctgggcacaggaaatacacgggcgacagagaaacaaggtttgaaagaaaaggagaaacgagcccattaaaaaatcctccccactctcaaaagtaaacaactctttagtggagggatcaattttctcaatgcctaacctaaaatgaaggttctcattcatcaggaatctaagtaatgtcttatattcaattgtaagtgcaccgtacttatttttgtttttgtgtgaagcataaaaatggaatatattggaattcttgtatctgtagaaaacaaacttgcagttgttttaccgaaaggtatgcgtggggagtccagctgcttgccactcaaaagccagtaaacaggccaggttggtagaaa

SEQ ID NO: 51563 - DNA, 1296 bp, Bovine  19866880980367
  misc_feature (1)..(1): n is a, c, g, or t
ngcctttgttttgacttttaaaaagcacataatttattctagagatcacattatacccattctttcagtccataaacctttccatagctttggactgaaagctgagatctgaaatctgactgtctaaattttgccctgctgagttggactcagtgccttatttatttactgtatctaggtagattgtactttgaaatatctagcactagcttagatttcatagtctcacgctgggtgaatgatctaaccaaggacgagggtattaggacacaggaatgaggagtggggttacaacctcagtgcagtttttttatacaaaaatgacagttttactgagatataattcacatactataaaatccatccttttaaagtgtacaattcagtagttttagtgtattgacagacttatggtgatacagtcatcaccaatatctaattttaggatgttttcatcatcactgagtttgaagggtaacaaatttgagtcccttggtaaaatggccagaggcagagcttctgtttgaaagatttggtgagggatggaggaatctcacagactgcaagttttgaaggagtacagagatgtcagagactgcagggatgagatcaggcttcactaggaaggtgtgggattaaagaacagtaggatttcatatttggatgcaggagagcatcctttccaggaatactacataagcaaaggtttggagaggaaactgagttgagtgtttttattagccaggaacgagctactctccaagcgtcgagctccactttgtagatcgcagtcctcaccatgaagacctctttgtgcgggttcaaatttcactcagaccagtgtttctcagactgtgtgttgaaagacaggtttgtttgctttaaaatttcccaatctgtcctggacacaacacacgtgtaaaatacaataacaatgaactggtaaaaatatgaaacaagttacacaaggctgaagcttgagtttgttgattgattgattcagttgagttcctaagaacttcggcaccatttctgaccgcgggccgcactttgagagccctcttccaaagcagaggcgggcttaggaaggtgcagagtcaaccgggtggcccaggtaacaggggcggagcgggactgaacccccggtggcccggcccgcccgctgaggggccgagcccgggcggggtcagcgcagggtagtcaggggacacgcgaatcgggagcagaggaacccggagagccggagccagagggacggccaagccccaggagccagggaaccgacgaccgtaagcg

SEQ ID NO: 51564 - DNA, 804 bp, Bovine  19866880988738
  misc_feature (1)..(1): n is a, c, g, or t
ntgaccgatggaacttccgtatccccggagatgtctcaggcatatatgctgggatctttaaaattgttttaggcattggggtgagggctgggaaacatgtccatattggcttctgggcctcctttcttctgggtgtggctcaccaaccccctcatggacacagccttcctttttccattctggtttgaaaccactcaggctcctggaaggcctttcctccctctgcacaaagctgggatagtgtttgtatgtgaactgatgggtattctataccccctctgcacctgaccacacaatacctgcctgttctcaaagccccagcccaacgccattccagcttcttctcaggtttcataactgccccgtgaactgcacctggtccttcttcccctggggctgtggggttggaggctgagtagactgccacctggtttagcctctccctgctgactggggttttggagactggctcgctattgcatgagtcagagagaaccccacgtctccaggcatcttccaggagtgagtgaccgctcgctccaggcaggaggagactagaaggtctcgggctcacccctgggcagaggcaggacagctacttggggagtgcaaagatgtgcacacaggctctggcatggtgcctggagagcttcccaccatccccttgagagcccctggcctacctcccagttgagctcagctgggaggcccaggctcagctctaagcaagcctggacagaagtggccatgaagctcaccatggccaggcagctcccactgcaagcacaaacaggcctttaaaaa

SEQ ID NO: 51565 - DNA, 1811 bp, Bovine  19866881007304
  misc_feature (1)..(1): n is a, c, g, or t
natagctgaagacatgatgtaaaagtttaagtactcggttctgttaacatattaccaattaaagtcacaaaatattcctcatcattattcatgcagataactgagaaaaaagatagtgcagaaattaactttaaataaaaagttattccttccccgcctcccactccctatactctacaaaatgttttccctgggactaggccttgaaaaggccactacatattagtttaacatgcattactgtctgcaattaaaaaagctaatttttgtggtggttgtaattacgttataaaaatgtccacatgcataaatctaaaaaaggttgaaaacctacaggtaaatctacaatatattgttttacatttgaccactggtttgtgttatgtaggagtcatagatttggtaaagcattgtaacaatttaggaaggcatctaaatctttaaattctggatgaattttatgtttgaatctacaaaattgcatgaaggctaaactcgagagacctcctatcattctaaaattcctctctggacaaatcatttttaggacactttcttataaatgtcaccttttgaaagcacatacaattacatttgttccacattttatgatcttaacctacacagggctgatctcaattatccatgtaatatcaaatatgataggaagggaaaaacgacgaggggtcctgcataattttcttttaataaatagagagttaggtggtaggaagaaggaactagatgccctacttaccaccatgtacgtgtgcgtgtttgtgtgggcactcacgtgtgtgtgtatgtgtgtgtgtgtgtgtgtgtgtgtgtgcaatgcactcccttttctttgaaacttctgagattaaaataggggagcaatcctgtatgttacaatgatagcattttttgaaaatctaggaaatcaaaaattctccaggctctccatcttggtttatgcttgagttgttatgtgccatatttgctttgaaatctttgattatctgtagttttactaaaattttgaagaaataatccactgttgtctgctttctggatttcttaatcttccttcataagacagagcttgttgatagcatagttttctaaatgcaggtttgcggccatcaccacttcaaagaggtttgaatgaggaaattttttttcccccgtattaaaacagttcttgtttctgtagaaacttcatttttagattaatctgtgatggatgagctatcataattctaatatgcggttctttttctatcagatattgtcatccaccagtaaagacattaaagatgcagcaagcttataaagtactactttcttaaagaaataggaggcattcccatctttattactgtacttttggttatgcaaacactttggagatataaatgtttatgtcccccataaatctggtcagaaatcatttttgattttgttgattaagttaaacagtaggatagagtactgggtataagtggtccaaagtaagataaaagactacgctaaaaatgctagatcttgaagaagaaactggtttatgcactaaacgttttgtgccttggtctaaatattaacatgtctatgtaaaatgacaaaaagaaccagtgttgaatcacattttatttcctgtcattctgctttatcccagactgctaaatgtgttctttccaagaagtttgattgaattactgtacacatttactgtcctgtgtgacagttttgtcattgttagagatttcagtaattaaaacgggaaacagaagcttaggttattttccttatcaaaactatgttccttg

SEQ ID NO: 51566 - DNA, 1070 bp, Bovine  19866881120126
  misc_feature (1)..(1): n is a, c, g, or t
ncatggagtgtccccgccctgcccacgagtcgccgggttcgttgtctgcttgggtgacaaaagcagaaatgctcgagggagacactaaaagcacccggtccagaggctgccccgggagggtgcagagaaccagcccagtcacactgcatatcttcaagctgcaggaagtcccgacaccccaggaaaaatgtggtgtgcaagccccagcgctaggactggggggtaggctccaggtgccagacagcagggttctggctgaggcagatgtaaaggtgataatcaaataaaaccccccatcacaaagggctttaaaataagtaccaagagtatgccagctacgtatacgtacgccctcccccatggcacagggttgtgtgccagcctatatctatttattttaaaaagcaaacttttttaagttgcctgagaagcagagtgatgatggcaactcttgagagccctagagaacagttcagtggtcaaaaaacagacagtgggatcaggcaatattttcttactatttttatttcttatgaagtttacatattaatacttaattataatttataaactttaatatatggtgcattgtttaaaagataaatacatcatgtgcatttgtgcatatttagtcacttcagtcgtggccaactctttgtgacctcatgggctgcagcccaccaggctcctctgtccatgggatttcccaggcaagaatactggagtgggttgccataccttcctacaggggatcttcacgacccagggatcaaacctgcatctcctgcgtctcctgcattgcaagcagattctttaccactgagccaccagggaagcccaaatacatcatattgctataatacaatcattaaaataattatataaataccaatagtaattaattcttagagaaatattctttatttctcttgacttctttctaatatatttacttttaaattcatcacaaaataacacagatttgtgataaaatatattcacacagcactgcaggatagaaggaaaagttaaattcccttctcctacccctaactccccagtcccacctt

SEQ ID NO: 51567 - DNA, 1636 bp, Bovine  19866881167617
  misc_feature (1)..(1): n is a, c, g, or t
naatagccctatatttattaaagaaacgagctataagtttcccacaaaaaaaatcttcaggctcagatggtttcacaaattaattccataaatctaataatgaaaaagaggatagttagaactgtattattaaaaactcacctttaatagcaaaaggaataacgttcaagagtcaacattatacaggttataagcactagactataaagaaacagaaaaatcagctctgatgaaattcacttcttcttcccttttgaaggtttggcaaataaagctggatctatctgctcctttgccagtcctctgacagagaagagcctcgctgcccgctcctggagagtgcccccacacttcagtccccgggccatgagttcacacttgagcttctccaagcccagcaactccatttctgcaacagaactgattgccagtaaatctaaagtttcctgactgatatcctgagaaaaagaaaaaaaaagacagaaattttaagtaagtcgtccattcctttgtctctaattaaaactttcttcaactgtcattgacatcctatttttcaagaaatttttatttaatatgccatatcttactactgaatcctaataatcatgttattctatacatgttctcaattcaagtaaacattaatttttaatctatatacttagaaacaggtattcagaaacaacctaagtggtaagattccaaaacagataaatcttaatatgtatgaacataacttttcttttttgacttatctagtaaaaattcaaacagcaaaacctacttcacctacctcgcctaccctgtgcactatgagtggagaaaaaagcagcatcctataaaggttcattttagtgagaatcctatgcctatgactctactgatattaaccccatcatctttttaaaaaatatttatttggctgtatcaagtcttagttgtcacacatggaaccttcatcattgtggcatgagggatctagttccctgaccagggatggaatccaggcccctgtcctgggaacatggagtcttagccactgaaccaccaggggaagttccctaaccccataatcttaagctttctaatcaaataatcatgattgtcaaagttctcacttgacaaatttaaatgctgttcaagacctgtaaatgttctatcaacaaagtaactttacagacttacacaaaattaaatacttctaatgacggatgctctgccaggaatgaaagtgttcatctagggttttttgggtttttttttttttttttttttgctgcactgggtctttgttgcagcccatcagctttctccagttgtggtgccaagggcttagctgcccccaggcatgtgggttcttagttccccaaccagggactgaacccacgtccgctgcattggaagggggattcttaaccactggaccacgagggaagtccctcacctaggagttggtttttttttttagttttttaaaaaacatattcagttcagttcagtcgctcagtcgtgtctgactctttgcaacccaatggactgcagcatgccaggcttccctgtccatcaccaactcccagagcttgctcaaactcatatccatcaaatcggtgatgccatccaaccatctcatcct

SEQ ID NO: 51568 - DNA, 1194 bp, Bovine  19866881207703
  misc_feature (1)..(1): n is a, c, g, or t
nacctcccagcaaatgttctctggttaatttggagactatctgaggtgcatgtgttttaattacataaataacagtgagtacttaggacaggacaatgagcctcatagttagtagctatggtttttaattgtggtgattgcacaaactcatccagttctggggttctgtatttctctgtctctacctgtaatatggcagcaaggacatttgatgggcaagactgtttcctttctagtgcttggagatccctgaataaaatacactgtgatagttaagatgtaattagacatgtgggtggaaattagtgttcaagcacaccatgtctaagcagagtcattgtgcctgcttttttactacctgaggccaccctggtcctgtgccatagctccaggtcactgagtatacagggctgttggttagaggctgcaggttccaaaaagaaaataactggtattgaatctgaaaccgggaagctttttatagctaaaactgggccacacagttctactatagacaagtcaggcattcaccaagtatgactataacctgttcacttttcttttggaagtgtacacgatctcaatgatcaaaactataatttgaattgtacctccatcttataaaacaccaaaactttcgactagatttccggagtcatggcaggtcctccattttggattagattctccagtcatccggacccagtagcaatagaccttttccttctcagtcatcttaaaaaacacacacttctccttgggactacaaaaggcctgcaatttgtccagtttaatttttcatttgatttttggatttgcttctggatacctaaaaactcccactactgtaaatcctggctttctggatggactcccccatcccccaacgccactgactttaaatgagtttgcttcgccagcattttacattttaccttttaaaggtgatttcaagaccaacccaatggtggaaaatttaaaaccatcattataccattcattatccctccccggcccccctggcacccctaccctgagtctcccaccctttatccccctgttgcggccggaattccctttttgctaatgacgacagaaagcggtttcccgagctgcgtttcttcttccactcttgctgctgcacacgatgcctcgcgcgtctcccggcgactgcgtttccccgcgagttggccg

SEQ ID NO: 51569 - DNA, 1283 bp, Bovine  19866881335088
  misc_feature (1)..(1): n is a, c, g, or t
ntcagtagcagtgtgctttccgctggctcccatcccacgtgtcaggcactcttatcagtgtctgtccttggaccagccctggaggtttcaggaagattcatcgcccagaggcacaactctgagtgtgcctgccagagacggcaggtggcggatataaacgcctcattctcagcctggtttggggttggcagccggagtctgggattgagaggaagcacagcctgcacagattcgctcagctcctcagaagtcccactgacagcattctaaacctgtcctatgttgatagacctgattcctataaaaagttcctctagagttgaggatattttgtctcctctgaaaaagaggtgtgctttcttctctagcaccatgagaactacgtggctgtgctttctgatctgctctggctacggggagaatgtgccagttgctatcttttaggtcctcatgtcctaagctgatgttgtttctttatgtgtcctttatgagaattctgttgtgtcttcctgctggagggagttgggacagtagggggagaatggggtctggaatctcgtgcccagccctcccaagcactaacacccccatttgctggcagccctacgtgccccggattctgaacagctcgtcctcagagaaaacagccctgtctccgcagcagcagacctacggcgccatcaacaacatcagcgggactgttgcggggcagtgtctggcacagagcccggaggaccgtgtggcagccgctgaccagggggactgagggctggggaactgcagggctcgtccaggctcggggccctggggagtcaggaggtgaagagacaggtggagaggcggctggtcctcgagctcaaccaagttcaggacttctttccacctgttttaagcacagccactctaaagagaagaaagcagaaaggggctctggcccttggctgagcagggagggcgggaccgccatcaggtggggttcttttgtgcacaggtgcagccctggactctcacttgctcgcctgaggctctatttctttccaggtccccctcctcctgcacaagtgcccagctctgtggctgggatgatggccctggtgatttttagcaggatcatgtgttgaaactgtgtccctccaacccatgagcatggtgacagaatcaaggaagagggggctgcaccgtgttggaagaccttctccctctgagcatccagacactgcccacccctctccaggcacacacacataccaccgataaccaaagaggctgcagcagccacaggc

SEQ ID NO: 51570 - DNA, 1128 bp, Bovine  19866881425412
  misc_feature (1)..(1): n is a, c, g, or t
nacaagttaggcaggtatgtctcacagcagttgtgatcataaaaatcatactttaaatgtagtatagaggagctagctatttaaaaaaagcttacaatcaattattttaaaatatttttttacaaaataactttttattataaaattatattcattgtagaaaatttagaaattatagaaaagggaataaaagaaaataatgccactgtgtagagatgacttctgttaatatttgtgttcatattccctcctctatacacttgccctctacacatatatgtgtgtgtgtctatatgtatacattatgtatatgtattttgtatatataaatattttatatatattccctgtcatttttcttcactatcttttctgccctggtccccaaaacactcatatacttgcaccttagactgttgattattctctaatcctcccatacatgctggtggatttgtagcttatccactcttattcttttaaactggccttattctattcttgcagtttggtagtctgtagcatttttccatatcatcatatttttgaatcagcttcagatacatgctttttaatagctgtatagtaagaatccttaaaaaataatcacctcttattatcttttggggaatattcatgttctggactttctcaggtatacttttagggttttaaaaaaaataatcaaacctgtttttacaggagccccactgggtagactctttcctaagactgttactcccattttatagatggtgaaagatagacacccagagaggtatttctggtctggtatttttttcaaatggtaagaatattgatctgttacatatgggaaagagacttgcagaatgggccaattcaagtgtggcactcaaagattcctaaaaaatatgaaggcgccctgaagatcactgtgtaatttcatgagcaggcttctccttcagagttaattgacagttaacaataattctaatgatgctttggtgttgtcagaccttcggggttcatgctttcatgcgtgtgtgcctttttagagagcaattaataagtgttggcagtgtgcttgtgatcctcctgaaatgcttgggaaggatattgtcgttgctgtagctttgtgtattttgg

SEQ ID NO: 51571 - DNA, 1175 bp, Bovine  19866881426630
  misc_feature (1)..(1): n is a, c, g, or t
ntcataagggaaaagaaaatttttttggtatctatatgagttgatggatgttaattaaacttactgtggtaactgtttcacaatatatgtgcgacaaatcgtgcttacaccttaaacttacgtagtgccatgtgctaaatcatttcagtcgtgtccaactctgggtgaccccactgactgcagcccaccaggctcctctgtccacagggattctccaggcaagaatactggaatgggttgccatgctctcctctgggtgattttccccacatagtgctataggtcaattatatcttaataaaactggatggagggagttagaaacctcataattaaccatacttcagtctcagcctttttaaatactaatcatagggcatgctaataggtgaatctagaaaagaagttccatagtcaaataagtttgtgagatactggattaaacaaagacaacagaatttctcagggcttttatcatgttaatgaactttgaatctctaggagccagcatatgatattcgactgttcttaaatttatttgaaaatggaattcttttataacagtgcactgtagtaacctaatatttcatggaacacattttgggaagcactactctaatattaatatctgaagactgtatatgaggataaatatttattcatatatttatttatggatgcatctggtcttagttgtggcacgcaggctcagcagttgccgctcgaaggcttagttgttccatggcgtgtgggatcttagttccctgaacagagatcaaatccatgtcccccgcattggaaggcagattcttaaccactggaccaccagggaagtccctgtatatgagtttttgcatctcctattactcttcttataaggttcagaggatttcaacagtgattacagaagaaatatacattttataacttttatgaatcctttatctaacccagatagatggactgtagattttttgtaaatattcagaggaaagctctctagtaatttatggaaaatgagagaatttttgtatcatttccaaccttatctttttatccagaatggcacagattgtctgtctttcaaggctctgggtaattaaaagagaagttatgttttgaaatcaatgtcatattgtagtaacaaggaggaagttgtttatttgtacacaaag

SEQ ID NO: 51572 - DNA, 1600 bp, Bovine  19866881458829
  misc_feature (1)..(1): n is a, c, g, or t
ncactgcaggaagcttctttagccatgagctacaggggaagcccagaccacatggtatatcatttcaattaatttgattcatagtttaaaaaacaaaaataaagagacatattcaaatattgatgaagatttaagtgagacacacatacactgttaaagagaaaacaagttgtcaataaatttaacaaatttgaaaatatgcatatcctgtgaaacagcaactacactcttggtttggagacagattctcaattactgctacaggctcaagaatagagacactgcaatctccagacattgttgaggccactgccccaggtgaaatttcacacagatatgactctggggggaaaaatagctaatatttcatacatttgtaaaattttatatgagcaagaatctttaacagtatttctttgctgtatttctctaatattttaggacattttagatgaaatgagaaaagaattaactaagactaaaagaagagctcataatataattgcaatatatgagaactgattttgttatctgtgttgggaaaatcccctggaggagggaatgactacccactccagtattcttgcctggagaatcctatgaacagaagagcttcgtgggctacagtcaatggggtcacaaagagttggacacaactgagagactttcactttcatttcattatacaagaagatgatcttccaggtggcactggtggtaaagaactcacctgccaaagcaggagacaaaagagacacgggttcaatctctgggtcaagaagatctgaaggagggcatggcatcccattccagtattcttgcctggaaaattccatggacagaggagcctggctggctgaagtcccatggggttgcaaagagtgggacatgactaaaagactgagcatgcatgcaagaagatacctataagaatattcattgcagtatcacctgtcatagctaaaagctgtaaacaagccaaatattcttcaccaagaaaatgcattaataacttgtggcacagtcacacaatggaatgttaacagttaaaataaataagctggagttgcaaagttcaatatgactaaatccccaaacacagttttaaattaaaatgcattcttcagaattgtatctgtaataatgctagaaaattttaaatgtgatgtcagtattttatatttttatcactatctaacacagcaaattttcaaatactttttgggaatgatcaatgccaagatcatatagtaaaagagtgattcatcctaatgaaagtcaaggggagaagactagagaggcatgaagagaggtttttcggtctactgtatctttaacatattattttcacttaaaaaacaatagaatgaaaatgtggcaaaatattgagagttggtgaaattgggtagtcatgttttatttcatatctgaaacatttccaaagacagaaagaaaggggaagggagggaagatagagggagacaatgaaggaagctaatcttaggaagttaaaccaaagataaagggtatttatatcagaaaatttagacataaagtcagtttaactatatttatctgtattcttttaaaagttcacatt

SEQ ID NO: 51573 - DNA, 1802 bp, Bovine  19866881656675
  misc_feature (1)..(1): n is a, c, g, or t
nctttctctagtctagagtagccagtaacttacgtgctcagtgttttccgtagtgactacttagccgtggggaaaaaacgtcctaatggtattttaattcaaaatgacttagtaataaatttgtactgttcctccaaaaaatatagtttagtggaaaagataattttaaaaaacattttaaatagaagaaatatttatcaacttgtattaattaaatgaaaatgaagatcattaattttcataaatcaatttatttagaattacaaatattaagaataaaagatttatgcatttcttaattaaacataacagtttagctaaatataaactctgcactaaagttctgcagtggcacaataccaacaaagaatatggaagcatttttaaactgtacaaaaatttcaaatggaaaataatcttgtttcagttttattatacattaatataaaaagtctcattttatgagacatctaaaagaatcaaagccacttctacagctatatcttaaactccaaatctgaaaacaatttattatattttgactttataatattctatattaaaacagagaaaattccaaatacacactttttacaagattaacatcttaggcagggttttccttaaaaaaccgagaaccaaaaaagcccacaaccaaatacaaaccttttttctccattttctagcactggctattgtatttgttttccttataaaattttttttactttaaaaattgtgtaactgttggattttaaccagtaatctggttcaaaaattgtgcaaataaacaaaaaaatatgaaaatagtgtgttatcagtcttttgaaaataaatcccataacaatggcactttttgccctgaattgatgggaaaagacatgccaaatccatttgctgaaatttagcatcttgcagtaatgtttctttcctgctccttcattttctttcaacagacaaacaacaaaggtttcttttataaattatgataaattaaaatatttattattataaaatgatctatagaaccatgtcacattgcaagtatatatcatatatacttgtaaagtccgtatttcccacctatattccagtggcttcctaaaaatgaggacttcccatatctcatgatgttatcttttgaagactgaagtggtgatcaactaaatgaactggagttgtaattttctagatagaatttccacattgccatgcataatgcacaaaagaccatgtttcttcatgttctccactgcagtagttgtctgcctgggttgagttgaattcatgcacattaaaaaaatggtcaacaatattcttccatgaaattatgttatgttcagacattttcagtttaaaaatacttgctaataaacatatataacataagcagtgctactgcagctgagtaataaaagaaaaataaatataatgctggtcagcaatgctggttcaagaagcagtagagtatattaaaatgccttatttggagatttaaattttccttgttttccagcagataggttatttggtgttggaagcctatataaaggaagagaacttcacaaaaacaatgtcctatgcagttgggataattaaatcttctattcagtctctgttggtgttatttgctgcaaaggcatgtaagtttcccatctggctcaggccgctctgaatatgtgcaacatgaatttctacattattctgaaagcaactaaagaaagaagaaatatggttaactactttatctcacaaaattaaaaacagtttttctaaaaagaaaaagcgaatttcagttagga

SEQ ID NO: 51574 - DNA, 1395 bp, Bovine  19866881805775
  misc_feature (1)..(1): n is a, c, g, or t
nagagtgccattcctgaaactaaagtcgtcgacgagatcttatcacaaatgcctaaaccgcaacatatttatcacatcccctcttcagaattatgaccaacttaaggggaaatttcctacccatgcactcctatttctggatggcctttaaagcatcagaactacttataattagagagactcaatttaatagtataacatttacgtcctagcatactggaaagcatcgagaccaaatcaatatgaatataacctaaaaagccgttaaatacgcaccaaaatatgccagagctttttgcaaccagcacttttcacttccttaccagactatcctgcttttacagctatctaaggaaatgtgaatacatatgagtcgcacaaaccacctaccaaataatccaatgtcttccaaagtgaaaagctgatcctctttttctgcttgtaaattattcacaattagcctacaaagaattactgtagactactttaacaaacttttcagacctgtgtaccatgttctttatttaagctactggaaagcttcagtgtgattcccccctttctacatttaataagaaacagagctgagcaggaaaacagcttaaaagttacaaattactttttattagaaaaggaatttttaagtgaagatataatttacctttgacaggttgataactatacataatagtgatcaaacttcagagtattctttaatttttaagttttttttttttctttttggttcaatctttgaatctgacaactatacaatcattttattttaaaataattcactttcattgttttacatttttcaatgttgggaagtttacccaaagtttggaaaaacttgataaattctcgtctccaagacccctataataagcattaaaagttacagcagaaatcagcaatatattttattacaagacttaacattagcaatgctttattatagttccatagtttttaaggacatcaataacttgattcaaaaaaaaaaaaaaaaaaaaactatgttcaaaggcatggctcaagtttttcaagccatattttacaaagtatgccataattacattttgcactgatctatacttgaaaataacttgcttgtgaaatcactaaggaaaaggggtcacttacagtttttcaagccttcaaataaagctccataacttgaatcagagataaacaattcaaattcacaataagctgaaagctatatctcaaatatatatatatatatatatatatatatataaagaccaaaatgggaaagtagtgttcaatcttgataggaaaaaaaaaaaaagtttaaagtggaactacttaaatgagaaagaattccaatgacaagacattttctgccaaaacgcaggaatgtgtagatta

SEQ ID NO: 51575 - DNA, 986 bp, Bovine  19866881827497
  misc_feature (1)..(1): n is a, c, g, or t
ncctacttcctagaccagatagttttttttttggctacacaagacatatgggatcttagttccccaaccaagtattcaacctgtgccccttgccttggaagcgtggatcaccagggaagtcccaacatcaagacagctgagactgtcactggaaacatttgattttgtctagttagagaaaatacatcttagactaacaacctaaaaagctgatatcagaaatataaattccagagttggcagaatttcttgcttgctcttttataatttttcaaaatgaccttgcacatttggcttttcaacacacaaggcgcaaaagtataacagcattcagaaagcagtaaaataaactgtcaaacagacttccctggcattcataaaaattcaggcctcactcaggaagctagcttctctcacaatctttttggcctaaggtcccaccactgaaatgtttgatccctgtccaggaagttaatcaggaagcatgaggttggctgacatcagaactgctaccatttctgccaatgcacaacccagctactgaatatggaccaatggctctaccttcctcctcctcgtcgtcatcgctggactcactgacatgcacgctgacagcagtgttcggagagtctgtccattcaaaatataccccaaacccaatgtcataattgtctgtagcaaattcccaaaagagatatgatccttcttcatgggtgggtactcgaacagtgactacttctcctcggcccactgtgatcacggaatccgcatcctgccgaatcttctctttaaagtctttgatctggggtcgtgtccacatggatggagctgcgattactggaagagattctaaaggcaacaggaattacaaaggataaagaggatgagccttcacgtgtaggcagcaatctgcataggaccacctgcccagccatgagcaggcaccaagtgcaatctggtctaccttagattgaggactttaaaag

SEQ ID NO: 51576 - DNA, 1735 bp, Bovine  19866880370119
  misc_feature (1)..(1): n is a, c, g, or t
ngattctccaggcaagaacactggagtgggttgccatttccttctccaatgcatgcaagtgaaaagtgaaagtgaagtcgctcagtcgtgtccgactcttagcgaccccatggactgcagcctaccaggctcctccatccatgggattttccaggcaagtgtactggagtggggtgccattgccttctcaggaacacctttaaatgaatgacacccgcagagtagatgaccaagcagcagagcttcagcgaggcctgagatggtacatcctccttaaagggtttcaaaagcacattaaaaatgaagcataacaggggcttgtccagtggctaagagtccatgtttccaatgcagggggcccagattcgatccatggtcaggggactagattccacataccgtaactaaggattcgtatgctgcaactaagacccagagcagccaagtaaataaaataaatatattatttaaatgaagcaaaacaagataccagtataggacaagcaaaacagaccgataggtcccctggtgccgatcaagattcagtgcctttaatgaacacaggaagaaacagaggctcagagagggaaatgtgtcgaggccataaggcactttgaggaagagaaacagaacaaagtccagctccccttcagggtctgaatattaaaggcagctcagagggagacggaagaggagaatttgttgacattggcccttagatgagagcaaaggttgacatatgacaagcgatgcttgcataacttcacctcctggactttggtgtgcttacaaatatgcacccactcatccaggttcactcatgagaactaggtaggtggtgagtcttaagcatcacacggagccaaaggtgcagttataacagaactgccactggcagaagcggcggcggtgaagggcaagtatcgtcagggccttgcgcccgggtcagcagacttgacaccttccctagcacagtttgttctttaaacaaccttctgctttctgtttaaacaagtgcctgggggataaaagaaccaaaaataagaagagcatcctgactgcctcccactcattcctccgaatgtttactgagcaactgctagaggttagacggctcagcagtaaagaatctgccagttcaggagactcgggttccatccctgggtcgggaagatcccctggaggagggcacagcaacccactccagtgttcttgcctggagaatcccatggacagaggagcctggcgggctacagtccacggggtcgcaaaagaattgggcacgaccgagcgactaaacaacatcataggttagacgtgcctgtaagtgtctgctttcatcatcttctggtgaatctaacccaaggtgggctgagagtgctgtttcacatatacatcgccatgagtaaattagctggctagtgagaagctgctgtacagcacagggagctccgctcgctgctctgtgatgacctagaggggtgggatggggggaatgggggaggtcccagagggggggcatatatgtatacacacagctgattcactttactgtacagcagaaactaacacaacattgtaaagcaattatatcccaatttaaaaaaagttaacaggaatatatggcaacagacatcattatcgttttcctattttcaagctttatttcccattttattagtaagccttttgtgacaaaggatgatgcccacagatagggtagagcccctatggg

SEQ ID NO: 51577 - DNA, 1060 bp, Bovine  19866880619361
  misc_feature (1)..(1): n is a, c, g, or t
naatgccgtttttagttttgtgattcgtctgaatagagttgccaacctttttgcggccattaggatgtgaggatgaaaaggaggtctgagtaatgtttctgtgtttacattcgtgtgatttctttatgattcctagacttatgtctgttgttcatgttcagatctctccgttttaatgttcccttaggtttttgtttctgttgctggggcctgcaggcaaggcaccacagtatcacgaaattggaagatcaatagccaccctcatgacggatgaggtaacgaacacgcccctggacgcggacactgattgtgaagcatataatgcatattaaattatagactctcttaccttctttggtgattttaaagtgtattttatggatctttctcttacagtattttcctctgtgctgtcagtaatacgcagatttgaataaatcatctccttaatgtagatgtatccgtggcctccctgttgtgtatttgtttaagctcttcactgctgccttaatagagtctcatctctgtgctttttgaacctgatctgctctgactggctccttttttctgctgtttgccccgcccacttggacttcctttctgcgccttggatatgatactcgtggcggcctctggacgctgagcactgtctccacccttcaccccactccctgcatgctgcgccctcatctcagtcagattcctcctgcagcgcttcctcctctgagacaccttgctcagccaccctgttctcccccatccgtttcccttcctttaccctgcttcatctgtacaggactttttgttatccacctgcagtagtgtattcacgtaattgcccctgagttcttgagtgcagggactttgacttatctgtgttgtgcctgccagaacttccctggtggctcagtggtaaagaatccgcctaccaatgcaggagacatgggtttgttcagtccctggtccgggaagatcccacgtgctttggagcaactaagctacgactcctgactgagcattgctctagagctgggagctgtacatgctgagcctgtgtgcc

SEQ ID NO: 51578 - DNA, 881 bp, Bovine  19866880684583
  misc_feature (1)..(1): n is a, c, g, or t
natctcctttaggattgactggttggatctccttgcagtccaagggactctcaagagtcttctccaacaccacagttcaaaagcatcaattcttgggtgctcagctttcttcacagtccaactcttatatccatacatgaccactggaaaaaccattttggagagcatagaaagacatgagtcatgtaaatagacagtgtatataaacatttaagtggcagagagaggttaagagcatagatatatgtgttcaaagttaattgtttcatttcaattttctcctcaatgcaatctgtttgtggtattggagcagggagtgttaaatgaattcttaagatagcttccagttctataatcctccattttagttaaattaagtgagaaagcagaaccagtttttattgctattttataaggctatataggagattgctgttttcaaaatagttttgtaagcagcaaataaacaatcatgaaaaataagatgatattttgaaatgctttgttgtataaataaatgtaaacaggataatttctttgttgttttcaaagatgaatccaactaaattgtgaaaacaagtttatattttgaagtaggtataatgtttgttatttattttcttatagctttatcatccaaatgttgtacgctattataaaacatttctggaaagtaagtatgagttttcgtgatatttctaataaagtatctatgttatttaaatatttttttaaaaaatgttacaaaagaagcttaatcaactcttttctctaccttttctttgttatatatatgatagttgatatttttcatcactttcttgatcagtgaaacacgatagtcaaagatcaaaatatgcttataaaatacttagatctct

SEQ ID NO: 51579 - DNA, 963 bp, Bovine  19866880769548
  misc_feature (1)..(1): n is a, c, g, or t
ntttgggaacatcggaaatgctgtttgagggcaaggtcaccttgtaaacacagccaaaagccccactgccgagatgatccaaaatcgcatagttgcctatatatttcgaaggagctttattctgattaatgctttcaacattttcagcaatttgcttcagttcatcctcctaaccaaaaaatgaaaaggaaacaggtcactaggataagcacgttctaaccgcatggcagcctgccaaattagtttaaaagtcaagacttaccactaataaattcaactttgatactaattcttcataagcactgatatcacgaacataatgtcctatatcaatgaaggtctcaaacaggtcggtggggaaaagtctacagagaaaaatgcatacacatacttcatgtaggagttggaaagtctggcctgttccttcccttttggatatggtacactcgtaggtcaattacattaaatatactggccaacaaatggggggaatagtgcttaccaacttatcccacaaaaataaactagagacacatgtctcagggggtaaggaaaagtaactggaaaggaaagttccagacatctgttgcacaaccctgcgcttaaagttaggaacactggactgcacagttaacaatggaagagagtgcatctcatgctatgtgctttttgccataataaaacaaatagatatgatacagattttacagaaattttatttgtaagacatttgggggtatggtatcaaacatagtaggaatggatgcttactggatgtttactgaacacagagcactttcacaaatgccgtttgggtcagtcctcatattaacccgaggaggtaaatgttaacctaactcttgaatgttttattaaaacaaagttaaaatacagatgaataaaaatgaagatatttatgcatcatttccaagctactggtttcaagagtttaggtttattaaa

SEQ ID NO: 51580 - DNA, 1189 bp, Bovine  19866880815294
  misc_feature (1)..(1): n is a, c, g, or t
nctgatactgcaaacattcaaagtctgaaactagcctgccaactgtactctgttgtcttggtaacagaattatacatgtacatggaaaagtcttattgcctaaagcaacaggatgtttaaaaagtgtttaagctgttgactatggcaaaggctgtaggttcaacccaggaggtgaggtttgagtccaattatagacagagatacagaatttgtgctaagataacagtcattcatctattaactgacaaagtatttgtggtctggtacctatgtgcaataaactgtgccctggggaatgcaaagacggactaggcatagtctggtatgtgccagcacgaagtaataaatattaattgattaatcaatgaattttgtagaaagtcataattcaatgaccctagtttactagtacttgactgtatgtgacaaagagactgaaactcctgtctgtattaccaagttatacaggacaatttatttgtaaactgaaataaaatgttatgacttattgaattacaaccaccagtaaatatatcaactaagaccataaaatccagacaaatgctggtataggccaacccctatatcacacaaagtaatgtgtaatttactttgtgtgagttatacctcactgaagcctttaaaacaaaataatctcttatgttctcattcaagaaaaattattcaaatagaccatcacaagactgtacattcacttaagtcaatatataaaaataaaccattaaggtaatttgatttgccttttgtgacttaccaaatagaagttaaatgtaagccagaatcttatggttctgtatcttcagaacagcaagcccttgaaagcatatgagtgattgcagttaaactgcaaagtaggtcaactacttggtgaccactcagattaacaatgggagtatcccaagtgacactctatttatgaccctctgattacatgtaaagagcaaagatgtaaaatcaaatctctattctagtaaatcaaaggcataactaaaagcaaattatcttgttaatatacttgtagtttgctgggaaatgtgtatcaaaaggagattccccatgggctaccttaatatgaaaaatgccgtgctgacattgccaggtcttctaggggtctgggagagccctaggaaggctgccaggtgacatcttggtgggggagatttagaat

SEQ ID NO: 51581 - DNA, 1858 bp, Bovine  19866880921979
  misc_feature (1)..(1): n is a, c, g, or t
nctgatgtattgtaactgacagattatattatccttctttgtaaatcagcgtaattatttagttatgtacttgaattttaaaagctgatgatattcagtttgaatataaatacaaaatgtgtgacgtcaatctatatgccagctattttttaatacattgttagagataagcaaatggaagttgacgtacaatgagaaatttcaaggctgttggatccaaatttaatttgtatttgtgactcaaagtaggcagtgcctgataatcatgagggctagagtgtaatcactgggtaaatgtaatccatttgtttaattgcccagactcctcactgtatttacagttaattggttcccattataggcctcttaatagagactataaagcagcaggattagagaaacctgaaaaagaccatttaatttgtgccctctcactacagatcctcgactttccctacagcagttgagcttcaggcagtttggaaagaaatgtggttaaaaataaattggttgtggtgatcatgtaatcaaaataaggaaattactataagttaatatttttatcactgatttctaaaatttattggtaatttgcagaaatttttacattattttcggacacaacttttttacttacatttaagttttccttttgttcctctgtgtacttaatattttatttaattcattttcaactactgcggccattttatagtgaaatgggaagctgattaggctgattagataaataatggtaaggggcagtatgttgctgtgtttgttgatctagaaacatatctgcaatatattattaagtggaaagatacgttactggtggtatataaattatgatcctattaaaagcagaattatctgaaaatatttcaaggcttcatgggcaaaatgttaaattaaaactgaatgatggcagataaagacgaacaaaacaaaccaaaaagcctcaacaaaacccctttatcacggaaaatttcaaaacttgctgattaaagtttcttttgtttctttcttatagaagcagtacatccccattgacctgtaacaaatagatggccatatgtttccccagcaaagataggtttattgagaatcagcataaaattgtgattcagggtgtgcaaaaatgttgagccacagcaagggaaggagaacagtttcatagcaggcgtggggtggggacaggaagttgagagggctctggtaaacaaagggtccatggcttttcctgggcggatacctggccagccaaggggaatctttcttcttgttggattctactattgatgaagggtgtgagtgcgcccccttctggtcctctgactctattttaaactttcttatttatttacttgttatttagtctacacattcattttattactaaagataactgaggccaaataaattaaattcctatttgaggtctcatcttggttagtctaatctacagggactcaagtctataatgagaataaataacaactgctgttcagtcgtgatgtctgactctttgcaaccccatgggctgcagcacgcaagacttccctgtccttcactatctcctggagcttgctcaaactcatgttcactgagtcaatgatgccatccaaacagctcgttctctgtcaccctttctcctcccgtcttcagtctttcccagcatcagaatcttttctagtgagtcagctcttcgcatcaggtagccaaaatattggagcttcagctttagcattagtcctttaagtgaatattaagggttgatttcctttaggactgacaagtttgatttccttattacaataataaacacaaattgtcaaaatgaggtatcactgcagtt

SEQ ID NO: 51582 - DNA, 1662 bp, Bovine  19866880927250
  misc_feature (1)..(1): n is a, c, g, or t
ncgtatgtaaaacatagttactatttctggtagtaggtatgcactgttagcttcaaaatttaactggctaacattcctaccaaagcaaaaacacaaactttagaaaaatagctcatatatctaatcaaataagtgaacacagaaagcaccttgacactgttaatttgccaaactatatataataataatggacagatgaaacaagattctcctgttgtttgtactagagctgcctcccaagcatcatttgggtattcaggcccaaccacaattctgtgttcacccattgtgtgcttgagaccaatgttatctaatataagtactaccatggtgtttgagactgtggagaatcacagtgggaaggctgtgggactgccaccccgtcactaactcagcctctacctccttaacgtgggcactgagcaggaggggtggcactttcagaagcaggtcaagaggcagcaaagctgaagaaataaaagggggaaagacatgagactgtaatacaaattgcactgaatttcagggtggcatgtgtgatgttactgctgacaaagctaaattacctggtctcagtctggatcctattccaccagtgaagtctctgtaagcagaatgagaaggtttattcaacttggatttgactaacatttattgaaagcttatatcccactatggtttataaaaccatatgaaaatataggtttgtttttcctaaagatgtcctcaagagtttaataaagggagaaaagagacataattgaacccagagcagagctgacattctatgagcaatggaagaacctggttgcattacagttgttcatgagctctaagaataattataagcctaaatcttaggcttgaatgattttcttgtcacatttaaaatcaaaatacttgaattaccctggtggctcagtggtaaagaatcttcctgacatacaagagacatagttttgatatctgatccaggaagatcccacatgacttgcagcaacgaagcccttgtgccacaactattgagcctgtgctctggagcctgggaatcacaactactgagcctgtgtgccgcgaccactgaagccgatgtgctttagagcccatgctctgcaatgagagaagccattgcagtgagaagcctgtgcaccgcaactagagagcagccccagctcgccccaactagagataagcccgcacagcaaggaagactcagaacagccaaaaatagattaaaaaataaaataaaaaatacttattttgtatgaaaaagaaatagcatttaaaattttatatgtagtatgttccatgctttattcctgctgtcttaaagaagaaactataactcttcctatgaaatgagataatttttacatttaagaagattatatttttccttattttctcagcattattaccatcacttttttgccctattctaaaacttaggatttccttatcattatgcaagttcgtctcaggacctttcccccagtggaagagtcattagaccctactgaggacagccataaataaccttcaatcttgttttatctactagaatctagagagacaagttcataacatttttttttttaagaaataagaaatatctatcagatcagatcagatcagtcgctcagtcatgtccaacgtctgcga

SEQ ID NO: 51583 - DNA, 1275 bp, Bovine  19866880983894
  misc_feature (1)..(1): n is a, c, g, or t
naaaaataaatatttgattagtaagaaccatgtacctcacttccaagagaccatttcattataaacacagtctccatggtgctcctaacaaacttcagacactacttcaaaaaaaaaaaaaaaccaaaaacccagtagtcacgcataaggggcatgacatacaatattgttatatatagcaacacaaaacacacacattatatacacacacacatatatgtatatgtatctaatctatctgtatatataattcttcttggttcaaatctataatgaagtttcagcatccaggtatttctttcttggttcatcttcaaaatttattttcacacttacaggtttttcagggctatttaaaacaaagaatgagaataagtaattttgaaatggtcaaatattacattcacacatggccaacagtaaatatccataatacctttgagatggctattcatactataaacataccagctgccattactatcttactgctttcttttcatatcagtaaactttgatgcccaaaggcaaatattaaaaagtcttagctttttaatatatatttttgccactgaaattcacattttcttataactcaaaagttattggttagggtatgaagactacgcctgacttaatagctttactttatatatgaacagttgtaacacttgacttttactgacaaacatttaatcaaatttaaataatttaaacaactatttaaatatttaatattttaaaaattatttaacctttgtcagtataaataaacatcagataatttcctgcaaaatggaacaaatttccaaaccttatctccccaaagttcacaaatacaagattctacattttcagttaatatcaaaaacaatgattctgtatacatgaatttaactgattaattataataagaatatctgggctttgaacatttttcaaaatatagaaacatgctatggtttgctgccttctccagacaaaactgaagaagacacctcaaacattcttctgttgaacaacataacaaaacattctctttcctcctaagctattttgaattgaggggcaacctgaatgaaaggcagaagtacttacaaaagacaaaataatattagtctaaggtctttatactaacattgtgggccaggggtgctgacaggagttgaaaattactaaaaattactaaaagagtatctagtgaaatttgggctgcatgaaataatccaaaatgacaaaaagtttaactttaaaacttttgagatcatatatata

SEQ ID NO: 51584 - DNA, 1360 bp, Bovine  19866881008283
  misc_feature (1)..(1): n is a, c, g, or t
naacatgacgtgtgagcgcggccccgggaggcagcggcagggaagaggggacgctctgaatacttaggagggtccccacacagctatgggtttgagagcccatgccaactgttatgctcagtggcaaaatgtacccagaggggagattttagatcaggattcttatcttgaaaagcccaatttcatgtttaaaaagactttcattgagcacaagcttaggtttatttagcgtaagagagacttctataaaagcaagtgaagtgaaagtcgctcagtcttgtccaactctttgcgaccccattgactatagagtccatggaattctccaggccaaaatactggagtgggtagcctttcccttctccaggggatcttcccaacccagggatccaactcaggtctccggcattgcaggcagaccagttgagccacaggggaagcctatgaaagcaacttttggtaaaaatatgttttgcatgcatgctaagttgcttcagttgtgcccaactctttgtggccctgtggactgtagcctgccaggcccccctgtccacgggattctccaggcaagaatactggagtgggttgcagtggccttctccaggggatcttcccaacccagggatcaaacccctgtttcttaggtctcctgcattggcaggtgtttttttttttttttttttaacagctagtgctacctgggaagcttaagcactcctccgctgtaagcttcaaatccctcattgaaatatctcatttctttttagatatttttcaaaaacttgctgctgtcagagaccaaagagaatgggtcaccacaagcggagctcacaaggtgagtggtcccagaggagttcctgcttcagtgtcatggggtgatgattcatgtgcggggtccagagcacttgtagtcaagccaccccacccgtaattataattcgaaaacttgctgacctagcctagaactgccaatctctgctaacccacctaaagaataaatttagaaacagcaaatagagattttctgaaacttctttttttatgctgtttaattctttattgcttaatcaactaatttgattgcctaatttaaatgttgttatacataaactgaccccaggtgtgtggttacaaataaaagaatattagtttggcacaaaagtcatgttagtttgaaccatagggaattaccatggtctgtaggtcagtttcatgtggtttaatctcataataagatggtttagtacctgtgagtcaaatacatatttcaagatgaatgaatgcaggcttaatcaaaacacactacatttatatttatagcaaagccatttagatggtagctgcctagagccaggtttca

SEQ ID NO: 51585 - DNA, 2151 bp, Bovine  19866881167693
  misc_feature (1)..(1): n is a, c, g, or t
ntgtaaaagatttaatagtagtttctccatagggagataggtgattttatttagatatttttttgcttatccataagttctatgttttaaaaatattgcttgtgtatcagcaaaaaaaaggcggggggtggggtgggaaattatgtgctgtatttaagcatggagcgcagtcactagcctttctcctttacaaaggcagacttgtaaaatggatctcaatagatgagaaggtgctggttgggtgagtgaaggggtggagtggacacgcatggctcctactccagagcggatgagcatacacagagaacagcatggacacagctcgaaggcctggcagcttagagcgtgctttgcttagggcaggtgtgtgggggtgaaggaggagggggagtgccttgggagaggggccctggtgggtacgaaggggtctcattctgcaggatcttatatggcacaccagagggcaagtgttccccgagacactggaataataaaatcagagtcagaggaagcctttgcagctgttgaagctcatcccttttttcaagtcattagaaaaggaagtaaaatatgacgtttgccttcaagctgacttcagggctctcacccagaatgatcgtcagaccctcagagaatttgtggtggtgtctgtgggctggcagacagagctgccactgagaacacacaggtgtggggatgactgcctctcagggagcacagaggcccgaccttgtgccagaacaggacaagtccaccgtctactggacgtgcagcctgttaggtcatcagagggttttaaagaatttttacagaaattctctcaagacacacacaggttccccacttctcatagccgcttgctttctcaccaggctcctttgtgtcgtcttgttatctgcctgactttcccaggccgttttgtttgcgacccttctatatttaggtcactgattttatgagatgattccagacttgaattcagcagacgctagtcacccttgtggtggcctcgggtacaggtatagctgcaggcccagggctctcttgctctcttttctcagcactgcagaatttccagtgtttatttttatctggtgaaccctcacaggcctcttctgagtgttctcgggagtgactgtagatggttctatctggggactgccttagactttactcaagaaaccaatttgtcaagttggagtccactgtgcctgtggatatttttatatgccatcatttctagggtttattttctcacgaaaactatataaatattgaggcatatgtagcaggctagaaacaaaataaacctcgagctcctggaagtcttgtgccatttggttttctcggcacaggagttttatttcttgtctctgtgctccttttgtacgttctagaaaggaactaacgacaggcaccgaatcaaacaaggcccagactgcaagccttccacagggcaaatgctttttaaacacaagaactctggtgtttctgtcccctgttttcagttatgagctgtggctcctgcagccaccagccacgctcactgtacagccacgttagtgtccgcttcgtgatcattctatcctgaaaacgttttacttccttgagctaccatttgagaatcacatatccttctattttccagtgttacgcattcagagccttgaggtttctcttcagtatggaaagaaacagaccactgtttaaaaggtatgagcttagagaaattcgggtgacctgtgatctttaggttcaactgttttcacaggcctactttgtatgcaaacagtaagaaaagaaaaagtcaaaatgcaaaacatgtgtcctcagatttcttaaaatccacagataaagcaagtcagccctaaatgatatcttaacaccgaaagtttgcagagtgacgaggaagcacacgaatcaaatcagtacacctcttttcattacctgtgactgctgcagtgtttagtttttctctcttttttaagacattaacttttaaagcaatgaaataaaaacatgtgcttgtttttgccccttcagaaatgtccgaagttgatctagacatttccttttttaaaaaattgtggctgtgctgggtctttgttgctgtgcgcaggctttctctagttgaggggagcagggactgct

SEQ ID NO: 51586 - DNA, 977 bp, Bovine  19866881250350
  misc_feature (1)..(1): n is a, c, g, or t
ncatatgctgttctttcaggttcaaattctgcactaccccataaagagagaagaaactaatgttcaccccctccaactcaaagaaacaaatcttgggacacattctgaaaattaccttcaacttgtgctcctttctgttgatgatgaccgctgtaatctgctgatccatgaagatgaggatggtgcaaagcagagctggaatggcagctattaataaggtccaccaagggttctctcccagggggcttatgatccagcccctacttttatcagtaggctgttaaaacatcgaaaaattcaaaggaagaaagaaaagttttcttataacagcacagactgtgtctaccctcaagaaatgccaaggggttggaaagaactggacactggactctgtcgtgaattatctgcagagacgctagtggggattttcttgtccccgaggcaggtccctgcgcacgtgactgagccactctctccatctggaggtagaatttgcgttctccccttggacccgggaacaaggccatggtgaccctgtgatcctgcatcttgacctgggaagaccttgctgctgcttttctagcctcctggagccccggggttaagctcttgagtaagcctggatgagctttcttgaggatgagacacaggatgatgagacaggggtaggaggcagctaccagtcccttcattcagccctctgtgctgagctcccagacatgcccccaccaaggcagtaaagatagcagacacccaaagatcccacagcaggagaccagatcaccccacctcagcctagggccaacgccacagatttaggaacaaaaagaactgttgtttaaggatatgatgttttaggagatttgttatgcagaaataggtaagtgaagcagagtttcattcccacacacgcctatccactccatataaagtgaagtcagacaatctactaggtcaactcttaaaactattaataa

SEQ ID NO: 51587 - DNA, 1096 bp, Bovine  19866881451706
  misc_feature (1)..(1): n is a, c, g, or t
ncgagctgagcttagtgtaaattcaaattgaatttttgaagttatataactaatttagatgacttggcttaatcatgtgaccttattaatctgtagtaatcactttcttcctctcgtccattgtctctctctctttgtctcatttatcttaggttagaaagcgcagtggtcaaaatctgttagcaatgaaagaggtcaacttacaataacccagcatttggaaaagataaaaaagaccgagacagcagtgtaaggaatattgtttctgaattaaccataattaaagagcaggtaaatggttttgcttacaaagatgttttccttaaataaatgtcatccaaaaagtagagttcatgtgctgttcctgtctacgctgtgtaggaactagttctgtttaaaataatcggccctgaggtgatatcaatcaccaggttttctcctaaggcttgacattgaaccacagacagtatatggggttataaccacatcagggccaggaatgcagaacaattgagttcacagcccagaatgcataatgtatgagaaagcatatccacttccttcttattatgttgaagtatatttcgttacttcattatgtgcataatagtatgactaagacttcccagacttttgtcaaatgaaaccaagttgttgacattcctcaaatatggattatttaatctaaactgtggattttcaagttgggttattatttattggcatgagcagaatattctaacatagtgttaaccactcaagtatcatgaagatctgtttaggagaaagaataagcatgtcagagagaaatgggatttctctttgtcatcagtgaacacactggcttctttttcaactttctttgtttatgttcactgtgaatgctgtttgtctgtaactcctggggagacctgtcagttcatggctgtttgttgttgttcagtccctgtcctcacgatctctcctggagtttgctcacactcatgtccattgaggtagtgatgccatctaaacatttcatcctctgttgtccccttctcctccggcctcagtctttcccagaatcagggtcttttccagtagtcagctcttcgca

SEQ ID NO: 51588 - DNA, 2232 bp, Bovine  19866881758265
  misc_feature (1)..(1): n is a, c, g, or t
ntagtttgtgagtttcggtgtcccaggaagccctattcggcaagtattagggaaaagttgtctaaaagtgttagcacatgctactcattttatggaggttgattcttagtgatataaaggttagcgttttttatttcaaaagctatatatttcactaatatcagaatttgaagaacatttttgagtaacattaagttagtgttaagggtgccatgtgacaaaaattgtgaaatgatacatcagtgactggagcctgggaaacattgtgtcggaagacagaaaggagggactactctggtggtccgtggttaggattctgaactttcacggcaggggctgcaggttcaatccctattcagggaactaagatcccatataccatgcaccttggggggaaaaaaaaagaaaggaaaaagtgagaggaaaaaaagaggatgggatctgagaaacaaagataatgctagcgccatgtaaagtgcatgaggtcacaaaggggaaagttcacatagtggaaacccaaaatcagccttgcaattgtacaggctgcagctctggcctgaagtgtgtctgagtgtacacgctgggggactctgaaaatgtaataggaacaggagtaatagtaataggaatcctgagaaggtgactgttgagatacagggagctcgtccaaagagtggtggacgcctgccgcagaaacaactgagaattgtgaatgtttaacaaaccttcttttttgaggttaagtatctatgatctttagaaggaaacatactgtccaagaagcttgtacttttacataattaaactttattttactctgtttttcagacattagtgaatttactcagtgcccgagatacgaatgttctgctgggtgctcttctggctctggctagtttagctgaaaggtgagcgcatttttaaaagttgtgctgctgtagcaactcagataggagaaatgcaaaatttattttgttacctacttagttaagatttgtgaataaaaacatgaaatgccatcaatatattgaagaggaacgggatggaaatgcatcattttagaatttaagttggaagagcaaagcagttaaaaatttttttctgaccagaaatatttacctactcttttcattcaaccctcacttatttctactttcaaattgcacatttctttgacagttgaatctccctgactgtctttcttcattctgtcctctatgtttaagacttttaaatatttttgcactttaaaaaactctagataaccctttcagagattatgactattttaaataaaaaacttgaagtatgtttttatgccagtcatttgatcacggttttttttttttttcccagctttattgaggaataattacacatgtaattttatgtatttcaagtgtataatgtaaagatttgatacacatatacactgtgggctgattaccaagaccaagataattaacacctcttcacctctctctttggttctgtgataagaacatgtaaattcttctctcagcaactttcacgtgcacggccctgtgttactaactgtggttgccaagtagttgggtctttagtgcacagtcttctcatacccgaaagtgtgtgcactttaacccacatctccctgttcctgctgcttccggcccctagtaaacacctgctattctgttctctgtttctatatagtcagttttgcttattttcaatttcacatgtaagcgatgccatatggtagttgcccttctctgtttggcttatttcatttaacagaatgtcctctaggttcatccacattatcaacaatgacagcatgtttttatggctgaataatattcagtcatgcacccaattatattcacttgtaactatgtataaatattcaattatcacatttctctatttcatctgtcaaaggacctgtagcttgtttgtgtttcttggatattgtgagtaatgctcctcactgctttttagtgaacaccctatgaatccccctctccagtggggactgtgttaatcatcatactgttactgaacaaatttaagtttatgacgtataatacttactgaatgttggcatttaatgtagccccgctctatagagccatattgcattttgcttctcctcctgggataatatgaggactaagatattaaacatgtgacatttctcatagttactaatacttttcaatttttagtccagagtgtagggagaagata

SEQ ID NO: 51589 - DNA, 750 bp, Bovine  19866881801742
  misc_feature (1)..(1): n is a, c, g, or t
ngttctggaaagtttctagattaaaaataaatgtatctggggctcaaacacaagcctaaggaattttagtccttggcttcttccatgggcccatccttttgagaattcacagttcttaggctgaaggagacagttagtgtgacacaggcactggaaacctgaaatgctttcttcaaggtttaaatcaatgataaagacatgtccagtcatcttaaaatgactctcgacctctacaggccacaattcacatatactactgtgcagctttaagcatcttcctcctgtgaaatctttaggattccaaggtatttacttaagaattaagtagactttaaataagctttctaagaaatatttgggatgaaaattccaggcagccaaattacttctatgctcagccatatggaaaacaattccatctgaagtcacttggaagataataccaggaaatcattttcagcattgctgctgctgctgctaagttgcttcagtcgtgtccgactcctagtgaccccatggactgcagcctaccaggctcctccatccatgggattttccaggcaagagtactggagtggggtgccttctctgcattttcagcattacaaggcatattaagaagttcagttgaagtaatctactagcttgaataaaagaactacagaatgcttaagactatctacattgcctcctaacagcactgatgagacatttattaagtgagtaaccatcaaatcttccttcattaca

SEQ ID NO: 51590 - DNA, 2504 bp, Bovine  19866881932488
  misc_feature (1)..(1): n is a, c, g, or t
ncagattggttattgcaatgttacttttcccaaagaggatggagggttttatcaggctgcttacctaactagtgctaatcaggagattcctgattggctagtttaagtttccatcttggggagagctgaaattgtaatttagtttggttgaccccagggttagcatgaatgactattttgattgtgagcccattgtcttgttttaaacaggatgctcaagtgagttcagggactgtgcaaggctgacccagttctggcagaagagattatggctgtagttgtcccacgtggggatttagcctgaaagttttaggcattctggaaatccaaggatattttgtgtgttgcccttgacactgtaatgcattggcaagtgcagtgcatttggtggagctttctctggaatttttagggacatgacccacaatgggttctcaaggcaagaatactaaaagtggtttgccattcccttctccggtactttggccacctgatgcgaagagttgactcattggaaaagactctgatgctgggagggattgggggcaggaggaaaaggggacaacacaggatgagatggctggatggcatcaccgactcgatggacgtgagtttgagtgaactccgggagttggtgatggacagggaggctttggcgtgctgtgattcatggggttgcaaagagtcggacatgactgagcggctgaactgaactgacccacgatgagagaggagctccctaaactagcagtgtgctgttaaggaaacttaccgagaaagacaagtaagatggcataaaagtgtcggtgggacttcaggtatttgcttataaatattttggaaaccccaaatatggacacttttcctggcaagcagaaaagtacttgttgggggtaatgagtcagaatatttgaaatcaagaatgactcagaaaatataggctcagttactactataattgacttcccttgtggctcagacaataaagtatctgcctacaatgtgggagaccccggttcggtcccttggtcaggaagatcctctggagaaggaaatggcaacccactccaggactcttgtctggaaaatcccatggagagaggagcctggtaggctacagtccatggggtcgcaaagagttggacacgactgagcaactcactttcacttttcactactataattataaactatgccctaaatgtatccagaggcctttgaatgataaatagtaaatgttactcatattagcatttttattattgtattagaagtaaatgttagtttgtgcatatttaaataaatgttttaagtggatttgcattaattgagaatattttggagcacacaagccaactaaagtttttccttccagtttactttgaaaggaatgcgatgttaattctggggcattgatggtttacaatgcctgatcaagacaaaaaagtgaaggccactgaaaaatcaactgataaaaaacagcaaggagtcaccatcaggtaacaccatactgagtttttgcttattattaactcaagcagtgaccagcaaccacagtgtagatccttgacaactcctactctggggtagagtctccactgaaatgtttgccctttttaaccctctccagtattcttgcctggagaatcccatagtcggaggagcctggtaggctacagtccatggtgtcgcaaaaagtcagacacgactgagcgacttcactcactaaagagatgtttgggtttgtatatgtttcagtctataaaagcaggcctccaagtggcaggggtccatgttactagtgggtagcacaactggttcacccagagtcttctgtcggttgacactgtgttattctttctcctagggactattcagatcttaaaagacttctgtgccttttgaacgttcaatcaagcaagcaacaggtagtgttttcaaagaatgcacgtccattaatgacagagaaatcatgtttccaaaggatccattgaacatcttatgacgatacatctattttcctttgttctttcacgtgtttcatctttcttccagttgtttctctcatacctggttcagggtcaggaagcaggactatgcatccacagcctttttatttctctgctctcatgcctggtgctaacctgcaaaacacatcaatatagaaaggatacgttcttctattgaatgctcagtgtctgaccctgcagagctctaggggagttgatttctccaaaacactgtacatcccgttttccttctccccttccctgcttttcaggctgcccaactgctatagcacccctcttgatgctggctgcaaagtatatctcaccaaaaacaggggaaatgaaggagtgagttttgactatttttataatagctttttttttttttttaatggaaagaatggtactgccacttgaatttatctctagatgtttttttggtttagcttctgtaagacttggagaggcgtagattagaggctatccgtaaggctg

SEQ ID NO: 51591 - DNA, 1844 bp, Bovine  19866880444848
  misc_feature (1)..(1): n is a, c, g, or t
ntctcctgcattgtaggcaaattcaataggcatataattagcatgcaataaatatttactcaacacttatttacactgttctgggtgtttgaacaagatacacaaaggtgcttgtcttcttgaatcctctattataactataatatgtacaaatttctagtatatggagctttcctccctcctaaggtttaaggctaacttccttatttgtaaattagtggtaagaaaaccagcggtaaaaatagatgggaaagtgtttgagaaaatacgaggcactgttaattattatgttaatcagtttaagggaatcggtaaacttgctctttccacccctcacaaacgcccctttacaattttctcaatttcttttccaagggccccgggccaaaatggaggaggctggactgcatctcccagcgcgccgggagggggcgctctgtgcgcctgcgctgtcaggcgccctctctgcctcctgggagttggagtcagtcttttcctcagcccgcccagtttgctaccttccccgcctccgcgcctaaccgtgctgcctattgggagatgtagtccggggcctcccggactccaattcccagcgggcttcggggcgggaacccggaaggggaggctagagaggagcgagtgggggaaacccgcgtagccgagggagctgcagcgcggggtgatggtgagaacctcgaaccggggccgggggcgcttgagaacccgtgcgggaattcgggacccggtagcgagagggaagaggcaggggctaaagaaggggctggatgagggggagatcgcttgggggaggggattgggagacgggagccggagggaattgtagaatgggggctggggatgggtcttgaaggtggggagagactcgagctttgggattgattgtaaggaagctcagagttggggaaaggagtcccgagttggagaagggagttggcgtccaggcagaggcccagaagggggcaatttcgagggttttagccgggaggatgtggaaaggcatgggagtcagtgctagatgaatgagagggtctggaggctccgagggagaggccagttctgaaagcggtgggttggagcctctggatcggattgtgggcaggagggcaagctgagatggtgaaagaaagaaatcagtggtagagtggtgtgtaggttaggatccaggactgtgggtacggtggggagcaagagattaggggcctgcctgtagcgatagtttgcttagtccagccagaaactcccgataaaccggacagccacatagggtaatatggccagaagaggccatagagacgacttctgcactcttatttctccagtgggatttagaaaagtgtggtggtttatgtgtatgggcagtccggcattcagatcttttcttcactcctttatgatctgggcaagtgtcctgtctctgaaactcagtgcccttatctattgtgggaacaacatgccactgagaagagaggagtcttcataagatcgtcctcctggctcagggtaagtccttagtctcagagcagttggtgggaagttccccaccccaggaatgtgacttggtcacaggtgctaatggattccctccttttcagtggagccccaggggtgttttctcaaaacgtggcactgatctgggcacatcccaggtcagaaacatgcgggggcagggagagggtttccccacagccattccaattccagttaacacttattttttaggaagtgcctggccttgttcttagctatttgtatgtgctaactcctttaattctgacgacacccctaagttgtaggtgctgttattagctctgttctacagtaag

SEQ ID NO: 51592 - DNA, 1612 bp, Bovine  19866880610396
  misc_feature (1)..(1): n is a, c, g, or t
ntgtgagcgagtgctgcgtgcgcccgtgtgtctcggcgtcaggggcttgttgctgggtttccgtgggtgtttgtgtcgcggtgtctgcatgtgtgtccctgtgctgccttcgtctgcagtgtgtctgcctgtgttctcagtctctgtgttttgtcgccgcgtctctgagctcactgtgtttgcccactgctgtgtcctggtgcctgtcaccatgtctattacagcgtgtctctgtcactggcttctgtgggtctgtttatgtctcggacgctctgggtctgcctatatctgtccctgtgtgtcactgtgtctgtccccctatgtgtcaccatctacccaggtgtcccgtgggttttactcaccacccaggccacaggtgggcgtgtcaggcccactggtgcccagagctgcagcccaagcccatcccaccctcgccctgccatgggccaggctgggcgcctgtttgcaatgcctgccccaggtaaacaccaagatccggaacgcaagggccacctccctcacctccgctccctgccccttagcctgccctggactgggctggcccagagccccacaggcggtgcccctaaactggagatgtgccctgacccttcccccacccacggtcccccaccttcccaagcccccagccttggcctttgcctgcttgcttctctttgtcaacccctggctgtctgctggcctctctgcttctttctgtccctacttcctctcacctgcatttctctgtggttcattctctggaatgacccttgtcttcattctgtcccatctaccttggactttttctgtcttttctcagggaaatctgatctctctcctttcctgatctgtctctgattgagcccaccgactctctctggcacctggtttttaactcggggccacgatctgccagtctcttcctgtttctctcgaaccttgtaagtccctctcgaaccttgtaagtccctctcacccggaaccgctcagtcttggtcactgtctctgacgccccagaccccacaggagcaaacctctgctctaccagggtccttagggggggactgtgtggcccctagccttccaccccagctcactggtagatatatatatatatatataaaggtatatgtacatattatttatatctgtacccaggggcaggaggggcagacactggagcctttgtgtagccgctgcccgctgcctgcctgcccgccactcctctctcttcgtccctgcgcccgcccgcccttactccccccgcacagaaaggttcctgtggggcctgccagcttcctctgcctgaggtgtgagtgggcacgccacagggcaaggcgggcaggggggactgggggatttttccagctcctgggaaggtttccgggtggggaggcctctggaaggaatgggacttctcagctgggctgccgtctgtctgtctgtgtctgtctgtctgctgtccctgggcgtcctgggtccttaacctggcttctccctgggagtttgtccatccagctaatgtcattctgactcttttctctgtcaatctgcctcttattccctcctgcacacactgtcactggggcgtctatactaggccctctgt

SEQ ID NO: 51593 - DNA, 1373 bp, Bovine  19866880743873
  misc_feature (1)..(1): n is a, c, g, or t
natgctgggactcctgcagtctccccagggctgaggcatcctcatctcaaggtgacaggaagggaggaagatgccagctgacattgctggatgtggctgagaacagcatccactgtgacatctcaagttggtctctttcctctccactaacttggccagtcatttacacaccactgatcaggcgcctcccagcgtcctggacacagtcctaggagccggggattggaccatggacaagagaggtgccgtctcttggcctctttcccagtttgctcttccctttagtctcggctgtgggtgtaaggcaggggacagaatcagtgcggccctcacgcgagggctgcagttcacagaactgggggcaagagccaggcctcctcctgagcctcccttccttgaagcagccagccaaatgctcctgtgagccagcttcaaaggtgtgacacccccagaagacacaggcaggactggaaggcgaggcctcggggcatcctcttcctctgcccattcattcagcccttcctcccagagcctatcctctgggccaggccacgggcatggtgctagtgacactccggtgatcccatacgctcacttcctggggtcacccatgagtggtgggtgttccagatcgtctgttaatcttgtgaccttgggcaagtttctttagagctcagtgcctccatttactgaactataaatgggcattggacttctggtggctcagacagtaaagcgtctgcctacaatgcgggagacccggtttcaatccctgggtggggaagatcccctggagaaggaaatggcaacccactccagtattcttgcctggaaaatcccatggacagaggagcctggtaggctacagtctgtggggtcgcagagtcggatacgactgagcgacttcactttcactttcaaatggctattataataaccatatcctttggcaaaggggtgctgagtagtatgtaaaatgattaaaactgtgctggcatggtaagtactatacacttgtttgctaccatcatcttcatcatcattattgcacttaaatattttatcttctttagagcttctaatcggagaaggcaatggcaccccactccagtactcttgcctggaaaatcctatggatgggaggagtctggtgggcctgcagtccatgggtcgctaagagtcggacgcgactgagcgacttcactttcacttttccctttcatgcattggagaaggaaatggcgacccactccagtattcttgcctggagaatcccagggacgggggagcctggtgggctgccatctatggggtcgcacagagttggacacgactgaagtgacttagcagcagcagcagcagcagcagagctt

SEQ ID NO: 51594 - DNA, 865 bp, Bovine  19866880796831
  misc_feature (1)..(1): n is a, c, g, or t
ntcctacagtagacatatttgcgggggctgttattcaccctccttacacagtaagagtggaaacaggaaaacctatctcccatgaccttcatctgggagtcaaccaacagctacgatgcagaagacactccttaaccggccgcggggcatctctagctatggttaccgtggccgagactgcagagccaacctttacctgctgcccacgggggagatagtgtacttcgtggcctccgtggccgttctgtacagtgtggaggagcagaggcagcggcattacctgggacacaacgatgacatcaagtggtgaggccagggcggaggatgccaaatatctcccgcacagggcatcaagggggaggcggggggccaggtcttcacttggcctgaattcaggcagaattcagggggaaaaacatcgtggattaactatcagtacttcagatgtcggtgaattcactccgatacctggatttttcacttcttttgaaaacttcaagcaggcacaccagacacagtgtgttggaatcccgtggtggcagccaccctttcgatgggtgtgttctcttggccatttgtggttcacgcttgagccctgtgggcccctgagttagagaccagaggtctgagtcttgcttctgagccagggtacccagagagtgttccctaattgttactgaagaattaaatcaatgttcattgactaactcaggggtccccaacctccaggatctaatccctgatgatctgagatggatctgatgtaataataatagaaataaagtgcacaacacctgtagcgcgcttaaattatccccaaaccatctccctcttccccatctgaagaatcgttttcttccacgaa

SEQ ID NO: 51595 - DNA, 1093 bp, Bovine  19866880822361
  misc_feature (1)..(1): n is a, c, g, or t
ncatgatctcagcccgttgccctcaccccaggttctgattctgcccagtttaccctctggccaagccctcaaattcctttcacgccggttcctctgactaccccatttcctgcagaaactcctcttagagccctgacctggctgcctccccgagactaaatgtggactctgcctttaccttaatagccacgcccacaatcctggatcctccctaacttctactcgggctcttccgagagactctgaccatccacgcctcctacgcgctagtccagcctctaaagctttgaccacgcccctcaatgttggctccgccttctcgtgcctttcactattaccactctgtctcaagattggtccctccgatcctcctgcaccgtttccgctttctgaactagatgatcatgctttaggttactacctcgtggcctggggcatcaccctaatctccccatcgttttccaagcctaactgaggttttggtcccaccctttgcggtacgaccccgctttggacacttacccttcctttttggcgctgcagttgctgctagaggatgtggtgcggctgcggggatcctcgcggcgcaccgaggcgaggcgctctggtgacaagtagcgccgggcactgctaatagagagcacacagttagggtcagaacctgcgaagccagcaggcgagtgccggaggcgggcgagaactttacaggacattcccctgctgatgttcagacacccgagtccatcccttttcatataaacagcctccgaggtcttggaagaggctggggatcccgacttccgcgcctcacctgcgcccagaggtcgcctcctttttgggggaggatggagacgtggcatagccgcccacgcgccgcggaggtcccgagccattgaggggcgtcctggtgggaagacctttcaggagctgacacactagatagatggagttagaggacagaagaggatgagtttgaagtacaggccccagcccctaccacctcacccctctagtctagtgaagataccggaggcagtggtgcctaggcgaggaggagcccggcccttgggggtgccccgcgcgcgcagcgctg

SEQ ID NO: 51596 - DNA, 1477 bp, Bovine  19866880885675
  misc_feature (1)..(1): n is a, c, g, or t
nacatttcgctgatcttggcacgtctatcctccctgcttttttaggggagacaggggaagagctggagtattgtaaagtacttagacaccaggtcacttcacccacacatacctcaatgttaaagcagctctgaaccacgtgtctgtcatgtgcaatcactgaaagatatgtgtctcatctagagaagccttccttatggccataacctactagactgatgatgctgaaagctttcggggcctgctgtttagcccacataagaggagattggtctgtggacaggggaagtgggggagggcaccaacctaccgtggagggtttcgtaggcctgaatcacctctgacatgaacatgggcctctggcgggcaatattggccagggagcccagggctgtggtcaggttgatggaggagatagcggggtgcaccatgaacttgagcagctgctccaaggctgccttgccttcttcccacagcacatctaacgagggagagaaaaggaccagttagtaggcggctttctccctggcctccagagagagcagtctttgggaccaaaaggagaaagatcctcgtacatggatggctgtgactggctaaaaaaactcaggagatttagtgcgtgacgagtctgactataatactattaataaaaatctagagatgacgctcaaagcatgggcttgcaatcctgaccaagtagaaataatttaaaatatccaactataaggaatctgtctgaactacactaacgtaaaactttgaatatgtacacacgtgacaacacacagacagaggactcaaaattctctgaaccaccagcgtccttgatccattcaccaaaagtgaactctgaaactgtggcaaatatctttcctgacatttcttgtgcaaaaacctactggatgcgacattatacaaaacagtgaataaaatacagaatgtaatgtagccattctaatggaatattttgtaacatctgaacatgatattgtttgggaaagatgcaacttaatttttgttgagttcaaaacgtggtcaaacaatatagaagaacagctaacatctgtggaatgcttacaatgccagccatataaactcaccaaaagctcatactaacaccctaaagtagatgccatagtaatgactccggatttaccaatgaagaaacaggctcagagagaataggtcgggtgctcaatggcagagcagagattcaaacacaagtcattacactttcatgcctctcagctggaagtattaagcatggccctgttttctataaacaaacccaacaaacacaaaactatgaacatacacatataaatacctatctttgcatagaaaagacctgagaggaaacaatactcttggcagtattcatctctgagaagcaggactggggaaggacggaatttcctttcctactcctccatatttattgcttgacactaaaacgggcatgtactacttttat

SEQ ID NO: 51597 - DNA, 1191 bp, Bovine  19866881041826
  misc_feature (1)..(1): n is a, c, g, or t
natgctgggaaagattgagggcaggaggggaagtgggcaacagaggatgagatggttggacggcatcaccgactcaatggaaatgagtttgagcaaactcccggagaataggatggatagggaagcctggtgtgctgctgttcatggggtcgcagagctggacatgactgagctacaacaacgacaacttctcttttccaaagctcttcgcactttgctgtttagctgctcttccttctgccactaatcacacctcagtacccacctctaggcctaagcggttgtgtttagtcgcttcaggcgtatccgattctttgcgaccccatggaccgtgacccaccaggctcctctgtccgtggaattttcccggcaagaatactggagtgggttggcatttcctacgtcagtggatcttcccaacccacgaatcgaacctgtgtctcccccatctcctatattgcaggtgaattctttaccactgaaccacctggaaagccctaagagctgtcccattccaaaagaccacgccatttctcttaaacccctcgagtatctgtccatcccatcttgtctccagtcttccctcagtctccgccctctgcatcttttgaccctgccccgttcctgcaggccccgccccctaatggagccccacccatcctctagttttactttagcctctctatcaaagctcctcttccctaagtccttaggttcttccctcaaagacctcaagccccgcccccaggaccttgcaaagacacgtgtccaacagctgcgcgcagagaagctccggggccaagcccaaacagaggcgcgatgccaccagtcccactagggcagacccggacatcgcgtcccacacgccatcagaagccaagagcatgaactcgtcctccgcttggcgtgccagggcggtcacctcaggctccgcggaaacgagttgctgttctgggggccttcctggagcctctttgtaggcaaagtctcccagggctctggacactgccaaagagccctcgaggcgccgacggctgatggtgccacccgcgtcatggatgcgttcacgttctcggggacggaggggccgatggtcctcggtgctgaaggccacggcgccggcgcgacttagcaccgcgcgagagtcaccgcagtgcgccaggtacagaaagcgcggggaaaccagtaacg

SEQ ID NO: 51598 - DNA, 788 bp, Bovine  19866881057230
  misc_feature (1)..(1): n is a, c, g, or t
natccacctccctcgccgaggagggggatgggtggggagggggcccacctctctcgttgccccccacccccgcccgcccagggaaggtgaggaggaagtgggccgagggggcgcggccggccgctgactcacaaccgcagggtgtgtgtgtggggcggggtgtggggggggggtggtgcagcggtggacctgggtgggaatgggactcccgatccctgtgtgaataaggctcctggccccctacccacgcacgccccgccgtgactcagtttcgcgtgcggaagatggtgggatcatgcagcaatccgagggcacggagttggaggaccctccctctaccgactcctgcgagacccctcccccacgcgcaaggttcaggctgagtccctacagcctcccgggcttccgcaccgggacccgcagactccacccccacgagacgccagcaatatgaccacgcccctcctgtagagcgccacctggcctggagggcaggagtctgggcaatcagttgaaagtttagaaatggataaactgaggtctagaggcagggaataaatctgggctagagccctcttgcctgagccaccaggactccagtggttaatgagagtaaaacaattcttagggcctagctgatttggtgagggaatcaagcttcctacctgtttcctaaaggagcctgctgcctgggcgataccctgatctttatctcattcttctaggccagtctctgatattaattcttctctgaagaactgagtaatcctctccccttctctaccgta

SEQ ID NO: 51599 - DNA, 1457 bp, Bovine  19866881063587
  misc_feature (1)..(1): n is a, c, g, or t
nggatgtggtggggattagaagcagaaggtcagcccctccagggtcaaaggttcccctgctcacagatcagaggagggtgggaggcctgggggtaaagcactgatcatgccaataaggatgaatgttacttcatcattctgggataatgtcagataccccagactgcaggctgactatgttcctgatctcatttaatcccttcgagtctaaggaagcagacacctccattattagcatcatgcccattttataggtgggaaactgaagctcagggaaaggaggccacttgcccaagctcacacagctggtaagaaggaaagccagaatctgaacccagggctctctgaccctagaacccctgtctgtaatcacttcatttgactgctatgggatcttttgtgtttctgccccagtgctttagggagaggctagggaggtggaaggaaagctggatggcccctcagaggccaggtgcctggtcctctctccagcatcccaggcaggtgtctgcctataccttcacccttaccaatgctcctgagccgatggaaccagcgggccgtgcgagggaagtgactgtagaaggtcgggttgggggctcccaggagatcaagaagcataaagagctcctagggagagaagccaggactgagcagccctgcgggatgctgccaacctcatgcccccctcctcccacctcaccggcacccagcagggccctagtcttacaatagcctggatcctggtggagcccaggccgtggggtgtagactccatgagctgggccaggtgccgggagccataaagcgagtccttgggtccccactgcttcagtgcctcttcaccatccaggaagatcagctgcaaggtcattggcgctgcctgtgggggccagtggtcagggccagctcagtgctagcctgccacctcaacgcacccacatttcctgcctgtttgcacagctgactagggcaaacagtctcctcacttgtagaacctgatagccaagagtacagtctgcctggatttaaatcctggctggattgctcactagccaagcagtagtgggtcagttactaagttctcaaagcatcgacttccttatgtagaaatagagttaatgccacttctcatagggtaggatttgaacccgggtcctaagacagcacgggtttccctggtggctcagtgctaaagaatccacttgctaatgcaggagacgtgggaaacgcaggttcaatccctgggctgggaagatcccctggagaaggaaatgacaacccactctagtattcttgcctgaaaaaccccatggacaaggaagcctggccggctacagtccatggggttgggaggagtaggacacgacatagcctctgaacaacaagaataataaagcagcctaggacagtgcctaatgcatagtaactaaataaggattagctctgatgtaaga

SEQ ID NO: 51600 - DNA, 956 bp, Bovine  19866881138580
  misc_feature (1)..(1): n is a, c, g, or t
nccgggctgtatgcagctcccgaaaatccgaatcatcgttccctcctgccacgagcaaaggagggcatgagctcctctgacgaagaccctaacccactccccttaatcccttggcccagctgtgagcccccttcaagttccaccctcacatcctccctctttgtttaccttctgtggagtcaggggtagatgaagctgtagacggagcttcttctgcaagaggaaaatatcgaggacacttagaagtttagactgcctgagttacagtagtgagccagtcctggaaacttgtctgaattaaggaatcttagaattttcatcacaggacctttagaacattctgtatacaaactgtaaaaccttcctatccctgttatctgaagctcagtcttggaagttcaaatccaggaatcttgatcttagagtcttcaagcgttgcttcactcgtgtctgactctttgcgatcccatggactgtagtctgccaggctcttttgtccatgggattctccagacaagaacactgaagtgggttgctgtgccctattccagcggatcttcccaacccaggaatcaaaaccgtgtctcttatgtttcctgcattggcaaacgggtcctttaccaacagcgccacctgggaaacccttcaggcttttaggaggcttttaggaggtttcaattcattaattctttcaacaaccattatttgagtgcttaataaattccagtcactattttagatcctgaagatacaactgtaaacaaagcccctagtcttctagagcttacactctatagaggagatagacacaaacaattaaacttatggtgttgggtgctaagtgtatggagaaaaatcaaagtaagggaagagaaaataaggggatgctatttcagacaggttggtgaggaagactccttggatgacatctgagaagaaatctgaatgatgtgatg

SEQ ID NO: 51601 - DNA, 1297 bp, Bovine  19866881275549
  misc_feature (1)..(1): n is a, c, g, or t
nccaggaggctggaatttctcccctttcatttccttattgtctctggaggagggtgtgacagggagcgcagggaggcggtgtgaagccagaagctagtttctgatcctggtcccagcctaggacctcaggtggcccctacactccgagaggctttaggttctccatctagaaaatggggggagggggagcagttggaccagctgatttgtgagaactgggggtctgggggtgatgcctgaggactataactttccaatttccctccagacaaagagtcagcctggtggaggggggtgccatcaccccagcagaagggtgcggtgggcaagaagcagtgtggggttccccccagtgctcagttgctgagtgagtgcagaagtttctcctctcattgttctgacccaggtggaggaggtggttttgttgatgggaaggttgaggagaccctcacacagtacgtccatttccagccccctacatgtcatctcttccaaaatatgcccccaaatgctgactatctctagactgtccctcaatttcagagacaatttccacacaccttgtcccctaagcttcaggctgtgccccaaataatgactccttccgcctagagccccacaatttactttttaagatatacctccaaaacactgatttgtagttggtatccttagagcacacccccaggatctgaactatgcaaggcgttcgttcagctgagattctcctaccacctgggagcctccaccaccaacctggtctctgccttccccaccctagaaccgacattgcctccacctctcaacactcccaaccccttccctgccccaccccacgtgcacatcacacctccacagccccaggactggcccctcctgggcaccttgccaagcctcgcaggcctgggtatccaggagtcccaccctacagctcaaaccccagacccagaactcaggcacgctggggcccatgaaaaccccagatcttagtgtctttggagaacttaatccttgcagtcccacatcccacctcaggcccacagtccccatacaggttagaaacccaagtatccagatccccataaccttctggctaggaccctgtcccgcctccacttcataatgttgactagagagcaagcaggctaagacggagtccttgcagcaagaggaatgcaagttagacctgggggaggactctccatcagctagggcaagcgaattattgttctctgccccctattccagggaagtcttgtcctgtccgagatgggactggtgagtacattagcagttt

SEQ ID NO: 51602 - DNA, 1629 bp, Bovine  19866881348722
  misc_feature (1)..(1): n is a, c, g, or t
ntgcttactgtagatgtctcaggatacccagactgctgtgcgtctgtcttgttttttttgtgtgtggttctctgacacacctatccctgggaccctctggatctcacactgttggatgtgtgtgtctgtacgtccctttgtctacttgcctgctgcctcaaagagtctgcctgtgcctacatcggtggtgtgggtcattgtgtgtttcatgtgtatttctgtgagtcagcatctgtctgtatgtcttctaaaaagttatgtctctgtaacttatgcctggctttgctacctccctgtcactgctgtggctgtgtgtgagtgtatattggctggctctagtgtgtctctgtctctttcacatgcaggtgtggggaaaaggagctgactcttcctttgggcgctaggggcctctgggggcctctgggtttggggtctaggggcttctattcgtccaggtctctgcctaggctctgagtctggtatctgtggctccaatgtccctgagggcatggctctctgagaaacataggtgtgtttttcacggcccttatttcacagggtggaaactgaggcccagaatgggaaaggccggggccgaggtcatgccgccaggctggctggagcaggtgttttttccttagtttgtatttgcctttcatggctgttggctctatagccactcattcatttagtcagtccattcaaagaccaaaagctgtttctttacgtgtgtgtgtgtgtgtgtatgagaaagtgacagacagacggaggacagaagggagagggatgtttctcccacttcccgtgtgtccatctgtctgtcccctagtgtcatctgtgtccctacttgtctctgtgtcttaatctctgtcctttggtttgtgggcagctcgcacatcctctgtgcatctgtctctcgaatgttctgccttgctctctctctctctcatcctctccattcctctgagtctgtccctccctccctctctgaatgctccctccttccctgggggctctaagtcttcccttcttggggtctgcctccccccactcccttggttctccggcctctctcctcctcctttggcctccctctcccggctccctgagtttccgcctctacctgccacctcgcgggccaggccctctatttctgtcaccgtgcccgccccaccggctgcgtgtcaccccccgccccctgccgcgctggctccccgtcagccgtcccaccagcctcgctgtcctgggcaggctggggaattcctcccggttcctggaaaaaacaactggtgccgagagaaaggccctcagtctccccgggtgcccgcccccctccctcgggccttgggggtctctcccggagtcggccggcccgaggcaggaagccctgcggtttctggcttctcccaggcggcctccggatctggcccccgccccccggccaacagcccaaatattattccgcaggaggagtcggtggcggccggaggaggcccaggctgaaagaggctttcagggcggccaggcctggggcttcctgtccccaggctcaggcctcaggccgccccagtggggacctcaggtggccggaggggcgggtgttgttgtagggtcctgggggggagggtg

SEQ ID NO: 51603 - DNA, 1069 bp, Bovine  19866881561513
  misc_feature (1)..(1): n is a, c, g, or t
nacactctcacagaagctcagtgcctacgagccaaggcactattggtgaacagccctgacaaccaccccatgagggaggccctgtcagaaccccactcactgctgaggtggcgttggctacccaaggccatgtgcagaacaagcagaactggggtcccctgaactccatctgcctcctgttctgaaccacactcagcactccctaaatccccatcctcttttgcttctgtaccagctattgtgccctctgctcaagacactctccctctctcccttggcctggttctctccttctcctccaggtctcagctcagacatccctcttctaggaagtcctccttaactgcccgccattaggctgggtcagaagtctcctctgggttccacatccccctaggcgcctccatctcagccctgcccactctgggtccccactgttgggtcacctgtacgtcttccccactggacaggactctggcggagaagaaacttgaggatcaagagcatagcatttggagtctgaatccagcattcaggtcctaattctgtcaggtcctagcagagtgaccttgggctaatttaagctctgagactctacttctttctctgtaaaacagagaagaaattaccctgcctcagagagcttttgtgagaattaaacgatggtgtggccgagcagcgctgcgtgccgtatcccaagcgcttagacgtggatgctagtgttagtaccagtgccctcttttccgaggctcccatcccagctcctctcatcctgcttagcccggcgtcaccctcttcccctcacctgtttgagcactgtgatctttgagtcgttggtgatcagtgctgcctggcccaagagatctaccacctggaaggagggtgaaaggcaggtcaggccagctcctacagcactcctgagatcttccagctaggggtgggtcaccctggagagggcccaggcctccccactccacacctctctctgtactcactctctctgatgtggtcatgccatcgatgcccggcccctcctcttgagtgaagaactggatgccacgctccggcg

SEQ ID NO: 51604 - DNA, 1212 bp, Bovine  19866881693767
  misc_feature (1)..(1): n is a, c, g, or t
ncatcaagcttaaccccatcgtggtgaaagaggtcttcaatcgcctgctgggcacccagcacggtaggtgatgtgctcgcctccccaccaggggccagctcaaccctggccctcgtttccctccccagcagctcccccaggagaccccacctcaggtgcaggaaggaggaagaggtcccagaggtgagagctgggggagggatgccaccaccttttggtcgggggtgttcatcttgctctctgaggctgccattcaggcttggtgacatctcgacatctgtcccaaagctcctgggccaccctcccatgatacttgggtgatggtttcatccacattggggacaaaactgtgggactgagggctgactctctataagcattttcccttccaggacctcaaacacggggcccatccctgccctacctcaggtcttgcctgaacccctctggctgtgggtgaggggccttttgttcgagtttggactcgccctggtccaaaagaaagaaaactttcaacctagacagactaccagatggcatagggtagattcctcagccctcaccccaggggctggagctaggaaaggtggaagctctctcttccacacgtgacttggcgactcaaaacacgcgcgcaagtgtctgggaccctcgacaccccaccagaagagtgccgtctcccccagcctcatgccctgtggcgtttagcccgagcgctgtgtgcaagtctgttgcctggccccctcttgtcccgtctagcaggcgcccctgtgcctctctgctgtgctggggacctgggatgagctcgtccgctccctgcccttgtaggtgcacagcctgggccgggacgggagagtggttgagtcacaggcgaggtgctgggggcccagtgcaggcctgaaggcctctggttggaatggtcaccagccgcggcctcactggggcgcctcctggtgctctcagtctctcctcccgccactccagccctctctacccctaatcccagatggcgccttgtcttcctctgccgctcccccagtctaggggggcttggacctgtctctcaggcctccatactgtctcctcctcctccccccgttccccatgctgcaggtgaagggaactcagccctgtcccccctgaaccctggagagctgctcatcgccttacacaacattgactcggcaaagtgtgacatgaagtccatcatca

SEQ ID NO: 51605 - DNA, 1075 bp, Bovine  19866880393411
  misc_feature (1)..(1): n is a, c, g, or t
ncacagagtcggacacgactgaagtgacttagtagtagtagtcaaatagcatacatttaaatttatagaaacagtcaaattatttctcagagttgtaacattaaatgctcccataacgtctgagagttgcgggttcctcaacaacacatgatatcctcagtcctttctgacttgttctaattgatgtgtcctgaaaacacactgtagctttaatttgtgtttctttttgagtgtttctgactcttggagcttttgttttatttttgctggggaataaaccctccatctcttgcctgattggggagtgatttttgttgtctatggaggatgagagagggagttgagtgacctaacttttatgtagacttcaaactgagcttacttacactcctcccctgccattcctgtggctcaaaatcggaactctgaggaggctcgctgcagcctggacagtgctcttcacctcgtcacccctttccccgggcacttctgtctcagctttctctgcactatcagtcccccctcctccgtttgctttctcttgtctaaaaggttgtctttgtgagttaattcacttaaaaatttcttcagaggaaacagaggaacacacactcagttctccacattgatagtccatctctctcctttagttttcaccttacttcctcatgtatttattcactgttttacacaaaagttattgatgacaaagctaataatctcttaaagcttacttttaatttaacttgtcttaaccaaactttctttccctcgccaaaacgccttttgcccttgatgtccacagtccaaatctgtatgtttcctcatatttctttttcattccatttggtctcattggctggttcccctttctccagtgtcccttcaattaagtgaaaggctaggaatggggagatgtcagcgtattttaatttccagcggcactatgacacaagttatttcagtaaaagtccatgaggatttggcattgctactgttcaataacagcctaattctctaggggaagagagttattgctctatatgcattgttgcctgagctccataagataaaa

SEQ ID NO: 51606 - DNA, 1938 bp, Bovine  19866880418159
  misc_feature (1)..(1): n is a, c, g, or t
nctggatttcaatcgactcagtttccagattgttaggttctttcagtacttcctacttcactgtaaccaagctttggcttcaaagaaaattggtctataaaatttttactgcattttctagtcaaaagtgtgtgcttctaccatggcaggggacactgtctgttactggccctctccttgagaaaccaacagaaatgcgggaaagttggtagaaactgggatacaggcaaagtaaaatcctgttagcaagtctaatgaatgcagagtgtgttctgtccctcttggaagcgttggttttattttgtgggaagtactgagtgttctttacagtaagtgtttgtcatgtaagttactgagatggtgaggagagaagaggatgtggccgctacaggatacagtgaatgcaggctctttcacgttattcattaaagtcgccagtccttctcaccacctcttaatacaaacccatcatcatcgagactggtgggatggctgtcgggcttcatgaagtctagaggtcttcatgttcatcactttaattttaccatataattaagtaatgatggactgaagcaaatgtatttatagcatatgtgaaaatcctggggtaaaaataggatgccgatcaatcttcccacatcctaacgaacatctgcttggtcttaggagcatggcattcctactgacatgggctatgcagtggcccctcaccattcaggcgtctatcctgtacatgttcagctatatgaagcctggaagaaggtttggaatattagaatcaccagcactgaagaatatccacacctgaagccagctagataccggaggggcttcatccacaaaaacatcatggtgagcatctgtggtttgggtagggcacaccacattctgccagaaagaagcaaagagaagagcgacgtattaacagcttaacagagggaaagctccatgcagcaggaagcatagttttcagatccaagcgaaggatgtttcagttacagtcacttttttttcagttcttcaaacataactttaaagtgttattttactgacactactgctaataagcaggcactgatgtcaaaccactaaggagacattacatctaacttgcagataatttatagaagccatcatttcttcagttacttagcatgtaaaactaacaccgtctctctgcatattaaccatgccactcttttacaagccaaactgtcctctttatcaatgtcagactaaaaaaaaaaaaatctcaggtatttacaagaagccacatgtcctgcataattattaacaagtcataatatagagtacaaatgagagatgatgttaagtcatttgttatctgttgtcaaattctctccgaagtgtctctatttggttttgtgtttttacactggtgacaaatatatattgtcaaaagatattgttacttaatactttgtgaggcctctcaaagtaagtaattaggaaaaaatcctaatttttccccaaatcagaaggtctaaagagtactgtggtgttaggcgtaggtctcctgatttagacacgcgtttagacacacatttagatcacacccatgttctgatcatctgggttttgatgatctgtctacaaatcaaactcatgaaaccacctcaagtgaaacctactatcttcccttcattccagctattggtcctgctattcctaattcagttttagcgatttgaacattgcactacccaccccatgtccaatcaagtctctactttccatcaataattccttcataatattgtaatattcactacctatctctttctgtaatatttattgcctttactcttatttgtaaaccacagggctgattcctatttcatctatttacagcttctatccaccccctaccacagtccatcccatggacagtgccaaccttttaatcctaaaatgctg

SEQ ID NO: 51607 - DNA, 2330 bp, Bovine  19866880449489
  misc_feature (1)..(1): n is a, c, g, or t
ntttacctttaggtacgctatatgcatagatagatagattccgtaaactttgaggtaaaaaacttccagttatgagacagagctgggtcttttcttctagcaaaactccacggtgattttggtgaacagatgccagcatatccacagcacagagagggagcaggggctgtggtcacacagacgtggcttccggtcccgccccatcgttttctatatgtatggcctgaggtcggcacttttctctaagcctcagtttccccacatcatggtggtaactaaccacacgagttcactgggagatctacacgatacaatacagagaaagcacgtagcacagagcaggacacacggtgaatgctcgacgagcgctgatttcattatctacagttggcattaagataaactaaaatgaatagtaaaaatgtgattttgtaattctcctttaagtttggtgttaaaaaatacacatacaaattataaagatttttttttaatgtggaccattctttaacatctttattaactttgttacaatattgcttctttttttttatgttttggttttggggcctgaggcatgtagactctttagcccccttaccaggaactgaccccacacacctcctgcattggaaggcgaagtcttaaccgccgaaccgccagggaagtcacacacaaattaaatacgctctttttcatcatccaaatccctaaggcaactcattattatacttcatttacattttaagttataattaaattttaagatattaagagtatctttttattataaaaggaacattaagcttatttaaaaaaaaaacccttagaaatgtacagtttttatttggttccttgcctgctgtgtgagatttcccatcaattagatgtctggagcatttccacatagcagagtttgaagatactgagacttttgttcccagaaatagatttgactctctgcctaggtttctactaaaaaagcagaaaatcaagataatttagcctttttggcagagaactggaaactcggagcatagttagatttatactccagctgcaaagatcagtgaataaattttctgtcactaggttacaatagctttattatatttaattagaacttcaaatgtttctgttctgcctaatccttttcctttagtcagtaactgttaaaggacaaataaactgtccaaaagcaactgatactctaggacatctttttcgtgtgaaataaatcatttgtaccaaaacatgtttttacgtttcccctaaatatgttccaatgttacacttaaaactaatacagcaagaactcttctttgataacgaggtctatgtcatgcagtgaaaaactcatataacactaaaataaatgaaaaaggcatattaattgggaaaacatttttaaattcactcagttgaaaaaacttccagttaggaacactgttctttgtaatttttactcaacacaacgtgggctggccccctagtgaacatctagggaagaggccgtttcctgaggactgggccctcgggagcactcatttttggaaggggaagtaagtcagaatgactctgtttcttcaagtctacacgtagcacttcagatacaagcttaaacttgaagtggcatccaagaagatgttttcaaaccactaaagaattttaaagactgcaagatacccataatgatgtcactatcactaggacgttggagaagggaaacagctggtcctgggagtagggacacacgtgcgaattcctttacgtgtcccctgactcacttgcccacccgtctgcatgcactcatcagctgcctaccccgcggcaggaactgcggtagctgccataatgacagctaggatagggcctacctggttgtccagtggttaagaatccacctgccagggcagggaacctgggctcaatccctgatctgggaagatcccacatgccacaaagcaactaaacccgtgtgccacaagtactgaagctcacgcgcccagagcctgggctctcaacagagaagccagcacggtgaggagccctcacccccggactggagagtagtgcccgctcgccgcaactagagaatgccctgcgagcaacgacgactcagcgcagccagacatcaatcagtcaaattcaaaaaagctaatatattaaaaaaaacattgggaggacaagattgttgttcccaatgatatcagaatctaggaagagggaaaacataggaagatttaaattctttggggataactgctaaaacagatacacggaccaaattatgtggaagacaaatcagaacatttagtaaataacaacca

SEQ ID NO: 51608 - DNA, 2501 bp, Bovine  19866880483635
  misc_feature (1)..(1): n is a, c, g, or t
ntttatagcacacaactgaaaagactctatgtgattacttatttttgtacgtttgtgagtttggctactaaaatgtaaatgcagtgcggacaagattttctcttctgtctgttcactgagctatctcctacatctggaattgtgcctggctccttatatacctgttgagtgactgaatcacattcttcgtggagcataccctttagatgtgacctttagtgagtgtattcatggtaaactctctccgattttatggtatgtaaatgtctttattcactcttgtctttgaaagatagttttgttgaatttacagagcctacttgatggtctcttcatgtataaccattgctgctcatatttggaaatatagggctccctataagtcacctgaatgtttgtggtggtaagatgtatcagaatccccctggaccctaattgttttataattgtcaaaaaagttaagcaatttggatttgttgttatgaatgtttatgaaatgtttctctccctttcttttagtttggtagaacacttatttctaaatttgatataatgtgatttataataaacaggaaaagaatcattctcaatattattgtcaagattaaatagccatagtgctagcaactatgaagacaattatatgaaacaaataattttctgaaaataatttttggcagtaacatggggaaataagaaaatagtttagcaaagggaaaaacttttgtatccataatctacttctacttacatttattaaatttgctacattgtgaaatggaatgtatctctattattaacatcaaggagacatttgttatacaatgacatcctaaaagaatgagttctaaattatttaaaggagacaaaatgctatttctgaacaccacatgaatacataaatggaatatctggtgactgcttacatatttaaaggtctgatgtggtgactccacccaagcaggataaagagcaagacaatcgtaggtgtacgaaagctcaaccaggcaatgacaagcttggggatgagcaggagatgacaagaggaaaactctgagtacagatttaggtgctagagatattcggtccacttcagaaaatcaacatctactccatcaatgtgctgtgataaggatttcaaggggtatattgatgaataatgaaacactattctttataaaggaagagaagaagacaggacaaaattttactgagttattccttttttggattgatttttcaaatattgcatgattcttaggaataaatcaaaacataaatggatctttttttatatgtctgtgctgatggcttataggtccataaaagatgcaactattttatatgatatgtttaagggtacttagttaagttcacttgctcggtcgtgtccaactctttgcaaccccagggactgcagcatgccaggcctccctgtccatcaccaactcccagagtttactcaaactcatgtctattgagtcagtgatgccatccagccatcttatcctctgttgttcccttctccttttgccttcaatctttcccagcatcagagtcttttcaaatgagtcagttcttcccatcaggtggccaaagtattggagtttcagcttcagcatcagtccttccaatgaatattcaggactgacttcctttaagatggactggttggatctccttgcagtccaagggactcttaagactcttctccaacaccacagttcaaaagtatcaattctttggtgctcaggtttctttatagtccaactctcacatccatacatgactactggaaaaaccatagcttggaaaaaccaagcagtgtagaagagcaaaagatataaggaagaatcagtgttagaaagttggcatctatcagtctgtgtaacagaaaaagaaaccagatacagagtttcccctgtaagctctgctggatgtagtttaggtgggataccctggtgggtatatggaggagagatttgaaaggcaaagcaaagtggagactaggtaggtgttgatgatgcagaggttacacgtgtatgagtatgtaagaaatctctgtacctaaaagaaaaaaagaaactatatataaatatataagaaaaggagaagaggacagagtcaaagataattctcagtgtctagtctatgtaactatttatactggtaaaaacaaacaaagcattaggggtaatgatttctttcatagaaagatatgaacatggttctgaacatatgtgttagaggtgtcaaagtaatgttccactggagatatcataccagcagatataagcagattgatactcccatctgaagctagtgaaagacatttttagagcctatggtttggggaatcactggttgatgagagttgactaaataatccataaagagggtttgaaggataaagagaagacagcttaaaatcatctgggtcacaaaaataattcaacaaagggctgaggaagaggagtctaagaacaaagaggtaagataag

SEQ ID NO: 51609 - DNA, 858 bp, Bovine  19866880559869
  misc_feature (1)..(1): n is a, c, g, or t
naactcgggtctcctgccttgcaggtagattctttaccaactgagctacaagggaagcccatctttagaacaatagtatatacatcctgctaggtttgagctatacttgtggcctaaatgccactttttgtaccacagcctattgccagatgcgtaggtccaataaacatgtttttctcagtcattttgaatatatgattcctggttttggtggctttcaaatctctctcaggaaccttaatgacagagtgacatctttgagaaatgcaagcatgaccacttctgtagcacgttggcttttttgagagccattaaacagaaattataaaagtaaattataataagcctgcaataattaaaaaaccctcattcaggtaaatcctacagactccttttaactttggaagatagattcctaatgctacactaaaacaaacaaaggtaaaagcatgcctttttaacagttccaaaggaattttctttcttagcaactctgctcagaaaatcgattatacactctttaaagaacctcagaaaaaatcaggctgtggaaaataatgattgcttcctaatgctggagtaaggtttgctatagatttgctgcagaattaagatcctgtgtttcctgaaatctttattgacagtagtgaaccaaatcagaagttttctgaaataatgcttccagctctctcagaaattcaccacatcaagaaaactccaaaataaaaaatgttaaatgtctgatagaagggttcaggcaaatgtcccacaactgcctgaagatatttagaattcatatataatcttaaacatatatgaatcgggaaaagtactaatagaaactattctggtacaata

SEQ ID NO: 51610 - DNA, 1526 bp, Bovine  19866880654076
  misc_feature (1)..(1): n is a, c, g, or t
nattcagatagaactaattcaatccccatttctgctagcttcttgaccttcaaatcttaatttttctgatgtttcctcactccaagaagtgaaaataatatttctattattggttgcttaaataaatgttgtatggcaattaagagtattgatccattcaacatgctgcatagatttgaatctaggcttaatcatttacaaactggacaacttacttatgtcttccaagtgcgaatttcctcatatgtaaaatagaactgataataagataaaatggatatgttattgataatttgaaaaagactgtgacaaattgccagtccaagttcgatgcatgatacaggttgcttggggctggtgcactgggatgacccagagggatgatacggggagggaggtgggacgggggttcaggatggggaacacatgtacaactgtagcagattcatgttgatatatggcaaaaccaatacaatattaacctccaattaaaataaatttatattttaaaaaagttaaaaccaaatatatatatatatatattaaaaaagaacttttaagagtattttcatctgaaatgtatactcctgttaccaaatatcaaatactttaatagctatgcttcaaccatatattcaatagtggaaaaatattcaatatgtatggaacctgatgatacaaagagctcttcttgctaactctgttcacttagtttataactgattatttttagccaaactagtgatccatttgacattctaaaatatagctgattataattatttagtattaaggatgcccctgtcatcatgtgaaataaatatatatcactgaggtcctaacttgtggatataaaaatctttctcttcatttttgaagctatttagattcaaataaaatatctgagattttacacagcttaccactttcagacttaaatatcccacttttgtccctccagaagagagaaccaagaagcctacaacaaacaaattctgcatttgatttttctttttaatgtaagcagtcaaaagactccctttgtgtcagaaataaatttttccataatccacaagaatggtccttctgtctgctttaaccggaaaaaaaattatcagattcttgaaacaaaaatagacatctatttttagggttttaatctatgcaattgtttctataataatatatttctataaataacctattatttcaaataattttagatgtgatctggaagaatgaaatagtttacttataaaagtataacccttcaagaaaggatacattcaagtttgttgttgttgttgctgctttaatgcaactttagaaagcaattcagtattccaggaaagagaattcaggtagtcccttgggaggaacccagatgtgacacctcgggtttccacctggatggttccattaacacatctgaaacataggagcctcctaagagacttggtgcagcatttggtcttgctgacttattctttctatagacagtcacatttgagatccaggcctgcgat

SEQ ID NO: 51611 - DNA, 1433 bp, Bovine  19866880715991
  misc_feature (1)..(1): n is a, c, g, or t
ntggtacatttaactccttgctcttatttaagaatgttgttgcctagagcttactaggcattacgcttagtgctttacatacatcacctgatttaatccacatacctcttctattaaaatgagtaaactgatataaatggtcacatatatgctaatgacattattcagtattttgtcaaaattcaacttttgtcaaatttgttttcctagataagactctacagattgtaaggacttatttttttcttgaccaaaacattgtcccattctctacttgccttatattcttccatcttgtcttcatctgtctctccttcatcctgatacttacgttttgcatttggagcagaggtatcataggaagccctgaaaattaaaactgaaatatcactcacaaatacataagatgtatacatgtattcattaatattaaagaacagttttacaaagacagaataaggcaaatttttcctaactaaacagtatccattcactcggtttataaattttaaaagtatcataacctgattaataactctgtactttatttttgagaaagcaaccaaatgagaaaataagtttttataaggtatgtatggcaaaaagaaatttctacatatcattctaatctgtcttgagtgaaactgatattctaattggtaactacaatactgaaaaattctaaatgctttatgaactatcaaatgaataccacttttagggtaaagtactttttctaaaataaagatttttaaaataaaattatatatagtacataagctaattctcagtctaatactccattttctaactagttcataaatgagaacttacttatattcagaaaataagcatttcataattcatagaccataaaaatcaatgttttccaaattggtatgctgatgcttatcataacaacatacttgatacctaagattattgtttattaaagcaatgatccttttgcaaatattaacatatcatttataaaaagccattattctactgacctgcaagtttctcttgtttcagcaatttctctctgctcatctttgctatttaacacagcaccgatgctgtcggcactttcagctcccaactgagaaaacgcaaaactcaacattagaacacaatacgctaagcatcctttctagccatttgcagcagcatttaatatatcaaatattaaaaaaaaataataatccctaactaccgtagcaagcaaatggactatttaccttccaggaaaaacagaaagtaccttgaaacaaaaccacattatttaagaatgatttcaacagctgaaaagtattttatgctttaagttatactgaaatcaaaacaattaacttgagccaatcttcttttaaagtaaataataaaatatgatttagcagtagtaaccaaaaaaaaaaagcagctaatagtgt

SEQ ID NO: 51612 - DNA, 996 bp, Bovine  19866880729913
  misc_feature (1)..(1): n is a, c, g, or t
naaaaataccaaaaaaagaaattgtttgactttccccatttatgtatgttgagtattttaagtttgtatccttgcttaaagtcttctctccatttgaaaaggcttacactttgtgtacagatggggtcgcacagagtcggacacgactgaaggcgacttagccagcagcagcagcatgtgaggcccgatataacatcagattctgaactcaagtgccatgtttccataacttatggaaacaagttactatcaagagttgcagaggaaaagatcccacagtcactgactcagttatctaaaatgtgatggccctgagtttaatgtctagcttccctgccaatcttcaaaggtccagagatccaggtttttcctattgtgtttttgcccataaaactatatcccaaagattcagagaaatgagtattgttttggaatttgaaatgtgaaatgttgtgcaatatgactgtttatgaaaagagattaattggcctgtttttattgttacttaggaacactgccttatggggatcaaaggaactgtaaagcgtagcacagacggggacttcattcatgctaatgttgatattgacttgattatcacagaagaacctgaaattggcaatatagaaaagcctgtagaaatttttcatataattgaacatttttgtcttggtagaagacgccttcatctgtttggaagagatagtacaattcgaccaggtaagatctcagtggggggaaatgttaaaagttccttgagatataaatgttaagaaagagtacacagtgctttgtaaaataaaatgcttacgacacatttgacccctcttcttgctgtatttcaagtatactaagctcagtcttgtctcagtactctttcagggtcctctttcctatcattctcatcctgacggaccttttctcacaacactgcctaaattagccagtttcacagtactgtccagacctcccaccactctttccctcatagcacta

SEQ ID NO: 51613 - DNA, 2265 bp, Bovine  19866880736145
  misc_feature (1)..(1): n is a, c, g, or t
nccattgtttcccccatctgtttgccacgtagtgatgggatcagatgccatgatctttgttttttgaatattgaattttaagccagctttcactctcctctttcactttcatcaaggactctttagttcttcttcgctttctgccataagggtggtgtcatctgcatatctgaggttactgatatttctcctagcgatcttgattccagcttgtgcttcatccagcccaatgtttctcatgatgtactctgcatataagttaaataagcagggtgacaatatgcagccttgacgtactcttttcccaatttggaagcagtccattattccatgtccagttctaactgttgcttcctgacctgcatacagatttctcaggaggcaggtcaggtggtctggtattcccatctctaagcattctttaagattacataagaatccatgtaaaccacacagcgtggtgtttggtccctgatagcattgtattgtgctcgtgctcagtcatctgcagctctttgagatgccatggcttatagcccgccagtctcctccgtgccatggggttctccaggcaagaatactggagtgcatgccatttccttctccaggggatcttcctgacccagagatcaaacctgtatctcctgtgtctcctgcattggcgggcagattctttaccactgatgccatctgaagccccggtgctgattagacaactccaaaagtgccaaggctcaattttaaaatatcatttaaaattttaggcatatgtctgactttacaccaagtgaacaacagtgagaaatagaagatggaattttgtgacaggataataaagaacttttaaggtgacagaggaaaggatgaaaaattccactcataggcttaaaactccacttctgagtgctaggattaaggtcatgtatccatgttctcatttgatcttcatgccaaacccatgaatatctctgatgtttgtgtgtatgtgtacatagatcgagagatacaggagtttatataaattagctgcccaattgtttttgtttactttagcagatctagctacattatacatatttatattataattagtactttggttgattaagaaaatattaactctaaaaattctgtgccgaaacatacttttgcctattgctgaaaaaccatattaaacactaaaatttctttcccagccttaatttggtcaccaactacttatgttaactactcaaaagataaaataggtcaaaatataatttaggaagcccagataagaaacaaaaagctagcagataatgtcccaaagaatgtcacacatgtaatgaatcctaacataaatctccatataaaactcttttgcagttattttttataaatttgtctttcctatttgctttaattgatatgttcattttgttaaataaatttggagaaaaatccaaagatatataaaatctcccattttactcagttctcaaacccctgtttctttaaattagatcttttttattttttttttttttgccttcaactagatcttttaatgcctgtaactgcttttggctttatagaatgaggcctcaaaaaactaagttagtggggtagcatagagattcaaatttggaaaaataattttggaaatagtcaaatttttgtgttaaattgtattcaaatacaattctcttataatgtttattggatattatgttccctattaatacttttatttgctattgtttagttgctaagtctggtccaactcttttgtgatcccattggctgtagcccatcaggctcctctgtcaatgggatttcccaggcaagaatactggagtgggttaccatttccttctccagggaatcttcccaaccctggactgaacccatctcctgcattgacaggcagattttttactactgagccaccagggaagcccagtacttttataagcagtttcagatttgctcagaaattgttttgcttggtaagagtaagcagaattattttctcctgaggaaatggttacttcattgctatataaatatgtattgatacatagggcagaatttatattagacaaaaaaaaggaaacaatctgaatgtacaacagtagtataaaatggttaaataaattataatgtatgcatttgatataatattcagcatccattaaaaccaatagattaaaaattttggatttgaaggttaatgtgatgagagaaagctcgtatatactgttaaagggaaaggcaaaattcaaa

SEQ ID NO: 51614 - DNA, 699 bp, Bovine  19866880759531
  misc_feature (1)..(1): n is a, c, g, or t
nattgcagcaatagtggcaatataaggaataaaatcctaaacttttactatacctaaaaataagcaagtcatttattctagaggaaaagaaattaggatgctattcagaaggaggataacagtattcatgcaatccattttccttcaagaaacaaactttaaaacttatttccttgattacaggttataaatataaaatatcagaaactccctggtggtccagtggctaagactccatgttcccaatgcaggaggtccaggtttgatccctggtcagggaactagatcccacacgccacaactaagatccggtgcagccaaataaatatgttttaaaaatcagcataccccttattctctattattaactataactgtttagctttgggcttggatatgtggaagaatgaacaggtttagggtgtcgagatcagaaattcacttttgaacatgttaagtgtgagggttctaagaggtactcaaggagagattctacaaaggcatttgggtatgtgaaggtggggctacagatacaggaatgaatgaatgacagcaatagtacagtgacttagagttaaggacctggcttctgaccacctggcttggaatcccagctctgttacttagtagccactggtcttaggtaacatttattagctccggtcttcagatcagatcagatcagtcactcagtcgtgt

SEQ ID NO: 51615 - DNA, 2037 bp, Bovine  19866880822097
  misc_feature (1)..(1): n is a, c, g, or t
nattgaaatgttaatcatgttcagtcaatttaataaataagtgcatgggaaaaaattaggaacattcatctttcagaccaaaagatctcttcatattcttaatacagaaataataaaatgaatggaagtggctaacataaaatttatgagttagagtttaattatttatatagaccaattgaaagacttcagatatcttttagcccagggatttcttgaggcttgtttggattttacagaacaaaagaaccaaactggggagaagatgaatgaaggtagagattgacttatttgctaatttttaattttgtggatccttcctatttctacagtgtgtatatatattataatacacttaggctttttcagtagggcagtgttacaaataaagtcaattgaaacacaaatataattcatgaaagtttaaaaagtcagatttatgtaaccttataaaaagcactgttattactctgattttgatgggttaaaatccaggtttcatcatggattggaatgattcttgagaaatcactgaaccaatacatacattttgtttttattttttgtttatttgttttctttgactgcatcatgcagctttcagtatcttagttccactaccaggaattgaacctgcaacccttggcagtgaaagtgtggaatcctaaccactgaacctccaggaaattcctcacacggtttattttggaagacaggataggaaaagggcttagagagctaatgaaatcaaatgcactcagaaggctttcagaggctgatacaagagttctcactttctggtgcactgtgttatttccacggtcaggaatttgacatttatctgtctgcattctctctggatggtgggttaaactgtagacaaaacacaagaatggttgggggaataggattaattatctactcgttacccattcaatcaatcaaacattgttaagatcatgaaaatatgtgatgtagtgaatactactgttagaactgagttctcaggataggagaaagaacaatactaccctctgaagtcatgacacttaatgaggttgcttgttttatggtttgtggttccttgaaacaagagagagcagttgtgtgcatgatgtttgttttattgccacagatacggcaaacaagcctctgcaaaccactttgaagagagcatgggacccatatggctggatggggtcagttgctcgggaaaggaagccagtttccttcagtgttcgcagagaccctggggaagtcatgactgcagccatcgggaagatgttggcatctcctgctaccccggcgggaatggattcagattctccctgggtgaggtcctgccacagctcttgagtattcatattccagtagccactgcacgtttagccactggtctttggcttttcaaaaagtctattttcctagatgctctatattttagtaattttatttcagagaaaaatagtcttttgagtctttacaccaatgttacaaaattttactcctaatttttctctacccatcagcctccgtttctcatgtatctgaaagatggaagaaagaaactgcaatgtccattccccaactgattaagtacctattctgcctctcatttagcttgaattctaacgagctatttgagaaaggattgaaaataaatcagaacaaaacaataggtctctttcccaccctccatgattcatttgtctttagtcctgaggccttgtcaatcattgcttgccagccagccactgctgtgtcctaacatagatctttcaagtttctcactggactccaaggtggattcattggagtaaacagcccacctatctttctaagatatcctgttactaaaatacccattagcatcacttattatgaccctcattccaaatttcttcagacttatagtcagataaaaggtacttagctcacctaacagtctaaaatattcgtgtgtagtgttaatcactcagtcgtgtctaacttgttcgaccccatggactgtagcctgccaggctcctctgtcccagg

SEQ ID NO: 51616 - DNA, 1377 bp, Bovine  19866880832397
  misc_feature (1)..(1): n is a, c, g, or t
ntattcaacacagtatttatctagaagacttcgaattccaagcgtccatatttatatactttaaaatgttctcataaacaatgagaatatatttgcctctagatttttctgtaagtgctggaagatcccctttgccaggagcaatttcaatgtgatactggaatctactggattctagaatcataatgatgtcttgaccaagcgatgagtactggctctccacaaacaccaggaccgtggtgtctgtccttgaggcatcaaagagcttcgctggcttcacttccatcagccggtatggtaggtgctgcaagtccccacaatctacttctaaagccatctcagacagttcattttcctgtttgtagccattgtacagatagtaagcagaaataataatgctcaccatacagaatgtggcaagcagaatcactgtcctttgaaagtgtctgtgcagcttcatgataaaactcatgttgcatatacttccctcagactgttccaacagaagcaccataaaaaaatgaaagaagaaaagaaaagatgatgtttcagatacttttccagtttcagtcaatagtttatgtcaccattgcagcacatttgtgtcacttgatcaggactcacagaaaatatagtctgaaaagtagaataggatacaacagaatattaaacattcaatctgcagcgttaaaatgagcaagtttttatcctggtgactggcacaagtggcaacctgtcaggcagatgaattggtgtctgctaattaagaaaatgtatcttttcttctcccaaatctgaatgagatcaagggaggaatggaaagagggaagagctccactgaacagaggtctctacccctagtatacaaaaggcactggactaacaaggagtttccttttattccttgaactttggatcaaattgtatagattatataaaccgaatgccacagagatgtcacctgagtgatacactgtcacaacatggagtacaggtggttaattacatatattgaaaattcatagaagtttggatgtattacattaaatcctacaattaagacactgctgctgctgctgctaaattgcttcagtcatgtctgactctgtgagaccccatagacggcagcccgccaggctcccccgtccctgggattctctaggcaagaacactggagtgggttgccatttccttctccactgcatgaaagtgaaaagtgaaagtgaagtcgctcagtcgtgtccgactcttagtgaccccatggactgcagcccaccaggcttctccagccatgggattttccaggcaagagtactggagtggggtgccatcgccttctccgaattaagacactagtttctactttttagaaaatct

SEQ ID NO: 51617 - DNA, 1003 bp, Bovine  19866880841961
  misc_feature (1)..(1): n is a, c, g, or t
nataagctgccttagagttttcttaattgcaagtaattctgggtataagatagtttctgctgtagctagagctattaaagcattagaaatacaaatagataaagattaaatagacataaggaaaacacaacattttgttttaatttatttgccatgaataaattttcagcaggaatcattaatccagtaatacaagtagtaaaattgaaggggttgtaaattaaagtatttattaatctataaggacagataactctgcttccttcgagttgtgtagaagaaatacaagacctacaacaggagtctaagagatcgaatgccaaaatgcctaagaaccttttcctatagtacctccaccctgaactgacatgttataaagattatacattgatggcaaacaaaacaaagaaacacaatctgttgatttttttttttttttaatggggatgtgggtattgcttgagattctgcttcaatgtctaggaacaaaagaaaaggtaacattttgtggctcactgaccaaaaattgactgtaagaatcaaatactcagaaaggccaaggatgtatctagaggtaagcatcacagacatcaggatttcaccctttctgggtactgactgtgcagagaagacagttacttctactaatctatgtcatagaagaaaatatttctgcaaaaataagttgctgttaattatggcaaatttctacaaaagagccataggttttagagaggtcaatatgaatttaatatgatctttagttggaaatatataagggccaagcagtaaacccatattagaaatcaagtttaaaatatgtgaccactgggttcacagtagtaaactctcacagtagcatatttttcatcttgtattgttaacactgtaacagtaagactgtcagcctatagggaaaattaatagctagacctatgctacagagaagaaaaatgcttataactgggccaaaatattcacataaaccacctcagtctatatt

SEQ ID NO: 51618 - DNA, 999 bp, Bovine  19866880907581
  misc_feature (1)..(1): n is a, c, g, or t
ncctggtgtgctgcagtccactgggtcacaaagagttggacttgactgaatgactgaacacaaaatatcagataaaattatgaattcatattagcattttcttttcctttaccttgaggaggcagtaatttcttagcatacaaaacagcattaatcataaagaaaataatgctgtattaaatgtctttaaagttgagaacctttttaataatgaagttctgttcatcaaaaataccattgagagattgaaaagacaagccacacactaaaagaagatatttacaaaatcttctacaatatatacaaaattatgcaagggactcttgtcctgctaaacagctcaaaattaaaaggcaagcttttctaagatggcacatctcatcatccatagagcatgatctttagatttaagtgaggattcaagtggaattacctctgtttcacaagaacagagtgatcatgaagaccacattatcagcagaaactaaagggcattatctggcctttaggtttgaatcctagtgaaatgttacagtgtcacacttggcacatgtatttactattttagatgaaaaaaagatacttaccaagtggaatagttgctacacttttcctgttgctataactcagtagaattccagtatattttactcaaaatgattattattaactttcttagtaagtgcaattcagacacaagatgttcagatggaatatgggtgagaagaactattagttttgcctgaattgctcttccttttgtttcttggactattaccttttatgacggctgttaacatactctaaccctgcattctcagtaagtcttttatttttaatagttacattttttaacttacataagccttcatttaaacatgttcagcaatcatctcctagtagtatcagactgttagttaagcaggaatctactgcttgaatagttttcctggggactaaggctccaaaatctgctctaacctaaaagactactttctg

SEQ ID NO: 51619 - DNA, 1200 bp, Bovine  19866881033007
  misc_feature (1)..(1): n is a, c, g, or t
naattccatggactgtatagtacatggggtcgcaaggagtcagacacaactgagtgactttcactctatctacatatcaccaaaaatatttcacatgtaggacatgcttaataactatttacataatgaatcagtgaacaaatgaatgaatgggtgaatgactatgtttagaccaatgttttgagacacaatcacagatacaacttagaagtagttcaaaatcaaagaattcaaaacatactttcttttaagcctttaggtcggttagaaagtatattcctatctaactgtgagcaattcataaaacattttacaatgttaaattcttactgaatttattcagtaaattttagttttttataccacttaaaaatggtttaaccttaagagcaccaaaggcattttgtattttgtataattttagagaatatagtagagtttcataaaaatttggagatttatctaacttatttttaaatgacataagaacatattttggcagttttaaagacatatttcagatataaagccttaaaacatttttatcataatattttagaatggaaaaattagaaataattatatattgtttataattttcaaggacataataaatgtttaaactaccagctcagttttaatttagctacactttcaaagactatttcaaaagactaatgaaaacttgagcacaactttttaattaattaatttatattgacttaaaaggaagagtctaaaatattaccaagaatatgaaagttttttttcttttcagtcttcacagtcctatggtaacatttaatagtccttcttgtatccttagctcatttaagtagtgtgatgaacattactattatttgccagatgctcagtgtctggagaaaagaacgcagtttcaagacttttttccatctgattcagtactctgtattttaccaaaaggtcaacactgtatagaataaaaaattatgtatcaaatttctcctttcacttttatgtgaaatcaatatgtagtataacagagatagaatccaatggcattttgaatgtgaaactaagatgaatgtagatcattttaattttaaattccattaatattaaacagccagtcacattatgtaataaaataccttcacaatgataatcaactatcttcaagtaattcgttttctatctaagggcagcagtttacataat

SEQ ID NO: 51620 - DNA, 789 bp, Bovine  19866881168259
  misc_feature (1)..(1): n is a, c, g, or t
natttcttgagttacaggggtgaaaaagagtgtcttttgttatgtacagtaagttcctttaaactttgcccaagtttatgctaatgaagtgactcgtatgggtccctagatagtttcagacgggggctggttgctagaggagaagctctggtgctcaggacccttctggaccttgtcctgtgtacctctgcatttataataataggaagtaaagtatttctggggcatgtgagtcattacatcaaattataaaacctggggaggaattcttgggaaccctgatttgtagccaagttggacagatgtgtgaataacctggcagttttgtgggactgagcccttaatctgaggggactgtacttaaccctgggtagttggtgtcagaattggattaaattataggacacctacctggtgtctgcagaaaattacagaattgcttggtatggaaaaacccacatatctgatgtcagaggtgtttgagaaaaaacatcttaggaatgtattacatagaaaccttattgagaagtatggaactagtaatatcctgaaaagttttagatttttaatctttctctaccatgaatttaatatcatgtctcagtatatgtttgatgggagtaaaataaaatgctaagaaagatgttctacagtgtcttaaatgttttagtttcaatgaatatacagagaaatagctttgacatacatgaaaatgaaacattttatattgccgtcttgaaatgctatggaaatcacccttgaatatttattaatgtgtgctgttttcat

SEQ ID NO: 51621 - DNA, 1223 bp, Bovine  19866881217734
  misc_feature (1)..(1): n is a, c, g, or t
nctctaaataataaagttactttattggcaggctgacaaaattttagtaatccagctctgtgttcatagctttcacatattatgaggtgtccaaaacattcttttatgctaacaggggtaactgagggtagttagtgaatcactgtttaaaggccttctatcccatttttcacatttttcctagtgttaataggaatgcaacatcccattggcagtttgaagcagaaacctggataaatacggtttttgttttgcaattgccctgtgaattttacacgatacaaattgcttgcttttgctgtttcctattttaaataattattcaaatacaataaaatgaccctctctctgtggtagtatgggaatataattgagagaaaaattcctgaatgttaaactaatttcttttaattgcttgttctgataacaaacaccatttttaaggaaagaatgtacttcaataaaaggattcttttatttctgtagttctgcaacaaatttgattttatcatgaattatagctttaactgattttatctttttgactgtttgcctagagacactatagcagctggaaattgtcagagactagtgctctgaaaatcagaaatatcttgattattagagattataaagatgaggcacagaagtaatgggacttactttttaaaaacaaaatgtgtcctgtacttaaacctgtgttccagcatgacctggaacatggtagaattctttaagaacaaggtctttggtgatgtacataatagcatcaatcatgctaaaatcatttcctgaacacacaccacatgtgtataagggcagtgaaagattttacagagaaggtcacttctccgtgagcaattggaatcattcacccaagcaacttagtctgccactttttgactttcagacagcagacaaggacagattctagtagcagcagatgtgtacaggctgatgtaaaatactgtctttttgaatagataaatctatagagagaatacacataaaataaccctgccacccaaattaattcttctctttttaattctaggaatttaaaattgttaattctagaatctcagaaaaactgaaatagaccatctgccctgtcttagatcctcttttgctcaaacttgtctaggaatttcatccagtttttatttgagggggagtggaaggcatttcagcaaagcaaacaacgaatagcgtgtcagccaaaa

SEQ ID NO: 51622 - DNA, 1545 bp, Bovine  19866881371878
  misc_feature (1)..(1): n is a, c, g, or t
nactgttaactgcactatttgttgaatactagactactggagtagccaaagtctgtccaccacaaagcaatagattgctaggtttgtgcttatgtctccatatttcttctcaaccttcttcaaaaagtaagacaaaaaaacaaatattgctttctttttagaggcagttggcacttttagacatatacataaagtatacttattttatgtttgttttttaaataaaaattaaaaaatagtcttaaatgtcaagagaatacatagagagtgtggaatgtgaatataaataatgaatttcctgccattttttttttttaacaactcctgtgaaaaatattggctatgatcttttcctgggatgtgtgactttttggtaaaatgttccagttcacttttccagtaactaactcacagatgttgtcttagctccttgcttagaagtaagcattaacatttactgtcttaatgaaagaaatctaagttcagatctctcatgtcccctgagggccacatgcagtaggtgctatcttttatataccattacccagatttcagggaaatctgagaggccacagtccctctgagaagtcagcatttggtggtttgtttgaattttgggacagtggtatttggatggcattttccatgtggggtaatgccttaggatcctgccgctgatccactgaaggaatgaggtatatcggtctctcataacacagccttgaaatatccatcttgcaaagaaattaatatcatggtgagttgacattctttgcaaaaatcgtatactgtttgtgtcaaattatgctgataagtatgaatcatttttaatgcatttttatttcacatttttggtttttaggtagatgaactaagccaacagcatggaaggatgttttttaactttaacattctaataatctcattctgcttctatctaaatattataagttgtactgaaacttaaactttattttccttaaatttagacattattgcctgagttgggaaatccatactcacaaacactcagaatgataatgggtattatccaacaaaagcggccatattcaatgaaggtaagaatgagattttcttctttcaagtgttttgatttccaatgcatgtcctatatttttagaacatgatttctgatagaaaactcacaatctctgagtatacctacctacctgtcaaccacacacatacaaaaataactatcaccatgcattaactatggattatcttactaagtattaacttagaaacaattgatattattaagtctttgaaatgacttttccttcagtgcttaaaattaaagaagtataaaagcatttgttaaatttgacttttacagcttttgatttattatctctaaaaaattttgttatcctagtctttccaagctttttttgagtgtgagtaaaagactttaaaatgtctgttaggtcaggaaaattatgccttattgctaagtgccaagtactcacccctgtcttccttttcaagctcaatagtagaattgcctggagtgtacagatg

SEQ ID NO: 51623 - DNA, 922 bp, Bovine  19866881376501
  misc_feature (1)..(1): n is a, c, g, or t
ngttttgatacctaagattttcttaaaatcggtgtatctatacttgagaatcctctttttctagcatcttttaataactattaaagacaatccaataaattggatattgttaatatgattcttcattatctgagagtcttttgagtgtgaagaatatttgcaaccctttatgctttgttttatatatatatgtatatatatacatatagatattacatgaaataaacatgattggtaagccagtttttcctgactatagactgtaacttaattaaattcccttcagtaatttacatacagttacaaagtaaacatagctaattctttggattatggaaaatttcttaagcagtagaaaaacataaaaattcagtaactatgaaatattttagtatattttaatgtaaaataaacctattttaaaatatgaaataccatatttatttcatcattattaatatatttgctttaatgccttccaaaggtggtagcagtgctcattttgatacctttccatggtcccaatgctaccatatttgaaataaaaagattttatcttagaccaactggattactgaatctgacttattaactttttgattttgtgtttgaggttcaagacctattaacttctatagggtgattaaaactcaagccatcagtttttggtcatctaatgggatcctttaataaatgagtttccttttactttataacttttttataatagtgaattttatggctttcaataaattttactttcttgcaatctggtacttttccccagaatgatgtaaacttttggttttgcttgcttaatattacatcattctttgtgttggcattatatgcattgacctgacttggaacattattggaaacttgtgtttttctggtatcttctaccttacagtgtcatgta

SEQ ID NO: 51624 - DNA, 859 bp, Bovine  19866881447554
  misc_feature (1)..(1): n is a, c, g, or t
natctaggtacttttcagtaagattagttaatttctatttttaatattaaatttcatcaaattaaaaggaattttcctcaattattaaattttgaaaatttggttttgttttttttttttttgcagttctcataaatttttataacaatgatttgatagtatgatttgaagccagtttccccacctgccagtggaagagatgcaagggacacaggttcaatccctggtcctggaaaatcccctgggtaggaaatggcatgtcattccagtattcttgtttggaaaatcccgtggacagagaaacctggtgtgctacagtccatggagtcacaaagagtcagatatgactgagcaactgagcacaacagtaacaacggtaatgtgatttgaaaccagcaaaatgtctttgaaatttgtgactccatgcatttcatatgcctgttgtcttcatagcatcaattgctccagttcccttgaagagttttactatccccattcactcattcactaaatatatgacaagcttgaggaataaagtgacaaatcaaacacaagtcttggttctgtagtagaggaaagccatgctattaacaagtgaatgtaataaaatgctaattctcagggaggtaaacacaacttctttgccagtcattgcagtgtttggtgatcaaatataaaatgcagtgacatccaaagaaaccaaagccctggtaaggtcatagtctatgaggataaatgctgttcactcattttcactgagcaacactactgaaggtgaaataactacctatatctaattttattttgtatattttctcctctcagtttatatataattctgtattcaacattcattttt

SEQ ID NO: 51625 - DNA, 1997 bp, Bovine  19866881464584
  misc_feature (1)..(1): n is a, c, g, or t
nctgcacagagtcggacacgactgaagcgacttagaagcagcagcagctatatagaaatgagaaataactctttgaattctaggcttttttttttcctcaaagaaatgaagacatttttatttaaaattcccacctaataataagtttcacagaaagtcctttgtaagatcctcccctaggccttgtttctccgtcttggcactggtgacattttgggtggaatatttcttttttccccaggatttatttattgactggctgcgctgggtctttactgctgtgcgtgggctttctctagttgtggtgtgtgggcttctccttgtggtggctgctcttgttactgagcacaggctctcagctgtgccagcctcagcagttgtggcctggggccctccaagaccgctgccacagtagttgtgctccgtggcttcagttaatctgcagcacgtggaatcttctggaaccagggaccaaaccagcatcccttgcattgcacgtcagattcttaaccactgagccaccaaggaagccctaaacacttttttgttgtgggggctgtcctgtgcatcctaggctgtgaagtagacccttgggttcataatgagatgccagtagcatcttcaagctgtgacagtcagtttctaggtattggcacaaacaaatgccccaaggggtaactacattgagaagcactgccatagaccccttaaacttaatttttggtcagtttgggataggaaagagaaaaacagttctgaagatatagaagggagactaaaaaagaaaagtgatataaataaataaaattagatgcaagacagcaggattatcctaacatactcaaactgcaaaaaatccaaatgttcatcagttggttaatggttaaacaaattgtggcacatccatacaacaggaatttagcaataaataggaaaataactactgtatagtattttgtgctatacaaaatgattttggattttgaaggaatctcagaaacaccgtgcttcatgaaagaaatcatttacaaaagactgtgtactctatgattccatttatatgaagttctaggaaagatagaactctagtgggaggaatcagatcaggaatgcctgaagctgggcctggtgagagcaaatgacctcagaagggtatgagaaaatgcgtggtggtgaaaatgatgtatgttttgactatcatggtggttacgtgacagtgtacattgccaatatacatgaaatgtaggattaaaatgggttaattttattgtatgtaaattatacctcaagaaagctgtttgaaaaatagatgtgaagatagtgaagagaatatactatagaggacaggatggggaagccatttccagactcatttttgtaaacaatccgtgacaactgacctcatagaagtggatgtgaatacccagggctggagctgattggcaggtctgactttgcttcaggaaaaccccctggcagcctctatttttgcacaacagcttattcctagcagggccagtcagagttgtctcaaagattatctggcagcccccagatccttgggacctatcatctaggaacccagaggctcctttgagaaactatgaataaacaaggtaggaggttagatctacaacacagagtcagccagcaatgtctccttagactctgaggtgccaaaagccaacttcaggaatgccttttcagttctcattcactaactaggcaggtcttcagcatttctctcctcctcagtctttctacataaaataacatgaattaaccatatgagaacagcataaacttgctcacttttttcggagaaggcaatggcaccccactccagtacacttgcctgggaaatcccatgggtggaggagcctggtaggctgcagtccatggggtcactaagaattagacacgactgagcgacttcactttcacttttcactttcatgcattggagaaggaaatggcaacccactccagtgttcttg

SEQ ID NO: 51626 - DNA, 847 bp, Bovine  19866881471190
  misc_feature (1)..(1): n is a, c, g, or t
ngaagaaatatgcaaacatgataatcctttggactgttgttcttataaaatatagctatctctttcagacagcaacaacaattagtcatgagttacacattctttttaagatatatcagagtccatttaaagttccaaaatgtaatactcagcacagaaatagagtaacagatgttataaccaaattaggggttcttcccagacatcttttattgacattagagtggtacagaggcacattaaagcctttgaataaagtgctacactctcaacctgaggatttggtggaaaataacttctgaaattgatgtttcaatttcagctgcttgtatacgtgctgaattgcttcagttgtgtcagactctttgcagccccatggactgaggccatcaggctcctctagacatgggatcctccaggcaagaatattggagtgggttgccatgaccttcttcaggggatcttcccaacccagggatggaacccaggtctcttaaatctcctgcattggcaggcagattctttaccactagcgccacctgaagtgaagaagtgaagtgaagtcgctcagtcatgtctgactctttgcaacccaatggactgcagcctcccaggctcccccgtccataggattttccaggcaagagtactggagtgggttgccatttccttctccaggggatcttgccgactcagggattgaacccgggtctcctgcattgtaggcagacgctttaccctctaagccacctgggaagccttcaatttcaactactcgattcaaattaatgtttctaacaagtggctttctagttaatgaatatgtttacagatacgttaattcttt

SEQ ID NO: 51627 - DNA, 732 bp, Bovine  19866881480464
  misc_feature (1)..(1): n is a, c, g, or t
natatggctggcataccccctgggaccaaacatctcttctgcaaggctctcagctcggagggtgcacgcggcccagctgagatcacttcgtagaaactgaatttcagagccgcggggtcttcgtgtgatcgctgatgctgtgatgaaaaggtggataattaaaccgacgtgaaccttaggcataaataattaaaaaccaatctctgtgacaagtcgcaaagctaaaggaaggagtgcctcactgagggagagttatttgttttgcaattaataaaggaagaaaatgcttgcttggagcatcaggctttaaaattacgacactgatgagagtatatatttgagaattatttggtagaggcggaattcttcttgatagaatttcttaacctatttttctgagttatttccatagtgtgtatatatatatattattctgaaagtaaacttttgaaagtcgccttaacaccccctttcagcctgtaagaaaccatttatcatgtccagttaatatccataatgcacaaaacactctgccagttctgccagatagttttgttccatctagtaatgcagttttagatgagaaaaaccctatgggctattcaaatggagaaactggtgaaaactctgacatgtgcattatctgaaatccacagcttttatcatacacactctagcatctaaaagccaagattattttacctaaggtaacctctgcgggaatcagaacca

SEQ ID NO: 51628 - DNA, 1308 bp, Bovine  19866881582205
  misc_feature (1)..(1): n is a, c, g, or t
ntttctttaaggagcttactatcaaaaggagggaaaattttttttcctggtaaagtgcagtgcagtgagtggtacttgaacctcatactcacccacactctgctctgtgatgatggttgagctgggagttcacaactgaatttcccagcttttcttgtctgatggcttcttataagattctgcaaagaattctgcacaggcaggttagaaggtggaacatggaatagctattgccccttatttctccacctctctgcttctgtatctgggggaatggctgtggcctttataaagtcgtagagccagttgaggaagcccctccttagtggtcccaccttccctttccctatactcaggtgggtgtccccagaaatgacttttgctcttgggctttgaaaataccacctccccactctatcctaccagctctagggctggcagccacttcctgaagttaggaatttatgatttaatctcaccttcccctttttgctcttctagccttcaacatttctccatagcaaatgctgtctctttagaattccttgtatgatttgttttcctgcctgaaatgtgtactgataaagaagcaaatgtgtgctaccttatagtatgtacaaagccattggcgtgtagcagagagttgttgcagttttcacaaacaaagggatataactctgaagtctgtctcccaatgaattttaaaacaccagaccacaccagcacacatgtagagtactgtacatgagcatcagtaatatttcttcatcacgacaaaataagggccactagggaatgtgcatggcaggggcgggggagaagaaatttgaaaattccccaaatataattcatattctttgaaaaagcaattttacttgtaggcacttattttaaggaagtaatgagaaatgccagcttcccaggtgggctcagtggtaaagaatccacctgccaatgcaggaaatgtggggttcagttcctggtttgggaagctccccttggaggagggaatggcaagccgctctagtcttcttgccagaaaaatcccatggacagaggagcttggcgggctacagtccattggggtcacaaaagaatctgacatgatatagcggctaaacaacaagaaatgaaagatctaggtaacaattaatgcatctcccctcttgggctccatcccataggcctacaagtcctgtgctcatccagcatcaagcccagagttagcaacagagacactaatggtttaatggatgggggaactaacatgtgtgaagcaagtcctggagcaacacctcatggtgtatg

SEQ ID NO: 51629 - DNA, 1985 bp, Bovine  19866881739018
  misc_feature (1)..(1): n is a, c, g, or t
ntaatacactgtctaaaaacaaatatatgtgcgcttatcaacgtccactcagatacagcagttgcctttcatgccatagtagatttcttcaactgaagctgggcttcctgaccgttcagtctgcctaatccgtcaaagaggacctgtctgggcatgagggcagagacgcagtcacccgacagctccgtgagctggagcgcccagccccgagcccgtctcaggcctgcgctgctcgtgacaccgaagtttctggttaagaacaaacgatgattctctcccaggcgtctctaggaaatgcgccaccacagcgcgcttcctacttactatgggcagaagctgtgggtaaaagaagagctgtgagtcggccacgcccatggtcataaccagttgcctctggtaggcccgctcgtctgtggagatctcgggtctgccgagcagcacgcagttcttcaacaagcagttcatgtacaccggcaggactttcatggaatccggcaaaatcagctggaagagagagacactggtttcagatgcttgtgctctttgctgagaatcaaggcccactgcactttacctgtaaaagagaaacaagatttgctctctgaggttgcagagaggaagaaacgataagccacgtgcagcacctagagcagggaaagcagcacagggcaggttttcagagagcagcaggcggctgtcatgctctccagggccctggcagcttggcacagcgttcctcagcacagctcaccgtggggcatgtggtcccggccatgcctcttaccagctgtatgcctcgcgaaaactcatcctctcgtttcctccattttctcttctaaaataatagcacctctacttcacgatcctggggtggttaggaggattaaattgtttctgatttgtgcagtacttattgtaatgcccagcacacagtgtcatacacacgtttattaaatgaaatgaaatgtgtaagttatttcctaatctgtattaccagcttctttctacctcttaagcaagaacagcatttccaactaccccctcaatctctcttcttctgtgctcttcctcaagcttagactcacagtcacagactcatcagacactgaaggaggactgtgtcacaggttctatcaaagcctcaaggcctctgcagaggaatgagccatagtccacatgcagatgcctaatgtgcactggggatgatatgcatacagacagataaaccataataaggaaattcaaattacagtgccgttcaatatatatatagatattaaaacgggaaatattttgtgaatttattaggtatgtcactaaatgataacaggaaaaaatcaaactcctacaattccacaaacatgtttttcctcttatgtttcctgttttatatactacagctaccagatgaaccctgatttcactttttctttaccttcaattagaacacaaattctctccattcctttataatccacctttataacctttaaaatcaacctgtaccttcttcctctccaccctctctttggcttatgtgagctcattctgacttcattctaactgcctccaagtacataccataatgctccaaatagtaacacaattctagaaacatgagtaaaaaaattacaaataatttgcctgtgtgtttaaccttaccaacacagttttacaaatatggctaagaatcaagagagactgtcatttcttccatttatagtaggtcaatgaacaaaatatccaaaagaaaagcatatacagtagataatctgcaaatataaatatctggtctataaattcatgattttttttttagctttctattttaatattaaaaaaatattcccttaacagaatacacgctgaaaggaaaatttcccttagggctctgttattaataggatttattcctcaaatccctttatcatcgcttctcatgatcttctaagtaagggaatatgtaagacagaactttctaactg

SEQ ID NO: 51630 - DNA, 1111 bp, Bovine  19866882077692
  misc_feature (1)..(1): n is a, c, g, or t
ntgctttttaagctactgcatgacagattacatgaaactcaacaaaaggcaaacttttcacagagtattttgtattttccagatttacagagcaattctctctgaatattaaatagtcacattttcaaattttcactcctttcctagattgattgattgctggaggctaatttcaaactaacttctaacactttcagtggagaaatgtatttaaagcaaagatttatgctagtcagatatccatctgtcttctacataaggccattcaaatcctcccagaatctgttttaaaatatgtgcatccttttgctgggaacattacttactcctctcccaaattaggacaaatgctaattattcatgagtcagatggctctcaaatacacagatttcattttctactcttattataaagtccatgaaatgctcctctcgttttatttcatcattctttcctcttcgtcctacccattctcatttacattgtccttcccatcagagatgtttacattagtatattctatatatgtccttaggcatccaaagctatagccctgagaaataatactaactttctatgtgtgtgttttgaatgtacataaattgttttgccctattataattcattctatatttctaagatctatccatattctgtaacttaaaatgattaactacttactgctgtactgtatttcattgcatgtatttatcatgataatccatttccctagggacagatatcaaggcttcttataactttctgctaacacaaataatgcaatgacattatcgtcataaatgtttccttaaaaacttgtacacagtgtaaacccagatgaaggaatgatatgtatacagaatatatggataattaatttcactcaatattatcagtttgctctcccaacagtgcataaagtatctcatgactcctcattctaaccaacatttggtattagctgacttttaaatttttcccaatactaggttgacttcatctgaatttttctgacttcatgtgaagttaagcatctcttcatgtccatataggctatttagactacttcttccattaagagtctatttttactccttgtcgagtttttgt

SEQ ID NO: 51631 - DNA, 838 bp, Bovine  19866880656817
  misc_feature (1)..(1): n is a, c, g, or t
ngtggatctatttcggtatatttattacagccgcttttaaagacacatctcagtcggctgctttctcttgtccttctctttgaatgcaagccgacctaaatggccccagtaagaaattaaatataattacctatagaagcgcacaggggacaatgagatcgcaccagcttccgaaatggaaaaaggcgtttggaggcccctcatcttcattcctccccagagttaatttgtctgcatttcctccctcgtggagaacgcttacacgcagcctcacaatgacctgtttagttggcggtggaaaattatgtcatttgcaagcaagctttcagctgtgatattttataattgttaagatgaaaacccgataatcctctcccccttcacataaactgcaatccatctttaaacctgtgataattccgaaaacctgccgcttaataaactaacaaaccccaggcctatgtgattttacggggagtcaatctttgatcagccaagctgaaatgggtctgataaggggacgcccttccactctgggagtcgccacttgagtgggtgattgctgtttcctccccgtcctcaagtgccaaataagcagaagtcttcctgagcttcttatctctttcactttcttctcgagatctctgtcgctttaatccggcatgtctgctgctggttaacaaggaaatcctatgtcaattatcgccaacaacttcctgctgcgaagcagtggggaatcaaagcgtttgagagccttttcacaccagagagtggtgcagggcctaattaaatggccctcatatcctgcagcccgtggaggccacatgatagatagcta

SEQ ID NO: 51632 - DNA, 1388 bp, Bovine  19866880689401
  misc_feature (1)..(1): n is a, c, g, or t
nctatgtactaagttggctgactcgtcatctttggggcatccgtagatcagagaataatatacttagaaaaagaggacttggatttgagttgaccattaatgtacctttggagagtctgctgctgctaactcacgtcagtcatgtccgactctgtgcgaccccaccaggctcccccgtccctgggattctccaggcaagaacactggagcgggttgccatttccttctccaatgcatgaaagtgaaaagtgaaagtgaagtcgctcagtcgtgtctgactcctagcgatcccatggactgcagcctaccaggctcctccgtccatgggattttccaggcaagagtactggagtggggtgccattgccttctccaacccaaagaggtgtcctcctgttttgctagcacaaggctgcccctcccaggatcctctgtgctctatgcatgtgtctctcctggaacagaaagggttaagttgacccacaacccactggaccctgagacattttccttctgggccacatatgtagatggactctgaagacaaacctctctcctccttggaaatcatgaatttttatgaagccagcccagaattcccagaattcagccgggtgcactttgcagaccctaaaatgctgtcaccatggaaggtttcattgcttgcacctgctaaaacatttgaggcatttgagaggcagtgaaacacatttgcttttcattttatctgactttggaaacctttgaagtgtttaatagtagagcccaggaaagatccccgcctcttaatcatttactggtaagtcacattctcggctggtagcctgtcaagcagaaactgacctgagcccagttttattaagtgtcacatgcccagtcactgttcattaaaggtgttttaaggtttgaattatgtaatttatgagaaaaagaaataaaaattccattgttttattaatatgcagcccaagatctctctctaataacaaatgaaggaaagttggataaaaggatggggggcggtgatgattctctggccttcctcggcccctagcacccccatgtccactccacccaaccccaggcaggagcctggcaagtaggcagcactctgggaagggagccatctcaacctgtcttcctgtgtcctctgcctgagacctgatgacaaagcagccaccttcctcctctttccagctcttctgtctgttttccagcaaggcaggaaaagcatttctagagtgacctggggtgatggtgtgagtcacagtcattgagaacgaatgccccttgctttcaggacagctgggagagggtgcagtgctgggcacacggccacctgtttcaggcaaacaatttcatggatcctcaccttacctaaaggaaagc

SEQ ID NO: 51633 - DNA, 1919 bp, Bovine  19866881017766
  misc_feature (1)..(1): n is a, c, g, or t
nctccttcagacggtctggcaagcccagcaggagccagtctaaggcaactggctcctgggaggagaaaaagcaggtgtgaatctgtgatgaataccaaagagggcagccaaaggagcagaaaagctctggcaggggagcttggggacaaaaggccagggcacatgatgtagtcgtggggaagcaggggtggtcatcagggtgacactaaagggcagatagcatgaacgtggatattgctgtgctgtggggtggaggtctacacgattcctgggcccaggttagggaggaaattcagaccgtccctctatcacctcgcgggatcagggagccatagggagaacttcagcctcacggtcaaaacttgtcaaggtagaaagatggtgacatggagaaaaatctccaactgtctagcacccttcctgagaacctcgaaatctttagaaacttactattttttttttaatttttaatatattatttccgggccaatgatttcacttataatcttgaatgacaggaatgggcactcagcaatgaagctgttcgcccactttgaggtacaggtgagaagaacgcatccattctccaggaatttactgtgcccctgctgaaaggcagacaccgatcaaggtgctgggacctgcagagaataagacaaactcggttcccattctcatggaacttacattttggggatgaaagagacaataatggctaagcaaatagaggaaaaacattcagataaggataatgtctaggaatgaaacaaagaactttgtgacagtgatgagtcatgaaggtctctcagagcctaggcctgaatcagaagctatgaaaggagcagagcaacagctcaggcagcaagtgtaaagaccctgaggcagggacttggttatggagatccaggaaaagggaaggtggtcaagtaagctgaggtcaagtaagccctgccaacagttctgggcacttccctttgttccaggtaccattctaagcactttaccagtagcttattaaatgctcataatggaacctagaggttccctggtggctcaggccttaagaatcctcgtgcaatgcaggagccacaggagacgtgggtgtgatccctgggttgggaaggtcccctggaagaggaaatggcaacccactccagtattcttgactggaaaaatcccatgcagtgaggagcctggcgggctacagtccacccggtggttaagactcagattcgactgaagtgacttagcaaggaccctagaaggaaggatttcactattaacccccattgctgtggaaactgaggctagagcggtcaagtcaccctccaaagttacgcctgaaaaacagggcaggcaggattccctccctggcattgggaatccaggcaaatgctagaggacagagaacctctgggcctcagaaaaaaagttgcgagttcgttcaagtacaacgggaagtaatcagatcacactgaacgttcgtggccagtacagtgattattgagcccttttcgcactcaggcaggttgcagacagcctagggtcgcaacctgcgatcctctcgggcgacccggcctttctgccctgccctgcccctcgggcctcccccagcggcttcctccccacccgggcttcgcagattctgggtgagaactagcgctccggcctccggccctcggaccccgaagcgcagagcctagctacccctcgctgcccgcaaacccggctggcagccctgcctcccctccgcctctagctcgggccgtgccgcctcctcgggaagccctccggggagtcccggggaggccagcctggcccagctaacccatagaccgagcgccaggacccccaagccccctggggaacactttctgccctccactcggcagcgagtgcctagcgccataaacccctgg

SEQ ID NO: 51634 - DNA, 1016 bp, Bovine  19866881022836
  misc_feature (1)..(1): n is a, c, g, or t
ntgactgattaagatattggaagagcatttggcattttctgtcttacgagctctaaagcagttccaagggcacagaccgcgcacactcaggcaagactgatagctcagattggacatggtggagattaatttccgagcaaggcaacttctaattattgtgctggcaaataaataactgaaacaatcttgaaatatttttggtgttgggggatgttgtggtttggatctttaattccaaattaaagtatttaatgctttataaagcagttgctatttaaactgccaataatatttaacgtgaatttgctcaccatttcctatcctcatactgtataatttataacactaagccctttcaatactccaaaatgccagataaacttttctcatttgctcttaatttggtcatgcaggataataccaacatctgaaggctctttaaactgctttttaaaatgcattcctgtgagcgcacccatgccccctctgctccttgtcatcatccataattatttccaatccaaagcagcccttaatgcacttattaatctggcattctcctcagtgtgaagcacattcagctcgattaatttttaaaaaccctccctttttataggggactgcagatgcttggctattactgaaaagctattagaagttaacacctttctctccctggagactggcatcgtcctaggccttcaaatgccaccctgttttgcattatcagctgctaagacgaagtattagagtcgtttttttccttttcacttcaggattggtaatgctattattagctaatggcagaatcctgcatggcctgtggctagagtgagatggttcctgggctaaaacaaacagatttttagatgttgtggccttctcagagtgtgtacctccagctctggaattcctgtgcttccaagtgagacagacaggactggcctccttgggggatggggagggggagagagagagagagaatgagcttaccttctctcccaggaccccttccg

SEQ ID NO: 51635 - DNA, 1030 bp, Bovine  19866881099752
  misc_feature (1)..(1): n is a, c, g, or t
natgttacagtataaatgaatgacaccaacaagagaacatgtgttagcgatgcaagcaattagttaatatattacaagcttcaacctctgagcaaaacaggcaacacaaatttcctcttgacaaaaggctatagataagatcaggtgggttccggaacaatacaacctcccagaattggagcaatcctccagcaggctgggagggagagatgggggtctgaggaatctggggtctgtagagtgtgagtcaccaggtaggtctcactgtccctgagaatgactggctggactttgggctctttgcagaggagaagtggagcctgaaatggaagaggacatccgggtgtcccccggatctggttcaccacaaagctgcctcctccttgctggggcttcagaattaaagttagaaggtggaatgaaatcgtattgctgttttcaaaggcaaggaggtgcctgtgcaaggtgatgggcatggggatattatatgggcaaatgcttgatcactgctttccagaggagattttaaaaactaaatattgtatattacacagtttctatctcccccttcttctctttcttctctctttcacacacacacataaagatgtttgaaacagaaaaatcttcttacatatacacacaaacagacaatatgttttaggtaaaatacacatgattgatgtacacttggactaaggatttgaataagtcccttagaaataccaaggaaatactgagaatgcaagaaggcaggaaaacctgaattcaccaactcaaaatgtaaaaaaatttgtagacagttaaaaatgtctgcccctgtacacacgcacacctacactttcacacttcctctgtttactaaataacatttcagcacagttttcatcttataaggaaagtgtttgaaacttggaataagtgcacttaattaaaggaaggctgtgaaaatgtgcactaatctgatatgactaatagcaaagtgcatgaaattgctaattagaatttcattaaaggtgcgctttatcag

SEQ ID NO: 51636 - DNA, 2929 bp, Bovine  19866881172650
  misc_feature (1)..(1): n is a, c, g, or t
ntgcattggcaggcagattctttacccttgaagccagctgggaaactctgggttgggggttacccatctccttttcttgcccctgagagcagttctttggggcttccctgtttgcccagctacccactaattctgctcaggcccagcactgcccacaggcctacctgcctcactccagttacctgactgaggctgcaggcatcattatgtcccaggagccagcttctccaccttcaatcctggccaagatctaagaatatctccgagagtattccccaacacctgcaacagatgtgcccacaaattacctggtcccaggggtggggagcaggccaggaaagggcagtgctttcctaaaagcattacacacttaatttgcaaagttacatcacacatatgtgcacaggtcaactttctgggagcttatttcagaaccggaggcaggtcacggatcctgagcgtgtccttcacagagaaggcaggaaggcctgtagacgttccatgagtgtcagattctttcacacaaaccagggcagatggggagaggtggatatttgaggggcctgtttcatctctgcacgggcccagtgggtgcctcgacagacaccatctcacttcttcccaggaaagcccctaccaaatgcgcatgcgcggatcctcatctcacaggtgtggaaactgaagccagaggaagtcaggtgtctttgtgtctcttacagaccatgtgacatgggcagagtctgaatttgaacccaggttccagactcctaattctactttttccccaccgcccagtgcagtgagagatggagcaggggtgatacgtgttacgtattactttttagagtgcagttgcacatatccatctggctacacttcaaaaagtctttattgaagtatagttaatttacaatattgtgttagtttcaggtgtacagccaagtaattcagttttacaatacatatttatatatattcttttccagattataatttattgtaagatattgagtgtagttctgtgtgctacaaagtaaatgcccttatttacaagacagaaacagatttacccaaaaaacaaacatggttatcaaaggggaaaaaggtgggggaggaataaattaggagtataggattatatacgcactactgcgctagtagtaatatacacaccactatatataaagtagattttaaaaggacttacttaactataattttaaaaagttatttaatggccttgggtactttagttataagagtcacagggaaagctagggaacctatgtgagattacagccaaggaactgtctacagaagcagtgaaacagcaaattgtaaaaatgagtaagattgagttcactcgacagttgtgtcaaattcagctcatttcattgacaaattaattgccttgaattattattcgtaatgttaaggttttacaaaataaacgtggtcattgcatactcagaggggaccatttagaagtccatttatttctaaaactaatattagatacaatacagttgcaaagttagaaccctcattcttccttatgcttttatattctgcctctaaaatatatttgtttcttctcctagctattgtttttactgtgataaaacatgcgtgccataacattttttgtttaaatgatttttaactgtatcaatagagtccagcggcatcaagtccattcctactattgcactacctatactttttcgtgaaacgtaaaaaatctcttctgaaaattctagcaaagaacaaatggatcaaaggcatggagaaaaagtcagccccgcacgcccccagatccccttccccgggtccagggagcacttgtaagcaggtctgcttgtctagtgagatgtggatttctgccagatttgctcattcggtgagacttcttcactccttaccaccgagagagcgtctcaaacccaagctgcctcttccctacctctatatttccaagcaacgtttccccgaccagatttacattttcaaaaacccttcagataatcacaaacccaagaaacttccactcctctgaggtttaattaggagaaactgtcttcctggtacttccgagtgcctgcctctaaatttcttggcggaaaggctaggttcacggcagatgagtgggagctagcagaacctgtgaatcgcctcccgctctgtccccgtctctccccagcgaccgggagaaggctgggctgcaggtcattgaaatcacattgtgcgtgtgccctctgtcattaggacctagagaatggggacgatcggaacgcagggataacacattagtgatagataatagagtctaaataaacataatcagctttcctctagtctccagaccaaagcttatctataaataccctaatgacgccccaccagccaattacttgtttcttggaagagccccttattaatggcgtttgcagtgagggaaaaacattaattattggacacagtgggatcttttacgtgctgtctggtccggacagcaccaattaatgcaacaattattatcaacgactgtggcagcatactgagcgcagccaccctgggctggcttggtggggtgggagaacctgtgtgctgggggaccatcacccactcgctgttccgggactctgcttcttcctcactgcagaaactgctggaacaaagcagagggtggccagagtgtgttgggtgttccttttttttaaagttatttatttattttaattggaggataattactttacaaaattgtgatgctttttgccatacatcagcatgaatcggccaaaggcatacatgtgtcccgtccctcctgaagccccctctctacccaccctatccctccaggttgtcacagaacactggctttgggtttccctgtgtcacaggtttttccttttaagcctgagcatag

SEQ ID NO: 51637 - DNA, 1573 bp, Bovine  19866881195704
  misc_feature (1)..(1): n is a, c, g, or t
ntataatgaggagggcaatgaaatggcattccgagagtcaatggaggagaaccctttagttctctcctcagggaatagctgaacaagtgattgttatcagagaacattctccagagttcccagccatgcaggattactcacttcccccctcatcaacacccactactcggtgcacatctctgaaagattttatacacgtgtcacatagacccttccccacatggcaggtacgccgcacgaacacggtcatacgcatctcactaaccagccacccaaaccccgccggctctgctgctaccccagtcagcacaggttagagatcccttcaacaaaatcacagtgagtgttggactcagatgtctctcatctcctccccttcaaaaaccatgttggaccccacttagtctctactctctgctcttgacacacaccagccttaaccctatgcatttacacctttctaaccatcctatttaaggacataattttaagatgtgtgtgcagaggtaattaccagggtgttcttcaagccttagtataatattgaaaacgcaaaacatcttaagtgcctagcattaataaaatttagagcattcatcctagtttggctgaagaacaaggcaggtgttatttacatgaggttgatagcgatgtgaaagaggttcattgtgtacgtgaacagaaatccatgggttgctctaagttacaaataagcgtactgtaatgctctgtgtctaggctgatcccctgtttactagaaaagcaaactttatttttttttcatctttattaaaagatataaaggcctatttttaaaagcccatgaggggacacatgagttggttaataatgtttactgctcagtcacatgatttcaattttttataatttttctttaattttattctcggtactgtaatttcagatttcacattttgttcgaatttttttctttggtccattcatgttttccgatttctctataagaagtgatttcttctgttatatttttaaaagttatttttaattttaaaaaaaaaggtacttagaggttcacagctgatcatagctttagaattcatctagtctaatgactttagtttccaggtgggtaaactgaggcccagagaagtgaagtgcctccaaaaaggtcatcaaagctgtttggtggcacagccaaggttccctgattattcccgttctttccaggaagtcctgagatgtctctgggatttttataaatatggagaaactgttttcataaagtcacctgcatgaaacccccttccctcccagcaaagttcagcatctcttgattggctcaaaatcaaaggtgccctttactgcttctccaccccttgcccccaggtcgcaataccaatggcatatatcacagcgtaggtgccaggacaccaggtaaatgttacgccaggtttcagcacattattcttgtccaagtctccattgtgtatgcaggacgagtgtgagacacagctccaccctcggcttgccccaccccttggctcatcccagtctggctacatggttaataaacaacaaggccaaacgaacg

SEQ ID NO: 51638 - DNA, 753 bp, Bovine  19866881359525
  misc_feature (1)..(1): n is a, c, g, or t
ncacctgacccgtgaagcaccggagaccagagataataaatccgccctccccgcttcgccccagccaccgtgggccattccccacaggcagccccgcctcgggacccgggaggcctagcagtgaacaagtaacatccgcagctcaagcaccttccgtatccagaccaggcagaagaaggcactgcccgggtgcaaatccagtttacaaccaaccagagatgggaagggtccatgctgaacgctctgggcaggctactacatctttcttcatggtcacgactgagttagttactgacttgccagggggccctgggccagtcctgggctcccattgtccccacgtagttactgaaggcaagatggcttccagtcctggtgttcccaagagaagaaagtcactggtagtcaagagatgggagctttcttcgcttctccccctccatgtgtcccccttccctccctcagcctcccagcctctctctcctcagccctttcctcttcaagacccagtgcttcccagtgtctgggagggactgcacagatgtgggggcttctgctcagtccgcatgcccacctcatgcaagcggcaccccggtccttctgggggcccctgcgtgcatgaagtttctctcacgtccgccgggccggccccggggggagggctttgggctccctctacgcccagggtacttgactgttaatgatccccgggcacacttcccccaccctgtcccctagacatttcccttccag

SEQ ID NO: 51639 - DNA, 3273 bp, Bovine  19866881485131
  misc_feature (1)..(1): n is a, c, g, or t
ngaatgatttgataagctgaaacttacccaggcgcctctcctcttggctcttctttagtatatttattttttcagaaaacattttcttgagccttgactttgggccaggactgttctgggcacctgtagttcaaaggtccctctctggtggagcggatgtccacctggggagaaaacatcgtacgagtaagtacatgaacatttttacaaggacctcatactctttaagtatgtatcaagtcgtgtccacattcatgaggtttcatagaaaaacaaaaataatctcaatcattttaaaatctgcattattgaaccaaccacttgtaagctgtttccattcaaatctatacagtatcagagtctatcacggcccaaagacttgtcatcacttttgatccatctcctttcattctgggttatctgacagtacaattcaattacaatgcaaacaaattgcagagagaaattgaagagtttaccaaagatgtaaggttttatgaagttgatgagagaaatacttaaacttcacgccaagccaatgacagatgggcatcttgcagttcatcaggtaacaaagggaaggggcggggattggcagaggtgatgaactggtggtcaaaacagaatggctgggccatcaagtggtttaggaaagctttagaagctctaagctccttttgcaataaacagctttatttatgtttgtgttgcgaagatataaagaaacattaaactagggaagccgtattgtgccactatccaattttgtcattaaaaattacattcctcaaaattatcaacacataactttgttcattctaaaaccacagtgtgtgatggaaattagactctaaaactggaaagaataagattaaaacaaatttatttttatggtgtataggttcagttttcaagctaaagtctgaatccaaatttttttttttaaacttccctctattgcctatgaaatattggctcccttgttaggtgaacttgctctttccaggtatgattacccatggataacaaggcctcctgtcatcacactggtgtaagtgttctaaaggagagtacagagggctctgagaccccccagggatcttagctagtctagggaagtgaaccacagctgagacttgagagataaacagaggctagaggtgagaatatgcctagagtgcatcacaaggcaggctggcaaggtctaaagaagtaaaagaaagccagcatggccagaggcaggtacaggagatgagtctgcagatatgggaaagcaccaggatgtttgttttcaccaaaggagcaacaggtcaccattgcaggatttcaggtaggaaactgacagatttctgatttaaagaagctcttgtgggtaccacatggcaggtaccatcttacctcttgtaactagcaaagcctccctggacatcttgtttcttcatagacctaaagccccgttcaaaattcccagactggaatcagactttccagcgttagggccccactaagggacactgcttcactgcagatgaagacagtgaagaagcccagtgagaatgagtgacccacctggcattttgtgttgggagtctttaaggtctccacttccaacgatgagacagtaccagggactggaaatatcctcttaccttagccaaaaaaatgaagaagatgccaaaacaaaaaaattttttcagaacttgggcaataggcagtacagccaatgatccctgaaagaagggaaataagtaaaatgagccctgtgattggcccagcttgctgctggagtttccagaccatacatagcacaaggtggggaaattcaaacaagtccagcaatatagctgagttgaagagacatagttatgaatttggggaggccaaggtggctggaatttgaaggatggggtatctatgaaaagacagaggcgaaaggagaaagctacagcaagaactgtccagttacctgctccctttgagtcttaagcagagtgctgatcagtgcatacatgtgagaaagctactcaagaaggcagcggggagagggtggtgaaacacagggtaggaccaagcaggacaatcgccagagttcacactcggctgggaagggtctgtgttcccatcagccagaaaggagcactcataatatacaggcaccaggtaggtacccaaaagagtattttttgtctcagtactagagaaacattagccatggtctaaagattcctttttcccacccaccaaagcttaaaaacaaaccctagaaataccaaatggcttctaaagaatttatctgtatcccggagcaaagccaagaatatttaaaggaatacaaaatgtcaagcaccacccatggtaagaagtgacgatgtctggcatccagtcaaaaattatcaggcatgccaagaagcaagaaaattcaatccataatgaggagaaaaatcaatcaatagaaacagaccccaaaatgacatagatgatagaattagtaggtgagagtccagctgtctcatctgaagacttccacaagaataatcactgtagagagaggcacaaagggaagtggtcttgtgatagcaatcagatgaaaggcactggaacatcaagagtaagaatgagtctacacacatggttctaatctcaccttaagtttcctagagctcagaaattcctctcaacagagactgatggttctattgcaacttttagactgagtgggaactcatttcaattattcaatcatttgaaattagaatattccttgagggacaagaaaggcatgagtaagtctgagcaaagtccattagaaaatcaatctatttagcagcctttcaaaaatattcaatcgagtgtattatcaggcattaaatcagcattactttttattagaaagatagaatattctggttcggcaacagctcttattcaaacctctacttcacttcactatctgttatcaattctgccatccatatctgctgtttaaatcatgaggaaaaattatttgaaagacaagccctctatgacaactgaagaatattctccattgcagtaattatattattgctgaactgtgttaacatgtaaattcttttctaaagtcaagtgtaggaatacaacatcgggagctagcaatttaaaaagtgaaaaatctcaatgcatattcaaaatgactagttgtgggaataacctttcccataatgggagcacaggtaatctttaacatcctccgactataaagtgggaacccaaattctcagcctgacttttcca

SEQ ID NO: 51640 - DNA, 1427 bp, Bovine  19866880379602
  misc_feature (1)..(1): n is a, c, g, or t
ntcagttcaagtctgaatttggcaataaggagttcatgatctgagccacagtcagctcccagtcttatttttgttgactgtatagagcttctctatctttggctgcaaagaacataatcaatctgatttcggtgttgaccatctggggatgtccatgtatagagtcttcttttgtgttgttggaagagggtgtttgctatgaccagtgcattttcttggcaaaactctattagtctttgccctgcttcattccgtattccaaggccaaatttgcctgttactccaggtgtttcttgacttcctacttttgcattccagtcccctataatgaaaaggacatcttttttgggtgttacttctaaaaggtcttgtaggtcttcatagaaccattcaacttcagcttcttcagtgttactggttggggcatagacttggattactgtgatattgaatggtttgccttggaaacggtcctctaggcttccccaaaaggaaagttacagattctgacaagtagggaatcccatgatgaaatggttggtccctgcttgcaaaccccacagtgaagccatcatccaataaccctttcatttgggtacagaaatcccagtcactttgtagtgctttttccctatgacagctaaagatcagcaggaataaattacaccctacaattgatagcctaatagatgagaagatagaacaactctggaataagaccaggatattatcaaggggaatgcagcagaaataaaatagtcagagaatgggatcagaagatcaaattggggaaattgtgcagaaagtagaacaaaaagacaaaaatacagaaaatagagaaaatgctgtaaaaattagaggattaaaccaagcggttcagcatctgacagtcaactaaaacaaggctcatagccttttctgtgccatagacccctcgggcaatctggtgaagcctacagaccccttctcagaataatgctttgaagtgcacaaaatacataggaatacaaaggaagccagttacattgaaatacaggttttaaattgttataaagtaaaataatgatatagtaatatatgatttttatgagcataccaaaaacaagacctagaggtagatgtattgtaattttgaagttgttgttcagtcactaagttgtgtccaatttctttgcaaccccatggactgcaatacaccaggctcctctgtcctccaccgtctcctggagtttgctcaaattcatgtccattggagtcaagtgatgccatctaaccatctcaccctctgcttccctctcctccttttgccttcaatatttcccagcatcagggacttttccaatgagttagctctttgcatcaagtggccaaagtattggagcttcagctttagcatgaaaggtatttcacaatacctgtgttgacat

SEQ ID NO: 51641 - DNA, 1716 bp, Bovine  19866880429596
  misc_feature (1)..(1): n is a, c, g, or t
natgcacgtgcattcaaactccaaagcccatagtagatacactatctgagctcctttttgtcccagtgaatagaacattaataatgatgaaatgggccagtcagtacatcccaagcagagggaagagcctgagggtgagctgggggcacagaagactgtgaggggtgtgcctggggtagaagggtgagggaacatggtggatgtaactcataaaggcaggttggggttttgactggatattatggagggtctatcgtttgatggctgctggccaaccagaatgggggcttctccagaggacattgcatttgggacataaaaacagcctcagaaagctctgactttttctgattttaagccaaatcatgttcatctccctcagcactgctcctataacctttttttagcacaaccacatcttcagcaatttggggccaagcaaacatggtcattcaggacgggtcacttgtccttgcaaggggccttcatgctctggtgacagagatagttggcacgtggctgccctccagctaaccacttctccctctgagaagagtagttattgccttgcatctctgcctcataaaaggggaatggaattggctgggggcaatctgttgggattggtctgtggcatgttgcattagtgtttgaagcatggccttcagaaagtatgtttccatttgttgtacttgatcatgatcagagactcggcttcaaaaaaaagaaagaacagagtttgaactctacttattggatgaaaagaaggagaaaagcaggggtagggcaggaagcaaattgtggaagagactcaatctgtattttcaataacaatagccatttaaacactgctcagattatgtctgatgagcaggaagactcagggtctttggaggaagaagcatgaatccaggagacaaatctccacacaaaagcaacctcaaaggtcaagagaggtcagatttgaatcatagctggaaggaacaatggagattagcccctcaattttttatattttatttattttttcatattagaggataattacaatattgtgatggtctctgccatgaatcaacaagaatcggcactacatgtacatatgtccctttccttttgaacctcccttcccacctcccttcccattccacccctctaggttgtcacagagcactggctttgggttcttttaaaactggagcagctaaagcccagggggtgcaaagacttagttgaggccacacagatggtgagcaatgggacaaagtttgaagtatcttgctttccagttctgggtttgtttgacatcaagctgccctctaggagaatgtgactgtgagcaaacagtaaatgttttaagatgtcagaaacctgggtgtgggtgtaaaaggccaaggatggcttcaaggaggacatggagcgatgtgaaataggtggagagcagagggcattgtagctagagggggaactgccctctacctgcccagaatgtgccaagcctggcatctcagtgtcaggaaaagaagtaagcagattcttgtggccaaaataaattgctacagcagtaaaattaaatcccctttccggaagaaatggaaacctttgtaagagatgagaaatctaaacctttgtgccccagcttaactgatttaagaaaccaacagttccttgcaaggttgaagagagaaggaggaaaatactaggcttgcctcctca

SEQ ID NO: 51642 - DNA, 1286 bp, Bovine  19866880476793
  misc_feature (1)..(1): n is a, c, g, or t
nggctgcaggctcagatcagagaaaccagaatttctgggcctcggcatgaggattttttttaaaggtctctgagcaattccagtgtgcagcccagctgagtagccttgagctaggcagtggcaacatgctagaaaccctgcagagagaggagctcttgggttcctgggctgaatactgagaccatggtcattgcatctgcttcttgagacaaaactctgcttcttcagaaaagggaaataaggaaatgaatcacaatgtatgtttcatgcacccgaaggaactacttaatataagatcagagttaagcactgacacaccctctagaacaagtagataataaacactcaagccagatttcatagaatcagtaagaaacctgtttctcccaaggatatgtctgatcactagagtcagagtattttctgagtcaggaattcagacaataacctgatgggtatatgtgtactcacaggaaaaccagtcccggattcctgaaactggacttgtcttagaaaattcagtctggatggtgactgtactaggactcttaagagttattggctacattaaaacaaaagctttcagtaaagtgcggaaaaaagaatttcgtaattcaggaagagaaggactcacctcatcactgaaatttctgaaggcagccactctctcttccacactttcctgattcaggggcaccagcttcaagcgatcaattatctgtttaacacaaaagccatcagccccatatgatacaatcatcacagtcattccatctcttcaaacacatgtcagcatctaacatgttcataggtggcttcttagtaggaaattctactccccttgttcaaaggctttgattccaacttgctgactgactcaattcctatccttgttttccgaggcagtttttacaattcagagacttcaaattattttgagaaatccctctgtttttagattaaagaagaaaggaaaagaaaaaagggaaaaaaaaagaacaacatagaaatcccttttaaattgccaggatcttacttgtcctttttcacttaacaggcatactggtgacatttcctttgttttaaatgaatcccacaaaatgttttgatttttcaagggcatacattaagcaggacttcaaacacccctcctgaaacttacatcaaaggctctgtcaatatgcccactgtgatactcgtcaaaaaaggtgatcaagtccaacagaagatagaatgtggagtccacaaatttatttgcactgattccctgagccctatacctgaag

SEQ ID NO: 51643 - DNA, 3049 bp, Bovine  19866880587401
  misc_feature (1)..(1): n is a, c, g, or t
nattcactttactactatttacaccatgagtcggcaaacttaactccgtaaaaggcagacagcaagtacttcaggctttgccggccatacagtctgtcattactactcaactcggctactgtagcacaaaggcagcacagacaatacacaaacaagtacgtgtggctgtgttccaacaaaacattaacaggcagcaagttgtatttggctcctgggtcttagtctgccaacccctgatttataccttcatatacgttatgcatattcttttatgtgtgaagaaatttaacaatttaaaaatatcacacacacatgcaaaaaagcaatcaaatctgttccctaaaatgaaaaatccaacacagtttatttaaacaaatgcatttcaacacagaacaattcaatcttaaatctacaatccaatcttaactaaaatcttgaagacagaaatttctttcaaaatttatttcatgtaagaaaattttccctattcacttctttcctctgccctcatcctgtactaaaatattcacatcacactttatgtctctgcctatcacagagatggaaaaatacagtcatcagccctttggtttctttttaagcacctgccccaccctatacccattctttcaacgttccaaattcctccccactaaaatgatgaatttaaggtagaaagaaatgaggaagaatggaaatttacaagaaagagagcatgactgataattgttaccaagaaaacattttcccttttcgctcttaataggctgtaaagctgatgcaattaaattataactataggcaactcagctggcatcacagtcctttcactccagcagcatcttttcacataagcaaagcctgcatgctcgagccccggggtaactgcaggcagccaggagctgcagcagcaggagcctgcagggagggtaagttagtggaaacgtctgaaggctggttggggtgttgggcaatagtgtaggggagcaaggatggataataaaaaatcccccccagggttcccctgatgtgcctttaccaataccaacagaaccaagaaaacttagtattttaaaaaaataaaattctggggaggcctacataaggatttctacaacatccttaccaattcagcatggcagccaaaacattcagatctcaagatgagttgaaaaaagaaaatgtggccgttatactcatcctggtgacattcactatgtatccaaacaatgtccccaccttaataccggcacttatgtctttctcaagtttaaggaatgaagactgagcagatgactgacaattcccatgatgcattttccacagagaatctcagccactttccagacccagcaaggtcaccagtaacaacacctctccatcctcccatgacccttccatcaggcctaaaggagcacacactctggagtcaacctcactgggtctgaatgctgactcactactcaccagctgtgtgatccgagagagttattgccctctctgagccttagctgctcaactgtaatacaggggtcacagtcctactatttattgtgaaagtgaaagtatcagtcactcagtcgtgtccgactctttgtgaccccacggactacagccagccaggctcctctgtccattgaattctccaggcaagaacactggagtgggttgccattttattgtgagagctaagcaaaatcttactgatgtacggtaagtaatcaataaatacatttgttatggaaagtggcaagattttttttctgcctcactaaagaataagctccttgagggcaaggaccatgtctaattcatggttgtagccgagagagtccaggcctggcacagtggggatcccaaacatatgtctgtagaatcaacaacccaatgcatgctgcatggcagcagcagccaccggtcaacagtcaatctgcacttttcccccgctgcaccttctcggggctcattcactttcctcttctacaatcaactggcaggcactacatttccaaggtcttttagaagcagcctatggggtcactgacaataagcagacagaatcactactcacgtggatggcttctcatcactaactgctcatcaatttcttccaagtgctcttaaaaatggtgcccatcacttcgtgctctctggcttttaagggaacacttatctgtgtgacccacatttaccaatatactatgtgaaccatttatgacccaacagtcagtgaacccaagcaggaaaatgactgggacgcttctgcacggcaaagctctacaccctttctcaccctgatcatctctgcctgtgacaggggctcacagcttggtcaggcagacaggctggaaaagccaggaaggtgggagacaaagcggtgctgttgacctgtttacgaaacctctctcgaattcctgaggatctggcgtgtatctgaattttacagactgcagccacattcaaggcaggaaagaagaaacagatcctgcccccgagctccccagtgccagtgctccctccccagcagtactcacgccttgacatctgctgtctcctgggacgtgcgtgtgagggtacgggaacgcagacgctcgcccgcctgctggatctcctgcaggttccgttccacatggggaagctctgagatgccctcggtctccgcggcaagctgttcagcttgctgaaggagctcaccaaacccctcagtatccattggggatgcagatcctaggtgggggagaagaaagaagagacccaagtcaagggacggataggcgtcacacactgcctgaacctgtcacaagctcaacaaaacactgggactttttgaaaacagacaaggagacaggtcctcaacaagcagggtttgttcctgaacgtagcccaagaacaacaggtctgacagaaaatgagtcagactgagaagaaatagatcatttctgtccaaattgacagccccaagattgatttctgccaccagaacaaaagcaaagatattaaggcacagactagaattcctgtctccctccacagactcagagcgacaggg

SEQ ID NO: 51644 - DNA, 1682 bp, Bovine  19866880620750
  misc_feature (1)..(1): n is a, c, g, or t
ntgtgtgaaaccccaagtactggaggcaaatggggtaccatgacagattccatctaaggcaatgggaagttataaaagagaaagtctgttagtggtttcccaacaaatacatttttgaaaaagaatttctgaatgagaagaaactgcagcagaaccaaacctcccttctctgtgacagccatgatgatcagcgctccgatcccatcagcataagcagtgctgcatagcaggaggagctgggattttcgactgcagtgtgaatgactgacaccgtgtaccagcagggaattaatatgacacgtggttcccaaacattgtcttcgctaagggcgctccttgcgcttgctaagtagaactcagacttaatcttgagcacagtggaaactagcctggcaaacacgactcagctgccacctgactgcctcagagacacaccctctgctgcctgtccttctcatagcccccgagccttactttgttgccaaggagaaaagacactagatctgacaaagcaggcaacctgtatttttttatatatataatacaggattcttttaataagttcttttaagtttgggttgggagcgggaggacagtgggaagggactttggccatgataaaggccatgactgatacattcccatttcatactgcagagcagttttagtacctaaagttctttgaacgtggactaatccatctccaagatggaaatccgttccccaaagacacattaaaacatttttatcatcctttaatatatcctccttatcttatctttccatcacctaagagtggctatgggattaatattttttagatctagtctttgggtgtggagagggttcttcagctgggcatactttggcacacagtttattccactcacaaagctagattgaaaagtttcctctttagaatcctccctgttcttgtgacttcgaagggttgctctaacaggtatgctggtttggagccagggtccgggtttgaggggcaggcagaggagagaacctgctcagagctgctgtccttactctctcccatggggccacctccgagtctgagagcacttggctggctggcctccccgctccctccctgccttggtttttagtgttcttacttttcggccccctccttcccaggagtggaggtgggggcgcagcagaggcccagcgactactgcagggcatatcctgcggcatcgctgaggtgcgggctctggcttgttttctggaagcagtgagatgtgggaatctgcgccaagcaagtcacatcctctccacaggcctcctgtgaccagccggggagagctgcttacacaaccctgaaaggttattgcagggctctgctgcatttgggaggagaggggatttctgctgaaaaacatttcccccctagctgactaaatggccatcatgttttatttcactcgttcatattatgcccttactgcttgccccccaccccagagagtctcccagtacctgacctggacgcttccctttcccggatgaccagaggtagataacggggatggcttgggccccctaaaagggacagaactggtttttaagcaggagcacaagagacttacatggctctcactggaatgtagaccttaaccttggccttatcctccaagtacagcaaccagatgtgccaataagcaacccca

SEQ ID NO: 51645 - DNA, 1111 bp, Bovine  19866880647164
  misc_feature (1)..(1): n is a, c, g, or t
nggcctctgctccttttaggcgtgatgtccttcccctctgtagggcagggcccctggcgagaaggtacctggtctcaggggacacgtgtgtctcagctactgtgtcatccccagcactgtccaccagtacttctggtgacaggtcagagggagaactacaacatgggagttggaggggcccccagaccatctggtccttccccatctgttgcagaagggcgagtggggcccgatgcccagtgtgtaaagaacctatgtaaagggcacacagcaagacacttgcagaacccagacgagaaccttctccctcactttttttaaagttctatagtattgctgatcttttgatgttccctccctcctatagcctcccctgtttaaaaacatcccccaaaccctggcaaggacctcctgctgtctactctaacatgcttgacccactgaagacttgtaactctggggtagttgctggaggaaattcatgcatcttcaaaaattgtgcccagtaagaaaaatgggacttctggcagagaaagtggtttcagtgagtcaggtgtttcccaggttcatattccctggaattctggtttcctgagccttgagcctttattctacacctcccccccaaatagttgtacagtcaagtgagaaaatgctacctcctgcatccctgtcttggagagacacaggggtctttaacatattagatgttctgaaaagttctgtagtttaaaaaaaaaaaaaaccagcagctctttgtgtataattcagagtttcccacacttgtttgacctcagaactctttctgcatgaaaaactgctggcctgtctcagagctggtcttcatccaaccacagactaactagatcactcacacaaggtggtgtccagcttttgctgtttatacactcctgggttttttttttttttttttccagctttaatagtaaaaatatattttcaaaaataggtcataaggccttttcaaaagggggggggtcccctccgatcagcctttcactgattcgaactaaaaggatggaagaaagcttcacaaagatatcccctcttctttatatcctgtgattctgtttttattggcctaagaaag

SEQ ID NO: 51646 - DNA, 1604 bp, Bovine  19866880770574
  misc_feature (1)..(1): n is a, c, g, or t
natatatagcagctaaaacaaactaaaatagatcaagtcccaaaccaataatagaacaatgtgtacagtatgataacatttatggagaatttaccaaatgtataaaaaatactacatatatattaagcagattctatagctagtaaaatataaacaatatagtggatgattgccactagaatcataatagtggtgcctctgggaagaaacagagggaaagaaataagtatgagaaaagaagacatcaaagatttatcagtaaagcattacttctttaattaaaataaatctgaagcaaatattacagtgtcacttggaaattctgcttgatggctccattggtatttcacagtattgtcctcagcactcttctgtatttttgaaagttttcataacagtaatcataaagtccttcttgcaatctatgtattaaggatgaatatttcttactaactctacagaatcagaacatttgctattaaaaggaaacaaatgtaactctacacacgatctgtgtgtatacccacacatggacacacacatgtacgtggcagaagtccagtcttctgctatcagacatgccatgacctgtgtccaacactgtgtctggcacataactgacattccattagcacaggttcaatgaatgcataaagtatgttgtgctgctgggtgggacttcaagagtcactttgcatgaagggaggtttgccactcatgtgctgtgattgcttaagaatgagaatttgcttttgcaggtgtatctgagggttcaccagggggaacagaatatggtgcctgaaggagatactggtctctagtccaactgaggtcattgctttttggaaagaggaaagatgtctaatttataggagaagtgacttttccccattttactctgcacacagcaattctcctttggtagccaagtgacaaagtgtatcacccattggatgagcatgagcgagaggcagaaaggatgttttccctaatttctcagacacagcatggcattgactcaaaaaggactccaggagacttgtacttactttggtcctttaagaatttgccacagaaagctgcatatagctctactggcagagcttcatggtaacttgacctgacatcacatagtttttcggtgtctctttcccatacaaaacatttatgtagcataaaagctgaatctaacaataatttatagaaagctagaaaaacagatgaaagataggtgacagatagagataatggatagatacagagatatcttctcctcatttgagaagatttccactcttagataaaatatagctgccaaaagattgaacaaatatgccaaaactcatgaggctttctctgttaaaaaaaaaaaaagtgagaacctcaggaatgttttgcaattaaccacgctccatgcataacaaacttaaatatgggaattggcaaccagacctgcagatagtgtaaagaagagggttttgagtgcttcacgttgtcttttttggctccaagttaagaggcccaagatgtgatttcaattttggatgcgctaattatgtttgtcaactgtgagctttgcttaattaattagtcatgcaaattta

SEQ ID NO: 51647 - DNA, 1963 bp, Bovine  19866880780332
  misc_feature (1)..(1): n is a, c, g, or t
nattctgagctcctggcacatgggttctctttcattccttggatactcccttttgcttcagtaatgttccctctgtctcaaaggctcttccacctgatcccttcttctgatgccttcacacctactcactgtcagagtcaccttctccaggtgtcagattgctttgtcacaagctctcaaggaccacattccctttctttagagcacttgtctcaatttatccttacatgctcataaacactcctgcttaattcatgtctgtctcctccattaggctgaacgccttgtgaaacaaagaccacctctgtcattttaacattatttcccagaagccaactcagtagccagcacattaaaaaaaaaaaaatcaataaatttgttgagttattgatactccagctccaaagtctttctaacattaaaaaggagaagaaaaactatttgggaatacaaaataaagaaaggaagatttaaagatgtaaagattataactttctcaatatgcaagactgatcatagatacaaaaggtcaagagatacctcaaggtctgtcaacatgaaaacatccaatctacaaacagaataatttaggatttaggttgaacagtcacagtccatatgagagctctaaaaatgaacaacattaggaggtgaggaccgcaacagcgagagacaagggctcacaggggacagaagagcctgtactgcacacagatctagtccagccgtggaggtgctgtaatccctgatgatagtcacagttccgggctgcttactgtctctggtctgatccccatcccatcacaccatcctggtgtgtgtttctatgttgcttctgggcatgtgtgaaatgcacaaataaatattctcaccccaaaaaaggtgagaaaagggaataagctattggaaagcgaggattcctccacccctttgttttaagtcttaggggcctatgtgttatacctcagagcttacacagagaaggaatgtgaagacagctaacacatccagaaattgagatggcaaactgagtggggaacaatcctgccgtgtagggaagaggctgagaaacaaggcagacacccccaggccccccacctgactcagtaccagcaccttggccagtctgagggaacgcgcccactcttcagctaaggttggtcttaagccccggcacaagaagcatcctcgtggcctggacagaacaccagtcccatgtggcccctgccaagctcctacttgtggaaaagatgtccacagggcagtttcctcgcagcctgcatggagtcccagcagatggcgcagtcatcgttattgacagccagctcctctggagttgccactgcaaacctgtaaggaaaaaaacggaaaccatcgcagagggcacctggcagaatctctgtcaatcccacaaatactgagcatcacttgcgtcacagatttcacctttctagcagcacacttacagaggaatcatgttcaccatgaaatctccacccacggaaaccatgacaaccatgctctctccagagatcatcaaacagcagaaaaccaatacacagaaaccgactgtgtcgtaacacgacggccctcgttagtgatgacatgagcgcacatttctgggtagattagaggagttaagacacctcagagagccaaactgctcccctggacacaaaaaggatgcctgttaacctcacaccattcaggcttggtttagcctcaggatgccaagtgaacaacctcagtgaggttaagagtatgagagacagaatgtgtgtttgtgtgtgtctgtgtgtgtatgtaagcatgcatgtgtaaggaataaaaagagcagaagcccaaggagacttccatttaataataatgatgataaaaataacaatgtaataaaagaacctaatatttacccagtactggtctcaatatattatgttcattatcccactgaatccacccaaca

SEQ ID NO: 51648 - DNA, 1330 bp, Bovine  19866880816227
  misc_feature (1)..(1): n is a, c, g, or t
ntatacagaactaaagatcttcatagtctgctaaatttccaaatggaaatctgtcctgtataagtaaagagaaaaaaaagtcctaaaaagagaggaaaatagctgtaagaaaatgagtcagggaactgatgtatcacatataaaactaatgatgcaataataattgatttgttaaaaacttgttctgcttaccacactgtatctatagtaaaatattcattatgtccttcctttttctgtccttggaaatgtagagttatgctcaaaccactgttagcttatcttgtaaataaccagaagaaactaaatggctttggttaagtataaaacaaatcactggtgttataatcccatatcacctaaattgttattttcgaggtttatcttttaattttataccttcagaattaaggtactgctgattaaatgcagctatatataacagctaagaggaaaagtggttgaatgctattaataattgtgtgtttgtagtactggcaagttgttggtagggaattggttccagaaatcctatggcagtttgttgaaaagagggtcagacttacctagaatgattagtatgctaatagcagttcttcaggattagtactggcaaaatattaatactgaggggagaatgcagtaagcttttcctagcttgaattagttgagagaaggggcattctgaatgggcgaacagtatcttcagtcagttcagccgctcagtcgtgtccgacgctttgccaccccatagactgcagcacaccatgcttccctgtccatcaccagctcccaaagcctgctcaaactcatgttcatcgagtcggtgatgccatctaaccatctcatcctctgttgtccccttctcctcctgccttcaatctttctcagcatcagggtcttttccaatgagtcagttcttcacatcaggtggccaaagtattggagtttcagcttcaacatcagtccttccagtgaatattcagaactgatttcctttaggattgactggtttgatctccttgcagcccaagggactctcaagagtcttctccaactccacagttcaaaagtgtcagttcttggacactcagctttctttatagtccaactctcacatccatacatgactactggaaaaaccatagccttgactagacggacgtttgtcggcaaagtactgtgtctgctttttaatatgctgtctaggttggtcatagcttttcttccaaggagcaagcatcttttaatttcatggattcagtcaccatctgcagtgattttggagcccaaaaaaataaagtcactcactgtttccatgtttctccat

SEQ ID NO: 51649 - DNA, 925 bp, Bovine  19866880832453
  misc_feature (1)..(1): n is a, c, g, or t
ngaccttgtaaggactgacatgcagctatttgagtttaagatcctagagctctggacgattataaatgtgttcactctctcttaagggataacccactgagatttagtgttcttgttatatgtggtctcaattatataggtggttatgtcagacctggaatagtaattgatctgaaaacccactcaggacgggggctgcttacgggaagatgagagcctggccactggccaggccgaggcccatcttctttgctgggcttgagcctgagggctgcagacaagacgttaacctcagccccctccatgtcagagcaccgcgaagaaccaggctgcttgcccagccccacagcgttgtcacatgcagtgtcgtttctgtgcagaacatctccgacatgtgggccatggtgaaacaaatgacagatgtgttgttggtgccagcgactgacaccctgaagagccgcaacagcgtggaagtgcgcatggagtttgtcaggcaggccttggggtacctggaacagaggtgaggcagcggcagcacagaggccgcctttaaaatcccctgaaggcagccgttcccgtttgaagtggtcctctagctaagtgctctggagctggtgtgatttaaacaaggttgagcaagtctgagagatgttgtgctgtttttaggagcacttctctatgggaactgtctctgcacagatgtaaaaccacgtgagtgggagccctgagccctgttaggcttttctctgtctttctccaccctgcgtccctcagtacagacacagggttattagggcacaatgccttgggtcaggatcctgggccctcgcggggttcagccattactcctcaggctcttggttttctctcaacattttatttttcccacccagcattttaccacctccaaaccttaggaaagccc

SEQ ID NO: 51650 - DNA, 1267 bp, Bovine  19866880848370
  misc_feature (1)..(1): n is a, c, g, or t
ncggtgggggttcctgtctactgtggggccctgatgatgacacacacactggcgattaacctgccccaggttgtggtctggctccagaggctgcttcagccttcccttacagcctggggagggcgggtagccggcaggttcacacagggagacaggcagtgctcagaacagtgcacccttccctccacacccaaagggtgagggcggactcgcccccagtaatggaggaggttggcgggggttgggggcagcatccactgctcctggaatcgggctgggtttgaggacccaccgtcaccctgggagctgagcctctgccctggggctggcagggagagggttcccgactgagccccacgagacacatcctctgctgcctcctgaggagcctctagaagcttgccagtccccagggtgacaaaggctgggctctggcctcccatcagtgctgctccagcctttaagcagcagctcagagctgggccaccctacacagccagcctccatcagctgccagagacagccttatcacaggggtgtgtgacacactcccctggagccagctgggaaggaaaagcccccgagaaggcgtggaagagaggcagacaggaggggtgggaggaggcctgcagagtgggtggtttgattggggaaaagcccaggatggagggagagcaggagagggtaggtgggatgctggtggaggtggggagcagggctgaggcggcccaggccccgctcctcaggcacgcgtgcaccctctctagtgcaggcaaatgggctgtgtggcccagcagaggcctagggcaggagttaaggaggggtgctggggagatgggaggccaggacgaaagcagaaggggaatcggggtcggtccggcctcccgatcctgccatgtccctccgagtcatctggtctcaacatgcgtgcatcatgaaggttcatttcccaccacgcccagggcagcaccctcgcctcttctagccccaccccacctgccagatgcccgggagacgcgggtccctggcaggcccacgcggcacccacctgtgtactcgggaaagcagatggtcagaggtgacttcttgatcttctccccaaagagatctttcttgttgaggaagagaatgatggaggtatcgatgaagaacttgttgttacagatggagtcgaagagcatgagagactcgtgcatgcggttctgcagccccaggcggggagggggagagagtcagacagacagcgagagggacagacagagagaca

SEQ ID NO: 51651 - DNA, 3059 bp, Bovine  19866880898255
  misc_feature (1)..(1): n is a, c, g, or t
nattgaggatacataatttttaaatgatgtatatcgcagatgaatgtttatctctgcttaggtttaaagaacagtatagataatctcaagaacagagaaaattagattttttttccttcttatctaactacctaaggatttaaattacaaagccaaccaagaaccactgaccttaaccaagcagtttgtaaggataaataataagatagagaagttctccaccccatatatatgtgttggtaaaattaaactttcctttcaggtaactctgaactttagaatcaaagttttaactgttgctggagaccatggatggaggatgcactgctttggagtttctcaaccactgtttcttctttcactgtggtcttgatgacttcagacacgccacttgttccaaggatgcaaggcaaacttaaaaacacttcactatttatatcataatatccctgaaaggaaaaaaaataggattagagctgaatcactgcaaaaaagttaatatcataaatacggatattttcgtccttttatggtcctagcactacaaagtgatacaagctgaatttttaaaaaactttgctcatttattttctaaatgaactccagttactgtttccgaaaatttttgtgagatgggaagaacttggtcaaagatactccctttatggggaggtaagctagcaccctgcaatatgggtaataggatagaggtaaagaaaaaagactgtcattggtttgatacctggagcagagaggggaaaagcccagggatgtagtgaaaggacgtgacctgttgcatcccaggggctaactttctgagctccgtatccaaagctggctttattccataaccgctggtgctcctgcgtctcacaggtataccctgtttgtctgtcctctcctctctgtatctcattgtccccattccctgtcctggacatggggaaggtcagcactgaaagcgttaagcatcaggctttggttcatggttttaattccttggtaaagtaaattaggcaatgccaaaggttgtggatttgatctttggaggaaatgtgagagtaaattttgaagggttttattgaagaaataaaagatattttttatatctctcttccctggagaccctcattttcataacttggttcctgttggtttagttaaacatggaaagttaagatattgtgtccacctgccttggagctgacccaggtctgaactttttcaaatccttgatgcatttaacttgaaggatatgaaacatgcaagcataggttacatagttcagatttatgttctcctggattaagtttttctttaatgtctgaaagcatagttttatagtagtctttttggggaagaaacccagtattatctaacattattggcaaagttaaatgtattttatataacaaagttcttaaaatgttgagaagtaactgaaaaaagagtgatgagtaaatgtttaggctgagataatttatttcaataaatctttcaaaagccttttttaaaatgctgttaataaatttctgtgattttgtttctttttaaattcatttttctgagagcatagctatttgttttctattgtaaaacaacaacaataataataataataaagcaaactctcaaaaaagaaagaaagaaagaaaaaagattgttagagtggattcccagtggaggggttaacgtgggctctgagggcagtcaaatttggtgacctgttttcagttttcccttccatgttttatttcccttccagtattcctaagtttttgtgaatatttgattaagcatttgggcctcatcttagctgtgctttaggaactttatacttggaataaagcagtaaaggacaacctgaactggagaaacagactgatgaccagctaagaccagttggcatgtcagcctggggtgacctggctggctggggagataaatgacaaccagaagtttatggaatatataaacgtttcttgggaattccaagaattaatgggggtgaagggcaaccttatagaagtccagacttcccatagccaagcaagataggggttagaccaaactatcttctcccatgtgttactctgaaagctggtggtactcacgactccaggttacagtgtgaatagcacttttttgttatattaataatataaatatttaaaactgtgatgagagaatgagaatagcaattacctttgctaaaattgatacagaatggaccttctttttatcattcacaatactgtcaagcaggtcagctactgatagtccaacagaccatgatctttgaccttttacccttaatagttccatggccctaggttataaaaataaaacagacaaatcatgatttcataaaatgcacaaaatatgtataaacagttttagcttatgtataaggtattaattagatatttttatgacacaagagttatatgacaattgttaggaaaaccaacagacagcccagtaattaagcttttcttaaaatattaggcagtccacagtgagtcaatacagatggcctaataatataaaaagatgcttaccacccactaacacttactaaatatgagctaaaataataaatacattaatttttcccatcaaaattggcaaagaataaaaagactaatgggcttccctggtggctcagctggtcaatctgcctgtaatgcgggagacctggtttcaatacccctggggttgggaagatcccttggaggagggaaaggctacccacctccaagtattctggcttggagaattccatggactgtatagtccatggggtcacaaagagtcagacttgactgagcgactttcacaaaaagactgataactacttttagagaagctacagacaaattggcattcccataattgctgttcaaagtgcaaaattatccaagtttttaagaggaagatttggcaacacctgatctagaaacaccagtccattctaaaggagatcattctaaaggagatcagccctgggtgttcttgggaagaatgatgcgaaagctaaactccagtcttggccacct

SEQ ID NO: 51652 - DNA, 1657 bp, Bovine  19866880939710
  misc_feature (1)..(1): n is a, c, g, or t
ncagtagaagggagaacagagctcatcaggattctgtaatagtttgatttctgcgtgaaaccctacatgttgttaatgtactttaaagcattacagttgtatgcttgaacatgataatttcactgagtgattatcataattctaattgaaccacagaatttcagtggcttcctttttctgttctgtaattttctttattaatggtaacaggtttaaaaaaaaaaaaaaggcgtactaatgccacctcttaaaaaaaagtctcctcatccttcttgtgtttcaaacacaggcctaaggaaattagagctactttttccctcctttttattttttattttttcctactcagatctttaaaaccagttaactgcatgagggagaaaatcagagactttggaatatggctatctgaggttggaggaagtgttgctactatttttggaaattttcttctctctttcttggtcctgtacctgtactttgctaagaagttacttaatggactaactgggagaatctatagagagatggaaataaaaacaatgaactcgaaacttttctattaaagattctcattacagtgaattctaaggaactatctgaaggcatacttcattggaaatttgtatggaatagtgtttaaaaatttgagccctcaccagaaatttggagatctttcaaatgcataaagacctgaatgcactttggtcattgtggtagtaagatccatctgtttttacactttgggttgtctgcatttttcacacagagtgtatgtgtatctgatgtacaagttaggtgccattgtatttcagaatgttgcagtatacagaggattttgaaaagatcatatcgatcccctttggtaggaagaatcctacatcgtctctgcatttgtgaaataagcacacccatttacgactgttgtattaataagtactgagtccactagttgtctaccattttctcttttagtttttatgctgagggctgtataaagccaaaacacagaattaaacagtggactaccaaataggcatttaggaatggattacttcatctactgacacagcagttggaaaagtacttcctttgtcaggggtcgtcttttcagtgttttagcgacctccccatacttacatgggcttggggtctgaggcagatcacttaacatttctcagtagtctctactctgaggtcctttgcattcaagataccgtgcagctcatctggtctccttgggatactcacagattgaggctgaactggctcacagtttactctagcaacaaggtgtatcctcttagtttatttctttggccacagtggcatggaaaaatgtggctctaatgacatggggttttttaagtaatgaagggggttttctcagtctcctgtagtgaactttagatggtctccctcaggaataggttttaaccatcactgaaatggtttgactgtaaccacactggggtctctgagttctttttttctcttgccccttccatccccaggcagagactcctcttgctgcatatccactatgctccaatgctgtatttatttgatcagaaacaaaagagtttgcttcttgcactggttcagagagaggtcccccaggattgtcttttgttcagtaattggagcataagctgag

SEQ ID NO: 51653 - DNA, 1555 bp, Bovine  19866881001105
  misc_feature (1)..(1): n is a, c, g, or t
nagcctggtgggctgccgtctatggggtcacacagagtcgaacacgactgaagtgacttagcttagcagtccccactgggagatgatcttctctcaaggggtatcagtacttcaaccaggcttcttagagacctaacagtctttaaaacccagagggctgcatctctaattggagcacttcaggtccggggcagacagttttgaatggggcctcattcccagttcgggataatgagtttcttgtaggaacagtcctgggatggctccagcttccaaacactgaatcctctcaagtttgttcctagggagggaacctggaccctagaaccaactcaagactctgacctggactcccggtcagcccccatcgcaggctccgttcaggtgcccagaagtattgaaaacaccaggtgctttggctagagatgaagatctgctttctagtccccacctgcccttgaccctggctgttaggaccctgcaggttctggggagacgttatcagctgggtagaagcagctcgggggctccagggctttggcccccgatccttggcctcagcatctgtgtgttccctgggcaggggctggaagcagacagcccagctacactgctgaagctactccacagtgaccagtgagacaaccccttctctgtccctgttgggcgactttgaacgcagcctcgttgagggcccctagaacccaactctgcatgagaaatgagtgcttcaaccttcaatgctaaaggactttgtttagctgagctcaattccagagcctgtcaccctggcaacgggtctttgggggatttacatctcatgcatcacaacaggggaaaagccatttagcaagttggaggggtggttaaaaaaaaaaaaaaaaacaccccaccacacaaaactagtgggcccctctctccccaagagtgcagccacaaaacaaaacagaatcaacaagaaaatttcccacaagcccatgtggcctctgctggcaatcagcccaacaggaactcaaacttaatcaaaccttcatgtctcccttgtgaagctcaggaaattggtaattggttttataattgaattttctgatcacgtatcaaaggaatgggtcctgccaaaggccaaggaatggcttgtctccaggaaggacggccaaggtctccgatggaggctctgctgggaggtagaggaggagaagtaactcgcggtagcctaagaatagagcctgttatttataaccagagaagaagctggtgaccgctgagccccaccctcacaaagtggtctcccccaaacatgcaccctggggcctcagggttcagattcagaaaaggagcctttggcgaagcagggtgggagatgggggaggcagaaggcagggagaccgtctaggtaaggagcttttcccagagctatgcagactgcgaaggaagcctgcctggggcagaggctgggcagagaggggaaggggctggtgcaagaacccttctggaaaggggaagtggggcacaggaagaaacagagaggtccgaggtgtccagccctgggtaatgg

SEQ ID NO: 51654 - DNA, 1081 bp, Bovine  19866881080753
  misc_feature (1)..(1): n is a, c, g, or t
ntgttaatttgttttcctggttactaacacagtcattttatcactgaaaactttggccatggaatcagacagacatggatctgtatctcagctccattttcccctagataactttgaagaaattacttactttctgtttcctcctctacaaaaggggacaataatgccaacaaagatggcatgatgtaacatttaaagcacttactcctttgcctggcacatactaggcacccaacaagtatgagtactcctttaccttaaagcacagatgtggggctctcttctcttcttcagatcatcagacttgaccatgaaaaaacaaaaaaaggatttccttcataaatcagacacacagagcagagcagtttaggacgggagcatgctggcagtccagcactgtcattaacagcctggactctgaagccgaagtgcctggggttgacacgtggccccctccatttggcagctctgtgacttgggcacgctgcttagcctctctgtgccttattcactccacaaatacttacaaaggcattacagcagagcttatatattcttgtgggggaaagacaataaacattaaaagttgattattagaataaaaaaggtgagaaatgtcaagggaaaataaagcagagtacgagggaccaggagtgctaagagcagggaagggcttgcaatataaatttggtggccaggttagaccatgcacgtgcagcagaggcctgaaggaagctgggaagtgtacccagggaagatctcagcaaagcagattcagtgtcctgagtggggagaatgcctggcctgttaaagaaatcagaggatgtggcttagtgagttggagggaagcagcagatagtggggccaaagatgtaatgggagacacacaaccactctggtttttgctcagacaaatgagaaccatagcagattttgagcaaaactttttagaactgagatgaaattcacttaacataaaatttactattttaacatctccaagaatgtaattcaggggacttacagtgttttcacatgtgcaactatcatgcacgcacgctcagttgtatctggctctttg

SEQ ID NO: 51655 - DNA, 1015 bp, Bovine  19866881089936
  misc_feature (1)..(1): n is a, c, g, or t
naatcttggtttctgatgaaagattttccagaaaatgccacagggatcagggccattaagtaatgcctttactttaagccaagcctccaacttcaatttcagctcttgatcagttttaccaatgtgaaagcaccagcgctaacccccttcaactttctacttaatttaagccaaatgcatccctgtgggagtctcctgctatcctaaattgagaaaaatcataaagcataccctctttggggttcttgaaccatcaaaatacactcaataaataacattctcaacagttaccgcataatggacttcaataacttaagagctcaactcaattacctacaagttttcaagcaagtcctttcatttaaaagtacaaaaatcctttatttcttcccatgtcatcttttattctaacaatgacaaactatttttttcataaagtccacaaaacaacaaatgagagaagaaatttagtgaaaaatattctgatgagaacttcagagacatttggcatatgctcttctcacaagttcctaaataccaatacatttcccatgtttgtttaaaatcagtatcatttttcagaaacttacttgaaaataagtcatcacctgtttgaaatcacccaatcttaaacattttctagaattaagtcataaaatttccattagaaaaatcaaaaagtctcagaactgggaaaaactctgatatatgatcagctttagcccttgcacaggtgaatttggttaataatcattaaaactgatgatctgtggttgaccttttgggatatataggaagtgataactccctcccctcataggagtttaaagtccagtaatgtgtttcctaagtgcatcacttgatggagaaggtatgatcttaaaaatgaacatttccaggctccacctgagactcactgaatcagaaattctagacattgactcagcaatctgcattttagaaagcatcccacatggaactctgctcaatgttatgtgccagccggatgggaggg

SEQ ID NO: 51656 - DNA, 2892 bp, Bovine  19866881122045
  misc_feature (1)..(1): n is a, c, g, or t
ntgagcctctaagatgagacagaaacaaagattttctcaatgtcttatcttttttaaagaaacagtaatattttcacaggagaaagcaaatcagtaaagaacacacacacacacacacacacacacacacacacacacacacacacacacctagagccatctacaattaggtttcctatcagtctactcgggcttccctggtggctcagaggctaaagcgtctgcatcagtctactcaaagtcactcttgaaatctctggcaaacctcactcctatttgctagtgacactgcaggttgccaaagcaaatgcactcaggaaaaaaaaaaaaaaagaaggaaaacagaaaagaagggagggagaaaggaagggaaaaacaagcagcaacaacaacccccctccgaaaaaaagaaaaaaaaaaaaaccccttgaaaactaaaacaaaaccctctgagggggagactaaagcaacttatagggacatactgaatcataaccattcttagcctatgattctttaattggcaaaccaggtttcccataagcttgagcccacttttcaaaaagccatttcatttacaatcagattggcatccagttaggcagcaccgagggaatgagtattagtaatgcctgctttatttctggcaacaaagataatttatatactgataatatccatatatatgagctctgggaaactctacgaaaaatcgtatactctttttacaaatgtggtgtttgcatatggatcagtatttattaaaacatgaaaaagacagcagacagccacaaaaatgattaggaagagggttggcacatcctgcaaatttgatttggtccatctatcagtgtattcctaacatgtactctgaagacagaagaaatgataatcaaaaactttaaaaatagactttcacttggttttcttctgagagtcaggaagaaaagaccattccagttagcctggattgaaaaaaaaatacctagagaaaaatcattttctcttgctacattagggaccttaaacatgaaagctatgctttttgaacagagagaaggatgttggacagaaagatgggggagaggggaggggaaggggctacccagaaatgctgtacgtgttgaaccacatttcttctaaacctcttcctgtttagcgatcaaccacctcctcaaccttgcacctgtcggagtaagggaaaacagagagctatgcggcaggtggaccagggtgggctgaaataaagaggtggcgagctggcataccatacagctttccaaatttgcaacaggaagtgaagcaagtgaagcgctgactaagctgtggcactgacccaacacactagggcatcacatgcatattttttaaggctaagtcctccggctggtgaaggatggcaaagcagtaaagacaactgaagagaacacaatctgtctcagagacactgttgatgaggacggcaggggcagacttccagcatcatgtaagggtcagagccataacagtgggaatcaaccatcccatgttaatcaagctgcccacctgtgtgccaagaactgcttcaggaacacaggaagtactctgaaaattggcagctttctgggctccagtcctcagaatatgtatgagaagtacgccaggctactcatttagaaacagccccacaacctgaacaaacagcactgtcattccattcatcattagtgtgataaggagcttcaaataaaaataaatggcccaacattaaaattctcttctcttgaccatgccacccccagcttatcttaattacattagagataatggaacatccaatttgtgggctaatcagggatgatcagctgcccatctgccctcttccagcctattccctttagactcacatctgaccactggattaggtgcaaagaagaatgtcaactaagagagctaatcagagagaatcaacagagctaagaactaagaggaaggaggacagggagggtctgaagtgaggtgagagacaagaaggaaagaaactcaagggaagagaagagggataaggaagggtatggaagggtatgcagaggtctacaaattaaaagggaagacaaaccacagaaaatgacaaagcagggagaaactgttacaaaccagatctgaatctttcaagttatgtggggaaatagatctcttcaaacacggttaagaaaggcaggcacagaaagaactgggcaactgaattaagaacaggtggggagcactcgagccccattttcataaagggaagagggcaatatgctttgacttcacacccgcttattattgagctgttgctggcttttagaaactctacatatgttctgataatgttgttctgtttttgctgggatgcaccaaatgggaaaagataggacacatttgtggttttgtagcttgttttcttggcattttagcaggacattggcaagttattcaaacgtgaaattaccaccaaaatgccaggaagcggctcacctttgtttgaaaatgattcttgctcagtggcagccttcctgtatccagacaggtgaaaggtcccccctcagggccagctcccaacaccggaacacctccctcacaaacacatatgcacacattttgcactgtggtatgtcacttaaatgttttggctggcggcacatttagtctcagtatggcacaacgttcagagactgccaatttcagaaacacattccgcagggtaaaaggattaataaggctcggtggcattcaacaatcctaatttaatttcattggtcctgtacagcaggagaaatcaatgttggtgaataactcattccaagtgtgaacaaaaaggaaaaaaaccttaaaaaaattttttttcaattctggatcaagtgaatctct

SEQ ID NO: 51657 - DNA, 927 bp, Bovine  19866881123646
  misc_feature (1)..(1): n is a, c, g, or t
ntcctaaaaccagcattcttaatgtcttttgggtctcaggttgctttgagaaactgatggaagctgtgaagagtatcctcaggaaaaacagaatctcttcagtctcctgcattgttttgagttggtaaaaacagtatttgtctatcggggttaatagtctcccaaaggcaggctgtgggtctgccacacctgggcttgattgcagattaagaaactggaccagataaatgggattatagccttgttctttgagaacagctattggttctcccaaggcagcttgtcacagtgaacagaggctgggggcacggctgtgactttgtagtcatggttctcgttttggcaaagttgtacacgtgccagtgtcccatggtctttaatttttcctctcctcagggtgcgggaggaaactgaggcagagagaaggataaccggcatgagagccaacaatggtgctcagagagaatgcagccattggacccgagccttcagggggtgcgggaggctggggggtgggggaggagggccaggtggggtgtggggaaaaacttaggaaaaaagcacagaagttttgcaatgggatttaacagcgttttaaagagagctcaactttgagatgaacaggaggctgagaaagcctttataaggtcttcctaaatgatgctgacagctaagagtggcatgcccctgagagtctatgattatctcgaaggaacgatctttatgggagccttattaagcacagagcgtgtcagtgggaggagcagcacagtgttcacagctctagagggcaagtgaggcagcctcctcgatttgcagtgagctttgcagccctttcccattatttccttagcagactgtggggctggtagaagacccccttgctccctagaaaccaaagaacactagggttgttagcgcaggaca

SEQ ID NO: 51658 - DNA, 2239 bp, Bovine  19866881164456
  misc_feature (1)..(1): n is a, c, g, or t
ntgactcccctccaaggccacaccccctctccagtatggaggaccttaggggtcccatgagtctccaggtctccctccctttaattagtctacttcccagagcacttaatcaccatcacgaaaccctccacagctccagactatggtgtgaccaaggccacgtcacccacccacatactagaactccttccatctgttacccaactctggctcatcagccgcctcgccaacccatctccctgcagaggaactggataaagaccttggctgagacagcgagatggagaccagagggagggtgtggaacagagagctagcaggtgggtcagaagctgggggcagtgggggcagggagcaggggagtccagtggagcaagtgacatgagtccacatgagatttgtagcaaatgcaaggatctggcctccaaagatgggggcacatcacttcgacagtctgtgactccttggctctgagtggtggtggtctccatgtcatgttctccccccagggtttctgtaagaacccagggtctgggggcatgtgctctctgaactgtgaaatgcttcagccatggagtgcattcatgtgagcatgtgtgcagaccaatgctagtagtctgagctacagtaagtctgctgagtaatgctatcttttgaggtgactcggggaggacagaagcagggaggacatgcagaagcccccaagggcagctgcctccgcacacacctgaggccgcagtgtcctgagagccggggagcagttatcttgggtctggggaagggccagtcagacaacttcctccaactcagagatccacccacctgccttctaagttaaaagggactgggcctgccgctcccaggattctgggaggagggagcaggccttctccacctgctaggccttaaaggctggcagaaagaagtcccctggagggagtagacccctcccacgagggcgctagggactgttacttgagaaccaagcctgtttgtttctatggtaccagggagagactggagtagtggggagacctgcggccagcccaggccagagctctgcctggtgggcgcccccaggctggcccaggctggacaaaagctcactctccaaggacaaggccagtgcctcaattagctgtcctcccaggagcggctccactgatcccctaaaaggcacagcaggtcctccagggttgtaggcggggcccggcccagcctgcaagcctttgccagagtctcagtcagagtgtgccccaggccccccgctgctcttttcaccctcttccccctaccagcggtaggcggtacctttgaagttgggtcctctgttccaactggaaatggctcagaaccaaaattagaggccgcacaatcagcttgcaatttaaaatgccaccgaggcgtcccctgtcccccctacccccttttaaaatgtcatcttaattagatgaagcctggcttcatgttttctgaatttcaaggtaatttctctaggatgtttccctccttttggttatttttatctttggcataaagcgagtctgtgagtctcaccaaagctaatctgtgagtctgcagacacctgcacatgcccaattctctggcagctggggttcagctgcccccctggctctggaagctgagaactcactgacctgaggggtctgaggaaggcaggtcctgaggtctgttgttaattcagttccctccagttaattcagcaccaggccgtctgggcctctcacctaggcaatggggctatgctaggggttgggagaaaacacgaaggtgcctgcgtgggcttagctagccctagccaccttccttaatccagtctgtcacctacttccctgcctagactctgccctgcctggcaatgtccccccaagtgtaggctactggggacctgcagtaataaccactgaatcactcccattccaactctcaaagattctgattaaccgaggataagaacgtctgtttggtgccattaagtctttgatgcccctaaacatttgctaattagctctttcaacaaagagactgtgggcggcctaggactatctcctctgccttgggggcatctgactatgctgttccccaaccaaacccagtcctcaaagacgggtcaggttatgagcttcttggtgtccttccaaattcacatgttaaagccctaaacactcagtacctcaggtctttaaagagactaaaacctggcttaaaactctgcatt

SEQ ID NO: 51659 - DNA, 896 bp, Bovine  19866881169734
  misc_feature (1)..(1): n is a, c, g, or t
naatttattacactggtataatacttaagcctgtaatgaagggtcactgaacagtcattccagtgagtactaggaggagaatcagagctggaagcctcttgctttgtccatgagatatgaatgttcagtcttccagaatgttggaaagagttgtattcatgataaaacgacacttaaaattctaagatcatgggcaccgtatcaggaactggtttatcattccttaattcacattacattggcccattgctgattttcatcagtttcaataccactaaatgctgagttcatatttcctactctaaagtaggtatccctagactatttgtttaggaagattgctcttcccatctctgatttgagtttccaagggtggggcacagcaggagtggcaacacgttgaaatccctgataggaaggaccagaggagcggagtccatctctgagaagaggggatggtgaccgccggctggctgagcaggtgtagaggggctgctttgtggctgctaattaaggcctcttccttgtcagacttctgaaatagacaagcggatcttggacatgggttctggctatgtaagctattttttgtgaattattactgaaaacctagtctaaattgataaaggcaactttatttctccttagtaagtacatgaaataggtatccagctttttcttgggcacaaactgtccaggcaagacttttgagtggcccttgagcttgttctacactgctggcctcagtgctcctttctgaaggagaggggaatcctacttaaatgtgtggcttgatatgggactgttttcgtgccgacacccatgatcttatagcttaggttccccttccttagggccatggcagcagcagcagacttcttagtccaacagcctgt

SEQ ID NO: 51660 - DNA, 885 bp, Bovine  19866881192903
  misc_feature (1)..(1): n is a, c, g, or t
ntggattttccaggcaagagtactggagtggggtgcccattgccttctcccagagtaagtagcataagatgattcaaatggttaatgggctatagtcttatggcatggcagatcttatctgtcctgggaatggcccagctgtatttctgactatagttattccttcctcaatgctgcctggtgattatcagcaggttttgctctgactcttgttttctttctgctctttattattattattattattttatttatctatttttggctgcactgggtcttcattgcttttgcatggctttctctagttgtggcggtctggggctgctcttcgctgcattgcatgggattctctgcagtggctcctcttgttgcagagcacaggctctccacacaccagctttagtagccgttgcaggctcagtggttgcggtctgtgggctctagagtgtgggctcggtagttatgacgtgagggtttagttgttctcagtatgtggaatcttcgtggaccagagatcgatcccatgaccccggcattggcaggtgaattcttatccgctgtgccactagggaagtccctgactctaatttctaagtttctatgattgaccagccccagacctactgacaccttccttcttcagttgtgtcacacatacagtcaggttcctgtcctgtaccacacacctcaggggcatttatctctctcagacaattcagcctaactctgccctacacaactgtgggctgacctcacagtttaactctctgaggacagtcttatttcccaagtctcaactgactgatgtatttcctgtgaggtgcagcctattgattagttattgatagccatgtgtgttccttttaaaaatagcttgggtcaggg

SEQ ID NO: 51661 - DNA, 1939 bp, Bovine  19866881223877
  misc_feature (1)..(1): n is a, c, g, or t
nccggggctgcaggggagggggacatgcaccttttgggctcactgagtccagagcccagccttaaaacgcagcagcatctacagattccacacaggaaaatctaccagtcacggtggcagtgatggcccagtgtcccttgtgacatgaacagcatccctctgtgctcagctcacaagccttaaactggctccctgtcctctcccagaagagggatgcagattcccttgggcctcgctggcggcatgcaggaattagacagaggagagggattgggccatcagggtccccagatcctccatgaagtcatccccttgctgtcgtcagtgtcagttgcctagcaactgcctttggcagatggtggcactgagagcatgccaatctctccacagctaaaaatacattccgacgacaacgggtctattttaaaagatacaatgcgctcccaacatcttcccttgtctgcaaagaactgtgccatgccgggtctctccgcgcttctgatttggtctgacggtgtggaagacagtattctaggaaaggaactcaagaccaggcaccacaggggtgcttagcaaattgccctggaggaggatgagggagaggaagaagaggagcagtaggaaatagtggactgggaggaagacacaggagttgggagcaaaccctgtcgtttggtcataatccttccctactcagaagggtggggttaggaagaaaagtcatagaatcacagaagcctagtgctggaagggacccaatcccacttcccagttgggaaggcagaagccctgagagattgagatgagaagagttggctctttgcccttgttcacagtgcaagggctgggattcccaggggtgagtgtgagaccttggaccctcaaactcctcttacattgtatcggcatcatatcactgcccccctgccccaccagcttagtctttccgtttaatcaccataatttgcagctttttaaaaaaaatagagaatagtaagcctatttgtgcattgattaattcaacaaatacttcttaagcacccactgccatactgtgccaagctctgcagatacagcaggggacccatacacgtggtctccaccacctgttgctggtggtccagcaagtgatgttggcatcaagcaggtgaccacagggtgcactgtgcttcagacatcaaggcagatttgggtcgggcccacttaccagttctgcaaccaaaggacatcatttagttagggttgcaaggcaaaatataggggacccagtaaaatatgaatttcaggtgaaagacaattatttttttaagattaatgtgttcccagtattgtatcctctgaggttcaaatttaactgggcctcctacaattttctggagaaggaaatggcaacccactccagtattcttgcctgggaaatctcatgaacagaggagcctggtgggctacagtccatggggtcacaaagagttggatacaactgaagtgatttggcacagctcacataggggttatttttcagattaaataagaaaacatatatacttctatggctggctgataaatgttacttcctctcctctccaagcagtgcttccctggggtttagccctggtcaacatctgagcccagctctcctcccctcaggatctagcaataagcgatggttagcggtaactctgttctgtcctaaggctgagctaggatgagggaaaatctgctggtggacattgacttgccagaagaactaggaaccaacccagctttacttggaatgctggtcggggccagcagttctacactacctggggtgcttgttaaaaatatagataccaggggcttccgtggtggctcagtggtaaagaatctgcctgccaatgcaggagacacgggaagatcccacatgccatggagcaactaagcccatgcaccccaacta

SEQ ID NO: 51662 - DNA, 1490 bp, Bovine  19866881238251
  misc_feature (1)..(1): n is a, c, g, or t
ncacaccttttcctctctgttttttcggccccaacctggtcctggccccatcactgtgcctggattgctgcaatcacctctgaacaacactgcagcaggtatccttccccttgcccagccaacttccacaagtgtttccacaccttccctcctttcctgttgacacttacctgctccaaaactttcaacagcatgtactgccgacactctgctgcttggtagtcacccctttcacatctgttcctcctacactgacagagtttattttttagcacatagcttctattctcacctccctgactttgttcaggttattactttgatatcctctttcacttccacgagctaagcccatttaatcttgcaaggcctactgagatcgtgactgttccaggggatcttccccaatcaccctagaattcattcatcattaccccttttctctcctctgagctccctatggcatttagagtctcatgtgattcctatttagttttgccagtcattttacacagtcttggacagtttgaccctataataggaatgttagtcttggctctccaggtagagaacaatgagcttccagagggaagcatccagaatttaggtttattctaattgtcatcagtgcctaccatgcggcactccttaatgggcactcaacaaaaccacttcattgatttttattagtgttcactaggccccacccagggagatggaggtatctacttaaaggggagctaaatattactttacttattgttcgttcttttaaatctcttcagctccctgagataattgcagccttaggtactaagacagatgctgagatggttcttggccaatgtgcagaggcaccaaactcatctttgtgactaagcaatattatcaacagtgttcaatccccaaagtcggcttccttctcagttgcatccagagccaaggaggttccgggaaaatgagatggtcctggcccaaagtcagtggtgtggcattcacagctgatctgtcctgacaaatcagctgagaatgaaaaagcaatctgctaattttatcaatgacatttcaccttgagtattgagtgcagactactagatttaggcagtcattaaagaatcagaggatctctgctcatcttatttagcaggaaaataaggttcattatctgttgttcaaatgcaaacttgtctgcctagggctcaagaaacaacaggaaaaagaaagctctcctttctattgccccacagcagggttctgcctccataagcttaccagggggacaaagttaggactgggccagaaactcaaggcaggtaggtgaaggtaatttcagaagctaggcttccactttaagtacgttttaaggaagcagtttctcagtaagtgtggttattaatgggaaggggctgaagtgggaggaggcagcatctctcctcaaatatacctccgggaaaattcactgcaatcccaagttccagaaattcagaatg

SEQ ID NO: 51663 - DNA, 1268 bp, Bovine  19866881271692
  misc_feature (1)..(1): n is a, c, g, or t
ncccattagcatggctacagtcaaaaaaaccagaaaaatgatattggagaggatgtagagaaattggaactattgtgcactgttggtgggaatgaaaaagtgtagcctcattgaaaacatatgcagtcgctcaaaaaattaaacataggatgaccatgtgatccagcaatttcatttctggacatgtatcccaaagaattgaaagcaggaacttgaagagatatttgtacacccagtttcacaaaagcatgattcatattaaccaaaagttggcagcaactcacgtgtgcatggatagaggcatggataaacaaaatgtggtgtataagtacagtggagtattattcagccttaacacggaaggaggctgcatacactacaacatagatgaacctgaggcattatgctaagtgaaataagccagacacaaaaagacaaatactgtatgattgcacttctatgaggtacctagatgtgtcagaatcctagagacagaagtagaatggtggttgcctgtgtctgggaaatgatgggaatggaggtattgtttaatgggtgcagaatttcatctttgcacaatgagcattctggagatacatggtggtgatgtttgcacagccatatgaatgaacttaacgccattgaactgcacggtaaagtggttaaaatcgtaagctttatggttaagtacgttttaccacaattaaaaaactggttttcatgtgttagacttgatgaaatagggcatgtttgcacacagctctcagttctttaaggataatttgaaatagcttgcctttgctctgattatggaaagatggcagatctagcgggttttgaatttctgttgcacgttaagggaaactgtgttctttgttttctcactcgggtcctctctctcttcttctctcccccagacctttggtatggctgaggagtaccatcgagagtcaatgctggtcgagtgggaacaagtgaagcagcgaattctccacaccctgctggcatcaggagaagatgcccttgactttactcaagaaagcgaggtgagttgaatccagaaaataaaccattattaaaaatgtgaggtcagaaaatgcttatctgcttgaccgctggctggcctggaacagctggtccctgtcttcctctggaagccctttcttcatcgccttctagatgcccacatttgcctggattcctccagcatggctggctgcttctgctcaacctcttgtgctaaattgtcctcaaactcctgtcccagg

SEQ ID NO: 51664 - DNA, 3130 bp, Bovine  19866881274252
  misc_feature (1)..(1): n is a, c, g, or t
ncttgggtcgttcgtatgttgccgtatacctgaacagggcagtgcgttcccactagcactatgtggtcggtcagaacacattctgtgtgtttttactggacacaactcgtcatttacaaaacagatttcttctcccagatgtactctccaaacacacagcttaaagagggaagggaagggacagcaggccggttgtgtcactcagtctctgtaactattgtccctgctgaggcctagggaggggaggtctggcaggacactgaagcaggccagtaagcacttagcaggtctagctcaaatatcctcggcaaactaggggttggcaaactcctagctatgggccaaagaaactgagaagagtttttattttttatgtctttaagtcattgtgggggaagaaatctaaagactatttcatgacatgtgaaaattttataaaattcatattcaagtggccgtgattaaagttttattagagcacctccatacttatttacctgttaactgctttaaagtggagctgagtagctgcaagggttgttgttgtttagtcactaagtcatgtccgactcttagcgatcctatgcactacagcacaccagacttcccagtctcccccgagtttgctcagactcatgtccattgagttggtgatgccgtccaaccttctcatcctctatcacccccttctccacctacccttagtctttcctagattgttatctgtacttatgaccaactggctacagatcagaggctcttgtatccgccacccccacctctaggtttaactggttcactagagcagttcacagaaatcagagaaacatttatttaacgctcaccagtttgtcatgaaggatgaatggccaagtgcagaggtacataagatggggtccagatgagtctttagcccaggagcttttgtctctgtggaacctgggtaccattcctgttcccctggaaccattgtcccagcatgtaggtgattcaccaacccagaaactcagcaaatctcattgttcaggagtttctatagagcttaatctgcagcccttgcttccccttgccagaggttggtgggtagggccgaaagttccaacctggtcttcctggtgactggccccatcctgaggccgcctagaatagcatctccaagttacctcatttgcataaattcaggtgtgcttaaaagggttcattgtgagttacagaagactcagaacttcaggacattccaggggttatagaagctttgtgccgggaacttggggacaaagaccaaatgtatgtattatactacgctactattttctgacttgattaaatatttaacatggttatattatgtggaaatgaccatatttttcataattaagacacatgttaatagcaagtagaccaaaattatttgatgcatttttgctttaccctttttttttaagtttatttcatcctatatgcaatttggagattttttttttctctttgttaagaatgtttatgtgcatagaaggggcatttttttggacactgaaggacaggtgaatgctaactaatttgaggaaatggaaatctgcccagtccttggctttagctctgaataggagctgtctctctaaagctgcaggctttaattttttcctctagttaattttctcagcatcttctaggtgtggtgaagaggtctgaactggggaacttccacttaagaagcattcaccagtgggtcattgcctttcgttttggaggggaactttttactcaagtgtgatgcacaatcagaatgtgcgtaaacgatgagtcttgctcaaattgaacacactattaagcagcaccaagtgtaagaaaattaccaacccccagaagcctcctttctctctacccctgccccgcaaagggcaaccagtcttgccttctgacagcagtgataagtttgcccttcattttaaacttcaccgggtatttgaggaagtcgttggaggacttcttcccagaggcacagagagcaggttgttgctcagagccctcgtaccctgctgtgctctctgaagggcctttcagtgtttccaggggccctcgcagtcaggcacggagtcctatgacagagaggggccccagtgccatgagctgtccttgctggtcttctcccatccagccccggttttgctgccttggctgtgccacagcccacatgtgtgggttctcagtggcttcttcccgtggagtggctccctcctccacagcttcccgccatgcagctgacatccagtctctgcgtgtgtcctgaccagatttccccaacacagagcttggacttcaccctgacaactccctcttccccatcccattttagttctctctgttggactaagcttgtgaggttattttcctgatcagttttcaatatcttggatcaaatgataccgatatttaaccccttatattttgtggctaatttgatatttatttttgcacaaaggttaaaaattgtctttaaacttgttaaattaaccatgcatttaaaaattttaatgaaacaggatgatgactgcataaaagtatagacttggaaactttaatagcattttttgataaatcagtttccattggttgagttataatgcaggacaaatccagtttttcccaaatatagtattatatacattactgtcttctttcagacagacatgaaacaagcttattttctactttgaagttgtatagcacaattctatgtattatttgcttagtttggaatttgttcacctgaaaactgggctatttcttctaaaataccactgggtttttgtctgggtatttagagggaaagcacttgtctggaccaagtgtgatctgaattcatgccatttatactgtcactgccttatgctgtgcagcctcggaaatgttaagtatcagttggtagttggaagagaatgtttttgctctggtctgtgcttgccagtggatttggcaagaatgtataggaagtcttcaagaaaaacagtctccataaatggaagaacaaagctcctactattcattcaacagatgagcacctactatgtgccaggcactgttctagggactgggtaacctcagtaacaaaacaggcaaaaatcgccgt

SEQ ID NO: 51665 - DNA, 806 bp, Bovine  19866881330716
  misc_feature (1)..(1): n is a, c, g, or t
nagtcggacacaactgagcaactaacacactttgacctaccttttctctttcacagtgttgttaagatgaatagagaccatagctgtgaatatcctttggaaggaaatgcagtagagaaatgcaagaggtgataatgatggcacgcatcaaagcactgatataatcaactttgtttcttataaatatttggactccaaagtataaagcaattttgtactccagagtgtaaagcaatgggcccaatagcatgtcaagctggctggcttcaacaggatgcaactctggtacatggagaaattaggatttgcttaaagtcaccccagatgagcaaacgacaaggtctagaaggcagaatctcgtaaggtgaccaacttgtcccagttggattcacccaaaagggggacagagactcatggtccacatctggtggatgaacatcagagtctctggtggtcacagagcccatcttcccatcactgaagagcattcataaagactctgagcaagataatttcatagcctctgtgacatgtcacgaggaatgaaggggtcacagagctcaccttttttaatgacctgctttcctcagtttgtcagtctctgccctcagtggttacagtagtggatctattaatttcaggtatctccccagccacccatctgaagagtacttaatgaattaaacacctgggctctaaagcaccaaagcagcctgacttggtgtccccaagagaatgacatcatcctattgttgtctccccaacatgctgcactccggctacgactctaattcccaacaggtacc

SEQ ID NO: 51666 - DNA, 752 bp, Bovine  19866881410525
  misc_feature (1)..(1): n is a, c, g, or t
ntgttgtacatgtgaaagtaatacaatattgtaaatcaactatacctcaatttttttaattaaattaaaaaattttaaagactaaaagaaaaaagaaatctccagaacttgtaattgccacctgtcccactccaaagaccaccccacctccctcccatgtgggaattccagcctcagctgtggtctccagcttggctttaaatttggaagctgacatcacagcaacctgagccatgacttctgcttgtatgtggggcatcagctcagctggcatttgcctagttctccctaaatgccaggctgtgggccaacagctggccactgggccatgactggggctggcagacacaggaccctgggcttggggcggggtgacgggtgttagacttgccgcccatcctcaggcctcgatggaaggagggcaggagagtggtgggagggacaggtgggtctctgggtacccctcccctccctgccccatagaaccagagaggcactgaagtgggtacccgctcaagtgggtgaagcaaagaaagagcccaggtgtcccctaggtgcttgatgccgggccatgactggggacagggatgtatgtgtttgatcttggggtacccggcccccaggtggcctctgacgcccctctcctcccagatccgctgcatgctcaatatctggggtgtgattctgtatctgcggctcccctggattaccgcccagcgggcattggtaagtgctgcctctggcatgcgggg

SEQ ID NO: 51667 - DNA, 754 bp, Bovine  19866881533334
  misc_feature (1)..(1): n is a, c, g, or t
ntcgaaaaggatgatataaaattctaaccaggaacagaacgaaaactaaaagctctctaagtgatgcctgttcacccacccaagaagcaaggctatgtgccaaacatggtattgtcagacaggatttgctggcctacctgaaggaattcttttaggagaatttcagagctttcctcaaattcttcttgaatttgagcttggtattccatgtcaagataagtagggttgatccaatcatacaaaatttcatgctggaaaggagcagcagatgtgaagggtaagttaataattccctctgcttttgttctgccaccatgtcataccagtaaaataagactccatactcccaattcagggggcctggattcaattcctggtcagggtactagatcccacatgctgcaatgaagacccagtgcagccaaataaataaaaaagagaaaagcaaatgatatgccacagcttctaagaagagaatcccagcaacaagaatttatccttacatcttgtgggatgtgagggctccgagctatgagaggctcaaagtaggtgggaggcctggtcagtgaaggaccatgaaaccagccgctgatggacaaacgtgacttttcttcagacaagacctcagacacctgagaggacaagaccagcagcacatcaacataaagataagggggggaagattactagccacggcccactaatttcaggacccttcacactaggtgtggaaaccacctggctgggtagtcca

SEQ ID NO: 51668 - DNA, 1481 bp, Bovine  19866881599542
  misc_feature (1)..(1): n is a, c, g, or t
natcccatggacggaggagactggggctacagtccatggcgtcgcaaagagtcagtcactgagcgactgaacacacacacatcattttatatctaaaatgtgtgtcttctagagatcagctgtatgttttaaaaatcctgcctgataatctcatcctttgattggtgtatttagtctatatatttacatcacttttgggcttccctggtggcgcagaggttaaagcatctgcctggaatgcgggagacccaggttcaatccctgggtcgggaagatcccctagagaaggaaatggcaccccactccagtactcttgcctggagaatcctatggagggaggagcctggtaggctacagtccatggggtcgcaaagagtcggacacgactgagcgacttgacttcactttcactttattttctacttggtccatctgcttttccatttctattctttgcctactgtctttttcataaaaaaaaaacaaacaacagttttccattttattttctctataggtttttaactatacacttttgaattactttttagtggattgctctagtgataacaatatgcatctttaagtgagcagtctatttggagttaatgtgcattactttacataaataataacaaccttgaaagtgaaagtgaagtcgctcagtcgtgtccgactctttgtgaccccatgggctgcagcctatcaggctcctccgtccatgggatcttccaggcaagagtgttggagtggattgccatttccttcgccaagggatcttcctgacccaggaatcaaacccggggtctcccgcattgtagacagacgctttaccgtctgagccaccagggaagctgcaaaaatgacgaggctgtatcacaggtgaggtcatgacctcctaacaagcaaaattatttaaaatgctgcacacacaaaagtcactgattactcatggtatgtataaaattatattttgctgtctcgatgatcactgcttatttctcagtacagaaatattttggattatccgacattgaactacgaaacactagttcacaatcacatgtgttctgctgcgcttagtcgctcagttgtgtttgactctttgtgaccccatggacagcagcctgccaggctcctctgtccatggggattctccaggcaagaatactggagtggattgctatgcctttctccaggggatcttcccaacccagggatcaaacctagatctcccacaatgcaggcagattctttaccatctgagccaccagggaagctcaagaatattggagtgggtagcctatcccttctccaggggatcttcctgacccaggaatcaaacccgggtctcttgcattggaggcggattctttaccagctgagttgccagagaagcccacacatgaaagtgggaggtggggggggaataaaacctagcgagctatgttcgaatgaaaattttaagaaagtattaggaa

SEQ ID NO: 51669 - DNA, 919 bp, Bovine  19866881170133
  misc_feature (1)..(1): n is a, c, g, or t
ngatttttttttgcctgagatacagctttgaggagaatgtcagggggacactcttgttcccccctttcctatgacatgataaacatcaccccatgccatctggtgtcaccatgcattcggtgccttaattagacttatagcactaaatgaactatctctttgaaataacagaagtacctcatggtctgttatcacaactttatgggctcccggagattttggaatctcagactgtgaaccacccatccagtccatccctgatttacagatgaggaaagcaaagcctccaaactccttagtcaaatgatgtatcagtatgttgaccctctgtttttgaaatctgagaagggaacagtgaagcagtgggaagggtggggtgggggaaaagtgtggctatgttgaaaatgtcagtgatagcagagaaaatatttgcctgtgagaccctgcctgtctctttggacttctttgtaatggttaagacaacccaacagggctggagtcgttagtgattcagaatcggattagccaggactggtggagttactttctcagcaaagggtttcatattttaacatttgtttcccatgacagtttgcttattcttaagttttggcagccatgagcaaatggttgtcaggttttttgttttgttttgttttaagacaaaactccaaattttattttgccaatttaataaactgtattctacctaccactccttctgctccctctgtaattattgatcaaactttgtttttcagttgtggaagtactatgaaaagttttcttttgtaccctgagatatttataattttgtgtaagcacactgtttacagaaaatctaagtggtgcatatgttaactcaaatacccttaaaacacttaaaatattttccaataactaattctccccccaaggg

SEQ ID NO: 51670 - DNA, 1316 bp, Bovine  19866880426663
  misc_feature (1)..(1): n is a, c, g, or t
ntcctcgtgactggtgggcacaatacgcacttctcagggtatggatctggggtcaggatcccccagcaggggtctgcccataccttctgtgtagccacacgcctgtgtgagggcctggcagtgggtcagaagcgcgatcctcgtcacggtcaccccgagcacacttccatccttgcacgtcttgtactgcaaagagaaggggccacgagggtagagctccaggcccacagccgccgctgaccctgagctgtgtaagggttgcagcacgcgtcactcagctccccaccttgtccagacctagcgactcacctcaatatacgcagtgtcattatttgcatctttaatgtgcgggaaccaatctcgaggaggtttagagagatgttttgactctgtgacaaaccataatagttttggccaaccttggaaataaagaacaagttcctttcaggcaagcatcactcagaagacaggtgtgacaccaccttcctgctaatggcaagatccacagcagcacaggccagatcaagtctctgtgtttccaagtctaagggcatggtcaaggtgctgtgagcctccaggagccgaagtctgccacatgcaggctaggagacctcctgtgtggacagcgtgttagcacaggccatggggcacaccctccccacccagcccgggctcacctttgaactgcgggatctcccccgtcgggctctttggcagccccttgtggcaagcatcgctcgtcaaggctacagtcaccccacagcttccaagcaagaacccaatctgctggcttcctgcatcctggagacagcagcaaggagatagggtcacgagtagaggtgatggccgctctcccgacaaagcatggtcttaccctgggatggcaccaacccctcagcagaggctcaatcagagagtcagggctcggctgacgtctgcatggtgggggccaaaccttatgctctctgcccgctgcctaaccttggacagggcaagagcttggcctcagtggtgtcatctgcaccatccccttggcctgctgtgagggacgaagagagggagctcggtgtgtgctggtgcgctcatggggtctcgtttcattcccctctggttgaacaacaccatgaccatgggccacagagaggatccaagaacatgcctctggtcaggacactgaccccaagaagtctatgatcacacccatgcccaccacggaaacaaacacgccgcatggagtgagggcaccaccgcatggactgagcagcagcatttgggagcagacactgtgggagaggcaggcctgggtggcgccatcc

SEQ ID NO: 51671 - DNA, 4691 bp, Bovine  19866880659789
  misc_feature (1)..(1): n is a, c, g, or t
ngagcacctactgtgtgcacagcacaagcagggctcctttgagactaacacctgtgaggagaggacacacaggcacaaaggaagggcactgcctcagaggcagcatcaggaggccgagcaggaactcaggggaaggagaggcctggaagacaaagcaatcagtggctggaacaggatacaaacagagacaaaaagccacagtgacatgtgagtcctacaaacactaatcttttcaaggagaatacctacctcactgttaattaagagttatcaagatttaaattcctgaaccacttgacataccagcatgcaagcttctcaaatgtcccacttcttggcaatcagtccttgaatcaatcttactgaagaagagccactgtttccttgaaatgctactgtttctcaggccagtttcacagtaaactttccctttgctaaaaaaatcagtaattgacatatgtaaacactcaataacttcaaaaatgatcagctaatttaagaaaatgttaattactactggggggctcccctggtggctcagatggtaaagaatctgcctgcaatgcaggagacctgggtttgatccctgggtccagaagatcctttggagaagagaatggatactcactcccgataatcttgcctggaaaattccatgggcagacgcaggctacagcccatggggttgcaaagacctggacacaactgagcaactaacacacacttttaccacaccggttactatcaacaacccaccaccagtcactttctggtattttttcatatgtgtgtgtccattttctaaggcagggatggctcacaaatgacaagaggaggtaatcatcctgctggatgaaagtctcccaaaacaagactgacaaccaacctctggtcagggatcccacccgctggaggagacgttcctgcacaggcacaagtgtgcacatacttgcgctcgtctactggcaaacctgcacctcacagggcttcttatttcaaagtgtcaacactaaaagctcttaaacttgaccaacatcacaaagtatttgtcaaggcttgttttcttattttttttctttagcttttcctggagattaccatccaactattgcaatgggagcactcagacagaggggtgacaaggtggtggcccagcctttactttaaatctctccagatcctgcacccagagccctggctcgcaacctagtattgtccttggagtcaaaatgaacctaaagaccatctccctgagaagggcatctctacaattaagtaaccacaatacctaaagacaagcccttctagagtttgtctgctgggaagggcagaatcctcattccaaagatgaggaaagattccagagaaacagggatggaactactgggaagttcatgaatgctcctccctcctgagagactctctgctttattctcttctagatattatcaagaccacatgcccacacattgccaccaacatgggagatgtcttcacagtctgctaggtcttctgaggtatctgaggatacttcttgctgctgtctgtgtccctgcccacttgctaggtcatgcactctttctaattacttctcttaatggactgtgggcagagaaaccagacaatcaagattattataatttgaaaataaacaataaactgaaagtttagttcagaaggatattacttcaacaaaaataagttttactgcatgaaatcagttacaccttttgttactcaagttttcttttcctttcccaaggttctcaataataatcctaacagttaagtcccacttacaaaaggagtgcaacaggctactttctgatgttgagaatatacagaggcatcagagagctaaagaattctctctggtcaacatcatcatcaacagaaactttaagaagcaacaattctcctgtcaagaaaattgagctcacttgagaactaacgcaacaaatgtgcacttgacaaagttccttatgaatatttttgcaattgaattattttaagatctacaaaggttcaaaatttaaagaaaataagtcacttttttgtaaagaaatgtgatttataatttttataattttttcatgtatatgaaacatgaagcaggggactcctacctgataaattgtcaaatctctatcaaatacacaaaactccatttttaacagtcacactcattctttttacactatatacgtatgtatatattacggccgtaattttaaattggcatccgcagagaacttctaaattaaaacatcatttaactgctaatgttctattttaaacatttacagcacaatttgtatgaacagttttgcagaatttttcctcacttaaatgtatttcaaatcattttctcttgcttccaactagcttttcaaattttcattagtaaatagtccacccaggaatattctagaagctgagaaggttgaagagtgaatataatcatgacagaccaagaagagtagaatcagcagtgatgaagacaaaagagccatctggtggtttttgactgcttacaaggaataaatacagtcatgattcacatacacttgtgtacaatcttaggaaaaccctaccacttggcaaggactgcgccaacctgcaggcatctcctgccaagactcttctcacctgctgcctgtgcaccactaggcccctggaacccactggacacagatacacagggcactgcctctgtaccaattttatctacctttaggaaatcaccccagtattcagatgtccttgtacttccccaaattccaagtcaaacacttaattcagcacacacatcactcagggctcacatgccactgacagcagccagactgctcttcctggagctccccgcaggctggctcttctcacatggacagttctcaggtctgctctggggttgctgttcttttccccatctcagatgaacataagcattataaagactgaaagcagtgactacttcatatttgttctttcatgagagtaacaaacacttttcaaatttactgaatcctaaaaaaacaaaaaactcaggccagtatcatctgtatgtctaaccctgaaaacctccctgaaaataatcgaatttaccagactaggttaaatcgatctccaggagaaaatgacaacacaactatgttaaacctgtctcaaaatctaggttgagggttagcaaactagagcccgtagccaaaaaacccaggtgttcaggagtcccaaaactgctcagttacagcttattcaagctttgaaacaacaaaagaattggtccctgtaaatcagtctgagtggacctattacagggaagaaaattttcaaagttgagaaaacactagtcagttcagttcactcactcagttgtgtctgattctgcgaccccatggactacagcacgccaggcttccctgtccatcaccaactcctggagcctgctcaaactcatgttcattgagtctgtgatgacatccaaccatatcatcctgtcatccccttctcctcctgccttcaatctttcccagcatcagggtcttttccaatgagttggctcttcacatcatgtggccaaagtattggagtgtcagtatcagtccttctaaggaatattcaaggttgatttccttttggactgattggtttgatcttcttgctctccaagggactctcaagagtcttctccagcaccacagttcaaaagcatcaattcttcagtgctcaccctctttactgtccagctttcacatccatacatgacctctggaaaaaccatagctttgactatatggatctttgtcagcaaagtgatgtctctactttttaacattatgtctaggtttgtcatagcttttcttccaaggagcaagtgtcttttaatttcattggtgcagtcaccatccactgacttctctgaaagttgtagatcctgtgttactctgtgctattctcaagttatgactgcacatttactttaaatgtttaagctaaactttcataatttatggacagtcattgactaatcattgctggatccagagtatagcttattgctttatatttaaaattttaaaaaaaagcacagccttttcagatcagatcagatcagatcaatcgctgagtcgtgtcagactctttgcgaccccatgaattgcagcatgccaggcctccctgtccatcaccaactcccggagttcactcagactcacgcccatcgagtcagtgatgccatccagccatctcatcctctgtcgtccccttctcctcctgcccccaatccctcccagcatcagtcttttccaatgagtcaactcttcgcatgaggtggccaaagttacttaccccaaattatgcatgtgttagtttacctggaattttgtctaaaattttttatagcttccttcttgataaaattcaaatttagacttttctgaaaaatcagatcattgaatctccttgtcatcatattgtggataaatctttaggaatagtatacatttcttttatcatttattgattcttatacctagacttttaatttcttggataggaatcatttacatcactcagggataagcattgttgtaaatttgacatcagttcaattcagtcactcagttgtgtccgactttttgtgaccccatgaattgcagcacgccaggccactcacatccatctagttg

SEQ ID NO: 51672 - DNA, 811 bp, Bovine  19866881170258
  misc_feature (1)..(1): n is a, c, g, or t
nctgtctgtactcacccgtgcaagatgtcggcctcgtgatgcctgtaggtaagggtgggtgtgggtgcagagccacagactggagaactagcacccccccacctttcctgcagggcccgccttgatggggagtctgagacaaagatagagcttcccatgggacagggaggctttctgttcagacaggctcaagagactggagcaggtgtgccgtgctcattggtttcagggctcagaccgtcctggaggccgtgtgcagtggctgacgacacacgccatgtggtcttttctcagtgtcatcctcatgtctgcatggtgtgtaaatcccatttacaccctaagcttacagcagtgcacagctatgaaatgttgttttaccgcaacaagaaaatcacagcttgcttcagggactgtgagggcctgttctctttcacttgtggttttgctgcagatgctacttctttttgtgttcttttttgtacccattcatttctcctctccagctccctgcaactccctttctaaagtaacctgtgcttgctgttttgcattcagccatcatgtgttcagtgaagcctgatggggttccccagctgtgcaggacagacgaagtcggggagctctgcgtgtgcgcggtggccacgggcatgtcctactatggcctctcgggtatgaccaagaacaccttcgaggtaggtggcaggtgagccccatcagacagcttttgccaggtgtgtggaatagatgtaaaaggagatggtgatttctcaatagaacatgttcatggtaattaaaatggttgtactttctc

SEQ ID NO: 51673 - DNA, 2109 bp, Bovine  19866880222782
  misc_feature (1)..(1): n is a, c, g, or t
naaaacagtgaaaatgaagggaggggactgttatgtttagtcctgctctaaaagacgcttactccttggaaggaaagttatgaccaacctagatagcatattcaaaagcagagacattactttgccaacaaaggttcgtctagtcaaggctatggtttttcctgtggtcgtgtatggatgtgagagttggactgtgaagaaggctgagcaccgaagaattgatgcttttgaactgtggtgttggagaagactcttgagagtcccttggactgcaaggagatccaaccagtccattctgaaggagatcagccctgggtgttctttggaaggaatgatgctaaagctgaaactccagtactttggccacctcatgtgaagagttgactcattggaaaagactctgatgctgggagggattgggggcaagaggagaaggggacgacagaggatgagatgcctggatggcatcactgactcgatggacgtgagtctcagtgaactccgggagttgatgatggacagggagggcctggggtgctgcgattcatggggtcacaaagagtcggacacaactgagcaactgaactgaactgaacaaatgttcagtgagtaaataatgtaatttttggtaatttcatccatatatgggagacaaaggaaataagagacacaaagaaacctaccctcatgatatttacattctatttgataacaacaggcaggaaaaatgaaaaaaattacgaaattaaatattatgtaaaatatggtagacaaaatggggaaaaagagaataagtgaaggtgtcaaaaaggtagtagaacaaacgctgagtcaaggagtgaagggaaataatttttcaagtagaaaatatgaattaatgatctgcttttaaaaagagcttatgtaggtgtacatgaagtaggaagcaccaggattctagctgcctgcccatgtagtcaacagtttcagcagaatctgtctgatgtaactattttggaactctgtagtctactgaatgcttgcaaattccacaagaaaacttgagcagtaaactgtggttaatgtaagtcaatttcagccctcacacagtagctgctaccaatctaccacctccaggcctgtgacaggcagctatacatgtgttcctggaacaagctgaagagtgttaccattgttactgcacctctcttcattgttgataccctcccactcttgcggatgtgacttctgggaggatgtaaagggctagaatcattttctcctccttcagttcagtagctcagttgtgtctgactctttgtgagccaatggactgcagcacaccaggcctccctgtccatcaccaagtcccagacttgctcaaactcatgtccatcgagtcagtgattccatccaatcatctcatcctctgtcgtccccttctcctcccaccttcaatctttcccagcatcagggtcttttccagtgagtcagttcttcacatcaggtggccaaagtattggagtttcagcttcaacatcagtccttccaatgaatattcaggactgattttctttaggatggactggttggacctccttgcagtccaagagtcttgagactcaagagtcttctccaacaccacagtacaaaagcatcagttcttcggcactcagctttctttatagtccaactctcacattcatacatgattactggaaaaaccatagccttgactagatggacctttgttggcaaagtaatgtctctgctttctaacatcctgtctaggttggtcataactttccttccaaggcagtaagcatcttttaatttcatggctgcagtcactacgtgcagtgattttggagcccaaaaaataaagtcagccactgtttccactgtttcctcatctatttgccataaagtgacgggaccagatgccatgatattgttttctgaatgttgagctttaaccaactttttcactctcctctttcactttcatcaagaggctctttagttcttcttcactttctgccataagagtggtgtcatctgcatgtctgagattatcgatacttctcccagcaatacttgattccagcatgtgcttcatccagcccagca

SEQ ID NO: 51674 - DNA, 1157 bp, Bovine  19866880423796
  misc_feature (1)..(1): n is a, c, g, or t
ngcatatagctggacatctcaaggcatcccggagttaaaatcggggctcatgccccactcagtgtgacctgtggaggtgatgacaggcctccctgcaggcccaaggacccctggcccagggctgacggggcacccgtgggcgcctggcggcctgtctcctggcccctgcttctcggcgcctccaaaatgagtcagagcatgtgcggcgtgggcttgtgcaggtggcagggagcccagaattagctcagctgcttcagcagggctgcagtggggagggggcagccatgccaggcgggggcgaaaggtaggcggcccggagccacagcgggggtctctcttggggggccatccctggcctgggaagggtagggggaagaagactgtctgtacctggcattcgcccagctgaatgagcagggggtctgagcagcaggttaggtgctggtgtgaccctggcccacctgagacagagctgggccgagtgggcacagccaggtcaccccccgaggtgcaggtggcagacaggagaggcatcagcatgctcgctgttgaccttcagcccagagcctctgcctgcccgcagcacacctgggtggccgagccttcctaaacccacgcctgtctaccccctgacagcccaccctcctccaactgctgtccttgttgtgttgttgcgtggtgaaagtcgctcagtcgtgtccagttcttttgagaccctatggactgtaacccgccaggctcctctgtccgtgggattctccaggcgagaatactggggtgggttgccattcctgtctccattttgcaaattacctttttgttcaaaggaatgagtgcggttaaggtgactactttaataaattgccaaatgctttgatgtcccttgcaccttgcccgttctccccaacctctggcacaggtgtgtggtcccagacactggtgggtgtcactcccagctacagcaaaacagggggtggggaggggcctggcacttgtgttaccatcagatgagtcagccaggtggaactgtaaagcatttaatcacatgggtgtcagcgttgtttctcgaaagaacatttttccaggacctggtatgcaggatgggcacacgctgttacgtctgcggttttcacattgtcatgtgaggtgcatgcgag

SEQ ID NO: 51675 - DNA, 1157 bp, Bovine  19866880497768
  misc_feature (1)..(1): n is a, c, g, or t
naatcacagcatctccagtatgttattctcagtcacagatgctgttgttcctgaatataaaaaatttccagatttcctcatcacaagcctgtttgcctttcttgctttatttctgctttctaatattttagcaatagtaacaactgatttttattcaacaatccccaagcattaaactccaagttaagcactttatatgcataatgatactaaagcagtgtcttaaccttaaaatacaggtctgatgatcaaatctctgttttaaataaagaaacagtgactaaatcacttcctccaggtctcacagatagtaagagacagaggaaggactctgtattgtaaggaataattgtgtcactcaaaatggaattttctgatggtcagtctggtgtagccactccagtactcttgcctggaaaatcccatggacggaggagcctggtgggctgcagtccatggggtctcgaagagttggacatgactgagcgacttcactttcactttccactttcatgcattggagaaggaaatggcaacccactccagtgttcttgcctggagaatcccagggatgggggagcctggtgggctgccgtctatgggatcatacagagtcggacacgaagtgacttagcagcagtctggtgtagacctgggataacatcatggagaggcatatcaaggtgaaagtgatttatgatgcccatgagtcccagaagagaaaggcacactgttttatgccatgctgtgccatgctcagagggccacactggaggagggccatgggagtgagctcagcaaagcaggtggggagaacagagagagagagagagagaggatctgtgggcaagtgcctttactgggagtcaggccaagattacagccaaagaggtgagggaatctcgttggtgtgttttaatgtcactaggtcagtcaaaggagggcagtgagggtaacttatggaagagaccagctttactgtactggtgcacctggtcacctgggagggggacctgtttatgaggatgttgaggcatcaggaaaatctgaagttttaaaaatttagagcatagattcttacccaaatgtgtccaatttccaagtgtctcctcagaagcactgaactttcctgctattgataaaatccctttggtcac

SEQ ID NO: 51676 - DNA, 1780 bp, Bovine  19866880514631
  misc_feature (1)..(1): n is a, c, g, or t
ncttttcttcccctgaatcttgatctggcgtccactgaaaataaatacacaagtaaatcacattttggacaccataatcaaacacagttttggtaacaggtgtcactacctgagaggagtaaaccagcctccagcataatcaaaaaggcgactgtcccagctcgggggaggaaaaaataacaaagagggaaagaaggcgttagaaacaagagttccattcacggtcacagtaagaattcttaagtccaacttacattcatctttttttctggagtacactcaatatacattattcttctaacaaagctgactttctgattaagctttatttgggttaatattcaagtgtttttagaatctttaaatagtaactgagaaaagagccttgaaatatatgtaacacacagccattttgagattacaaacccttaaattacaactcataggtcaactgcatattctttcacttaagcctcccagtaaggccacttcttaagtgaggccacaggatggagggtcctagtcagtacagaaggcagaactgcagtcaataccattccacagaaatcccagaggaatgaattagtttagagctaaaccctgttaatgaggacaacacagccagcgtgggacagaccactatctcttcatctgagcatcagatacagtagctaagagccacactttcaaaaaccaagtaatcttcaaacgagagtcatgatcaggatgatgagatgctactattaggagggcacagccgattcaaactgaccattttaccttcactctgagttacatacccattgtttgaaataataagcaaaattaccagcacaatttaaatcattttatttcaggttttgaccaaccgaagttgcaacagttattcctcacactggaggactaccagtgcgtcctagtcttgaagaaaggttgcaagggtctcttaaatctgctataaggttcctaatactgctccttctagagtcaaagtgtgagtcaagttctgcctcgtactgatatttagaaatggtcagaagcatgttaacttttttttactcaagattattacaaatgtctgcagaaggcagataaaactgtggaaaagctttatatgttctgatttcttaatgttctttggagatcaaagcctgagtttcaggataggaattaacagggagtttattacaaatccagtcattgtgattaataaggacacctcattgcctcctacactaactgttctttatgacttctcaattatataaacatgatttaacattctttgaaaggtctaaaggcttgcattttacaagggtaacaaaactgtgtgggagaaggcaagaaaatcctcttttcctacattaaatgacaggaaaatatggcaaagaactgtgtcacttgagaaagcattgccaattttaatctcactttacacctccctggatctgattagttagcaaagtttttctctggcctcccagatcataatatcctatacgctctgcttctcctatcaacaaaaggaaagggatttaagtgctgctgaccaatcgagagcatgttcaagttaaagttactgctgtttttaaagggatgttcatttttgtgatttcttattttcttttcacaaacacaaggctcctggtttctattccaaagacctttgtgaatctttgaatcaaagatgagatttgtaatgtcctttaggctgtctctccacagttcatcactacagattcaaacacagatgccaacattttttccaatcacatcaaca

SEQ ID NO: 51677 - DNA, 721 bp, Bovine  19866880622046
  misc_feature (1)..(1): n is a, c, g, or t
nacttccgcttatgacacgccctctgacaggctgaggttctctctttctcctcaatgacaaccacctccccacaagactggcttctggggacaggggttgagggtaagacactctctcaatatagggtcgaccttccccatctgtccccagaccttgtgattccagatccttgcagacagacaaaattaaataccaaccttagtgttaaatacaacctatggtgcctgtcctggagcagatctttgacgacaaaagttccggaccccagcaagtacatctgcgggagaggggagacagcattagtgcccaggccgtgcctctcctccagctcttggggcggcagtgggtgggcggggggatacggctggctggctctctcaacacatctgacttcatctcaggagcccagtgggaggctcagaaagatgttcccaaagacaaaaacacctggacattaattcataagccaggaataaagtcagtcttatgttcacctcccagacaattatgtagctttaaaaaaagaagggaagaacatcccacgaacaacaacatggtacttaactgttccctgagatctgtccttgacatcatacacggacagcttgatctgtgtcatctgattgatgagagagtcttgaaagaaggcaatgctgcttagaaatataggatcattggttccctacaatagaaaaaaaaaaaaaatcagaatacagagtt

SEQ ID NO: 51678 - DNA, 696 bp, Bovine  19866880624934
  misc_feature (1)..(1): n is a, c, g, or t
naaatctgactcaccacagcatgagagaaaaatttaggagagaaaattcttttagttttcatatatttttactgctgtcttggtagcatccataacatctaaaagtaagatattagcatggaatgattatacttctgtgtttcagatgataccctaaagatattaaaggagttaacaagcaaaaagtctcttcaagtgccaagtatttattatcatttgcctcatttattgcaaaatgaaggaagccttcaacctgccgtgcagatcggaaatggacgaacaggaggtatgtttattttgtttcctgttgtagctgcgttgctggtcagaattgtgtcttggggtattatgtggtattaactttactgaggctttcaatggctaagtcaaatatctctttgtaaatgtcacattgcacttgaaaatacgcaggttattttcaaatatcttttgatactgatttctaacattaatccacagtgataagaacacactgtatgatttcagtacgtttagaccataaaattgttttttatccctggatatattccagtgtctcctagtttatagtctatgggaacttgaatttgtaacgtactattgtgtgaaaattgtataaatcttaattatgttcagttggttcacggtacttttcaggtctactatatccttctacatttctgtctcttcattcta

SEQ ID NO: 51679 - DNA, 2756 bp, Bovine  19866880627548
  misc_feature (1)..(1): n is a, c, g, or t
nactcacgtgtgactgattccactggtcagagagtccccttgactttgtcaggaaccacttgcccccccatctccaaattgtaacacctcgttgtgggcatgagggaggtcctgtctctcgttcgggagagatggaagtggattttggatcactgtcctggtaactccctacaatttagaagattctttgggcacagctcagtttcagtttggggactacttgtatgagaaacacttagatttgaatgcatggggtatggacccactaacaggaagtgacaagtgagaaagaaagaaacacagatatctgggggtgggttttatatttgagagcttcatttctttcctaaagtctgggatcctagttgagagctcaccttctcaaagtggaggtgtaacactccctcggtcgggaaatctccaacagctgaaagttggttttttcctataacatcatccatctctgctggtacattaagatgggaagcttctgaagcatcacaggcttaaattccccacttcatccattactagctggcgatgttgactctcacccttaacccggatcctgtccttttccagcgctgccatttctgaaaaacacggtgatccttctctacccgtttgcacctctcatcctgctctacgggctgtcactagcattgggctggaacttcacccacacgctctgctccttctacaagtacagagtgaagtgagccagggcgccccttacatctgagcagcagtattggtgaggtggtgatttcttgtgaaacctgtaaataaactatcattgtagatatcttaaaggtataaagtttgcaaatttgaagaactataaatgttaatacttagtacattccttaaaactaattaaatgtacatttctacaataaatattttttaaactaaagtgttaccttttattcataaatatttgcacacagaatgatatgcaaagtactaaggctatgaagaaaataaaaaggtaaaactttttaacaaattatttttgaacacgtatccacgtaatagtcatgtgtgtcccatcccctccccaactgttactgacaaggtacagagtcacccccatttctaacaggccacattttaaacttttatataagccacagggtcctaatttaagctttaagagtctctttaggaatcactgaactacaggctgtaaatgtcactaatagccattatttatgccaaaaaaaaaaaatacccaaccaacaaaatgtagtagatgaagagtcccccagaagctattcttactctgggaactgtataacacacgcaaggcatgagtgaacctctgtatcacgctgataatcatggtcttaacaactaaggcttttttttttttaaagactttccaaaacacacaaatctactattgttttctaactgaaaatagtcctggtaagctattattatatatcagtgttaaaaaactataataataaaaaagcttggtactcatgaagttttacctgttttttattagaaggagtcttgaattcaacatggctttttaaacttctttatttcaaatacacatgaacggttgtggcacagagaaacagtgatgaaggcacagtcaacgggaccagttatcaggttttcagttttagcagcaaattagaaaataaataatctgcctttgaaaatccaacaggacctaaaatagtactacagttattaccaatccaaccaatgaagatgttataagggaaatatgtacaatatatttcaggggaaaaaaaaaatacattggtacaacctggaaaagcagttcttcaggcagcttctcccaggggtgcttccaaaaacacccccaatcccaaagacagcctttccaaacgaagtttgttctcaaggagaaatgctttagtttttcaccccataaatgaaacaatggttacatttaatcagctgatctctaaaatctttcttagaaaacacgaccgactacactgaaaacgtcaaatctgctggcagtgcatcttacagtactgtccacaccggccatcattaaggctcagagactgtgtcttcaaaaggtattttcacccaaatttcagcaaactgagcatttcgaacaaataatggaatgcttatcaaactcaagtaccaaatctttgattccagggcaatttgctaatcactaatgctctgaattaaacagccttccttgagtccaagaatatggaatgttccccacagcagacaatccttattctagaacagttttagcaccacagttcctaacgtttttccacacaagcgtttccaggccaacactcagtttacattttttgaatgacatctaaattgcccactcatactctgaagctccagccctttctggtttgttcctctggaaatgctctagctagcaccctaacaggtgaagcgagtgtttcaggcaagaagagtcaagtttctgtatagatagtgatgatacaggtatataaatataaaaaatgcctgttttttttttttttttttagtaatactcctgtagtggtctcttcagcactgtaggttcacatgcattgaagaaatgaagcatattagttatgccatatatatgttaagattactaattaaagatatacaattctcaaactaaatctcacacactataaacactgctccatagcttgggaaatgtttcctttcctttaggacttcagataccgattatgactcaagtctttgactttttgataactttagcctct

SEQ ID NO: 51680 - DNA, 1290 bp, Bovine  19866880744937
  misc_feature (1)..(1): n is a, c, g, or t
naatatgaaaactcccattaaaatattccaaaaattcagaaccaaaatttcacagaagaaatgcaaaaggactatcatacatgaaattcaagtttaatcttatgttaaagcaacaattacaaattacaagacaacaatattcaccttcaaattaaattagcagattatataatatatattaaaattgtggtgataatataataaatgtttcagctattcagaacagcataaaaaacctgaaaacattttaccctattgttcagtaatttcccttttaggaatttaacttttatgaattcaaagtacccattgtaaaactatgtcttttttatttcttgtaagtcatatttaagagcgctacttgtttcaaatagctcaaagattccccagagttcatctgaagtccatacaggtcacaacagaaaggatcataaacaccacagttaaattttagcctcatattgtatgtttttaaaaagaggctgtttcttcactattgtcaatgaaacgtatataactgaaatgtaacttaatattactctctttaaatcaaatttagcaattaatgaaattgctttataattaacaacaacagaaagagttttacgtggtgatttttctctctgtagaggttaacaaatgctggctggtaagcaaccgtcgacagctttcaaagagagtagttcacgcgactctctgaaaatataatctgtccataaaacaaaaaacagtgcctgtacctgaaaatttattcactggatccttactcctgtttgtttctgcttctacacgcttgaattgctgtacaatggcactgagctcagaagagcgctgagagattcgatgttcagctattcggagacgttctttcagagcaagaaattctcgttgataagcaatcactttttctaaaaacaaaactagacgttattagtgcatttcttaaaaaaacacataaaaacaccattataatcaaatctgaactggaacagcagaaattttaaagctgcacttttcagaaacagatactcatttttgaattcactgagacagaactgaaaataaaaaagagtctgaactaacaaagtagcgacaaagccaccagtaacacagtgctatcaatatctgtaaggatgtgagcactttctaattagcactttggaaagctaaagatagggagaaaaagacaacgtttttggaactaacacttaaagcatgataccaacatcatttcttaaaaggtagagacaaccataaagaccctatttgtatgaaggtagagacggatca

SEQ ID NO: 51681 - DNA, 1626 bp, Bovine  19866880868172
  misc_feature (1)..(1): n is a, c, g, or t
ncacaaaaccactctctgccttaagaccactaaatcttaagagataaaccagggagtgcagctgcagagcccacgctcttagagatgtgtctgacccttctgctctgctacactactatcatcttaaatattttagagtgctcatgcttttgaaactccattctaatgaaaacagaccctcgatattatttttctttaaaaaactgtggaaaaaaaaactaaaggaaaaacttacctggatgtagtatgtgcctttttcctgagcatacatcattagaaaacaataatctaggttttgctttgttctccatctgaaataaaaatgttcaaaaataagttaggaatcagactcaaagttagcaaaagaaggttagatgtatattttgtaatatataacaatgttatatgccctatatataatatcacatatattgtatatatgataatatgatattatacaaaatgtacagttatatattggtttccctggtggctcagtggtaaagaatctgcttggcaatgcaggagacatgggttcgatccctggattaggaagatcccttggaaaaggaaacagcaacccgctctagtattcttgcctggagaatcccatggacagaggagcctggagggctccatagggtcacagagtcagacataacttagcaactaaacaacaatagtcatacattagatagataggtagacaaataaatggatggagccacacatacatggtgtatccacttaggaaagagtgcaagagaattcacttttctttaagaaggttttatcaaaatacattctcaaaaacactaatcctcaagatgtcctgagggaaaaaggagtctaatgtctagtaagtttgggaaggacatttatttcttttctagagacacattaatatattagaagcattgaaacattcagcagtaagtagcatctgttgaaaaaagtttttaattcaatattttccaaattttcttgactacaggccctcttttcagtgatatcttaatgtctccatgaactagtgcttcctatataggtaaaagtttttttaaaaaaaatcttaaacattgtattaaaatttacaatattaggtccttttgatgaattcttggtagcctacagaaacccactgaccaatgctgaatatagagaagtggttttttaaaagccaggttaacacacacacacacacacacaatagaactaaagctctgaaccactaagtaaacttctcccagaaaataccttataagctgttctgaatttaatgagtctattcactgggtttttttttttttttaaacaaactcaatcctaaatgttttaagtaacatattcattgagagacaattaaccaattatagagacatatctgtctttgtgacaaattaacaactcaagaaatacaataaatctcttcccaaaacatcatttttgtccttttttctggttatagacaatccaaaaatgatgctaatatctcttagattactttgtctttaacaacaacacaagaaaagcttctaactccttcaatgttagagatttagagataaataaattgactgttttattgcagtatgattctgcagaagactattattgtttttatta

SEQ ID NO: 51682 - DNA, 3309 bp, Bovine  19866881060885
  misc_feature (1)..(1): n is a, c, g, or t
ngtgagcagcttggagtccctgaggcctctgccgacacatgcctgctcacccacggcagagtcctcacagggtcccttctctgggcggctttcttgcacgctggatacaggctgaccatctttatcttctccccttctgatccttaggtccctcgttcaaagcaagcagtttgaaagcagataaaaagctagaatttgttcccactaacttacacatacaaaggatgagagttcaggatgatggaggagcaggtaactgccccgtgaatcatgtcgcttctttcccccactggcccttggtccctgagctgtcgcacgtctgtcctatgtgtctgctgtggcgttgggctgagagcacagcaaagggacctccaaggcctttgtgaggagctctagcaccttcctctcgtttgtcctccctccagcttctcttgcatgtctggggcagaaaacggcccacgggtcatccttctgaggcaggggtgcaggctgagtgtcgtgggtcgctgtgtggccccaccctgagacccacacaggcccctctgaaccaagatgagggtgctgggctccagaggccctcgggcaccctggatggtggggctagtgttgccataggctgcttggagccgggctggcgggggaccccagagcttcgtgcatatccccgtagccagctttgtccgcaggcctgagccagagtaacagaggagagctttctgtcattcagatcagaactatgacatcgtcaccattggggcgccagcagcacactgccagggcttcaagtcgggagggctccgcaaaaagctgcacaagtttgaagagaccaagaaacagtaagttctcagagggtatctgtcctccttgttctggtgtctcgggcttcctggatttaaaaaagaaaaaaagtcgcaaggggaccgcagaaacgtccagcgtccgagctgcttttgcagggtgggggagctgcctgaggcgcctgtgccgctctttgtgcacgtccaagctgggcggtgacgagtgcccgagggcctgtccctgcaaaacaggcgattgaaaaatccgcccggagaatggttcccccggccctggcggacttggcgggctccgctgccctttagaaaccttggtccaaggtcacagggtgtgaggtctgggaaagacggtttcctttcctggaggacattggtggtcagtgttcccagggtcagagaggctccaggggctgcagggagtgaccaatcagagcggggaaacagcgaggtgggcggggcacgtgataaggggcggggcctcgaggaggagctctgcgggcagggcgagctggtgactagagctgacaggttgagcaggtagggcgacagcagtgctgggagcctgctggagagagggtgcaggggctgctgcagggcaggggcgacagggagagagcataagctgacctgtcgtgtccgacaccgggaggcattggtgatcttcccgaacatcgcctggctagacttaaccttgactggagggctcgggtgtaggaagtagatgggatacgtgcaggtgatgccgtgggctcctcggacctagaggtggaggaggagtgggaccaagacaagcttgtctcaggctggtaggagagaggatggcaaacgaggggagatggtggaggatactggtggagcgaggttctggagaagatggggaggcaggactgggcagtgatcctggaagggccaggagaagaaggtggtatcgcagagaaagaagaagctggggctgcagcagagcagctggtgcagaatgtggagttgaggggccccaacaccaaggcccacgatcctcaggaggtcctgtggagcagtcgtggcggcctggtgactgagtgcacacacacagtgctggccgcagcctcaggccagagcctggctctgtgtctgggtgggtgtcaggacagggcttgagcaggttgaccttggactgcaggggccggggagaaaggacaggtgcagtgggctgaggcgtgagcaggcgggcagagagcacccggggactcagggttcagagggtgggaggtaggcctcagactgggcagcatctctgggatcctgcccaccttcctgcagcccccttgacctggatctggccccaccaagggctcctcaaaccaggccaccagacccacccgaggattcaccagcctggtggtcccctgggaattagggcaaagacagcttcctgtgccaccgccgctctgcacggccagccgcatgtgtgtcgctgcactgcatgggccgtgtggaggtgtgagcgtgcgactcgagctggcgtggggccctggaggagaaagccagtcaaggggctggccctgtcccaggaaggtcggggtgttgataccagttattctgcatgtgaacttcaggactcttattccccaaaggctttttgtagtatttttcaaatatataatgtatatgtttatgtattttcctactaatggcataaaaccgcctgcaggaatggtttgcaccaggggagctctcctcagcccaggtgtagcccaccacatgggcttctccctggggctcaagcacacgcgcagacgctgcttcgaccagggagcaccttgggctcctaagctgaatcctccctgtagtcggggcttcctcaagttatctccagaattttgatgaaagagaacttggtttttacgtttttttgttttgcatttgccgtttgctaacagactgctaatatttcgtcttggttcttctctttagcagttttgaggagtgttggtgagttctctgtctgtggagagtgtgcgtttgggtcttgctctcgtgcagagaaagcctgtcccctcctctgtgaggtgctgcccccgccatgcccccgcaggctcctagttgtagtctcgtagatggaactcccttccaactgcaatgttctgtgataatgaatagcccgtctccagtctgctgtttcaaaccctcccagtctggctgcatcactcggagcaaagacccagctctctctccatgacgaggaggcacctaggccaggcaggtctcaggtgctgaggcttcaagccagtaccgtggtgtgtttgggagtcccttcctggcttcttttactgccatctaaggctcttctgtttttatttccccttcacctctcgcaggaatgaaaccagcttacttttttttcctttggccatgcttcatggcacatagggtcttagttccctgagcaggcactgaatccctgcccctgccatggaagcacagtgtcttaaccgtagaccagcagggaagtccc

SEQ ID NO: 51683 - DNA, 912 bp, Bovine  19866881149830
  misc_feature (1)..(1): n is a, c, g, or t
ntgattcatggacttggaattcagctccatagaaaagcacaataaaggtctctggaaggagaataaaagccataaaagaggcaccaaaggctctctcttgatattgttatttcttctggatgtttagaccatccaagactttgcctaatgtctcactgaaacctctggatgttcctggatgaggaatgttccatagcttctctcttcccctgcttctgtcaactaaacctggggatatgttcaccttcaggaacaaggaaaaggacttaatctctctcttggtctctctctcacacacacacacccacacacatacacacgttgtccctggtgtgtctgatggagaagcaaaggagcacggccctcagttggccgtccacagtcttggatgtgctctccagcccctgagagggatctgggagtgtctgaacacactgaactgaacccactctccatgcggagaacccgaagcccttcttcggaagcccctctcccagccccacaacccaacaagggtcctcccagggcagggagagtgaaggaaggccttacctgtgctgtcctccccaaggccttctgcagcctcccgaagcttaatgtccatcaccctcgtggaaatcatgtccagctcactaaaaatcagggagaaagccatgtgagaggaacaagtctaactgaagtcaatgaccgagatggtagtgactgaattttgcccatgaccctggcaaagacagaggccaaaaaataggtccagggctcaagattagtaaccacatcagtgtttatctaaccactgaccagatccatttaatggaaaacagaaaactgggaaagcttcaccaatttatacaatgcagatgcagtttctttctttgaaagaaaaattttcagaaattatgtattgctcaaatg

SEQ ID NO: 51684 - DNA, 1995 bp, Bovine  19866881176774
  misc_feature (1)..(1): n is a, c, g, or t
natgggataatagtaggtcttgtttgatagaaatgcattcccaaatgatatgcaacatattcactgattgatacggaccacttttgaagttttttaatgaatttgttaccatattgtttttgtttcatgttttggttttttgactgtgaggcatgtgggatcatagctccccaaccagggatcgaactcacacgcccttgcattggaagacaaagtcttcaccactggaccaccaagggaagtcctgagatagcacagctttagctctttcttttgccttatcagtgaggttctccttccccaggagggagcgttcagggatagatgagcgagatttttctggagttccagaaaaaaaaaaaaaaaaccaaccctctgctctttgctttatggttgtctgtgcaagattccagaaactctacgtgggggctgtttccttgaaaccgttggcaaatggttactgacattttagccttttctcaacctggcttcaaggtttggtccaagaggcattacagaggaaaagagctcccttgaagggcactggaggagctctgggggctgaggaagggggagtgcattcttcctttcaacacttttaaagcttgctctaccaggaccggatattttcccatttttctaacatgttcacaaagttcccctaccctttctattttgggtgttgacaccatgttctttctcagccttaactaatcaccaggaactttgggttttgtcctctcaaaacccctaggaacttcaaaagccacccacagcacacacaaataaagccagaagtttaagatactacagaaacaaatgaaatccttacttagaaaggcgatttatggagtcagtaaatatttaggagttacaacaaataaatgtaatttttaacagcaaggagcagaggctcaaggtgggagagaagaaaagggggtgcaggcttatttgtagttgttcagtgtagtttgaggattctcaaaaaagcacacacccccctaactgagtccttgtctcttatcttcatgagtcacctgtccattgtgagtgcaggttattaaactggggggctatagactgattcacaatatatttttattccttccacacaggaaatttaaagcacttaatagcaaaaggggtttttaagagaatggtttattccaaagggattatacaaattttattttcataagtaaacttctctttatttgctcaaataactgcgatctgtctttaacttctttctgtgccctgaggtgctcagttgctttcagcgcgtccaactctttatgaccccatgggttgtatgtagcccgccaggctcctctgtacatgaaattttccaggcaagaatactggagtgggttaccatttcctccgccaagggatctacccgatccagggaccgaacccatgtctcctgcattgcaggtaggttctttaccactgcaccacctcggaagccccttaacctccttaccctgcctctgacgcttttatttgggattttgctccagttaaagccaagagtggagagagacccttccaagcttctcccctggctctttgcagatagaggtacaaacacgagcttcttgggtcttcagtgcccgcagggaaaatccccaaacccaccacctaaaatgtgttgcagattccgagtgtgcccatataaagtcgccaacatagctgaagactcagacgttggtcatcaatcgatgtgctactagcatgagctcttctagctggcatggaagcttctcaagggtcagcagcagtggcctccgttccctgtgggtcacaattcacgtgggtcttacctccctgcaggttaagctccctgctctgtaggcacggggccggggcgggggcgtctggggctgtgtgactggcaggcccaggcttccgggccagctctctggtcgccgctgagcgaccgtccgaggccagcacgtttccttaccaatctccttacctggaccggcgggt

SEQ ID NO: 51685 - DNA, 1503 bp, Bovine  19866881199646
  misc_feature (1)..(1): n is a, c, g, or t
nacagctcaagtccaagaacagaaaaacttgttcttcaaatctgggcctgagggggcctcttcaggggttctcattaactcaagagggtgcttagcctccaggccccctccacacagtgtgcatctgggcgcctacagaatccaagggagtcctggatccaaagaaagatccctgtgggggctgctcccactcccgctctctgaaccctaactcaccacaggcttctcctcagtttttggcagaattctatcattagctgcagctcatactaaaaaattctacagaagtttacgcacatgaagaatgagaacaggtttaaactatggtattttaaagatacccatgcgttatacttatttacacaatgcaaagaaaaatatctgtatcctgagtacatgaccctgagcccataattaagtacaaaaaagccttcgtgttcacccttacagacctgctcattccataccactctccaggctatgcttacctctgtttgatattctttctcaggccctgtgcctgtctttataatgctcaccacagccgtcaacagcaacttgtttgtaaggtatctgcctacccctgcccttactttcaaggctgtgagcttcgatgcctgtcacatccattgctctctcaccaggagtaaacaacccaaaaatgaagttaaaaaaaaaaaattccattgacaacagcatacaaaagaataaactactcaggaacaaatttaaccaaggaggcagaatatctgtactctgggaactacaaaacattgctaaaagaaattaaagaagacacagataaacagaacgttatccagtgttcacagatgaaaaaaacacgtttaagatggcaatactttccaaattgataacacagattcaatgcaatccttatcaaaatcccacctggattgtttttccccggaaatttttggtttgttttgtttttctttttgcagaaattggcaagttgatctgaaaattcatatggaaatacaaaggacccaaaacaatcttgaaagtgaaaaacaaagatggaggattcatacttctcagtttcaaaactgacacaaatcttcagcagccaggaatgcatggtactgtcatacgcaaaatagctagggagaagctgccatgtaacggaggcagctcaaccctgtgccctgtgccaaccgacaggggagggaccggggggcaggcgggacggggcttcaagagggaggggacatatgtatgatgtccttatggctgatccacactgttgtacggcagaaaccaacacaacactggaaagcaattatcctccgattaaaaataagtgaaagtgggaagctgctatatagcacagggagcccagcccggcgctctgtgacaactaggggcggaggtgggagggaggctcaagaaggaggggatatatatgtatatactcatgaccgattcccattatggcacagcagaaatcaacacattctaatattgtatagaaatatcctccaa

SEQ ID NO: 51686 - DNA, 1083 bp, Bovine  19866881366368
  misc_feature (1)..(1): n is a, c, g, or t
ntgccggggtcaaggtttgatccctggtcgggagctaacaacccacatgctatgcagcatgaccaaaaaacctcccaaataaacagtttaaaagaaaaatccagtttaaacaaatataaaaatacaatgtacaacatgattttacacatagacattgtagaatgattatcattgtagaatgattgtagaagaccaagataacgaacaaagggaaaaatcttaaactgagtgatatgacataacaaagtactaatcaccaagaaaaggatctttgtcccccggtgtccataaaatcaagcccatataaataagggcctattctatagagtctcaaattcaagctggaaacaagtgacatttttgtaatgtgttttttttatatttgtaaatgtgttttttttaaatattttctatcagtcattctataagtcatttaatttaatttgatttaatcatacagaagagtggcctcagcatagaacccgtctccaagctgaatgccaaagatgatcttgagtagtgataacttctccctctcctgcctcaaatttgacaccacccaaaaagctggaccagtttgcggagaggccgttattttgcaaaatgtgctttttgtttctcagtctgtgggtggggccatttagggaacaaccatatttgcacagtcagatttttggtggaaagctgtttttgcaagagacactcatttcgtgtattcgcagtactgcttccctgttggcagcaagaggaaatgccattagaaggtgaaagttagcatctgcagctcagatactcagagcctcaatgttggaaagaggtagacaaatcctaaagagaaccaggaccaacatgacacagctcaggtcacgtgtttttgtgtgaccgtgtgtttctgtcctgttggatccaagaggattctgtggaggttactttcttgcttccctagtggatctagagcagacccatgaaacgacttttcctgtgcatgtttctcctctgattgttcacttatctatagatcaattaaataatatttatattgaagtataattgatttacaaggtattggtttttgaggtacag

SEQ ID NO: 51687 - DNA, 2065 bp, Bovine  19866881429625
  misc_feature (1)..(1): n is a, c, g, or t
ncaaggagacgagcacactggcctcccgcagtgagaacacagcatggcagcctcttcgtggacgaggatggggccagtggtcacttcactggggaagccaggactcatttcagaataagcagcaaaatgaaaagacaggtatgtacatcatcacacagtatgttttcacttctctagatccctacctggacttcccccagtacctcagcagtgcaggagacgtaagagctgggggttcgatccccgggtcaggaagatcccctggaggagggcacggcaacccatcccattattgcctggagaatcctgtggacagaggagcctggcggggaatggttcatagggtcacagagtgtcagacacagctgaagcaacttagcacgcaggccccttaccatcaatgaaaccaaaagacaattgacaaataggtttttaaaaaaactgcaaaatacgacaagaatatagtattaaaaacagtcacatgaaaaagaccaacagtcgaagttacaaaagtagaagcatgaatatagtatgaaagctgttcagtttcagagtaatcaaagaaatagaagtggaacaaggtgccatctccagctccgacgagaaagggaaaggctggtgttccaggtggtaggttaattaatgttctgtgagtactgtggtaatactaaaagtccaaaaatttcagaacggttaaattattctttagctgtacatttctactgctaggaatctgtccgagggagatcccaggcaggtgtgccaagcacagggtgcaacagtgagcagcgagaccacggggcagcactttagcgagtcacagacggactgccagccgcccacactcgtggacatgggaggatacgtgcagagctagctggcgctcagaaaggcgtggtgccagcccctcgcctctgcccgctgtgtccacgctgagcacagatctcaggagacctcctgtctcctgctggaggtgtaaagggttttgtctctcatacttactgtgcacacatccatcttgtggagggcacggcggccttggcttacatggcctcggtttctgggacaggagggcagagtagcagggccttgagcccacgtcctctcatgagcacacccaggccacaactgcctgccgaatagccatcagtaaaaagaccagaacctaaaacagatgctccacaaccaaagtcaaaggaggagcctcaacaaggcaggcagagaggtacactagcaatacaattaaaccatatccctggtggtcaggccacagcttacacactgcagaggttcccccgccaagtgagcgctgagccccaggtcaggctccccagcctggggctccagctttgggaagaggagcccccagagcatctggctttgaaagccagcagggcttagctggaactccactctcacagggtgcacacaaaatctgacatgcaaacagggctataaacgagaattttcatgtttatagacactcaatgcagtgcccatcggtgatggtccagccaggtgctggccccagaaccatcctcaggtaacagaatgactcaggccgggtttcatgttgtcagttgtttattatttgtcattctaaagactcgcacatttatagcatacatggctttgaatgagctaagaatatataaaacagtaactatgtgtttattaatactgtccaaaacaaataaataaaagtaccttaaagcactaaggttggcaaatacaattgtgtagggacaaaactgtattgtataatgtttgtacatgttttaaaggaaaccagaggcagctgagctgcagacgctttgacagaacccatctgagttttcagtacgtcacaacatttctaagtgggggccttatagggaacactggctggaacccctattttacagagacctggaccactgcctgtcttctgccgcgggaaactcaaagctcccgtgtgacctgaggagccgcggctatcgcggtgagcagcatggcccccctcggcgagcatgcccagtgccgctgggagacccacggtcacacaggagccagggagtcacactca

SEQ ID NO: 51688 - DNA, 1420 bp, Bovine  19866880349125
  misc_feature (1)..(1): n is a, c, g, or t
naaaatatacaaaaagccaaatacaaaagcccagagacatgcaaatgcatttggggccatttttacacaggagcagttaatgtggccaagccccattctagctggttccttccctctcagcctataaatttaccaaatattggccaaagctacactctgagtcacattcatgcaagtgtgcacctaagagaagttgtcccaagggtttcccattgctcctgctagcacacgttttctatctctcaatcctctctctcccagaaagacaaagactaagggtagcatggcatggtatgtatgtgtgcatgtgtccatatgaacatgtgtttctttgttctaatgagtcagcttgatgagaacagaagggtgctagccacgtacagactgcaagtcactgcaggctgatgagagaacgttgctttgcctactctgtgttgcagctataggttagactgatattttgggggaattgattgacccacgtgggtattttggcatcttatagacatgactgagagtgctttctttgagcctgagtgaggctgtcagttgtctgggtttgatttttttgagtgaacttaccaatcaattcaaagaataacggtgatggaactgagttggtcaggtggttgactaggcctcacatggccacagagtgattctgagtcaaaaacgatgggcagaatctgacagtttaaaaacgggatccatcaattaaacagaaagaaaccagtggggctgtttggcactcgttcacccaaaccagtcaactgattaaaatgttctcatttcaaccaatttgtgcaagatgcacccacagcacctgagggtcagggaacccaaaaggctttgcatcgaaagctggatgtataccaagatctaaaagaggaaagggctgtgttcgtggccgtacacttggaagaaaaaagttctgatgcaaggctgtgtgtgattgcatgagtgcttgtatctggacctgtgtctgcttataactaataacactggcaagacagtagaagctgtgtatcataactggtgctttcttttcatgtggagtcacagaatgttaggtattgaaggaacctttagagttcatgtagaaactgagacttggagagcttttggtttttgttttttggtttcgttatttattttttggccataccctacagcaggtgggatcttagtgccctgaccagggatcaaacatgcgccacctgcattggaagttcggcgttttaactagtggaccactggggaagtcctaaggtgtggagagttttaaatgacttgtccaaggtcacacagtgagtggacagctgagacacatctagacaccatatttgttaaggctgtcataacaaactacccacagagtaggtggctaaaacaatagaaatttatttttttcacatttctg

SEQ ID NO: 51689 - DNA, 1095 bp, Bovine  19866880406659
  misc_feature (1)..(1): n is a, c, g, or t
nggactctaagtggtaaggctagtcatcatgctgaaagaaaaaatccagactgccaataaagtagaattcagggagatggaaattttgagttatgtgcacttggatctaccactgcagaagccagtatagaagttcctcacagggccgcctctgcacgtccagaggatgtcaaactatttaaaaaaaatttttttttcctttccctggttatgttcttttttttttttaacccaggaggcatgatttggaactatgaaaacctagcagatggggaaacacacagccagggttcaaacctggctaagcgaccttgggcaggtgacttaacctttctgagactacatttcctcatcaaattcagtataaagcacctggcatatagtaatcctctataaatggaagctattatagttatgagtattgagagggcttcaggacactacccatgaattggaactgagtcatggaatgaataattaccatattcggaacaaatcagaagcccagaccctgataattcatgtataatcttctcactgcatggaatccagtctttccccaacttaatttgacctctcaaaaatgggcgataaaagaggaagaatgcattctggactcttctaagcagcctggaaaccttaggtttagggcaaagatgctcttccccagagacaggatgggtggctgtcttcatgatatggttttaagaaaaattgtacaccaccctcacacaaatctgtattatgccacctgccatggatctgaaattccatcatcatagctacttctttccacctgggcaatggctcctgcagacccctacctaaaagcacacaatttcctgggaggatgtacatgtgcacacattggttaaggtttcctaatctggcaatccagcttttaccccatggatactgagctggaactcaggataagtaagctttgataggactggggatatagaaaggccagaggcgtacagtggaaagtatgggcagcagaaagacatgagggccagaaaaagaagaaaagacacccaaagagctaggggacctgctaagaagggccactatgtcacctagggtttaaagagg

SEQ ID NO: 51690 - DNA, 1317 bp, Bovine  19866880518999
  misc_feature (1)..(1): n is a, c, g, or t
nttcaatgacttacccttctactcctttcaagtctgtgagtaggttgtttcaaattccactgagcagtttatttatcatccggaatctcagtcattgaaggatccagaatatatcaaacttcccaggtctccatctgggcacccttcttagttcaggaagcaattagtctgagaaagacagaagagagagtgtaggagcagaatatatatccttttaaaataatttagtaacaaccctaggtaagtgaccaataatttatagagtctattctctttatagagatatttccttgctgctcaaccattgagcttgccgggtttagaggattaatctttgatgtagtaaatatgctcaagctgtaattcagtagcagggataaagggaacttagacttgtcttgtaaggaaaaaatattaaatggatttgtccaggaaccgccattgtagtcctcattgtctcttgtaccttcagttcagttcagttcagtcgctcagtcatgtccgactgttttcgaccccatgaatcgcagcacgccaggcctccctgtacatcaccagctcccggagttcactcagactcacgtccatcgagtcagtgatgccatccagccatctcatcctctgttgtcctcttctccttctgcccccaagccctcccagcatcagagtcttttccaatgagtcaattcttcgcatgaggtggccaaagtactggagtttcagctttagcatcattccttccaaagaaatcccagggctgatcttcagaatggactggttggatctccttgcagtccaagggactctcaagagtcttctccaacaccacagttcaaaagtatcaattcttcagcactcagccttcttcacagtccaactctcacatccatacatgaccacaggaaaaaatgcttgtaccttagcatcctacagtttcagaactgcaaggggccctctgatccaatgtccttattttacagatgagaagactaagagttatggcactacagatggtcacagatttaggactggaaccatgtctcttgcctcctacttcaagacatttaatactacacttcgccatgcctgtcacactcacactctacatttacttgcaaggatcccatatcaacttccttccactcagttcttttctgtccctccctattgtctattagccaaaccaagctgcttcctggactcctgtccataccacacattttctggcttctcaaatgtcccttaaaccacttccatccccaggctcagtcgtatccgacttttctcttccctctgttccctttcttcctctctaac

SEQ ID NO: 51691 - DNA, 4050 bp, Bovine  19866880543271
  misc_feature (1)..(1): n is a, c, g, or t
natccatacatgaccactggaaaaaccatagccttgactagatggacctttgttggcaaagtaatgtctctgcttttcaatatgctctctaggttggtcataacttttcttccaaggagtaagcgtcctttaatttcatggctagcctattaaagtgcagaactttgggccccatcacagattcaccgaatcagaatgagcattttaacaaggtcccaggtggtgtgtatgtttattaaagtttgagaggcactggtgtgttggataaggttctgctacttaacagctgtgtgaccatggacaagttatttaacttcttcacagctcagtttccttgtctgtaaagttgggataataatagtatctcctcaaaggtgttgtgagaccttagttaacacatgaaaagtgcttagaattgcaactgacacctggtaagcatgcagttaatgtcagccagtattactcttctctctgatgcactcctcaaacttcattaaggggaactggctgaacttaacgggacaggataagagaaagtaggggaatacattctatgtgtgtgtggtgggggtgaagagaagggcactgattacaggaggaataacttttttgattaataacaacaaaaaatttgagggagacagcatatggcctagccggggctacccagagccccagaagagtgaatgatggattcattcatattcattcattcatatgatggatttatcagtagatacaacgccaggcctacagagtggtaaacaagacagacaaggctccagcccctaaattagggagattcagaatttctattaaacactaacaagaagtgaaggcctgtggatgctatatactgcagcccatttagacagcccaattatgaggccttggaaatttggtttgactctctgcccagatcttatccgcctagagtctctgttactcttctctcttctgtatcccacacccactgtcaccggaagcagtcatgccgctctcgttggctgtgtcgacggctgagtggaacacgctgagagtaaggactagcctgcccagaagccagttgttcacgttgtcccagttttctggaactgcctttctttcatttttctttcaatcattggttttcttatttttattttatatggtagcagagtccattaacaatgttgtttcggtttcaggtgtgcagcaaagtgattcagttatacatgtatctattttttttttcaagttcttttcctatttaaatgattgttaccactgctattttgatcaccacttttaaggacttcctcctagagtaagcacccccaaagtggatgtttgtcaggcaggagcaggggcgaacttcatagtttggtagcaggagtcgggatgttcctaagaaagtcctgaaagccttggctgtatttcttggttttgtatggcaaagcctggcctctttgtagggaccggaagctaggattgctctcgaaactggttctggaattgtctttctaaaacatagatctgatcttgttactcctctgtttggaaaccccgaatggtacacaaggccattcacactttagccccaaactgttcggcagtttccttacacctctacctagtgcagtgtgcactctacaccttaattacaagagtggttaaagactggggctcttttcagaactaggtttcaaatccaggctttattgcccactattgtgtgaaattgggcgagatactctacccaagccttggattttgcatctgttaaataggaatagcaataatgaaacagtaattttcaaaagagctaatattattctgtgttaagtactattctaagcactttccatctactgagtcacttcatcttcacaacagtcctacctcatagcattgttgtaaagattaagtgtgtatgtaccatgtaatacacatgaagtaatattaactgctattattattgatattaatattacaaagcaaaaaagcttcattgtgctttcatattccctgtccctggaatgaccaactccctattctgtgctgaaaactcttagcattcctccagaaacctcagctttttgagttcctatacacatagtactttaaatatacccccctatagttcacttatcctagtacattgaaaatagtctttgcctgcttttctctaccactagactgtgagcttctcagcagtaaatatcctgtaatatttactttatgtcactagggctgactctaacataagaaacatagcaggtactacatgaatgttagttcaatgaataaatgaaagtctgactgaataactaaatacttataagaaaggacctcgcgtgggaagtccaagaaaggagttggggagtaaaacaatctagatagcttctgcctgtatcccctagcctctgagcagcaaagccattccccagcccaagctgcctcacatgtcaccggatggattggaactccccatcaagaacactccccgatcccctcttgctgtagacacaccactcgcctctggcagtgacagaaataaagaggattacatcatttgttacaacaaaatggttattatagtaataagtataattagcatcagacaattacaataataacatatttccttgctgcagaggtacttttttaaaaaacaggtttattttaataccccccccccccacacacccccaagaagaaaacaactcttttcgggaagagcaaaggcctctttcattctagtgagatgctatcttaattaaggaacattattgacaaagcccataaaatgggagcagattcccttggagcaaaacctcctttgctctctctggtttcttgggggaaaggaaaatcttgtgcctctctttctagggattaggagaactggttgaaggatagaaaagatgaggccggggagaaagaaagaaaggaaaggaaaaaacccttctcaaacaactagagcttaatacccgttgtcgacaatctcccttgttttcttcctggttggatggacctggaagggaagacagtctatttatttatagaggtaaatagtggtatcatttatggatagaggtgaatacgtgctttaggtagttttccaagctccataggagcaagaagtgccgagagcacagggccccaagaggagcctgaaggtgggtaaccaggcataatgccactccgtgcacaggcccgtgtgagatgcttaacgacatcacgtttgttatctcctgcttttttccgaaaagatttgggggagcttacactaatctgtaatgcaaaatgtaaaaactagatagatgataaaattaggatccacataaacatttcaaaaacgtgacgtataggtacttccctgatggtccagtggctaagacttcaagcttctgatacagggggcccgggtctgatccctggtcagggagctagatgctcccacatgctgtgactaaagaacccaagtactacagctaagacctggcatagtcaagtgaataaataaaaataaaaaaaattttaaaaatgacatatacctaagtacatgtacagtttccatacatacctacaaatatatacatagacatgtaccttgtacatagcaggctctcaataaatacttggtgaattactgaaacaaactcaccccaaagacaaagaaatgtaaaaataagtgacttgaatagatatagcctaagatacagagataaatacgaataaatgttcatatataaaatatatatgtgaccccatgccttgtatatataaaacagaccactctctaaatacacatgtcgtgaatacaccattttacacacacacacacataaaaattgaacctcttccttttacaatagacacagccatagttagacatgtgaacacttttcaaactcatatatacacataaaacatggccacatttccacaaatatgtacaagtgcacacttactcatataaacacacattcatacacatagacaggtgcatacagagtactcacacacaaacagaagtcaaacagaaacagctatgaagatgcacgt

SEQ ID NO: 51692 - DNA, 1547 bp, Bovine  19866880556857
  misc_feature (1)..(1): n is a, c, g, or t
naacactgagggaaaaggtgtggagcagaacgggcatttcaggccttaaaggtttggggctgatccagagtcacattttcaagtaatatgatttggttcttttgtggccttgaactgacctcacattgtcacccctgccgtatcaccataggctatcccaagtactcagtaaatattcttgggttaatttcaggcaactcttaatcagttgtcttaataagaatgaagtggacaatgaacattttttattattaaaaattatattaaattatgattaaaaatgttttttctctgtgctgtgcagcttgcaggatattagttgtgggttgaacccgggcccatggcagtgaaaacactgagtcctaaccactgggctgccaggaaactccgcccaaatttttaaatttggtttgcccaaggagttacatcttagcaattatgatttatataagcaatcccatttgaaagagtttgcaatgctgatttgggaatgactgggatagggcagccaagatgtgtgtggacaggaaaggaaaagtcatgttaggttttttaatttctctaaagatagttggcatgccaacgtttaatagttgactctttgtactcacattcttttttttaaattaatttctttttaattggaggataattgttttataatattctgttggtttctgccatatatcaacatgaatcagccataaatatacatatgtcccgttcctcttgaacttcccctcccatctcccatcccaagtacccacattctggactacatgatttatggaaatttctttaatgttcctagctttatttgtcatagtcatcatcagatgtagatatatctcagggttgtttctctcttcttttatataaactggtttatgccttattctggtagagtattaaactgtctataaagctccctaaattaatcacccagtagtttaaacatagtaaacatgtgaattgtctcagttaattggcccaagaaattgtgttcatccacaccaccatatttcttttctctcctcacactttccctgtcactctaagctaatatcagaagcaagaaacatttgttcttgaaaaatgctgaattcatatccagaattagagcaagatcttaaagaggaatttaagagggacttccctggcagtccagtggctaagactccgttctcctaacgccagggcctgggttccatccctggtcagggaactagatcccacatgccgagtttacatgccacaactaaagatctcacatgctgcaactgaaaaagcctgcagaccacaactaagatccagcagagccaaataaatacatattttttttttaaaaataggaatttaagaaatatctcactgacttggaggattaacagatgacttatggatcaatgacttctgaggtgaccaccttgtgttcagggagcagaaggaaaatccagagacaggagaccctcttcctacaggtggagtccagtcccatcagggagacgggatggcactcatgacacagaggccaaggcaaagaaaga

SEQ ID NO: 51693 - DNA, 1087 bp, Bovine  19866880667135
  misc_feature (1)..(1): n is a, c, g, or t
naaatgcttgtgaaatttatttacaaaaaattcaggccccagcataggggaggtgcccaatcccatctccctattgcctcttccaccctaatcttttttatttttttccttaacaacaacaaaaaaaaggaggtaacaaatgcatagactatagctataaattcattgaagtggggcgcggctaggaaaaagattaggaaacctcgatgcaccagttaagaaatttctaaagagggttctacaccttcaaggggagaacagctaggctcgggtggggcctgggcgtagacggaggtaggacacgagtttgcacacctaacaccaggtcaaaggaacagaaatttcacagcaaggcggggtcacatttagctgccccctaccaatggagctaggtggggtagggatggggagcccaggaagtctcccctcgcagacccggtgtcctagcagatcttgtcacttgggcaagggaaggcttttagttcaaggattgttcagttcaggcgcccactactctcgcccctcccccacccaattcgagcagcaagacatggtcgcgaggtgtgttttcttttaaataaagagtcttggcctcggcgccaacggtgtccactcgccgtgggtcagacactttccttcatcccccattccaggccctgtccctgtcccacatggagtcagaccaaggtgaaggaggttgtccagaaagacgtgcgggaaacggcagtgggggccagccctggccacagtccagttttccacccgcggaaagtaggcgagttagaaaataaaaaataaaaataaaataaaataattttcccctttcccccctcccctcaaaagggcccagtctgcggttacagcagaggatttcccgagaaatactgcagccggtctctgcttagttttttttctttcatccttctgttctgaaaccaaattttcacttgtcggtccgtcaggttcagcatccgagacagctgcagccgcttctctttgttgatatacacgttgaagaaaaactctcgctccagttcccggatctggaatttcgaataagggcagcgcttcttgcgggtgcgggggg

SEQ ID NO: 51694 - DNA, 3280 bp, Bovine  19866880713468
  misc_feature (1)..(1): n is a, c, g, or t
nccttgggaggatctagggtgacgaggtcccatccccccatccttccttactcgcattaatgatcacatttctgaaagagcctggaggggagattcccaaactcctggttgcagagtttcaggttgagaatgaacagataaataatgacttgccaaattaattaattattttattagcctgagtaattattaatcaggtcattaatcacccagctgtgcactatgaatagtaattgtgtggtggagggtaggggcgcaagcagcagtgaagcaggttatggctttaagggctgatgatgtctggaccttctcctggtccttggaagatttggggaggtttataggccccatcattccccacccccctggcccccactcatgcttacagattaggagttgaacgggatctacctggactccttttttggcaagggcaggtgccaacttcatccttctcttcctgatttccagagttcagatggatgcaggacatggcagccaggacgtgcacacagagatgaaaggaagatgaagagaacttacacttatgagggtgtgtgagtgtgagtgcgtgtgagtgtgagtgcctgtgagtgcgtgtggacagggtgaaaatgtggagagaccagtagggagatggagagacagagagacagagacaagtcctgaatgtgctgggggtccctgcagtgtcagtctgctgggtcagctgatacagaagagtgatgctgggattgactctgagttttggaatgatgctttggaatggggtggatgctgcgggagaggaggggaaatagaggaggaagagaccagaggagggagaaagggaaggtgagacagtaaggagaatggggcaggaaggaggggaggatgcaaagggctggctctttgaatttggagccctgctgactccagtatttcatatttttttcttgctgaggtatctgaggattccttctgtgccgtctgttccataccacccacccttctcaggtgcttctctctcctgaggtttggagtgggcctcagcttctggatcttccccctcggctatttcctgggattctgcccactgccctgtggggctggagggaggggagatgcgaggatcaacagaaaaggcaaagtggggtagacgacccttgcccttgacaccagcaagccattctgtaagtttcacttccgtctttcttgctccatcaactcacatccgtggtggcgccccatcagttagcagtcagctctcatccctcgtgctgtccctttcccaggcctccttctcccggggccaggtgttcccagggccccttcccttcatggcttacttgggaaggggtcagtgctcatgtttttaactgccccaggtccctctggcatagtctatttcactttctgtttatggtggatttcactctttatttactgtagtcctgctttgtttatgacctgcttagggtcagtttcagctctgtggctccagtttctcccccatgccctgtgtttattcctgctcttgacatcctctttgcaggcccttcctcaagactctactctgaaacgggtggggagggggccctcacaggctcagctccacctgtctggggcccaggctgctctgaggatatggaacccacactcccgaggccccggcctgtgggcatccctgctcagtatatcctcccagcagggctctgggggtgggcagggggtcaggcacaggggcagcttctgacaagacagagcctgtcatgagataaacacaaacacggggcctggaacccagcctcttgtttggaattcttgacagttgggttggtggtgggatagggagggggtagttggtgggaaaggaattgaaagaggggagagcagacctcctggagtgtctggagactcagaaaaagggtactgtgggccccacagcccttgacattgctcgaggactccttgctgatgactttgaaggaaaggtctagcgtccagagtccctggaggttgagttcccttcttaggaaattgcccagtggtgggcatgggccaatgagctagaggaggggggatccataaatgttcagtgcctgggggccaggaagggtaatgctatgctaccttagctgtgattgcaagttcttcctctggcccgacttctgtaagggactgggggagtggacaggaggaagggagagcggagaaggccgggctcctgggtctcccctcctgatctccctgggagttgttcatcttcagccaggttctgagagttatctggaagacactccagacttgcctgcagacagattaacctcttcccatccttggagtgtgcgagagggcgtccttctcccatccctagcatcccctttctgtgtgtctctggaggtatgtggtcccctagccctccctgtctttgtcaggtgggcacgtctctggaaaggacctgtcttacactttcccttgctcccttcccatcaactctccctgcatcactgggaagcccttctagaaagccttccttcatccctcttccattcagtttcatccgcccaaacttttccctagaatacagaggttctagtccttggctcctgctccgagccctctctgggtcctattgcccttggtgtttttctgggttccatagaggttgtccctgtacttcctgcaccgcgaacagcctctccaccttccttcctggtggctctttgctcccaaagcctctgctttctaggccccaggtaggggaggagactgcagttctgcccactgccagcagagggcaacacacccaagcccaggcagaaggtgtggaggctgaacagcctgggatggggcccaacctgctgagccctgggaggtagtagcgcagggactggcttgagagtagaattagtggaattttctaggaccactgaacggggtgggactctctagttcttgcctcatttacaaattctgtaatagctaataatatcggctaccatttggagcagatgctttatttataatatgtcaagttctgaaaataaccgtgaggtaatattattttcactttacataatggtgaactgaggctggggaaggttaaatcatgggaaatcatgtgtccaaggaattggcagagctgggacttggtcctagtggggtggcccaggcccaggagactgcttcctccccacagacatgcagtaaggagcctggaaggagcctggaaggggcccttgtggcgcccacccagccccctccttccggtgcccagcagggttcaaaggaggggttg

SEQ ID NO: 51695 - DNA, 860 bp, Bovine  19866880742592
  misc_feature (1)..(1): n is a, c, g, or t
ncagataccagcccggcctgggcagagagggtcagggaatgatgtcccggcccccagcttccaacacagagagaaagaccaggaaaagcctgaggtggtcaagcggcccctgggtgtgggggatagggcccagcagaccccaaaaatggggagcaagggcaagggactgggacgtcaaactccagggacaggcacaccaggcaggaaaataaaggagacgtgaaagaggggggagggaaccccccccaaagccatataattctcaattgctttggtctttaatttcatcgccccataaatgaggaaatatcagttcccatactaaatttttatccttggctgataaatatgacggggaattttcgttgggtcctcgtaaaagcgaacagtttcgatcaaactggtggggaaagacttatgcagataatacaaacagagttgccataaagtctccgcgtttcccgcggggtgggcggtgggacaaatggctccttggattgactgccgccccggcgggccaagtctcatctggggcctaagcaggctaaccttgcccgggccatccccctgtgccgagcccactgcgacccctgcaaatgaaaacacgaaagcatttcaaatctcccttggctggccgggtcagcaagtcacacattacaaacattttcttccagtttttcctggggttcaggaacccctgagccttctctctcgccctctggatgcaagaaatcccggatttctttccgaagtcgtcttctagaagccgccggcttgggcctccctagaagggatccagtctcctcactccacgccagggcgcccagggctcagatccctttcccggcccggctccaaac

SEQ ID NO: 51696 - DNA, 3685 bp, Bovine  19866880775622
  misc_feature (1)..(1): n is a, c, g, or t
nctggggtctcccgcactgcaggtgaattctttaccaactgagctacccggaaacccattgatttcatacttgtggtaaacagcaagaaaagggcaatgtgtggataaggattaagaagttacatggagatttttatgagacaatatcatacgacagcattgtaaaatgcaaatgaaagaaaagggaaaacagctactgagaagactttcttcataaattcacttaaggaaacacagcccacatatagaaaatggctcaaaaacacttacaaagcaatgtataaatactgcaaataaatacaacacagatcgagtcccctggtgctatgtaaacagaataaacaagaagccaatattggatgaggagaactagggagtgcttcctgcaggatggagatctaattattggcaggcctgggataagggtatgttaaatagagttacttgcaaatgaatcaagccacattcggaaaacaggcagggtgagaaaatcatcagagccccccggctcactcccatcgcggctgttttcctgcctgccacattgagcacattactcatttgctactttgaacagtctgttttcgtttcctatgctggcagacacccctgtcagacgccccactcggtttctcacagacaattatgactttcagatttcctgtggctccaggagtaagggggccaggtagccctagaccgcaaagaggcaattatctcggtaatttaggtgtcaaactactttacttgagtatcaagctcatctctccagttttctgctccccacagcctggcagctgactatcctaagaccaacatatgcagcactgagtcttggaaaatctaaaaatatccaataaaatgcagctgtatggacatcaggcaggacctttgggcccctcaaccatcttttccatctgccatgtggtttgacatacacagctatctttaagttgttgttcagtcgctaagtcgtgtccattgatggtagtacgccaggcttccctatccttcactatctcctggggtttgctcaggctcatgtccattgagtcagtgatgctatctaaccatctcatcctctgctgtccccttctccttttgcttcaatctttcccagcatcaggatcttttccaatgagctgggtgtttgcagtaggtggccaaagtactggagcttcagcttcagcatcagtccttccagtgaatattcaaggttgatctcctttaggatggactggttggatttccttgcagtccaagggactctcaagagtcttctccgagagcacaatttgaaagcatcaattcttcgatgctcgtcttctttatggtccaactcgcacatccgtatatgactactggaaaatctttaaaagcctatgttaatttcctgtagatggatgggtgaagatcagcttctggttttgtcaggtttgaaaatcaaggtagtcactgacctagaaaaggactgtgagtctgaaaggactcctcatggtgatctctaaactgaaagactgttagcctagacttttgtcaaaaagtctgctgctctagaggtaggtttgagaagagtttaaaaggaaaggatttggtaatttaaacagttgtggagagggataagaagaggaaggagtcaataaaggtgaccaggcttctggtagaggcaactggatgcccccaactgaaggggggtctacaaaagatagagcagtttagagaaagtagatgagttctacttttgagcacattaaatttgagctacctgggggacttccctggtgttccagtggctaagactgtgcttccaaggcagggggcctgggactgatccatagtgagggaactagattccacatggcgcagctaaggcctggtgcacccaaataaataaataaataaatgggtgttgccgtcgtttagttgctgagtggcgtctgactatttgtgacccccatggactgcagcgtgtcaggcttcctgatccttcactatttcttggagtttgctcaaattcatgccctttgagttggtgatgccatccaaccatctcatcctctgtcactcccttctcctgccctcaatctttcccagcatcagggtcttttctaatgagttggctcttcccattaggtggccaatttgaattttgaaaaatatgagccacttgggagtggacagtggctggatacatcagtctgttctagccttgcctactctgtgtattctgttttatttcatgctaatgtaatggtttggtaatggtttgattgtataaggcaaagattagggggaatttaaaaattagctccacgtttccacaaactggagggagtactcttcctagcagtgaggaaatggggggaagagttactctacccttaacctcctaccatatttcatgtcctcagatgatacatgatgtctaacatttctttagtatccatctgcagagaacctcagatggggtccactcacaattggggctaatatttgttgttgattaatgggctggggaaaaatatttgaaggctcttcaagagaaacctcctccctcacaacttgctaatttattgggggcagcatgtgtctttggacccagtatagaccagtttagacgaatgtagctttgctatttcagtctgctctctttttttccttttttgaaatagtcctggttgtatctattcactaggtttttaagttgtcaaactatattaaactgaagttagggtagatgatttcctaagtctgtcaccatgactgcattactactattttagtctattactttatatcataaaaatggatcgggagacaagcccagcttgtcccacccccatagcaaatgtacacgtatcaaatagtgctaagaggtcacagggagacaatctgacctgagaccagagactttggagccatctatttgtggtagagaccccttatgctcccacatatgaagcagtagagtaactcttccccccatttcctcactgctaggaagagtactccctccagtttgtggaaatgtggagctaatttttaaattccccctaatctttgccttatacaatcaaaccattaccaaacctctcacgttcttccacctttttctctctcaggttctgctcttctcttctgatttcttggctctagacatcagagcctgaagtagaagtttctgtgataacattttattgaggagtacgattccaggaaagcaagagtgaaggatggggaaagcaaagcagaaagaaggagcaaatcaaaaggattgtgttgggacttccagggtggcccagtggcttgggactctgtattcccaatgcagagggcgcgggttcaatctctggtcagggaactagatcccacatgctgcaactaaagatccggcgtgccacaactggggcctgatacagccaatcaatacatttaaaaagtaaacgttaaataaaaggattgcgttatatagcttaccacggcttctggaaaagttgtagcttcacatgggaaagttgtcttcaaatgagccatgtgaagcaactgtatccccagtctatctaggggaaagaaggaaaacatttaactgtagctcacattattaaatttctgtcccttgaggtgtttactatctcatgtatgtgagtgtgtgtgtgtgtgtgtgcgcgcgcgcgctgtgcacaag

SEQ ID NO: 51697 - DNA, 1048 bp, Bovine  19866880791998
  misc_feature (1)..(1): n is a, c, g, or t
naaatgctcctctaagtttcgatcaagttaatattgcccgcgatggtggcgcttttaaaaatttcacagaccgaaggagataacggagaggggggttcacccggcttttccaaagagcccttttccctccctccccaccccttctccatcgtaaaaagtcgagtcgttgggagagagggctttgtaggttataataaaatcctttgaatgcttataaaactccacataaaattggactgacccaaaacacgaggccgtccccgctcccctcgcctcccccctaccctcgctcgccctccctccctagctccctccctcctgcccgcctgcttcccggccgctgctacctactgggggcggctcccttggccggctccttggccgccgagtgggctgaaccggacgagctgggattcgtgttctcctcttcggcctcggcctcggcccccgcctcagcccgggacgccagtcccgaggctgggggcgcctcaggctcccctttggcctcacccttgcccgggcaggggggctcggcgggcgggtcgccgccgccgcagtaggcgttgtcgaagaagcggtcaaaggcttggggcaggacactgttcttgttgactgaggagtagaagccggcgggggcggcgtgcggggcgctggggtggtggtggccgccgtaggagccttcgtttttcatgaggatctcggtgacggtggaaggaggcaggcactcccggtgcatgagctcgtcggccgccgcatagcaggaggagtagctgttccgggggtgccacttgccggagggctccaggccgtaggagacctctcggaccgggggcacttgggccgggtagggataggagatctgacgagagggggcctggggcaggaaggaggagaccgtggagaactcaggcacgtagtaagtgcaactgggcagatagaggttggaagcgcagctccctcgctcgccgaaatcggcgcccctctccttgcgcgacggcgagcagaagttgcccaggttgccgagttaaacatcgttctcttctgccgg

SEQ ID NO: 51698 - DNA, 1060 bp, Bovine  19866880808982
  misc_feature (1)..(1): n is a, c, g, or t
nttggagaaaagtttaggtgtttctagttgttattttgtccagaggcacaggtttagccccataaagatccctatccagccagggtggatgcctgtctgaattttggcaatggcaacaatgggaggaggcggagcagcacgtgggccctgtcatgagagggcacagggcagagtgcagcagctcggcatccccaagggggtgacactcggtggactggaaacttctcctgtttggaaagcttcaagactctgcattcccagcgacttctctctccacaattttcttgcaaccaatgacaaagtaccaagtctttcctcttggtaaggagtttcatgaaatctaaaaggaaagaaagaaggaacctcaggacaggacacttctcccccaaattagggagagggacagaagggaagcacctaattcaaagcaagcctgtttaccagctgccagcccagacacacccccaacaaaatgccatggagaacgatgtcgtgactcatggcttggcaagtaccgggatcatgccccgggctcccagataccacactggctcctccaggtcgctctggctggatctcctcctcctccttttccccagaagcattcctcatcttgccctctcttcccagcccctcctctcctcaaatcattctctgcagtgagaggtggggggtggacaagcagaggtagaactgggattcgagttagggttaatttcaggatcaggattaaggatgggattaggaatggagttaggggcttccttggtggctcagacggtgaaagaatctgcctgcaatgcaggacacctgggttcgatccctcagtcgggaagatcccctgggagaaagggaatggctacccactccagtattcttgcttggagaatcccatagacagaggaacctggtgggctacaggccatggggttgcaaagagtcagacatgactcagtgagtaacactagggatggagctactttgagactgggtttagtcagcggacttttgtcggtagagacaacaaaactctactaacttatatgcattaatgtcttgg

SEQ ID NO: 51699 - DNA, 1210 bp, Bovine  19866880855591
  misc_feature (1)..(1): n is a, c, g, or t
ncacacagggggtcagttcccaggtgagcaaccccagagctggtgtcctttccacaggtgaagatgaaatccgggtaacaggaggggcaacaggggactctagggggacttccggataaggatgtggggtgctgggaggccttctgggcccctcctcttcccaagggtgcaggcctctcaccttccaacacttcagtcccagtctccccagggcctagggatttctgcagtgaattcccaagcactatacctgctgacatggccctatgaaagccgttcctcccctggccccaccaggactggacccctgtctcctggtctcctgggtggagggtgctgccctcccacaaagcctcaggtttccacttctgctttgggagcgatttctccgggaggtggaatatagtgctctggccagagtttcagagccctaggccaggttctggttacccctaatccccaccccgcccccaccctccccaggctttggatgcctcttccttccatggctccagcccttctcttctctccatgctctatccccctggacaccccacagtctccctctcccacagctccctgagagctggtccccccactggtttttccaccctcacactgcctctccagtacctggtctccccttccctccaccgtgagccctagttctcttcgtcctcttgcccaagtccctttaactcctggttgctgcctacggtcaccttttccctccctcctggcgtcttgtctcccttgctctccagatgctccttccttccacgacccccagacactacccgtcccctaatgaacctgttgtctctctcccctgccctccaggatccccagcatcccaccctttgtcccattcttgggatgaaccagaacaaacagtaggaaggctaccctctgccccacacctccccttcggggggggggttcccacccccaaccccacttttctttaagtttccaaatcaaccttcctccaataataatgataaagcaggaagctgggccggaggacagtgcagatttttcttcttgacacggagtttccgattaaaggcaaagggacataaatcctcctgcgtaattgctgtgctccagcttggagccactcagagggggaggtgcccacccctctgcccctgcccctgggagccccacccccatcctgagcagggctcattgcccccagagcctgggg

SEQ ID NO: 51700 - DNA, 745 bp, Bovine  19866881064432
  misc_feature (1)..(1): n is a, c, g, or t
ngtggaggagatcctctgctggcggagggagaaaatgtcagagccgcgaaactagttaactattcccgcgcagaaaagacagtgaaaatgagggaagaaggttcaggtgaggagtggagagatggtctcccagatgttcccgcctgggacccctccccatcccttccccatttcctgagtggcaatcgggctgggatcttgtggtgggagggggctcaagggagctacagaagacttggaggaggtaagggcgctgctgaccccggaccgtttgtgtgagcctgaaaacctgactgggccccctcatccaagtttcctctcaccccctgctcctccagactgcagagccctggaagacagcacagggggagggaccttccaatcttcttgagtcgcataagggggcctgggagacagggggctctgacccctggctaagctggcgaagcagaagaaagaggagtctgagcccactaccaccacccatcaatcttgtctgaacccgacaatatcttgtcccaagcccaagatgccccaaaaggacgacctagagagagctaagaggtcgggctggggtgcagaccttccccacccgccgcttctcatttcccctctctgggccagcccagctcctgctcacctcccttcgggacccaaggccctgccttatttgcatacgcagcagaaccgctttgtgcaaactaggcagtgaccttgaactgggccgccttggcctctcgactga

SEQ ID NO: 51701 - DNA, 749 bp, Bovine  19866881069214
  misc_feature (1)..(1): n is a, c, g, or t
ntgagtttcgttgtttaaccctaaaatgggaataataaggacctctttattgggtgactaggaagattcaattagacttggatatggaagttgtctcacattcaaatattagcttctcttcccttaacagtgattcttatttctatgagaatattacttcagaagcataaagaaagtcatctaaaaattactcaacataaaaatagccacttaacagctttatgagaacatatctggtgtgtagagctatgttaatctatgtaatccttttttacagtagctggttaaccttcctaattctgctttgtcctaaatgacatgaaaaagagtttggtattagtattccctgccttctcattggttagggatgggaggagatagccaagaggcagaccagggagaccatcagaaattgatcaaaaaaaaagaccatgggtaaactccaaaatggataacccccacagaaaaaaaactgagaccgtgacagtggctaaaatgaaccaagtgctgctacatgtgaggctttgtgctaaggctttaccttaatttaatgcgcataacaaacatttgagttaagaactattattgggcccattctacagatgaataaatcaaggcttagagaagtttagtaactaattcattcaaacagatgaaagtgacaaaggattcaaaccctaagtctctgccttcaaagctcagattacttcttctagagaaacatagatgaatcccaggcttgaaacatg

SEQ ID NO: 51702 - DNA, 1439 bp, Bovine  19866881123275
  misc_feature (1)..(1): n is a, c, g, or t
nagtagtattaattcagtctctcaattgcactatgaggagtggggaatggatttaaaaaatgcagacacggctctgttgtcaaggatgcacagactaaaacacatcaatgagggtgaaacataagaaagatgaagaccatcagtgccatacagtcatccaaagaagggcatcaggcaagggaaggctctgggcgtgcttggcttgagaaatgggaagaggtggctaatcattcatgttttgagaaactctcctcttattggcccaggagagcttctcaggtatagggaagaaagcacagactgctggaagaatgaggaaaagaccatctaatagtctgagggaaatcaaggccagacccaaaatgtgaaaaaactgccccaaaattatgaacgaggaaggccaaggtaagtggtggtgaaataggaaaaataggcctaatgtgtatggctgagtccttttgctgttcacctgaagttatcacatggcttgttacttggctatactccaatacaaaataaaaagctttttgtaaaaaagaaaagaataaaatagtcctgattcaaaagtgttagttgctcagttgtgtcagactttttgagatcccatggactgtagcccatgaggctcctctgtccatgggattctccaggcaggaatactggagtgggtagccattcccttctctagggaatattcccgacccagggatcaaacccaggtctcttgcattgtaggcagattctttaccatttgagccaccaggaaagccaatgaaagggtctcatgaattcttctgaaagttgtaggtgtgctgtaggtgaacactaggagagattgatgaaggatgtgaactaattaatcaactggaaaactggatgaccagactctagatgatccataatggaatctatactcccaagttgtgtgacatctccccacttaccccacctctgcccaagtggccatttcctctaagaataatctcctccttttcagcatcatgtttgtctcctccaagaagccttccatagctaatggaatggaaatgcccttctccatccacagcaatttggatcttggctgctctacgtactactcattcattcctgaccttttgtcattcactgtctacctctggagactgcagtctgtctcatcttttttagaagggtactcagaagagaaagcatcttatcctcctttgttcattttgcttcccaaaattgttcatggcaggaaagcacagaccacccaaggaagacagccatcagatggctccattccctgcatcacagactctgtgacgggctcttctctcacactggagttatggagcaggagttatagctctccctgtaaaaagtcattataattatgaaaaatgtctacagctccttccaccgtttaggcaaagcctcggctgtcccaatagcagaga

SEQ ID NO: 51703 - DNA, 975 bp, Bovine  19866881265497
  misc_feature (1)..(1): n is a, c, g, or t
ncggaggcagccgcaccgcaggggctgataatcccacactcgcctcagcctcaaaaacgaatttctcctcaccgcctggggagggtcggaaggcctgtttcttttcatcctttcattgcgatgagttgagtcctcccaaccgcttctagaaaagtccgtccagatgtctaaccacagtcacacgtgctactgtttcagacatttttccctgtgatttggtaagaacactattcccgaagtgccggtggttgggttttgagggtgtggaagcgggatgaaggattgccgggcacggctagccactgagcaccccctcgcctcccccacaccaccccccgccaggcaagacctagaagggagtctggctggggactgtcatctcccggctgttgccctgttttcttgcctgctcttcccacaacggccacaaggggtcttccttgcgctaagaatgggaaatccttgcgccaggtcagaacgctgggaagctccggcgcctggcgcagtgtcctctctgcggtccccgagcattcagacccgcaggcgtccggctagccccgccctaccttcgtggcttcacccggttgtagatgaccttcagctctcttgactcgagctccggactggagatcggcactctaagatctcctgctccttcctccaagcttaggaagcagcagaaggctaggagtgagtcgaggggaggaactcaggccggacacatagtaggcgctcaataaatatttttgagatgaatgaaagaacgtggcggtgtcctgttcagaagctgggggaggggacctcaaaaaaccgaagggcaccatagaggcagcgcactcaacgccctactgaggaaactgagcccgtctgtggaccctggcgagtgggacttggacatcagcacagcccgggaggtccagtacagagaggggatataggaaggggagaggacaaccaatcagaaaacacttttgg

SEQ ID NO: 51704 - DNA, 831 bp, Bovine  19866881324613
  misc_feature (1)..(1): n is a, c, g, or t
nccaaagagggaagctaagatataggggggcctgtcccccaaggccagcagttccctggggagaggagaaaggcttttcccatcccagcatcaccctgagaattcgcctcagcagggttgaattccaagagcggagatggggcgctggagagggtaatgaggggcttggggactctcagggtcaggaaatagaactgctgaaatttcaggacttggtcgtgggctgggaggatgggagggggcagaggaggagggaagtggggaggagagagacctcgctataaaaataaaaaacaagagagagaagcgtttatgggcctatgaaacggttgggaatttggactttttatgaggatattctcgagttactactcttgaagctgaggaggaccagactgtagaggctttgatagcttcgatttcctatagttttaggtgctggaaactgaggaggggaaagatagggaggggggagaccgcaaaagcagtaaggggggtggaattcctaaagcaaaacgtgtccaaattcaggttcaattattgggtttggggagcctggctgagcctgaggatggggtggcaggggtcctgggctggaaaggggctccactgacccctgcctgtgtttggccctccaggcaaccccgtggccaactggattcacgcccgttccacgaggaagaagcgctgcccgtacaccaagtaccagacgctggaactggagaaggagtttctcttcaatatgtatttaaccagggaccgtcggtacgaggtggcccgggttctcaacctcaccgagcggcaggtcaaaatcggtttcagaatcggagg

SEQ ID NO: 51705 - DNA, 1094 bp, Bovine  19866881374603
  misc_feature (1)..(1): n is a, c, g, or t
ncgtttatgattcgttttttattttggatttcttccccaccaaaagactaccacaatgcctatcatgtaagagactcataaatattggagggggtgggggaatgagttaacagctggtggtaggttggatgggaatttttattttcatctcagagaagacagttaaatgacttgcttaagagaacttagagatgaaaccgggactagaattagagtcagttgacacataagcctgtagctcttgccttctgatcaggctttgaaattctagaacattgaaaataaggccttgtcactcttcggtgtatccctggccttgctgtcttcaggatgggtccctaaagattaaaggtaggctcaaccttaagacctgagagagatgccagacttggagcaggcagtctgctaatgttggcactgtatggggagatgcaaaggagggccccggagacaatgagttctccacagcgcccttctcagcctttgtttgagtctagctggcccgggtagccacccggacagatcagttaaagagttctgagagcagtctagggaaggatttcctaagtttagccctgacttcttaaatttttatattatattggagcatagttaggatttttttttctctctctttcccacttttccagggctagggtcagagaacaggttgatggatcaagctgttgtgtcaaccttgtgatcccatctgggggaagaggttactcttgacctgcatatggggttgagagggaggagaaccatgatccctgccctgtgggaggcccagatgtgatggaaacgtgcccagagcctggcaagctctcagaagcaagcagagtgcaaaacgggcagctgggccttgagtcaactcagggtgtagaagtggagaggagtctgtcaggaaaggctctttggtagaacgtagttttgttttcacttatttatattggctgcgccgcgtggcttgcaagatctcagttccctaatcagggattgaacccgttccacagcaggaatcctaaccactaggccaccacggaactcccagaaggtagttttaaacagcattaaaaaagatgagatggacacag

SEQ ID NO: 51706 - DNA, 1375 bp, Bovine  19866881516841
  misc_feature (1)..(1): n is a, c, g, or t
ngtacttgctgtgcatgttttactctgttctcatgacatcttgtgagaaatagtctattattcaattcagatttagaaagtgaagttcaaagggttatgtaacttgcccaaggtccaaaagctagaatgatcaaatctaggatttgaacccaggctgaagcccacttcaccatactctttctaatgcttgacagagactgactataatgccggtgtttcccagagagatgtgggtctggaaggatgctcagcattaggccatccaaccgactgctgcttatgcaaatcctgccctcctccctggactccttccctcacctgagaacttccgtgggcagggcctctctggctgaggttggcttctctctccccacccccaccccttcacaagaagaagacatcaaagatcgcagcagggccataaagagagggagggtgttagaagggagccaccctggactcataaactgggcgggggtgggggtggagacccacccatttgtcagggacactgcatctcactttccccaaaaactgagatgtcagcttttgcttgagggcagggcacttaagtgcagatggctgcagcgagaggcggggtgggaataggggtgatgattggagtcattctgacatggaaacggtgccacctctccaccccgaccttgtgaggccaagacacttgggggggtgtcatttgagacctgagttgcagtttcagttccactgccccgtggctgtgaggaacttcttcctgtctcctcagtctctttaccttgttctggggttgatcttccctggcaccctcctttaccttgctgagaagttcactggagaccacacagtggaggcaacctacagagcacagctgagttccctgggccacaaccaggctgcacatgttgaaggacagctagagaccccaagagtatcagtggtctcatagtcaccatctccttctaccatcacagtcaaccagaacctccaaactcttgttgggtggtgtctgaaactgcaagtcatgcaaattcagtaaaaaaaaaaaaaatgcctgtgttcttagagctaagtgcagtctcctccgttagcctaggagcatctcaaggacagaaatcaagtcttgttcccagataattcttccactaaatagagagctctgcacacaacgggggctcttgaaatgcagtcagcaacatccacatggatcaagaagtccatgttctcctaggcaaactggagaatcacaattaaaattctcccttcctcccaatcacattcaccatagaactgcttttttttttctgaatcaccgtaattatcaacaagcttttattaaatatggggctgtgcttgttgcttgacatgacagatatca

SEQ ID NO: 51707 - DNA, 868 bp, Bovine  19866881569561
  misc_feature (1)..(1): n is a, c, g, or t
nttcctgaggtttatttgtgccgattctctccctctctgtctttgactctctctgcctatgtatatgtatctctatccctagtctcttgtatagtctctctctccgggtacatctgtctccctgtctccgcttttttctctggaatgagtgaaataagagtatcctgaccttctgactggctcttcactcaggtgtctctatctcagtagatctatgcgtttctgtgtttctaaacaaaaattaggcagggaggggaaccatgctggtggtattatcttattgcttaagaattctaggagggaattccctgatggtccagtggttatgactcagtgctttcactgttgtggtcccagattcagcccctggtcagggaactaagatcccacaaactgcacggccttgccaaaatttttttaaaacgtctaggaacgtcaccatccctttgacaaccttcctgccgccccacccatcaccccttgctgccaagcaccaccaggttgccattagagcagcctctccacactccaggtcagctgtcaggacagtgatgagtgaagtgactgacaggcaagcagagatccccagggccccgacccatgattccatcttcctggacgggctacataactgtttctgtccctgtaagcccattcacccctgggaacccaaagatagggagtcccgacatggggatatggggagaaactaagtcctgggcaacctgcagtccctgtagctgatcctagaggcacctgaaggccttctctgtctctggtccacgctactcctccccacctggtgagtccctctcaggaaagatggatgtgaggagctctcccaaaggggggtatagaaacagagatc

SEQ ID NO: 51708 - DNA, 861 bp, Bovine  19866881570598
  misc_feature (1)..(1): n is a, c, g, or t
nacgaatctctggggctttctactctgggaaaccaacgtataaacatcagggtggccagccccagtctagggtcttgttgtgtctggacgaactggccatttgtgcttgaggggaaggggcccagccccaccttcccaccctcggggaccagcgcagagaggaaaggtgggggctggctttcccccttctcccctccctccctcgaaactgtatataaaaattccaatacagtcttctcatggttgagggggagaaaaaaaggaaaaccgaaaaccctaccctcgaccctacacatttaactgcgacagacggagacatctggcaggagggcggtggagccaagaaaattcctataaatttaaattcgatgatggttacaattaactccacaacaaatgtgtgcttaaacggaaagcggaaagcattgctgggcatttggacgaggcttgagcagcacgtgagaaaggacagctttgagactcactgtggaaagtcctcagcctgaaagctggaggaagctaccgccacactcctgcccctgcccgtggaaaggagggagcaggcccgctagctctggcctacttcaccttcacatgctctgcccgcctgcctcctcctccgcccggacagcaccgagggttttaagaggagaggggctaataaaaggatcaaataaaatcataatattgaacagaatgaagtatctttatttgccacaaaaaaaaaaaaaaaaagtcacagcaatccctctgggacagggagcgagccggatggggattgcacatgtacacacactcacgcacatggagatgggtgattccaatctcattccaggccagtcctacccacaccccctcagg

SEQ ID NO: 51709 - DNA, 1088 bp, Bovine  19866881761031
  misc_feature (1)..(1): n is a, c, g, or t
naatctccactttgagcccttcttttggggctgagttgctgaccctttagttgtcaaaatgtagatatttcatctgtgaatactgggcaaaactgaatcgccagtgtctctgggctgcagggtggcagcactgctcagctccagggaccaacccactcactgcactcctggagcacaactctaggtggtgccattcacatagagtttgatgtgcatggcacctgtgcccccacccacccacaagattgtgtgatggtgggccaccatcatgccctttctgggtcaggacttccctggtggctcagatggtaaagaatctgcctgcattgcaggagacctgggttcagtccctgggtccagaagatcccctggaaaagggaatggctacccacatgggtatacttgcctggagaattccatggacataggagcctgctgggctacagtccatggggtcgcaaatagttggacactgaggacttttctatttaccaacccaagcaagtcaagctgagaaccagtaatatttgtgaggctttgcctggggacagaaaagtggacaaaatgatcttcaaagtcatgtactcatgagacatgggcgccaggaaaccagagtgtctcccagaacaacaggcccatggagcaggatgcagtcttaaattgggtagcagggaaaagaaatgcagattccatccatcaaggaaggaatttctatcttcaattcagatagaaaacaattacctagttgcacttagtaggtctgtagttactgtgaggtgaatcagaatcagtgttgacattcctgtctctaggtttggagttcatgaaagcagaaagacccagccaccatggtgacatttgtgtatgggaatttgctgaaatctgaaatgagattctgacccagatgggggtcaggaatttgtttccttccctttttctccttcttagggaaagcttagtttgctatttaggatgaaaaataaccaccagatgaacaaaacaacgatcatcagaaatgataaataacacactccagatgtgtccagaaagaaacgcaactgaaagcaccactgcctccaagtagtcac

SEQ ID NO: 51710 - DNA, 1242 bp, Bovine  19866880410853
  misc_feature (1)..(1): n is a, c, g, or t
ncttttaagatgcttttccctggaatttctaactgatttggtctacctccgctatctcaaactgagtttaatcaccaggaaagttctattgattgtcaatgatgtttgcttgattaattcagttctagctgtgttgcctttttacctatgtctttcagcatgtcctagaaaattaaatgtttcctttgggattttcagtgaatttgaactgaaaagaaggttattttcctctttttttttttttttttttagtagcgaagaatattctcattagttttcttgaatctaattttgaccccagtgtatatatttaaatgaactacactttttgaagacatgttttaactccacggtgttttttaggatttagtctattctctgtctgatacttgaaagtgttaactacctgaatcttttcagaagacattgaggcttagatttaagaaaaatttgaaaactatttgtgctacccttgttttaatgatcttcaataattttctaacttgatcttttatcaggaatttgtaagtgggttttaaagatataaatacataaatgatatgactgtttttgaagcatgcatgtttagtcactcagtgtgtccgactctttgcgacccccatggactgtagactaccaggctcctttgtccatgggattttccaggcaagaatactagagtgggttgccgtttccttctccaaagcatcttcctgactcagggctctaacccacatctcctgtgtcttctgcattggaggcgaattctttacttgctgagccatgggggaagcccatttttgaagagtatatatcaattgatttctttcagtcttgcaataaattatcgttgatttttttgttgttgttgccccaaagtctttccaattgagtttacagatgttgtcttttgcaatttgctaaccagtaataaggatttctgatgacatcagttttgggagaagaaagtatgacattttgagaccaggtaacagtagacttaaaacaaaattattttaaaaagtatttatacatgcaataatgctattttgttttgggcaaaaaaaatgattgactgtaataaagataaatttttagtcttaagaaaaatttataaatgtggctctttcacactgactgctcccttctgtatgaaagaggtcatcatgtgccgagaaaaaaacagatgagtgttgagttttttggaaccttatctcgaggctgctaccacttgtctgtgag

SEQ ID NO: 51711 - DNA, 1818 bp, Bovine  19866880510611
  misc_feature (1)..(1): n is a, c, g, or t
nccctctctccttggggatccctagactccttatcacctgcctaggaaatgactctctcataactctctctctcatatattgcaaatacttttccatttaccttatcttttcattgggtctatgatgattttcaaatgtgcttaagcttttattttttatgtcatcaaatctactcatcttttcatttatgatcattgtcttttgcttagaaaaatccttcccaggccaacgttacagaagatcttaatttttaaaaatgattttgtaggtgtcatcattttaagcaggatacataaaagaagaaagaacaaaagcagcctaaaaaccagtacaagttctcttaatataggtaagggcatatgtgacaattgtgtcaatggctgtggccgctattaggtggttacattgaaagtcaaggaagaggaggaggtaaagcaagaaaggttctttctaaacatcaggtaaaacatttgttctaaagaccttggtgatgaaccatccttctcttcaacttgttgagagggactgggctgtgttttggaggccactccaagtgtaatcttgccagagacaggagggcagagctgcccagcttccctttctttctctagagaagtagaacacacatccagtaaacaacctccatcaagctttaccaaacaattctcttttcaactacaaaatctggatactagagatgtgttccaatgactgttctgaaagccaaaagatgaactgctgtgaaaccctgaacaactgtcagataaaggaatgctgctataattaatgcactgagcaaagcttaggtatcatttttaatttcaaaaagtcaaagaagttgtattaattgtgtagcagatgcagctttcacatctgtgagtactcaaaattagagacaatataaactttaagattccgaccctgatgattgcttttcaacatcagaaagtataacttgtgacaataatgtgattttaatttttatcttcgtgatataatattttaaaatttagtctggaatatttgaaaattcaattctctatatgtgtatatacatacacacacacacacatacacacataagtaataattaatatggagacactggtgagtttgaagctagtactttccctgagtaattgtatctggtcttttgacaggttcttatcttgcccttgtagctaacctattacaagctaccgccactaatagggaacaaagatagatttagacaagggattgtgttgtatcaggacaaagcacacagcaaacataacagacttaagagcaacatgaaaagaaaatagcaatcccaaagctccattaagaacttagaacaccagatcaagatccaaaactgatggcttcggtgggtgtgatatggctgccaggaaatgaccttgcatgccctgctggagaaattaatcccaaaggtaccataggaagaagatgacccaattactgagaagaaagtcaggtttataaaagaccatgatgagaagaacagaccacaaagactcaaatatcagagcaatcaagattgtcagattttgattgtgagagtcaaagccagaaactactcataagtgaaaaggaaaaaatgtcctgttgaaaaatcagtgtcctgatgttgctgggagcaagaccaactcttcaggttttaaatggagtaggaatgtccaggttcataatgttatcaccccattgctagttggaattgatataaaacagagaaagcaggtaaagatgacctagaaaagaaatgtgcagaataacattctgatggcaagaaagttgattttgcttgaacttttaat

SEQ ID NO: 51712 - DNA, 1119 bp, Bovine  19866880861694
  misc_feature (1)..(1): n is a, c, g, or t
ncagagctcttaactcctttctctgtgtcagtttctgttatgtcacttcttgaattttaattggagttatgtctgtcttcaaccccctacacagtaaatcccaacaggatagaaattatgcctcaatcaactttgaacctccaggattcatacataacaatttgtggaataaaaaaaaaaaaagagcattggttacacatcccactttcagaaggtatttaggaggaaggtatatcatttattcgagaggaagccatctaacgcagtcacaacaaaatcacagcactgaatagaaactaaggcatggaaatggtgatacacaaaattatagagcatgtgaaaaatacaaaaggtaagagtggtgggggaaaagagtccaagagaagattgcatgcttgaagcaagaaacttctctgaaaggctaaaacacaaagcaaacaatgttgcagctaataagaagtcctggatccacactttgtctttgcacgggaacatctctgcatgattagcagttaagccatttttcagtattaccagcattgagataacacaattcagatcaacatttaacaatcgttagaaaacgttgtttagaaagtcaaaccaaaatcccttacatttcagcttaagcacatttctcctttcctttcatgagaggtgagcagctggctgccatgctaagcagatctctttatatactccaagaccctccaaatatgtactgcttattccagtctctaaaatatgcagctctcttcacacccttccttatgcatcctgttgggaatgtttctttatgtaattcatccttttaaatcatccattttttctttcatgctacattccataacttcacctctccctaagcccttctgttaatgtctctagttcaatttactacattaattccttcccctctcaaattggcattctgctttctacatcttaacagaaggacttattttagtttatttaccttacatttctctcctccttttgaagtggccaatgataaaattaaaacagtcccaatcagaatcatgaaaccaatcttaaaacagtctccatatgtcttgggaggatttgccttcctggagatgtgttgatgaatttttagca

SEQ ID NO: 51713 - DNA, 1188 bp, Bovine  19866880930910
  misc_feature (1)..(1): n is a, c, g, or t
ncccaggactgatctcgtttaggatggactggttggatctcctcgcagtccaagtgactctcaagagtcttctccaacaccacagttcaaaagcatgatttctttggtactcagctttctttatagtccaactctcatatccatacatgaccactggaaaaaccatagctttaactagatggacctttgttgacacagtaatgtctctgcttttcagtatgctgtctaggttggtcataactttccttacaaggagtaagcatcttttaatttcatggctgcagtcaccatctgacatatggacccattcaaattcacatgcacatatatacatacacaaatgcagggtaatgcttgtgtgtatctatagttaagctctcattctctttttctccactgctaatgtctaacttttctgtcttcagtttatattctcttgatctttgacttagatgtgggtgactcagaccaattacttcacataattgcatttggagtgagactgatgattttgatatgggctcatttttattatttgcatgtaagtttaagagaaggcacttgatgaacttactgtgatttcacatgcaaaagtgaatattgaggagattatgtaagtagatgagaaaattgcctttcatacatatttcttttttttcatacatatttcttgagtcgacagggtcagatgagaagttggcaaagaatatatcatgaaattcaagaaacaactttttattttgctgtgttgaagggaaatgttctgtgcactttgtgctgctttttattacttttagcgattgtgtaagttgaccaattatgaaatattgtacaaccaaataggaaaaaaaattagtattttgatggaaaactgaatggaaaggtgggcagttgacttgtcattttgacattgagagctttctgtttgtgaatctagaaggacagatatgtgtcattctgctttcaacagagttggaaatgcccactgttcttcacagcgaaggcttcatttttgtgcgtaaaagattggaaagtgccatctgggacacatcatatgttcatgtttctccaagagaatctggaaattatacttctgagattttgttactaatgaagaagagaaaggaaaagaaaatcttccataaattatacctggtccatttcttgtaaaaatggaaatgagagaat

SEQ ID NO: 51714 - DNA, 1429 bp, Bovine  19866880965872
  misc_feature (1)..(1): n is a, c, g, or t
naaaaataactgcataatattcctttaatgggatatgtttaactactccctttaggttgtcttcagttcttcttatcattagtaaggccctgatgaacatttttttttttttttgtggctcattttctccacatttagcattatttcattaaactatagttctagattaaaattaccaaaccaacaggaataatcattttaagagtttgataaatatgacaaaacactgcttgtagaaaaagttgcaccaatgaataagacatccatttcaacatacctttgccatattgctttacctttgtataacctctgaaaaacaagtaatctgatgttatgggatgctgttttaaataaatgtttttaatttttagtgagcatgaacgttgcatatccctgccctttgtccacacaaaaattgtcccttaatttaccaaacttggttattgttggataaacctttgctgtgagctatgacccgtgaattacagattattcagcagcattccaggcctcccaggtggcattagtgataaagaacccactttctgtcaatgcaggagatgcaagagacatgtgtctgatccctgggttgggaacattccctgaaataggaaatgacaatctgtttcagtattcttgtctgggaaattctatggacagaggagcctggcaggctacagtctgttgggctgcaaagagtcagacacgactgagcaactaagcacacactagcagcattcctgtcctctacatactagatgcccgcaaccccctaactcataacaactaaaaatgtctccagacactgtgaatcatacaactgggaaaaaatcaaaccttctgaagaatcttatttttagcaaataaatgttcaataatgtagtaaactgcctatttagttgatctgttttggaagttcagatgtttgtatctaaagtgagaaaccttcactcaaaaatatgaagtaagtgcaatgagttcaggctagagagcaaagtgttaataggctcatggaggtcaatttagaagatttcaaggtagtgctaaagcagaacagatagggaaacagaagcagctcagggaatttgattcaactgcccaagcttgctttccaagtaactgggactttaatagaattcaagtctttttttttttcaagctaaagcatagttgaggtacttgaaagaattcaaatctttccactcctactcataatgtccacgccccaccccccgccccctgaatctgcctgcaatgtgggagacctgggtttgactcctgtgttgggaagatcccctggagaagggaaaggctacccactccagtattctggccaggagacttccatgggctgtacagtccatggggtcacaaagagtccgacacgactgagtgactttcaccttcacttactgaaatgattgagtga

SEQ ID NO: 51715 - DNA, 1551 bp, Bovine  19866881010676
  misc_feature (1)..(1): n is a, c, g, or t
ntggaaaatccttgaggagatatgctagcctttttttctcccttttctagggaattgttttatgttctatttctagtgttctattctgtgagaaagaattgtctttttagcctacaattattttttaattaaagattgagttccctttcatctttcttttctacctgaatattcttagcagtgaatagccatgtattgaaattcctttctcactaatatgcatcctcccttttcacattgagcacattatgatttatcttgatattttaaaattaatcatttttcctacgtgtgaccaagatctgtctgtttttaccttttccttataaaagcttattttcttgaaatctagtgggattggtgctttgctgtggcactgtgcccccttctctgaggaaataccatttttatgtccagaagtgatcaatactgtaaaagtgttcctcctgcaccctaaccccagatttgaggaagtaactgtgactcttcttatgcatctgtccctctgaaacttaatccagcactgccctgggacccgagataaaggttgcatgacttcacgttactcccaaacccttccctgatgacgttgcaagattattacctcagttagcacatattcccctttgactctttgctctgaaatggatataaaataattcatcttctttggactgcatttgcaattataatttccctccactttttgtaaatttgaagatgtgatactcctttcaaaaacgttgatctatttcttagttttagcttttcatccgtgcccttgtgcgtttaactcataaccacctgataactggggaagctccctgatgattacaactttttgatttaaagttgaatggtttcacaagtttctcactttaacctatgtcataattttagataaattatgagtgttgaacttactgtgtagaataattttcaaaagccttcagtgtctaaataagccaacacagagcttactgaggaatactgtgtcccatgtactataaatgcattgtctcatttattgtagtaagaattccataagggggaaatattgatgtcattttacagatgggaaaagcaataaaccatacatttgcaatatacacaaggtcacacattggcagagctaaagttctagttcaagttcttcttatctttaaaaagctctttatatgctgcttcttgaagttaatcaaaagtattgattaggactgtaagctccactgggagtagaaatcatatcctccttgctctatagtcctgtataagacctaacatatagttccttacaaagagaagctcaaaatctgtgtgcagagtaaacggtttctcatttctgcttttcactgactacaactgccatctctccatcttctgaagcaattttcagcttaggaaacttaaggcagaaaaattttcaggaaaggaattgagagagctgaggagaaataccctatttcttcccaaattccaaacacatttgtagtctttgagctctcaatatccttcctggtttggacaaccatctgaacctctctaaacaaa

SEQ ID NO: 51716 - DNA, 1567 bp, Bovine  19866881229911
  misc_feature (1)..(1): n is a, c, g, or t
ntatctgcacatattttatgcttctttcagctgttgttaggaaatgcagtcctcaaactgttctccaccataagtctttgctctaggtgattaaaaatagacagggagaagagaaggatatccttgcagtttgcaggacataaaaaaggcacatgctgctaaattgcaccaaccgcagggaacacttctcacaggtgttccactctgcagaggttactcatttgcctccaagtgcaatctcaggtgttggcttaaggtttcaaaggccccctcccccttgccctatgcttgaggtccctggagaaaccaatacttatctaggctcagtagaaaccacactgttcccggctctcaagtgcagggcgttggaaactgggtgttttcctcatggaaggcttttgcctctggaatttcctgccagtcccagtttgccagaaccccaccttaccgaccttcagggactcatgaaagactcgttttctatatatccttcacaacaaggagagaccttacaaccatgattttgtaagaatcagtttaaggcattagcatagctcaccgacttctgggttacaatggtttaattttggtgctggcttcctgttgcaatttcaaacagggtaaaattttcagaataaacataccaaataagtgcctgctcttagtaatgaggaagtgagaatgcctacctggacgtgaagatatttagaattctaaaaatagaaaaacttctgtcagatcatgctccttctcgcactggtacctcaggtgcctgcaataacccttaattccgaggcaggaataaaccgctcctttaaagctcgaagatgatgcgcatgtgtgcttgtcaaatcccaaacccaccctggagaatagcactggtttgactggacattcacatatttaccctgtgctgttacgccaaggcattaacagctgctggcttaattattaatggagttagtgtcaatcatctgagaagagaattaaagaataatattttaaaatcatctggtccaaaaaagaaaaaaaaatctgttgtaaaacacaactctcttgtcatttattcctcttgaacttctccagccaaaggattaatctcagaaaaccgctcttctaaaattatttttcctatccccttaaacgttttctgtccgagcgctctccctttcaaaacccagcacttgctatgttcgcattattttcgcaagatgccctacatcaggggaaccgatgatacggtatagttttgataactctagcacggaagagaaatacagaggagcaagagccccccttttaagaaaagagccctttagatccgcggcgagcctgcgatgcctttagcgctgcgggccttctcggctccgccaaaaacgcggaggctgctcggtgtgtcttacagccgagagcaggtcaaagaggaaaaacaaatagttgttctgatgatctccaagaagagtttcactctggtagtatttggaaaggatcccgcccccccactccccccgcgccgctggatgccccggttttgggacctctgcagttgtcaagaaatttttttcag

SEQ ID NO: 51717 - DNA, 1319 bp, Bovine  19866881268586
  misc_feature (1)..(1): n is a, c, g, or t
nggctttctttcgtctccttcctctgctttccttgagtagcatactattagattgtatataaaaagctccagctttatttataacaccctgcgatgcaggaaaggaacattcatcttgtgtgctacaagccttatattctttttgggagttggcagcagcatgccggctgtgttctaacaatgggaacaggcattgccaaaaccaaccaggcttacctctgaggcccagtgccacggcaagctctttccctcctcctgcctctcaccctttcctgtgggctgggcagaggtggaggcttagggattttctcattcctgaatctgcccagatttcttcacagtcttacaaatcctttgtcctcgggcaaggctgcctcctccccattgctggtctttgggtagcctcatgtgtgacacagctaaagaaaatgtgaagtgtactgttttccatggtgaagatttctacagaaagtaggtaccctccacaggattacctgggaggccagaataatcctcctcctaaaagtgggagaaagctccaaattcctctctagcaagtgtttgctttggtcatgaggcttcaacttgaagagaggtgctggggtactgccctttgttgaaatttcacttggtgccgttatatagtgtttgatttcatgaagttatatcatgatccatattgagctccagcaaaaatggcttgtgtgtgtttgctgtaaagtaatcagttttgtatttcgagctaaacctaagtgctgtttacccagtatatgatttaatttcattattttcctcagtcaatatttatcatattgggaaagaacttataggaacttacaggattacacagttattataatgtgctgtgcttagttgctcagtcgtgtctgactctttgtgaccccatggactgtagcccaccaggctcctctgtccatggggattctccaggcaagaatattagagtgggttgccatgccctcctccaggggatcttcccaacccagggatcaaatccaggtctcccatactgcaggtggaacctttaccatctgagccaccagggaagccccttattataattgggaaagattacttttctgttttctatttacttattatgatgataatttttataaatatttgcagatgcattaatgtatctgtatttacgtattaaaaacatagttggtattgttgaagctgaaactccaatactttggccacctgaagcgaagagctgactcattggaaaagaccctgatgctagaaaagattgagggcaggaggagaaggggacaacagaggatgagaaggtt

SEQ ID NO: 51718 - DNA, 1606 bp, Bovine  19866880395432
  misc_feature (1)..(1): n is a, c, g, or t
ntgtcagactctttgcaaccccacggactgcagcacaccaggcttcccctgtccatcatcaactcctgaaacttgctcaaactcatgtccaaccatctcatcctctgtcttccccgtctcctcctgccttcaatctttaccagcatcagtatcttttccaatcaggttaggtgttattattaccatagctcatcaaatctaatatgtcagtgactgcaagatgcaccaatatggagtataccactatgaaagaaataaaaacactatcagttcaactataaaattatgatgtggtgcttttttattacttagaatttttattttacatttattgagatagtctttttagatggagacataggtttattataagaacacttatgcatgtataaaaagggagatatgagtttaaaaatgattatttctaagtttcttcacattctgggtctgactccctgaatctttttttgactcataagtgctgatggccatgtttttcccacacagtatcctcagagcatcaaaggtgctcagatgctggatcatttttcaagccactgacactttttctacaagttttcatgctggtgcttcttggatctcactgaatgacaagaagaggaggttttcattcatcagccagaatgaatagttctttctcaaatgacaattgaattgcttgttgactaaaacatcaaggaattgccttcgtgttgtcacaccatcagaaataacaatccagttggtatatatacacagcaatgacacccaaaattggtaaattagaattgattaaatacagaattttctctgttaccttttcccctttctcatatgagtaaaataagatgtgtaaatacctagagtcaaaatgaaatagaaagttagatactttcctatcaaatgtaagtattgattctaacagtgtccacaaagatccaacatttatttgtttattcacttaccaaacattaatggattgtctgttctatggacacatattaagtaaggtatcaggaattcagagagattatcttcatcactaagacaaagtgatggatgcagctcttgggcaatgcgagaaagcaaacaagtaagcacacaatgaacgtggtcatgagagatgcgtgcacgagatataccggaggcacaagggagagcttgatggattctccttggaccagagttggggaaaatacaaatgagtttccagaccagcaaaggaggaaagggcgttgagccaaaaggggctttcctcaaaggaaaggatgtggcttataatttttttcaattttattttctatgtcctgtctgtgttccttgctctaaaaggctgaaggcatccatttctcttttttctccaaggaactgtccatttgtaactttaatccattctcttctcagattatgttcacttttgacctgtaggaactttttacatattatgaaccttaagttattataaattatatatttggcaaacatattcttccattctgtcacttgacttttaattttgttaatagcaacttttatatttcaacagtttaactatttccccagtcagatctgtcaatactttcctttacagtttggggttttcgat

SEQ ID NO: 51719 - DNA, 1032 bp, Bovine  19866880593990
  misc_feature (1)..(1): n is a, c, g, or t
nggtggcaatcagttgcagaacaccattatgctaacatttctagaggaaaaaaagttctaggaacttgctctttaaaatttctcaagagtcagttggagcctacacacaggatttaaagcaaatctagctggtatgtatcttttccttcctttactaactctatcacccaaaatcgagtatcccaagatgttaacaagagaaaaagcttagaaaagacactgacaggctgtaaacaggacttggtggaaagataaatcagatggccttgagactcttgtatgtcttatttctatgacacctttggatctagaagcctgttcctgtgtgtaaaagggaaattttagttttggtggaaaagcaacaaatgctgtccatttccatgggctggagtccagtccaggtccgttctagcaggactctgcctctgaggccaactaaagcactcagtgccagcccagggctggtaggtgctcggaaagctggctacctaagctaccagcctcatagaacacactcctggacacagaacagggacctaactgaaaggagcaaagtgctatcaaacgcttgtagccattaaagccgaaacatgcagtttcttcacaaattgaccacaacttaattttctgaaactaaagattcatgctcattcaactcctgggtcaacagtcactcaatgtgttgaaataatgacattacaaaagcaacccagaaatacccagatttttaaaaaaacatcactttatttctcctcatgagatagaaggtgcatttctattccctttaaactgcatacacgttaaaccaggctccccaaagaatgaaatattaacaggatttactcaagagctacccaaatagagaaacggtgcgcgcaatgatctgtttcatggaacgaaactgaatcaaacatctgttaggttttcctcccctccttctcccctccctgatggttaatgacatctgaagcgcttaagctttgcacattccttcactaattaaattcctgcaaagctgtctcatgaatcagg

SEQ ID NO: 51720 - DNA, 1196 bp, Bovine  19866880668717
  misc_feature (1)..(1): n is a, c, g, or t
ntgctcctaagggaagtctggacagagagatacttgcaggcagtttgagatgttaatttcgtatgtataaggatggcaattaggatcaaggactatctctagtttaggaggaaggtttgagtcatcttgtagggatatgaagaaaaaagactcatttcatcactttcctagggtttccttgggccattgggtgattctagcagcattttgaagtcattgtgttggtgtgtatgctcctgaacctacccattaaatacaaatcaaataattataaatttaataacatatctgagagtacaatgagactctagagagtgaaaaaatacatttgtactccttaatttaaccataattaatgattaaattacttgtgcttggtactaggatatttgaaaatttaaaaagcagtccccatgatttctgtctaggatctagctttggatacgaagaatgaacatatggagtaattagagagcaatttgaagcagtgcatggacataagaaggagataaatctctatgctgggcataaatggtctgtagaaataagaaatcatcagagggaaatacattcagttttttaggagacacaaattactgagaagggtgagaatattaaagaatgatataccataaataagagtacagaaatgggaaataagtggtacctaaatgggctgtttgtatgcatgtatgtaggagaaggcaatggcaccccactccagtactcttgcctggaaaatcccatggatggaggagcctggtgggctgccatctatggggtcgcacagagtcggacacgactaaagcgacttaacagcagcagcagcatgcagtcaacactgcaggtctagaatgtcccaggccttggtttttgccctcaaggagctcacagccaagcagggagtagaatatgcaagccacctaatatagcatcagtaggttagaatagatggtaagagtaaaatatcctatgctgctagaggagtctgggcgggcttcttgaaagagaggtaaaatttgaagaacagagcagggacattcaacaagagaaatacaaagatttcgttggatagaagtgatatctctgatgagaaataatcttccatgttctttaattatctagtaacaattatttctaaatttaatgaaagacctactgctttgtgagatcctgttgcacatgcttcgggaatt

SEQ ID NO: 51721 - DNA, 1380 bp, Bovine  19866880699105
  misc_feature (1)..(1): n is a, c, g, or t
nctactgtaaccgttgtttgagtttacccctcctttctaacagatagagatctctacaaggattttattatgcttatagtgcccagaaggccatggctcatctctggactcttgacagttctcaagcagtcctttgggctctcagaacttttgttttataacttaatataataaagagaaaaagttgcaaaattgaaaggaatcctagaaaaactaatttacgttgaaaatgacagcattaaaaggtcacaaactccagtgtctacagaggataggcctacatcataaataataaaactgaccctctgtaatataatagggagtggtaaagacagtagcagattgaaaggacatgtcatatttgaaggaggcagtcactgtttaccacccaccagttataaaatgaaggcaacatttagccaaactttcagatttttcaagggacatcagatatatcagatttttatgtatcgtttctcaatttaccaatgttgacaacaaattaaatttatttttaaaacatgtatcaaattaaatgtatgcataggccaaatttgggctgtgggtcacatatgtgctatttttttactaaaaggtaaaatgaatggatactggaaatcttaaaattggttcctgtgaggaatttaatggaaaggaatgggagaggggtgatgattttaacaagtttttttgttttggggatttgaattggatcccatctgatattttttgagagattccaataaatgttttaattcttttcaatttttcttggttttggacaggtgttttttggtgtgttttaataagcttctaccaaaactggacattgagaggaatgaacttcacatgaggtatggaactctagcatataattttgcctgccaaatgcccgataaaacaagattagaggataaagctatttgggaatttgaaagcttattttttgactaatcttcctagttaagtgacacttgtagcatatgatttaaacatgtgcatggcaaaatccaagctttagcgaaatacaaattgctacatgtcaggaccttaagaattatctttaacactcagtgaactcacaaatgcaatgatttggctgaccatatttgcatgcattgtactttacccactatgaagaggatgggaaatatcagttagaaacataataaatcttccacaaaatacttggaagccaaatccagcaacatacaataaagaattaaacaccttgacaaagtagaatttgtcccagcaatgcaagattgttttcacatttttttttttcagcaaggttacaatctttattaaatttctattctgctttaccttagtaataaaatcaaaaggaaatataaattaacacttaatcattataag

SEQ ID NO: 51722 - DNA, 1121 bp, Bovine  19866880757193
  misc_feature (1)..(1): n is a, c, g, or t
nagatggggaaatgcccacaaagccttgttattttgtccttagacaactggtgagtccatgcctgcctcttagctagcaccatggaagcatggccaccggggcagcagcttccagaattctgtgctgctctatgggcacctgcctgtctgcgatgttccccacctgtcagttcactgctttgcctgtggaccaagaaaaagagacggcagaccatcactcccctgctgtgcccagtttcactaatactcatccatccattctgttattcaacaaatatttattgaagcctactgtatgccaagcactatttcaggaacttgggacatcgcagtgagaaaaataagcaaaaattcccatcttcatggagtttacattctaatgaaataacttctaatggagcaagaattctcatttattttatcttattttaatactgctctttacttttcacaagttaccttatcctttactacagcaggtttccatctttagtcattttcttgatctgctttcccatgtcctttagtgcattttaccaatagggatgtggggcaaaaggtaattgaatctactatttgtcaagtctggagtacagaataaccatcagaaagcaaagcacaagtgcttcacagtcttagtttccactaagccctgtactggcagtaaaaacacaaacaaagttccccataacctctccatgggggcccttcttggctgatttcttgtaactctgttgcactggttcagacaaaatcaaccaaggtcatgacagtgaaatgcatattgcacgctgaccccagaatttggatatgagttacaagcatgaactcaaagccagaacacaggatctaccctgtaattattttatttttgactacacaaagtctcaatcaaatggctatcctgggttcaaagcactcttttctgaaaacatctagaaaccaacgtatacttatgtgtaaaatgcacatattaaatataaatgattcagcaacatggatcagattttacatactgtaaaaaaaatctcttctttaaagctgatcaccctagacattaccttcatcatatttacaaatctgttgaagattaatctttttttccccccttacccaaatca

SEQ ID NO: 51723 - DNA, 1835 bp, Bovine  19866880773456
  misc_feature (1)..(1): n is a, c, g, or t
ngaactttctgggtacctctttcctcttactgcaacattgtgcatttttctccttctctttccctattaactcttcaggagacccaaagtatccttattccccaggatttatcaatgcctggggaatttgttctgagatttccttcttcatttaacttctttctttattcaaagctgtcctatacaaagtaatttcatctcctctttaatatcttgataatgttaataatgataatagctaatatttgagtgcttagtatatgccaggcttcacactaattattttccacagattagcttgctcagtgatatgaatatatgatcatttccattctacaaacaaggaaataaaggtacattggaagttaagtaatctgttcaagttcatggaacaggtaaataaatgatctgtacccaaaggatctgtacgcaaagattctccacacagtctctatattctcttataacattacagtataggacctatagtattatattcaacaggaaaaaaagttcattacaatggaaatagaaaaacaaggcataagctttcttccaattcaccaaggaaggggatagtggtttagttgctaagtcgtgtctgactctttcatccccacagacagtagcctgccaggctcctctgtccatggtattctccaggcaagaatattggagtgggttgccatttccttctccagggcattttcctgacccaggaattgaccccgggtctcttgcattgcaggcagatcctttagtgactgagctaggagggaagcccgaggagggggaagaattaaatatttatagtgcagtgaaggaggatcacagaagaactaatctgaaaaaaatccacctgtcaagttcttgggggaaaatgagagcattataaagaaggttgggaatattatttattccccaataatggagcagcctccagaggttacctggagggccagctggggactgaacttggggtcaactgctgttccatcactggagggagtggcatattgctggcagctgtggttgggactgcagtcacgtggccacaacaggcacaacaaaccaccccccaacttcaatgtatctgtcccgcaccctgcagtttcccattttcagaagggaaacaggctctgaaaggcccatgactgctccaggttactcaatcagtaacaaagttgagctcaactccagatctcaccccagaggccttcactccagggaaaagaagctgtctttaaaagcctgttagcattttagctgcttctgtgaacttgtatttgctcttgtatttctttttcttgaattttagcctagtcattcaaaaccagactggatatcccttgagacagaatgttatgcttttgtctattggtgtagagtgtaaagtatatcttcattgaatacttgttcactgattaattaaatgaggcccaagaccaaatgctaggcgaagtgggtggacctcttgactatcaggctgctgaagttgttgcatcactctgtggggaaccctgccactctgtctctgattggtctcaaggcattcattaagtttcttgatttctctttgtctccacggcatagttaataaaaatgaagatacagatttgtctgagggtccttctagttccaaatttctagggcgagagtttcaacattgaagagaacagaaattcccccaagaatactgacataactggtaaataatttgaatttgcagtggtttgcagaagaacttgaaagcatgagtactatgtttccagtacatagcttgcccttaaaaataaatgaataaagaaacagacaggctcttttcctaattcata

SEQ ID NO: 51724 - DNA, 1604 bp, Bovine  19866881209382
  misc_feature (1)..(1): n is a, c, g, or t
ntctggcttattaagatattaagcttcagtctgttttttcagtctgaaaacagcatgttacttccctgcttaattatttcacgacccataaaagctaattattaataaacaatttttaaaagaccattaactttttattgtaatcacacagctatgtttcaatgttggttgacatttattagatcctggtttctcaaaatatatttatctaggtaaagaaaaatgggcagaaggaaacctcacccaatttatgtagcagtgttaagcaaatttagtttttcagccaaaataaaatcatttgtatcttcaaactttcccttttaacttttcttttagcaatataattttgcattttggccaaggagaactgctttcttttggcagacaaaatcatgctgcaggagaaacagtgacttcaatctatagaatctgtctcctttttaatagagctgtaccaaagtagaggattacattttacctaagctgatctctttcaaaagactgataggatgaaatgattttaaatctgtatttttacccaatatacacaattatgttcaatctgaaacaattttctaaaagaactgttgccaaattttaagaaactccaaaatgtcttatccaaaagctgtcaattaaaaagtaagccacagtgcttaagtgtaatatttttaaaaccaactctttactactgcacattcttgggatatgtggaaacaaatacattttgactcttaagaaaaaacaattgatggcacattgaagaataacttcatgagtttataaacataagagggtatagttattgcaaaatgatggaaaacatcaagtgtgccttcattttgtttgaagagagagtatttccactcaaaagttttgagtccgaaagagctatttactgttaaagtatcaccaaaattagtttcaaacattactcagaaaataaactatttccaacaataacaatcttcactgccttttataaggactgtattgtaacttttcatttttaagcgtcttatatctccttgtaggattatcacaaatcaccttttaaatttcaaatgaagtaattccaacccagtcccaattaaatacatttacaaacaaggaacattattgcacattacacccatattttaggaatgtgtgcttccttcccccatgcccaggaaaaaaaattgacactgcatctatgaatttacatcctcattatctgaattcataacactttctgaaagtgcttctgctcttctacattaataatattatagtctaaaatacttcatgaaccctgaagtgattctctatggaaggagcatcgtttgcaaaatgaatttggctagtcacctgcataccaaaatctccaagtatctgaacaaatttcttgtgctcctttccaatccaagatctcattggatcatgtacttggtaaggtgttacatgggtgtgaacaattatccctgtttgtgcaaattctttcaagacttccggataagtaatccaagtgttgcttcctccagaatgaccaccatccaaccagtacattgtttttatgtttttgataaaagcatcgatgttcttgtctttctggcttctttcaa

SEQ ID NO: 51725 - DNA, 3217 bp, Bovine  19866881309099
  misc_feature (1)..(1): n is a, c, g, or t
nttttatacacagaacatttcattatttgaggggtatctgaccttttctgacttagtacagtacttttgttctcaaagacttcctggttaagctgcctttggttctctaacttgcttaaaatctgcatttattgtagcctccccagtttttatatttctaatgcacttacaatcatcctatgttaacgctcctttataatatatatatatatactaaaagtaaagcaaatattttggttgtggaaaagataagtaaacttcgtatagctaattaatattttacttccactaaaaatttacttctttgttttcaattgagaataaatattttcaaagcataggtgctaaagaaacactaaaccaatactaaacaaagatgagatcctagtcacatccaaaaagtgtttaatcttgtgacagaaaggaagatttataagatgctaaattttagaaataaactccttctaagagtgctctagaaaaaaaaaaagcttaaaatattttgatttacaaaaccaggttccaaacatggttttaatcttaactactccttctttcagaacctttttttccttattcagtgttaacggaaaaaaagctaaccatcctgttaaatttaaatccagagatgggacttctgctcctatttcaaaatatctgcaaacgttcagtattttttctcttttaaagttgtatacagaataaggcagaactgcatcacccttaaccatgctctcaagatataaaacccccaaatttaagtaacggcaatggatttaaaacactgtgctgtgactgttttcagtgaggattgagaagtcaaggtattgaacttttatacacaattatgtaaagttaactaaacaggacaacacaaagattaacaaactatggttctctgtcctcaaggaatttataatctagtcccaaataagatattattattaatacttttaactaaattttatcactcaagaggtattattataaacatattaacatatatgaaaagtaaaactataagccaaatttgttaatgcaccccttaatattttgatttttataattttctggtattcagttttgtataattacagatgttaactgtatcactggttactaacaactaatgcctatatactgttcaaagaaattaagtgacactaattcagactgtagaaaaatagtgcccaatagtgtacatcataggtattgcattataacatttgatatttaataaaatattctgtttggctttgaaatgtatttataatttcttcataattacttaagtgacagttctaaaacatgtaaatattttagaaacaaaatgattttaaaagtaccatgaagtataatttttttgcagatataaagtatcttgcttagtatcctttaataagagaacttaagagtataataatatatttataggttgtctttgaaaaataagacaatactgtaagaacctgtcttagcatactttaaacacacacacatttgtatataaaaattcatcttgtataggataggatacagttaacaaacttttgtattaaaaaaaaaaatcacataatggtcaagtgagtataaatagtataaaaagcaagttactgaagtctagaaatcttaccaggaatgaataacacatctccagctttaagggaacattcataccttctagccttggaaaacagtggatatttagctaagtctgggttatctatgttcagtacttctgatttagaacctgaaaagttacaaaacaggatgatatagattgaacagttagcattttttttaaataaccacaaatataaatttgaaattttgttttttcttaacaactactttactgtatcacactgtgagaacaattactgttctcctgaagacaattttcagtgacctaccctttatttataaccactgacattcatgtaacataatcaagataatctaaaaatttcattcttcatataacctatcatctcatgtatacacgtacacaatgaagaacacaatacaagacacaaatacaacacaagaatcataattaggaagaagccctacaaagtttttctatgagaatgaagacattaaaaaaaaaaacttgagaaatttattctttaaaaaaaaatagtacctgataaatataaatattgggcatctcgaggactgaacagaacaacacgcttttttcctgtcacttgtattaagaagttatccattacctgaaggcaaataagaacttatgaaaaagcataaaattctaatatacagaatcaatggtattccagttaaccataaatcctgtcttttaataaagcttgactcagattacctaaaactcttatagtaatattctaatttaacagtgaaaacagatgtgttacacaactgtgtcactatttctccaacactgccttaaaatgggaaggactggcaggccattagaaaatctgctcagaacactgtttgcctttgcttcatcattatgacaccaagtgcagttacatctatttgaggctccctttggtaagtatgaccaactcccctgggggctcagatggtaaagtgtctgcctacaatgtgggagatctgggttcaatccctgtatcaggaagatcccctggagaagggaatggcaagccactccagtacccttgcctggaaaatcccagggacagaggagcctggtaggctacacagtccatggggtcacaaacagtcagacacaactgagcgacttcactttcacttttcactttcctttgctaagtatgggtttcccagatggtaccagtggtaaagaacctgcctgccagaacaggacatgtaagaaatgctggttctatccatgggtcgggaagatcccctggaggagggcatgaagcccactttagtattcttgcctggagaatcccatagccagaggagcctggagggctacagtccatagggtcgcaaagagctggacccaactgaagcgacttagcacacacacgtgcacgttggtaagtatctattttacttatctatccaggaatactgtaaggccaacattagatgataggatgagagcacttagaaaaccaggtgctgaggaaacacaagggagtgctgcaaccacggacaggctcttacgagatggccaaccagaatttggttacaggaaaatatactatttccaaagtatttcgataggaccgtactt

SEQ ID NO: 51726 - DNA, 1078 bp, Bovine  19866882143437
  misc_feature (1)..(1): n is a, c, g, or t
ntggatttgtttgtggattatttgcctgtatcatgtagcttggctttaccaaatctggggtatagtattcccacagagaggaaactgtttgtttatgatagtgaaatgtcattttagcactttgatggtttgaaagacaaatttatgttaccctgtcctgctcacacactatcataatagagaaattaggcaattatccttagcacattacagttcatgtcttaagtttagccaaataactgtcattggttcatttattcattcagcaaatatttattaaatgcctgcaatgtgccagctgctactcgaagaagtagagatttagtcatcaacaagacagacaaagtccctgactatgaagtatttcctactctgaaaaccaatgagcttttttagtctgatacacaactggttgatttattctcatgtttactcatgaagatttttcacttttcacagttttaaaaactcttaaatagagagcacgtgggtgaagagaaacgatcttgggtaaggctcaaataaataaataaaacccaacaataaaaaacatgatcctattggccaactgtagctaggagcctcattcctttcattcaagactgtactctttcaaggggcagttctccagctaatcaaaatttcaaaggacacagaagaccatttaataggattatacctaaacctgttatagattaaattctctgactgtttgacactgtagtaactagcccagatttgtatttacgaaaaaagagatgataaaaattccctcttgatagaacagagagaacagactatcttggcccacccactttcctcaaaaataaaggggtggggaggggaacaagtgctaagaaatagaaatctcaacaccagggtgctgctggcaaagttcaaatgcaccaggaaagcacacagagaaatgtccctcttgatacaaaccgtcttcccccgcccttgtttccagaggcccatggccaagatctaacatatctccttgaagtgcagaaacaataaatatccacctccaggtgacaccagtggttaagcatgacagaatttgaaatagaaagcg

SEQ ID NO: 51727 - DNA, 1448 bp, Bovine  19866880123635
  misc_feature (1)..(1): n is a, c, g, or t
ntcagcagatgaaatggataagaaagctgtggtacatatacacaatggagtattactcaggccattaaaaagaatacatttgaatcagttctaatgaggtggataaaaatggagcctattatacagagtgaagtaagccagaaagaaaaacaccaatacagtatactaatgcatatatatggaatttagaaagatggtaacaataaccctgtgtatgagacagcaaaagagacactgatgtatagaacagtcttatggactctgtgggagagggagagggtgggaagatttgggagaatggcattgaaacatgtataatatcatgtatgaaatgagtcaccagtccaggttcgatgcacgatactggatgcttggggctggtgcactgggacgacccagagagatggtatggggagggagaagggaggagggttcaggatggggaacacatgtatacctgtggtggattcattttgatatttggcaaaactaatacaatattgtaaagtttaaaaataaaataaaattttaaaaaaatgaaaattatatggcatgtgtgagcataataaatactagaagacttgttcaattttcctgaaaattagctttaaaggaaaaactgaaagtaattttgtttaggactgaatttagcagttttattaatcctgttctcccttcttgttacagggctatctttgcacaaatctatggggcttttccagataccatagattaactcatttgtgccttagaggcagagataaagtaacaatttttcatatctcaagtgttctaccttacaggaaagaaatgttattcttcatttaatgaacattagcacatgaacaattaagacataattgaatgaagctagtcagcaaaaggcaagagcttgcctctgggaagctgcctgaagttgactgtgctcatatctgtggtattatctattaagctgacagtaccaaagggtagaaatgtactgacagtaattgtacagtttttggtacccccatgttttaaaattgctttctaatagtaaacatttctaggagaaatgatgatgctgataataagaggttgaaactgctgactgacctataactgtcagattactattaaaaaaggcaagttaaaaataaaatctttatctgattattaacaaccgctctgagggttagctttaattactgtaagacaattttacttattccaggtaggggtaagtcatttaataaagtataggttgattagaacttttattaaaaacattaaataaaggctgagttttaaaatacctagctccctaaagtgaaagtgaaagtgttagtcactcagtcatgttcaactcttttgtctctgtgaccccatggactgtggcctaccagaatcttctgtccatggaattctccaggcaacaatactagagtgggagccattcccttctccag

SEQ ID NO: 51728 - DNA, 1543 bp, Bovine  19866880461197
  misc_feature (1)..(1): n is a, c, g, or t
naaacattagtaattaaatgatgctctctgaatgtcagtttactttatatttttagttttcatgtagagttctttttcattctttgaagtcaagatcaatagttttccctaaactactgtatttattgattaaaaaccttttttcaaaattcccaagtccaaatttgtatggtttatataagaataatggcaatgttcctcgatatatggtaattttaattctcttgaataataaaataactagaactgctcactcaccatttccttgaccattatgataacattgttttcattcttcatagtatataaatatggatttctggattttaaattatgctttttctctatttttgtatattaggaaatagactttattttttagagttctttataaaatctactctgtctttattcaatataaaaccatttgaggaacttatcttggaaaaaatagtacaaaatgttttgtattttatttattataagattaattcacattaatctgcaaagtattaatttttactttaataggaaaactaatatgattatgttcttccttcaaggggttttaatttgttcaagaggttaataaaaagaccttaggaatatttgccccttctgttttatatatatacaaatataaattttaagtttctattttgtgtaaattacattttaatatacataaatccctaaaaattaatataataaatatgacattaaatcatgcaaagtttaatagtcaatgttgatacacttccattttaaataaatatcaaaatatgtctatatgggtaacattttttcagaaaatttgtaaacaattgtctttggtaaaatcgttggtaagttgtataggatactgcatttcccattcaaaatcaatattcacatttagactctatgatctattccagacatgttgacctttccatgatatttacctctaaaactcatgacaagtgaatcccagtgtgcttaagtcttagttcatcatcttgagaaggccaaatgccattctgctaaaagctaactcacttgacctacaggagtcaatctagtctcaagtaatgctatgtatctaaactactattgggattttgatatttctgtttggattaaatgaaagatgtataaaatgtgttttctgactatgacagtaaaagtattttccagaagatccaagtaataattggctgaaaacctcttatcagttatgcacacatgtggtagcaatgagagtgcctcatagagctctgactataggaagcacacttaaccaaggttctagttgctgtgctctgctgtatttgttgttgttcagtcactaagttatgtctgactctttgtgaccccatggactgcagcacatcaggctgccctgtccttcactataactgaagtagctcaaattcatgaccactgagtcgaagatgccatctaaccatctcatcctctgttcctcccttctcctcttgcctcaatctttcccagcatcagggtcttgtctattgagtcagcccttcgcatcagaggccaaagt

SEQ ID NO: 51729 - DNA, 1722 bp, Bovine  19866880518166
  misc_feature (1)..(1): n is a, c, g, or t
ntataggtgtatgcatgtatatcggcttcctaggtggctcagtggtaaagaaaatatctgtcaataaagagacaagggttcaatccctggtttgggaggaattcctggagaaggaaatagcaacctagtccaatattcttgtgtgagaaatctcatgaatagaggagcctggcaggctatagtccatggggtcacaaaaagtcagacatgacttagtgactaagcagcaacaatacatgtgtatatatgtacattcctggatacatgtatattcagacagtgtgtaaatagttatttgacatttgtgtgagcagaaacataaatgtaacataatacacataaaaatttaatactgaggaactttggaggtacaaggtgaggaattattatgtattgccaattgttataataaatatttgacattcattacttttgtgaattgataataagtctattaagaagtgttattcaatttcttacaatggcaacttttctcccttctctctctaaaataagcttgttagataaaacagagtatgtaatatttgagaaatacatatattaaaatttacttatcattcatttgaaatttaactgcatgtgtgtgtgtgtgtgtgtgtgcattttactgaagtctggcagacccatacaaataccaatttttatacagaattcatgaaacaattgcttctttcacacacctctatttgaaggaaagtggtcccagctggcaggttctcctcaacaacgacagtatatgttgaattggtgaacacaggactattatcatcaatatccaaaaccttgatggccagagtaagagttgaatgacgaggatgtactgctccatcagttgccacaacaacaagttcatagtagtcccggacttctctgttaagcttcacggccgtgtaaatgcttccattggatgtgatgcgaaaaagattgttgaagttacccaagctgtagtgcacttggccatttattccagcatcaggatctactgcctaaacaaaattaaaaacagaggaattcacatagtactctctgttataattttttagaagggacagttaaagacctatggcatatttctaaccaaatattgttttttctttagagagaaaagtaaaaagataatgataatgtggtacaaaagtctagaacatgaaaagaaatttataatagtttaatgctactcttaattctaaatgagcataaaattattttgtatcagtagcaataacaatattatattatgacagaaagttcacattacataaatactgaattttcctgtattatcatttatttaatagatttttaactctaaaatttaaaaaagttttaaacataattgagtgatagcttttgattgtatattttttaattcaagctatatattatatacctataatacatatagaagcaccatatatagatagatatagattactgcatttaattttcctaacgttcttataaataaatatcattggttccattctacaaatgagagaactgtggcttataatttgcttagagttatggaaaatcccatggacagaggagcctggtaggctgcagtccatggggtcgctaggagacggacacgactgagcgacttcactttgacttttcactttcatgcattggaggaggaaatggcaacccactccagtgttcttgcctggagaatcctatggacagaggagcctggtg

SEQ ID NO: 51730 - DNA, 1193 bp, Bovine  19866880518167
  misc_feature (1)..(1): n is a, c, g, or t
nctacaaatgagaaaactgtggcttataatttgcttagagttatggaaaatcccatggacggaggagcctggtaggctgcagtccatggggtcgctaggagacggacacgactgagcgacttcactttgacttttcactttcatgcattggaggaggaaatggcaacccactccagtgttcttgcctggagaatcccatggacagaggagcctggtgggctgccatctatggggtcgcacagagtcggatacgacggaagcgacttagcagcagcagcagcatacaagaaataacaatctgtgcctcaattcttagtataatgcctacataaaattacttaataaatatttgagggattaattcatgttagaataaattaatgcaagcaactgaggtttaaaactagacatactccaaaccccaaacagaagtgaaagtttaataactgtaaagcaactgcaaagggctcttaaatattagaatacaacctctaaatgatagtagaattgttgatgcaataataagccttttgcaattgaaattttaagtcatattaaataactttgcattaaataaaataagtaaattttgagtggctattcttcaaaggagtgttatgagaattaatataatctaaaactcaattaattgaaatagaaattattacatctcattatcaaatactgtgcattttgtactacatagctctatctcattgttcctcacacaaattggaataaatcttggaaaccataaaatgttatataactatgcaccaaatggctggtaaggaaaggaaggaaaacaagagacttggctgcattatgagcgagggacacaaaaatcaattaatattcataaagcctaggatggaatatgatgtattttgaacagaatataagcagatgtacatccacctttacaaacactggggaagcaagtggggtgggtttgctgaacacttttgccttgtttgaaatgataaagcccaggatgtgaaagtcaaatttataactgtgcaccctatgaatgccagactttccagcaggatttgtccctctgattcatcaaaacacaaatgtccctgggagggtattacttctgaagtttgaagcctgagaaaagatgaggaactgcaggaatgtctgaagaggacaaaaatactgtaaaatagtcaaagagcttacataca

SEQ ID NO: 51731 - DNA, 1316 bp, Bovine  19866880752662
  misc_feature (1)..(1): n is a, c, g, or t
nataaagcctatttattcaaatgttcttaggagggtacattttttatctgcatagtcacaactcttctttatgccgtaagtttaataaaatggaccagctgaaaatgattgctgtaagttatagtgccttgtttgtcgaaggaatcattgcaatatgaggggaaaaggggggttttgaattgcatcagtgctgtttgtgttcaacttataaaatatatgaactctttaacaagagtaggagagactagaaatctactctcttattcaccaaatgtctaaaattcagcccactggaagaataataagaaagcaagcattgaaatgtgacattaaaatagtatgttgttctagttgagtactccagacatgccttaaagaagaacagcttctcttgtgtatctgcacattacttttgcctttcacattaagatttatgtttcatggatttgctgtaagataaaagagaaaagaagtagttctcaccatgggagtctctgctacttctttatctttttctttttcttcctttctcttactttcaggatatctttttttcatatcagaagtcttactgagtgaactgaagtatcagcctctgttattataggctttttcttttgttcaggataaaattcagtgataactcctgtgagaagtgatggacagggaggggaacacactgatgctcttaaaaggaaacaagaaatagatggtgaaactcaccaagtgtttgaatctctgccttgcacctcatcttcttaaaatatcatttacaaatagcattacaaaggttttttttttttgcctttttgaaacagagcattctctatatcatgccagataaaagtttgaatatcttctgctttgaaacagatatgcaagtcagccagggcatgagtttatgaaccttgatgaagaatgcatacatgtagaatgtattttcaaataactttctttggtttgcaggtacaattctggtggataacatgctgatcaaagggactgctggaggaccagacccaaccatagaactctctttaaaggacaacgtggattactgggtattgttggatcctgtcaaacaaatgcttttcctgaacagcacaggcagagttttggatagagacgttagtacattgtttttttttctctttgcccctctattacaactctattataatttaaatatttgcatgtgtttgttaatatatcaaattttcattgtataatttgagtttattttcagtgttcgtcaacaaaaatattttttttaaaactcctgaaagaagaataagaaaagaagaaggaccatctgt

SEQ ID NO: 51732 - DNA, 1478 bp, Bovine  19866880804632
  misc_feature (1)..(1): n is a, c, g, or t
ntttgctttttgttttcccctcaccatcctaattgtgtatgtgtattagagaaagggggcaaattataaatttgttgcttttcatagcatccagtgtgtccaggatataacataatgactttcagaacaattagaaacaaaataaaggagagagaaaacctcttgttcaaaatggcttgtgtgtatgaactgttctgcttcaatcagataaaggtcattgggttggaaccccatatggatcaattagtctcctacagtgaaaggtgatattttctagccagggactgtaccttttaccctggtcagctgtgtccagaaagcctgctctgagtcacagggggaatttctagaacatccaagtctcagcacaaattaatcacaacagctggatacagaaagaacttatctaggctggtggtgtcaggaacacatatggttctgagagaagaatacaatgttatataaaaggttacacattatttccagtactattgtctttaatgcagagcaggggatcataaacattttatgcccagaagcattctggcaatttgctctcagatgaaaatttaaatccagaaaataaattgcataacattataaaggaaatctaatatattgaaatagttatgaaaatggtaaaaaaacaaagaaaagtattttttcttctaaatctattctttatataagattaacaatgggtttattaattatcataatttcattgttataatcagcataaatgtatttaaatatctaatattaataataatgtgaaatgatttttcctggtgcaaactcactgatactaccaaacatctctgtgatctgtcacctgccctccaatgaataaaactggtaaattacaagaggaaacagagaaaattatcttctagaggctcaatggtgaagataagggagatggtgaggacagggaagcctggcatgtggaagtccatggagttgcaaagaggacatgactgagcgactgaacaaagacaaaaagaggcctgatataaaacagagatatgtatcaaactgcttataaactttcatggccaaatgccactgtattacagaggaaagcactataggatttaaaagaaaagatttaactttaactcttagatggtttcaaaatacaactactgcaaaaatgggggaaacataccaataaaaattataacagaatttgaatctattttgaaatacatatctaacacatctcttggtatatgtatgccactaaattatgtcaatgattacttctaaagtttggagaagattttatagaagtcagttgtgataaaatcttcccttataaaatatctggatagacatatagtaagatggttaaaagcaaaccaaaaaaaaaataggatgttgagagctgatgttaaagggttggtgttcacccatttataacatgtgtggtgattacatagtaaaatttattggaaacaaattgtcatcaattt

SEQ ID NO: 51733 - DNA, 1386 bp, Bovine  19866880936835
  misc_feature (1)..(1): n is a, c, g, or t
ntatctttctttttattgcttagatctattaacttcttaagaatggagatgggtttctctcatgaaatgtcatatacaaatctactgttgttgatttatcaaatagaataatatgaaataaatagtaatatttgaaaaataatgtagagactgagggtgccatggcctatgtgataaatcatgctaatgaaagcaagtgatgcagagcaataattattagtgactttagtgagctttactagaccatattgttggaacatcataaacaaattatataatccaattaatgactgcactaaaggcatcataaaatataccttcctccctttatggtaaaatttgaaatatattaatgctaatgtcccattcttgaatcagacttacttacttgcaatgtcctgtggtttactaaattcattttgctttttcagtcatggtctaacttcaattttagacaatacaaattagcgtatggttctactgatattacaaatgtcatggtcaaattctttttctttcagatgagagtcaaaatgtaaaagaagaagtttttgtgttaaaatttcactatgtgtgttttcctgaaaatgaatattctgaggatcaacataaaaaaatgagaatagtccctcctcttctgctgcttgtgacaagcaaattgaaagtaaaatgtttgtacagcatgaaatttcaagagagcacagtactcctttgattgagaggtcaaattgctttgaaataaggaactgattcagagaaagtgtgtgtgtgtgtgtgtgcgtgcacgcacgcacgcacataaaaacaaaagcttctaaataagaaagaccaggtgactgaatatgcaaagtgatattcacaggaatatacagaagggtagaagtttcagaaaatctttaactctttcttgatctttttgcttgatcattttgacaccagtgcatttccagactattgtgaaagcctgagactattgtgaccctaagcacttttctttcttaaacctagagttcaaggattctatttgcctctagtaaattcagttcagtatagtgtatttagattggcatctggaataagagtttcaacattccaacagacattcaatggcaagtcatgtgagtgcttttattcttaacgagaatgcactttacaaccacaaatgtaacaatatcagctctcactgaaaatgtggagatacccaaaggattctctacttggatgcttggggctagtgcactgagacgacccagagggatggtatggggagggaggagggaggagggttcaggatggggaacacatgtatacctgtggcggattcattttgatatttggcaaaactaatacaatttgtaaagtttaaaaataaaataaaattaaaaa

SEQ ID NO: 51734 - DNA, 2601 bp, Bovine  19866881055052
  misc_feature (1)..(1): n is a, c, g, or t
nttctcctgcctcctcactttactcacattttttaaaatacactttctactgatctgtttcataataatctgtactataactagttgaaaacatacacagattcaaattttggcttctcaactcttgaagggaatggttatacaacataagtcataaagtaagcattgggaatgtaggaagagaagttctaggaaataaccctaccagtgagccaactgcttaaaatggccaatagaacaactgtttgacagaagcgatagatattccacagtacagatgttagtatgacagtacagttaaggtattcacttaaaggggtaggaggttgaagttagagatattctgattcaatctgtaagctgttataattatccctgaaaatcatttttttgttaaatgcattcattttgatttttaaataatctaggacttatgcattctaaaccattagccaatcagggcatatgcgtatttcattctctttactgaagagctatatgctaactcatactaaattttcagtaactcattgatagtaccacttacagtgtagttcaccaaatactattggtcagaatacccagtatcttctctgcagaccaagagtcaaattaacacaaaaagccatacaatagtctgacttgtttttaactctaaaagctcaaaagttgtaaaagtgaatattggactgattttttaaaaagtttctaaattagaaacagtgttctagctttagatttatagccttagaaaaaggaatttggggggatgtcacaatatggagtgataataattctagaaaatagaaatttatctttgaaaaggtaaacagtttatctgtgttcacttattggcttaaaacctagaacaaagaagcaacaaacatataagaaaataaatagcaaaacatacttataagttttttttaaataaacagaaataccctagtcttgaaagagtgtaaatcagtcctgcctgtaacataaatatttttccagtaaccttgatgtaacatagcaccataaaacccttacctctgatgtataacctctcctgcaaggcagaaatgaagaaatcagtattaaacaccctggatttacagataaaatagaattatagatgaaggtaatttaagaaaatcatagaaaaattgagaaggtgattttttctcaaaaattgtctcaggagaaatatattttatggcagtatcaaaacaggaagatcaagattttatgcctacattattaaacaccattatcactccagactctcatgccatctgaaaactaaacaatacacaatctgtattgactctgttatgatcagttagattaaaaatattctacatcatgtctgtcctagaccagtcttgatatgtgtgatactcatttgggggaaaagatatgcttgatacatgaaaaacatattggcacaggacaaaaaatattacctccatggctagaacatattcttccaaatgtttgtaaggttttttgttttgtcaaattattctaaaaataataaatgcaaaataatgactagtctttacatgccaattatgttactagacatgacatgaaaaagattttagaaatataatagccaagcattcaatattacatagagatttatgtagttaaatggactataagttgttgaaacatttgactgtacttgagagggaaaaaagtatggaatgttttcaatgtcattaattatgaagatttttatttattattcattaaacacttgacctaaagtattacactaatgctgttgaccatgctatatgaaattaataaacaactgcaatgaaaatttactatgaacactctctaaagtccagcaaaagaatctgtagaaaatttatttaaaatattccaaggactttataagataaatctgcttatttgaatacatcttaagtgattataaggcattgttggtttaataatggttatctagttggtaataatggtaatctaatgcttatacacatatattgctgtcagcaatttattgcaatagttctgtcttatctgtggttatctatctgtggtttcagttacccgtggtcaaccatggtccaaaaacattaaatggaaaattctaaaaagaaatttggtatgttttagactgcattctgagtagcattatgaagtctcactccattcttctgtatccctcccagaacatgagtggtctcttggtccagtatttgagatttcaggcatccattggaggtcttgcaggatgcttatgttgtatggttaaatagggggatgataaccttaaagcatttaaaagttgagacattttcaacttttactcaatttgtatgttttagagatatataaagttgagagctcctacttaggttttaataatgactcgagtcatagccaataaaacctatatttcattttctaggatatttaaattgcctcttttcattggcattacattccataaatgtaggaaataaaatatcagtagatgaactatactatttccattaacctttttcttgccttttatttggctatttgtattgttttgtcttatctcaaaggcaaaacataactcagaaaaagtaaaca

SEQ ID NO: 51735 - DNA, 1128 bp, Bovine  19866881057948
  misc_feature (1)..(1): n is a, c, g, or t
ntatttttagtgatttgagctcatgtacacttgttaccttatagccagtaagtctatttgccattgttcaataatgaataggtatggaaagagggaatatttgccagtatcatgagtcagtaaattgcttttccccttttacactgataatcacatcccttgaaataactcagcttctttaaagaaataaagataacaaccattttatgtctttttgaagttgacagataattttaaaaatgtacttccattagtaatgtcattaaggatgcactgcccaacttcttctgacctccctgctcaacaacttttatggctcccacttcaaagtgagagaggagtgcacagactcaaaaattgctgtgaaggacaagcaaaaactagagtgaagctccctctcagttttgcactgggctgataaggtgctacatggcagttcacacctttctcatagctatattttctgtttgtcctcaaagttctttatatagacctgaattttatgaaaataaacagaaatcatttatctaaataatccaaatgggtatgaatataaaacattttgaataagaatgaatcattgaaaatgcataagtaatctacgcagggagttttcaatggaaggagggcaggcctcatgctctcctttaaggtcttgtcccagtatattctacccataaaggcatgcttttacatctctacagaatttgtaattcttggtgtaggtatcccagtaatgggtttccacctttatcaatcagaaagcatatataatagacttctctaaaatataattaggcagcaaaaggcgtagatataatgtgtaagaaatatattttccagcttccttttaaaatgatgtactataaaatagtatagtcaataaaagcccttgtgcatgatgtgttgtccttattaagcaattatttggctgactgcaatgttaactggctgactcaactttgacttcagtgattaaggctattcacaagttttcctagcatacgttcacagttttgtccagtgaaatctttatttgactacagacaatcagccgatgtcccagcaatgtgcatgcacagataagtagccgcaaatcaggtcccataggaaggtgtatattacaaa

SEQ ID NO: 51736 - DNA, 2539 bp, Bovine  19866881162987
  misc_feature (1)..(1): n is a, c, g, or t
natattaaataggaaaataatactctcaaataaatcaatgtttaaattacacaatggtctaaaatgtaaatcaacaaacttaaaaacttaaacggaaatgcacacaatatgattaattaaaacaaaaaagtcttgaaagttatccagcacagtgatcaaagatgaatgcactttattaccatcttgccttatgcccaagtgattttactgacagctttcaaataattctgatgtcaatcatttaacacctggcattagttgaatctcttttccaattaaagtgtaaaaagtttactcacgtataaataatacatttaagatacgtacatactccacttaccctgacttgacccacaaaggcattggcttcttcttctaccactgacagatttctgggcagataaggatcaaagactggtgcgttgtcattgacatctgtcaccaccacgtttaccgtggcagttgaggtcttaaagaaaaaaaaaaaaagtgattaaatgtgagaggaggtatttttattttgatgtcagttaattggttatctgggcatttgtctatctgaaaagcatttcattaccattcctattccttagctttccaaaaaaagacaaggaaaaaaaggaagctcgcaatcttcaaacacctcaaaaataaataaataaataaaagtcagatgggaaaaacaaatgatgacattaaagggcaagcatcttcttgaaaatgtcaagtatttcctggaggcttacgttcagaaagtgcttttacctttatcttgttcacattttatggatggtaagcttttatttatatacacatgcacctcttttttctctgaaaagtaacatttctggagtttttaccatgtacatgttgcactgttcaaaaatataactagtacattataagataacatggtataccaaatgggtattttcagataaggaaatactaccagaaaatactacattagtaattttctagatacacatctaaaccaaaagtttgagtatcatacactgcaaattaaaaaaaaaaaaaaaaaaccttatggttatacagcctaaggaaatggtaagtgggcaaccctaccagtggtatgtacttcctggttaaaaggtgaaatccctggcctgatgcaacctgagactataatttaggtcaatgacttttgcataatcaaggaacatcttcatacctgatgcaaatggaaactgctctttctaatcaaagcctgagtatagtttatgacctccacccatctctgtcacatggtggggaagatcacagaaggctgagaccaaaatcaaacaaagcaaggatgctagtctggaaaatgaaaaacccataacaggcaaataataagtaggaggaaaaagcaggacgaaactatcatgggtgaattatttacatttctttttataaaatacaaaaaattatcctaatctgtttaagtaaggtgagtgaaagactagagaactgaacataaagaaacgacttaaaggaagtgaatctgaagaaattttgcagtggtcatgggactatggatgtcaaaaaactggatttcccagataatgactatggtatgataactcacctaaaaccagatatcttggagtgcaaagtcaagtaggacttgggaagcaaccctatgaaccaagttagtggaggtggtggaattcaagctgaggaatgtcaagtcctaaaagatgatgctgttgaagtgctgcattcaacatgccagcaaatttggaaaactcagcagtggccacaaactagaaaaagtcagttttcattccaatatcaaagaaagacaatgccaaaaaatgtgcaaactaccacacaattgcactcatttcacaccctaacaaagaaataccccaaattgtccaagctagacttcaacagtttgtaaaccgagaacttccagatgttcaacctgccttttagaaaaggcagagaaaccagagatcaaattgccaacatccattggatcatagaaaaagcaagagaattccagaacatctacttctgcttcactgactatgctaaagcctgtgacttgtgtatcacaacaaactgtggaaagttcttgaagagatgggaataccagaccaccttacctgcctcccatgaaacatatatgcagctcaagaagtaagttagaactgtcatggaacaatggactggctcaaaattgggaaaggagtatgttaaggctgtatattatcaccctgcttatttaacttatatgcatagtacatcatgtgaaaagctgggctggatgaagcacaagctggaatcaagattgctgggagaaataacaacaaattcagatatgcagatgacaccactaatggcagaaagtgaagaggaaccaaagagtctcttgatgaagagaggacagtgaaaaaactggcttaaaactcaatattcaaaaacgaagattatggcattcggtcccatcatttcatgccaaagcaatggggaaaaaatggacacagtgacagacctcattttggggagccccaaaatcactgca

SEQ ID NO: 51737 - DNA, 715 bp, Bovine  19866881199458
  misc_feature (1)..(1): n is a, c, g, or t
ncacttataataatgaaagtgaatgctctgaattttactaagacattccatgcaagaattaattcattttcatctagaatctaaaatgtgctttcatgtttctattgcatagttgtttttttgctgtataacaacggtgatcacataaccttttatccaaactgggacacttttgaagatgaaagaagtgttatgaataattatacaagaacaatagtcataaatatgaactgtcctgggcaaacccaggactggctatgattcttgttcaaaatgtgtatttcattttaaagtatacttaaattattggagttatgtaaaatttgaaatgggatgttcgttttgaaaagaaacatctttgtctctttgaattagatgggttttaatcttttaatattctatacttggtgaactatccatcttttctttctagtttcacctttccttgttatttaccactatactgaataaaccactggcagaaatagataaaatgaagatgacaaatctcttctttgtgacacttactggctgttaaatgtgcatacagctttttaaagtagaattcttcttcaaagtctagaagaggatacttcattttatttttctttagcctcaaaaacagaaactggggtcaagtccaataaaaaaattatggccaatggaaaatgaagcattattaaaataagaaaacgggaagaaattgaaagactta

SEQ ID NO: 51738 - DNA, 1691 bp, Bovine  19866881263723
  misc_feature (1)..(1): n is a, c, g, or t
naaaaaaaaataaattccattttcaaccaaggaccaagatatcaatctaattcacactttgaccttcaaaattcccccttggctacgcagggtttactgtatctaagcaaccccccatctctagtttttcatctctggcagagatggctctggaatattgggtaaaaattacaccacaggagggtgtccccccaaaaaggaaaagaatcactgagaggttgtgaatttaccaatttaccaaatatcttttacatgtgaaatatctgagattctttttatacctaggctcttttaatactgaacagatgtcatctggtaattcagttctgggccaggtctcatgcacagaacaatgcatatattaacagaagctgtttgttcttcaacaccttttaactgattgtctgtacatataaaaggagcaaaagtgaatgccttccatgtaatgtcaatttcacaagtatgttacttaaaaataaatgtttacactgtatgttatttgaaaccagtggctaaatatatttgtatgacatcatattctaattccattgatttactggaatgtactgagagtatatgtctataaacccctataatataaatctacaaatttattattttaggaaataaatctatattattttcagcaaactatatatcaaaaaatttcatacatgttttaatagtaacaggtattttattttaactcctcatttaacttactttctccaattaagagtagttctatatttctgaaaaataagcaaaagaaagaatcattttccacaagttctatcttctttaaattcagttcagtcactcagtcatgtccaactccttgcaaccccatggactgaagcacgccaggcttccctgtccatcaccaactctcggggcctgctcaaactcatgtccatcaagccagtgatgccatccaaccatctcatcctctgtcatccccttctcctcctgccttcaatctttcccagcatcagagtcttttcaaatgagtcactttttgcatcagctggccgttttattggagtttccacttcagcatcaatctttccaatgaatattcaggactgatttcctttaggatggatttgttggatcctccttgctgtccaagggactctcaagagtcttctccaacaccatagttcaaaagcatccattctttggcactcagctttcttttttttttttttggttttcttttttttaaattttatttttaaactttacaatattgtattagttttgccaaacatcagaatgaatctgccacaggtatacctgtgtcccccatcctgaaccctcctccctcctccctccccatacccgcccctctgggtcgtcccagtgcaccagccccaagcatccagtatcgtgcatggaacctggatcagctttctttatagtccaactcacatccatacgtgactattggaaaaaccatagatttgactagatggatctttgttggcaaaataatgtctctacattttaatatgctgtctaggtttgtcataacttttcttccaaggagcaactctcttttaatttcatggatgcagtcaccattttcagtgattttggagcccaagaaaataaagtctgtcactgtttccattttcctcatctatttgccaggaaatgatgggaccagatgccatgatcttagtttt

SEQ ID NO: 51739 - DNA, 1224 bp, Bovine  19866881634368
  misc_feature (1)..(1): n is a, c, g, or t
ncctgggctgggaagataccctgcagaagggactggctacccactccagtactcttgcctggagaattctaaggacagaggagcctggcaggctacacatcatggggtcgcaaagagtcagacatgattgagtgactaacacacacatatgctttattatattctgttaaacaaggagtttttaatctaatgaagacagtacagatattggcttgtgttggagactgagatgcactactcaggttccccttcaagaaaagacattctgacttcttaaagtgatgtaggaagatgtccttcagctgccagacacttcccagaatatttcagtttgcacagagaagggtcacacctttctcactgtagcccactgactgatggccaagtgcaaagaccttctcattttgacccaatctggaataactcaaacatgcagcgccaattccagagctccttctggaattggccaaaactgttgttgatcctgtacagttagatttttctcttaatacaatcctgcttctgtctctgcttttcacatgcatggatctgatcttattcctgtcccactgtctccttcacagggaggccagtttgcaagcaaaacccttatatagcacaatgttttccctcaagccatgaaagaatcaaagataggaggctttttttggtaatttttaatctagatttagtctacaaaataaataaataaaggcaggcaatatttctttggcttgttttctccctattcagtttatgatatctcagaaggattagttcattgggattctgaaacccaggcctggaaatattccctataggtatcataactcatgatgtggatatacagaaaatatagtctctttttcactgtcatattccttctacctcaacatttttatagagagttcttctgagcctacagtcttctctaatggttttacgactcttcggtatcatacttatccaagtcttcacagacagacttttgtcaaaatcaatcagtctttatgaaagtagcaagaataatgcttcctctgggcaaaccaaatcaaagtgttcgcacctgtcatgttggagggtagttttcagtctccaagtctttagattttaagtttgaaaaaagtcaataactttcttctttattatctgcaaagattcttggtagatatagagtttcgatttctcagaataatatgcttcattttaattcctgatttatat

SEQ ID NO: 51740 - DNA, 1353 bp, Bovine  19866881742266
  misc_feature (1)..(1): n is a, c, g, or t
ncttcttttgttggggggaaaaaaaatgacgtgatggtgaaaagttgagtccccagagaatttatgttgtgattttcaattccagctcactgcagtcgacgcagacgaagggtcaaacggggagatcacatatgaaatcctggttggggctcagggagacttcatcatcaataaaacaacagggcttatcaccatcgctccgggggtggaattgatggttggacggacttacgcgctcaccgtccaagcagcggataatgctcctccagcagagagaaggtaatttatatcagaaccaatgcagtcttttcatcggtctggtttaaccccataattaaatttaagaagcgcagcgagcattcttttatcttataaacatctaaattggaccagaaaatcagagagactagtttctcaggaactgcatattcttcttttgtcaaattgcggaaaaagtatgataaagtcaagattaagccacaaaataatgaactatgattccaagatgtgaaggatgcaagtctctgttgggagggggagtgggaactgggaaatatcagaagcctgtgtccaatatattaatgaaaagtaaggttgctactgagagctcatagataacgtgcaacacatgatgtctcaaggatttgaagccatccctcagtgtctggataattatttttaaattatataaatatatatatataattttatctagaaaatcattatatataatataatcttatatatatgtatacatatatatatatatatgagaaaacattaagagaaagcaaagtaaaaagactttcaattattacaactacatttatttattcccccacctgagatcttccttttatttcttgtttgttccagatttcaggatgcattttaagaaaatgtaaacttaatattaatacattattgaatctttctaggaactttatgtctcttcatttgcccatgttttcttttgtatcctttagtagattttattttcaaaatttttttttgcaaatgtcctatacatttttttaaatttaatttaattttatttcttaacttaacaatattttattgattttgccatatatcaacatgaatctgccacaggtatacacgtgttccccatcctgaaccctcctccctcctgcctccccataccatccctctgggtcgtcccagtgcaccagccccaagcatccagtaccgtgcacagaacctggactggcgactcttttcatacatgatattatacatgtttcaatgccattctcccaaatcatcccaccctctccctctcccacagagtccaaaagactggtctatacattattggctcttctgctggct

SEQ ID NO: 51741 - DNA, 1039 bp, Bovine  19866881824620
  misc_feature (1)..(1): n is a, c, g, or t
ntttgagatgatacttatggatgagcttaatgatacatttggagaagtacaatttaataggagtgagtcagcatggatttaccaaaggcaatcatgtcagaaaaaatttcgttcctttttaagttgaagtaataattggtttatgtaagggagaaccaatgagaaactgtcaggatttttggagatttttggaccttttcataaaatgaattattgtacaaaatgtcatggcatgtgtcagggtacccaactaacaaaaggggatgaaagtaagggggttaaaaatagagggccaaagaattcaggaaagactacattccacaaagcttcatatatcagaacgctaacgtttttaattaatgatgaagaaaaccttttatattaggaaatttgaatatactagtaaatgagagggaatggttaagatacaaaaggttacagctgttttatcttaactgtgatagattaagcaaatggcctcagaggtggcatatgaaatttaatcttcctgagtataaagtgatgcacttggatagaattaaggaatcagttaaaaatagtttaaatggtactgaattgcttaccattaaaaagaaaagggatttggaattttgataacagtcaagcttttacatttttattcttataacttgataagaggaaaatgcaagggaatgcagttaaataatacacatcacaaagaattaaaagctgactgccttactgaagaataaaaaatcctaatttgtgaaaagggtttgatagattcatgggctatcatcttgcacaggcaataatctaatatataatgtaaatgactatatatatataagaactaaaaaaatatatcaatacaaatatgatttaaaaatatgacagcagaaaaactaaggaaccccagaggtgctatgtgctcagtcgctaacctggctgtgtgaccccacagactgtggtcctccaggctcctctgtccatgaattttccaggcaagaacactagagtgggttgccatttcctacttcaggggatttcccaaacc

SEQ ID NO: 51742 - DNA, 1380 bp, Bovine  19866881869818
  misc_feature (1)..(1): n is a, c, g, or t
nacaaagtaggaatatatggacagaaaagaaaatatggactgtatttttctatggaattaaattcaccaaaaaataatagatatcaggaaaatacatagtgaatatcattgtagtaacaatccacttagaattgagaggctatgagtcaaaaccttcactctttattctgccaaaataggtcgagtgatagtttcaactgaggaaaaatcccacactaatattaaatataaataactgctaaagggcaaacagaatgacatcctaacactggcttaggggcaaagctagaaatgcaagggagctaaaccctgagttgactacataaaaacaaccttggtataaaaatgtctccttaaatctagttttgaaacacctgtttatgtacttaattttttctaacagaataaaaaatttgataataagaaataaatataatacaataataacaaatctgaataaattctcatatggaaaatatttttcaatgactctgacagccatacttcttcaaaatcttgtctagaaaataccgttagtgaagcacgaattagtaactagtaactcacaatacaaaatcttgatataaaactaaaactttttaaaattttctatttagcatttgtgtttttgttttgtttttaaatttcgacttgaaataagaaatgtgggaagcctaacaggagcaaattaaaatggcattttttcttttgccatgcattctgtaaaactttcttattcactctcaatcttccagaaagtatgtatcatagaaaagattcttgaaagaattatacaactccagcatttgaggagacagtgatctagaattactttaaaagtaatcttcaccataatggaatgctgcaggagggctgaaagtttcacttttagaaaataacaaattgcatggcatttaataggccttgactaaacaggctacagccttggaaagaaaatcactttcagcactggccttcttgctaatgtattgaattcttctataatacttgaccctgccagaggttgcataaggtttagctggagctgtgtcctgagggcctggaatgagttcagaatcataatgtaccttgtttttggtggcagcataaggaattgagaagaaatatcatgaatggtataggagagtcaaataaaactaaggatacagtgaatgtaagcaatttgaactaggctagatcagaagaatagtagtcaaagtcagatgaggtagagacagagaggagatgagaagggacatagtaaaaagaaagcagagtagaaaaaagtagaaagctgcatagcagaaagcagcaatgtggagtaatccctgagtaaatttcaggaatatttgattatattcttatactttccattactgg

SEQ ID NO: 51743 - DNA, 1344 bp, Bovine  19866880140302
  misc_feature (1)..(1): n is a, c, g, or t
ntggtttgccttggaaacaacagagatcttctgttgtttttgagattgcatccaagtactgcatttcagactcttttgttgacctgatggctactccatttcttctgagggatccctgcccacagtagtagatataatggtcatctgagttaaattcacccattccagtccattttagttcgctgattcctagaatgtcgacattcactcttgccatctcttgtttgaccacttccgatttgtcttgattcatggacctgacattccaggttcctatgcaatattgctctttacagcatcggaccttgcttctatcaccagtcacatccacagctgggtattttttttgctttggctccatcccttcatcctttctggagttatttctccactaatctccagtagcatattgggcccctactgacctggggagttcctctttcagtatcctatcattttgccttttcatactgttcatggggttctcaaggcaagaatactgaagtggtttgccattcccttctccagtggaaatgtatttagtgatattgtattctctcggctgttggacacccagaaacacttaccttatccacagaccaaaagctctaaaataggccgtgctgccatcttatctatagagatgaatgtatcttcccagaaaggttatttcacttcaaaccccttaatccagaggctgaaaaattcccattgtctccccaaatagtattaaaataggaaaattcaaatcactttgccgtattgctgagcgtataagactcctagacctaacttcctaccttcaccctgctctttgtgcctcattacttaccggttaaaatggtgtctaaaatagctctgaaatacttactacctttggttatcagagatttgggaaagtggaggttggtgctgagaaaccttgtttgtgctaactaggactaacgatctaaatgtcaaatgctaatagaaattcaccaaaggatttgcttaaaaaatggcgaaattcattattttcagaattttaattggttgttgtttgaactttctggcttctctctgcatcaaaaacgcatgcaagatttattttgcacaagtatgtcaagtaatgctttttgaccaaatcaagcagacttaacttaatgactatagtggtgggcctagtcccaattgcattaattggtaaaatatttatgacccacagtatcataatgtatgtgcaaatataagtgggatgttgagtgacccagataacattgagagtgccttgtctaggattggattaattctactaaacattgttctttgatgctctttgggcctaaggacaactgaacagaaact

SEQ ID NO: 51744 - DNA, 921 bp, Bovine  19866880367694
  misc_feature (1)..(1): n is a, c, g, or t
nacatgagttttagtaaactccaggagtcgtgatggacagggaggcctggtgtgctgcagtccatggggtcgcaaagagttggacacgactgagtgactgaactgaactgaactgagctcagactctcaccagctctcctctgaatcactgaaataacattaaaaatggtctcctgagtgctaagatttccctttccaaatcattgtctggatttggaacactgctccaaatagctttgtgctttcctgccttctatgtcttctttaagatgttcagattgttctgatgcttagaaacctctttcccactcccatacctgttactcaaagtactgaatcatttcttgctgtctagctcaaattccatgaaccatacccaacttttactccttgcaattagtctcattccttagctgtttttcctctaaaacattgttgtacctctattattgttcttactcagtctgttgcaagttatatatcatctttgattcacccaaaacatctatataagactttattcatagtagaggggcaataaatgctattttaaattttacctcaaatggcacaaagttggatcaaatcagaatatctgataataccaaaagtaagacttataagatgcttactttgcagccattgtaactcgtatatttccataattttattatttttaaatttatgtatcttacagccatttaaaatgggtcttaaacttcaagatcctacttattatttagtttggagagatgctagttcacagacacatttatcttctttggctcagtttggtttcatatgggaaatctctttttctgatatcttgatgaaagaaaattagtctgtccactgaggtgaataatgccttagataaaggacaagtcaatgcccagatagctgtaaaattccactgttgca

SEQ ID NO: 51745 - DNA, 646 bp, Bovine  19866880431242
  misc_feature (1)..(1): n is a, c, g, or t
nttgagttttttctatgctgcatgtaatgaacataggctgtaaaagaataccctaaaataaaaatacatggtggcatttaagatgtttgttgaacttgaagtggttactcatggtctctcttagtgattacaggttttcatcggaccctgtggtttgcattactgtttgcaaagctggggaagacggactggtggaagaaggctgggtgcttttcctctacaaggtgggcaccttgctaactctttgagatgctaagttggtaagaacaggaggtggtaaaagtcccgaaaaggaaatatcagcaatactttctgcttacaaatctctgacctactcaatttatcaagtgaggatattttacattttaggttaactagttcttttttgaggtactcaaacctcaggagacagaaggccatctaacaatatatcttaatgtccatagttttaatccgatcaacaactgggttaggttagtttcaagggagaggcttgaaagcaggaggtataaagaaggagagaaatggggggagagcagaggcccaccaaggtacagggacatctctctcctttgctcttagagtctcacaagtgtatgtcacagactggaaccccagggctgtatacagacccacactgttttga

SEQ ID NO: 51746 - DNA, 1067 bp, Bovine  19866880574101
  misc_feature (1)..(1): n is a, c, g, or t
nggattaggatcagggtctcattcccacagaggaattttgctgggtggtctctggtgtctgtcacttttgattggattgggcacaaaaaataaatgtgtcataaaacctctaaaaattgttcagcagcctaaagtcacagaaattcacccagcttgtttattttggggaggtactatggaaaaaaatgcaactctcaatgttcttgagataaaaaaatgttaatagaattttagaaatgtcttttaattggagaatctcataaattcacatgtaaataaaggatgattaataatagaggcactgatatactgatatgtacaattttttggtctcacacaaacataattatggactgtaaggggtatgctggctttctatggttttagtttattatgtttttgagggtacataaggcataatagaaaaaaacaaacagaaaacaaaatatcaccttcccaacccaattagcaacatctcatactatgtaaaaattaaatcatctttaagcactttaaaaacaaaaacttccactgtccttggtctgtgggcagagcctccctggagaaaacaaccttatactaggtacaatgtaactatctgtgttgcaaatttatgtaaaatacagatgcagcatacagagataccataggccaggaaacaaaaatggacatatgagggtccgttgtctgaaaggaagttaagagctagggtcaatattaactccaaagattaataaatcttgatagtctctatgcaactaaaaaggatagacttacattattatctttggtttgcacagggctttaagtatttagaaggtaggttgactctaggaagcagaatatccattttttcaagcgttgcctttctaaaatgtaatgagcggcagtttttatttatgagaaccaagaaaaactttgtctagttactacatttaaaactgtgtgaatctctttactatgctgaaagcttgtttcctttggtttgttaacttaagaactagcattattgaacaataatgtgttatttctacaatataatatcaacttattagagattttattgg

SEQ ID NO: 51747 - DNA, 936 bp, Bovine  19866880588368
  misc_feature (1)..(1): n is a, c, g, or t
ncaggtaagaatactggagtgggtagccgttcccttctccaggggatcttcccaacccagggatcaaacccaggtcttccacattgcaggtggattctttaccatctgagccaccagggaagccccaaaacaacaccttaaaataattgaaccaaatatttaatgagcactttccaataaaccagggtgatttcagtgaaatgttgctcagataccaacaacccagcaggttaacaaaacagacagaacaaacccacacactccaatacaggcaaacatgtctttaagcccccaaaagacattttcccctctttagttaaaagcaattaattcacatgtatactcaaaatcataaaaacacagaaaaaagattagcacaaatcttagtcctataattaaaattaactgtgtttatcaatagaagcaatcactccatgcattattcaaggcctcctgctaggaaccaatagcaaaagagagagtctcaataaatttgaaaaaattcaacaggtaagaaatctcaatttatatctgtttccaaacagaacatcaaggtgaataaaccagacagtgaagccactgctgattcttctcccggttgccagagatctccctccaaaaaacagcttcatcacactctcagaaaatacagagatcccttcttatgtagctagaaaaggcattttaaagcaaagtaaatcatttttaaaatgttgactttcaagacttccctggcggtccagtggctgggacaccgtgctcccaatgcagcaggcccagttcagttcctggtcagggtactagattctgcatgcctcaactaagacccagcccagccaaataaatacataagacattttttggttggtggtgactttcaacagggacacttttacactgtctagaagaactggacagaactacctaaactaccat

SEQ ID NO: 51748 - DNA, 1259 bp, Bovine  19866880655374
  misc_feature (1)..(1): n is a, c, g, or t
naattggtttgagggtataatttccattatgataatcttattgtagacttttttaaaaggcggagtgcttgtctctgttttaacgagatactgttttaactggatactggcagcaaccccttttaactctcaataatataaagatatttcttaagcagagaatccagtgttaaaatttggcaacaaacctgtgttcttgtcaaaagtcagaaatcacaaaatcaagctgtcttattacatactttagctttctactttgagatgctcagagaggttcaataacttgtccaaggtcacacaggtagattaatacctcactcaaaaatttttcctaggtctttgaaaccataaggaaaatatgaagatcatctacgtagtcaaataatgctgtgacattaatttcactcatgatagtataattcatggggataaaaacatattattatttcatgtattaagcacattatacaattaactgacaaaagaaaaattcaaatccacgtgactaaatgctacaaccaagtagaaaaaaacagactaaatattatactagtctaatgttatggtaaatttggatcaatagatttttcctccccaaacccaatttcatttattgaaattgttttttattgtattaaataatatatcaaaatgctaatttactaaattttagtttagagttataaaataatagttcaaggaaagattaagattctattaatctttctgtagatgagaaaattgggagtcacagagattaagaggtgttccccatatcactcactagtcagggcagaaagaggcctgagatccaattcttggcctactgactcatattatttcctttggttcctcacaccttccccctcccattttgttattaatcaaacaggaatgtgaatgtatcactcaggattaattggtttttaaagggactattctattttcagaatttaatttaattctatcttcaaagagcccagataagattctcaatctatagtggtctataggcatctccagaagtttaactcaagccaactggattaattcaagctaattaaaagatgaattatgattcatttaatccaacatgtactgttcacccaccatgagcagattctgtgctaagtgtgttaaaaagatgaacaagatacagtcaagagaactcactagaaagcagtgtgagaggatgtgagacagagtctgcacaggtgcaggtaggtgctaggagagcaaagaggagggcatctacctca

SEQ ID NO: 51749 - DNA, 1328 bp, Bovine  19866880681300
  misc_feature (1)..(1): n is a, c, g, or t
nagactgcagctgtgggctggatcctgtgagccaagtttggttttcatctttagagaaataagcatcaatgcagcaaatgctcatgtagctggcattccaatgaacagtgcgaatgggaggtaaaaagtttcagccaacaatttcctttaccacaataagagctgagtaaaaccaagctacatacagtttcaggaaactgctagtagattatgagcctttggaagggatttattgtttcctggaagttcagagcctacttaattatggggagaagttcagtaatattgctgaactaaacgacagctataattcagaacagtcactttcaaagttttcagcctgtggtccaactgggagcacctgtgcccctccgggttagagccctgtcttgtctaaggctcctgattccaggagaaagaaaggtcacctgcagctggggaatgagacatggttcacgggaacacacacacacacttcccacccgaccttcagaaacagggtgcaaagccgcttttaaaaacaaacaagagctgagtggggaaggggtggcatttaaacacttgtgtctgtgaattataatctcgactttccaactgatactggcttgaattttaagcacttccttcatttcccacaagtaaccatcagttaccaccagcagcacatagttccttctgtgtcagatctaaagctcagtgattcttataaaaagccagcagtcccttctgatgttacagggaagaattgagggcaaaggactggagttggcttacactcatacggttttttcacacagagaacaaaaccaccagagcataaaccccactttttgttgaaggtaattaaatgcaaacacacttcagcaaaatctctaagatccaagcttgaagcccttttattctattactcttcactacatcctcttagcctgatgactgaaaactggaaacagttgtccctgccattagtgagggttattgagagtccagctgtaattccatccttcttttctgactctaagttatatcccaaagggaaatatgtcatgcttgtagggctcacatgataatgccttatcccatcaagttttaatggttttataatagagaaaagcagtggcaaggattatttgaaataaggtataatcctaagtgacatgtttagaaatcctgatttttttttttttttttttaatagctctgacctccccaatacatttaaaatcagcttgcttccctggcagacagcagggggcagcagatcagagtcggctctctctcagtgagagcagtttcaaagaggaaaatttactgcagaaaaatcctca

SEQ ID NO: 51750 - DNA, 1467 bp, Bovine  19866880719646
  misc_feature (1)..(1): n is a, c, g, or t
nctctctctaattttagctgatctgttttcaaattgctgatggagaaagtaagtacagtatcctataaatatgacaggttccttaggtggttgctattttggagatggtctggggctctctcttgtaaagttgtcaggacaagccattgcttctggtgtccaagggtcagcttacagaaagcacatgagcttcctaaaagtctcattcttggtcagtgttggtctctgtttggtgatgggccaatatgggacactcaggtgatggcactggctcagtgcccactaggaaacatggtatttctttgattccttttatttgttttggctgtaccatacagcttgtagaatcttagtttcctgaccagggattgaacccaggccaaagcagtgaaagcactgagtcttcaccactggaccaccaggggattccctctggttctttttttaaaattaaaaaaaatagaaaacaacatttatttttaattgaaggataactgctttacattgttgatttctgccaaatgtcaacacctggggttcttatttaggctttttggtttcttttaagtgaccgctttattctggaatctgatcttttaaaaaaattatttaaatttgcaaataatacacagacatagagagcagagtataatgaatctccatgtaccatctccaatttggtttcatcaatctcccctcaactcaattttccccctccttcctcattcccttcctcttctttccctgcagaaaatgaacacaaaatctaaacaccatccttttcacctgtaaatattcaatatgcacctgtaactagaatacttttttttttttttaaagcaatatgttgaaagtcaattaaggtgttagaaacacactagcaaaatatatcatccagtatccagccaatatccatattttcccctgcactgtcaaagcgctatcaaccctgaatattcattagaaggactggtgctgaagctgaagctccagtacctgatgtgatgggctgactcattggtaaagactctggggctaggaaagattgaaggcaggaggagaaagggacaacagaggacgagatgggtggatggcatgagtatgagcaagctccaggaggtggtgaaggacagggaagcctggtgtgctgtagtccattgggtcacagagttggacacgcctgagcgactgaacgacatcaaagacagcttcttagagttctcctctttttgcaagactgactgatctgttgaaggagctgaatcatttgccccaggattgcttccttaaggtgttgttcagtttgtgtttcttataagctggaagttagatgtggaagcttaattagattcaggctcaacatttttatagcctgactttctattatatggacataatgtgaacatagtaatagttgatcatgggaattagtgaatttccgccctcagaaatcagaggtagaacagg

SEQ ID NO: 51751 - DNA, 1163 bp, Bovine  19866880826376
  misc_feature (1)..(1): n is a, c, g, or t
nacccaaggtgtgaatagtccaagttactgggctacctggtaactctgcaaaatccacccagcccctttatcacccatctgcagctccacacacagaggccctgggagcctgaaatgagtactagaacagctgtcagggaagcaggacagcgtagagactccatcaatactgcacagactcagggccggactccctggtatgaaccccagctctccactccctgacttgtaactgtaggcaaggattctgtgcatccatttctgcatcagggaatacacaggaagggcctgtgccagtcattggtatcactggtagtagaggccctgaaaaaggcattcctgccacatggctctctgtgtggcacacattcctctcgtaacctatcctctgtttcagcccatcttccttcctctctcagagcatttcaggctcctctacaagacaagagacaaacagcggagaccagggacaagaccacctgaccacagggctcctgagaccttaaaaaagaaaggttctcccaaattggttgctctgaaaccaactgccagtgaaaatcttgatgcctcagaaagtaattccctccactgtcaagagcagtggagatcttacaatgaattacttgtctgttcacgtaatagcttgaaactgacacctctggggccacaaagaaaatcatgaggtcaattcaagcttattctgaatgtcaaagggactctaattgatcctggcacctcaggggtgcgggtggtagtgaggggaagaactttataaatcatctagaccaagggtcacacccaaatacccagcgtaccaatcaggtcacaaaccacaaggggactggagccagctggggactgcgtgtcctatgtggtgggagggctgctacttagctccagccaactgctgtcaggggccaaggactgccagaggttctgaatgtttaagagaaactggaaattcagattctgtgggagggcccagcaaaacacacctgcagaacagacatggcccaagggctgccaggttgcacaccctgagccagacagggcaggggttcctgcctgcaagcctcagatccctgaaggtcacgtaactcccacactaatccaaggtgaggaggagacgagggtccccagctttcacagactaaataaagaat

SEQ ID NO: 51752 - DNA, 1958 bp, Bovine  19866880851934
  misc_feature (1)..(1): n is a, c, g, or t
ngttgttttgtgaaatttgctcggcattcaatgtactttcatgaatttgtgggagagaaagtggtctcaccatcctattcctccgccatcttaggaccaccacctgtttctttgtttttagattgatggaagtatggaggaaaacatgctaagagtcagtttaaagaaatgaaagtggctacctgtagagaacagaaattgaaaagaggtagtcagagttctgcttttttctgtaataagtcttgtacagcaatttgactctctaaattatgatcatgtgtaactgtgataaaaaaaattagcactaaattaaaaaacaaacattgcccccattattagagcacaattaaataagacacttgctcatgatcagtattattatgtaacaaacatcgttatactttaaaacattaatccctgacaaaatctctgaagatttattttatataaacatatagaagtagaattcatttgtttaaaatgtctatgaactctttaaagtctttttgtatatattcccagattattttgcagaaaaaaatgtatcaaaatattctcatagctgcagtagaggagaataaatctctcaacatactctcatcaactttattattcttcaatccattttgtttggtataaagaaaatagaatttaattgacttatcaaaagataaattagattctgttcatatgaattgttggcctaatagttaaaaattttagtgacttcctgaaggtatttcatagaagtcaattattaatatccatgtttggggtttttgtctttgatcaggatatttggaagaaaatgtgccattacacaagttatgttatacagactttattatgtttgctgtcttaaaaataagctttattctgagctgaaggaaattaatgatcttagactttaaacatgacctttcattttagaagtagttatgtactttatgactatcttaaatttacacagtgcttctttcttgaaaagacttttcaattcatttaacaaacatttactaagtgtatacagtgttctagaatgtaccatgtgctgggacacaacggtaaacaaaacagtttttgtcctaaatactcattgtgtaggatttacataacagcctcagaaagtccagatactttcagcaattgaaggagaaaattatttctgaaaatatacatgtctctatagtatgagaaatagaggtgaataacttgacttcaacttagaaattgctgcacctgagaatttttaaactaatcatgttcaggagtagtatttgtttacagttaaatgtatggtatgcgtatgtgactcaggcatcaagtggtctctatcctgtttataaaaatggatagagaattccatcttcacataaaatatagagaatgtccacaaattctgttttatctttatacattctgtgtaactgaattttttgtcagaagagagatgtgatcctagtttcgaaaacacaaaatactgttacatggtcatttctgtctttgaattgcattctcaatgacactttaaaagaaaactagatatgggacctgacacatactttaaaatgtcaacattcaattatatcaccatggtaagaaggaaaaacctcgcacaattttcacccaccagacacagaccatcctgttgctctgcttctctgccttagtgacagtttcccatttgtacaaaagctatttctgtgacagaaacatgccttctctttattagtcagatcttgagttataactctctctcttaaaaaaaaaaaaaaaaaggaaagcaccacactgcttagaagccataagaagggcagataaaatcatcttcattctgtaccttccactcacagcactcagagaacttggtttcaatttgaaaaaggcttagtgattagaatggagtcaggcacatttgcagaaagattaataattaggtcttattaagacaatagtgg

SEQ ID NO: 51753 - DNA, 1905 bp, Bovine  19866880932392
  misc_feature (1)..(1): n is a, c, g, or t
natgcttaaaattggctctgaaggacagataagacttccttctaattaataagatccatttgctcacaatttaccatttgtttgttctctggagaagattaaacattccccatctcactcccaccttacccccaggcttatttactctgcttagcaagctttcttgacaaaaggtcaaagtcacaacacttagttcccctatcatctataacagttctcaattagtgaagttttattattaggcttactctgattaatgttgctctaaattatttggaacctatttcaccttaatattgagcgtatttttaagcaaaatgactgaaaacataaaatcctaaagattactttgttattttttttcttttcaaatacaagcactccagacttgtatctgatgtgcacaaatggatggatgtccaacacttaagagaaagtaaggtgttatgagaatcatacatcaccagcatggataattgcttaaactctgttgaatcagtgatgttttagggcatagggggaggtgagaaaaggtctattcctggaaggggttagggaagaggtattcaggtctggtttctaagtgtttgtagttagccaaggtgatgtcctatacaagatagtagaatgtggaagactagtgggaaggaaactcggcaggaaccatgtacaaaacactgatttatcatttctgtctttcccatttattcctgattggaaagttttccaaaggaaatataatgaataagaatccctgtaggtaaatatgtggttaagaccatgaaacagttcccttgaactgattacccatgaaactctttttcttttcagtgattagatgcatcccccaacttcttgggctttcctggtggctcaacagtaaagtatatgcctgcagtgaaggagataaaggagatgagagtttgatccctgggtcaggaagatctcctggaagaggaaatggcaacccactccaggattcttgccagggaaatcctatggacagaggaggctggcgagctatagttcatggggtcacaaagagctggacacaattgagcacatacacacatcctaacttcttgcccctagtaagtaaaatctatttattgtggctcagacagtaaagaatctgcctgcaatgcagaagatgtgggtttaatccccgggttgggaagatcccctggtgaagagaatggctacccactcaagtatccttgcctggagaatcgcatggacaaaggagcctggcaggctacagtccatcaggttgcaaagaggtggacaggactgagtgactaacactttcacttcttttttttttttccaagtcaaaagaaggaattccattcctctaccaaattggaagcctttaaatgttgactgctgttatcttagagcatagaaattgaatcccacctcctttaaaaatagatgtaattaccatatggtaatgtattattaccaaagttttgaatttgagaaagcaaatttatgcagatgtcatgaggtagaaattgtactttgtccattttatttctagagaaggacttgtaactagtgaaccttgaattcccctttatgaatatttcaggcaaattctattactaatttatgaataagagctgtggacttggaatccgactattcagtagccttctttgtagctttaatcattttctggcaggtgcaagtgttttactagtttgttctccagtcaccaaatgccccagttttgttgatataacttaggaaaactaaattacagaaactaggttaaattcacaagctactagccaaaaagttctgagctaaggtactccatctacctgacttacctgaaacagctctaagagacaagctgaggctttcaccatttctgttctaatattaggatcagactgt

SEQ ID NO: 51754 - DNA, 991 bp, Bovine  19866880974775
  misc_feature (1)..(1): n is a, c, g, or t
ntgaaccctggctgcctccaattttgagaaaagttaaactaatgagaagagctaaactacgtagtttcagagtaaggtcagatgcctcctctgtttatacagatcatatctgcaaaggtattaagtcatcaggccattcctggagcaaggggaaaatcaaatgcattaatgagttagcaatggttctaactgtctcacgtgacatacctaaaacaaagtttactttccttctttctgattcactatgtttaacaatgacttcacaaaggaatagtgagagaatcagaaagctgttcacctcatgatccaaaacaccaaagaggtggttttggacattagaccaagatgataattcatttttatcttacttctaagttggctaactctgaaatctgttgaatttttaaatgtctgtttttttatcctcttagagaagcggtcagcaattttctcactgccctcagtttgcaaagaaagagcaggaatcagcagcaggtccctcatccggcaatctctgggaatatctgggctgcccttagaattgccctttctctcatggaccagccggaactcttccaggcggctaatctcggtgacctggatgtcctcctaagagctttcaacttggatccttgaaggaaaaggggggaaaacccttcacctgtgtaattgtactgagaaatgcaaaactattttattatgaattccaaaaaaaaggataaaaacggatgttcaaaaggccatggtgatataacccaagggaattcccacagacaatgcccagtctctgttcaaatacaaaaagcacaaaacgttgcatagagtcaagtttgggctcgaaagaacggagagacacaagacaaaaccaagataaagtgaccgtgtttgaatacgcttcacaagccatgagcacagtgcacgtatgttccttggggtttttccaagtgtccacttgcagctgatgacacatctaaggaactgcttatgggca

SEQ ID NO: 51755 - DNA, 1161 bp, Bovine  19866880988444
  misc_feature (1)..(1): n is a, c, g, or t
naaatcctggtatcaatcttcttagacagtaagagaatttatattatacaaaatatatttacttggttttatttttaaaggaagaaaaagcagggggaaaagactatcaaggaatatcttttacctgtgctttttaaaaataaaatatgaatttgaagccactacttaaagcctgggtgtgaggaaaagtacataggatagaaacaacatttgaccttttactagaatggggataagttttctggacccagaaaaactagtaaatgataatagctctgttatgaaaagaaaccaagcagaaaacaatgattccattgtgaggagagcttttagttctctttccacacataaatggattgcttcttgatccacactctttaattctaccactccaacagcctcttctatccacaatgaacaacactgcgtgatactagaagagaagagatggactagcttactctcagacataagcgttttctgggcaagtgtttataaaccataaaccatctttactaagtatcagttgctataagttatttattatattttagacatgtcctttataattcacatcgcttcagaacaaaagacattttttaaaaagaacaagaaattatgctgggagcttctaccctatgtgccaatggactccaaaatttggtaactctaaactggatcacacttctgactgccagacacctgattctgcttcaaattcaacatacccaatattaaattcatcatcttttcctcccatccaagcctactctctttatgtttcttatctttacctaacgataaaactgttattatcctattgatctcttgatggaactgttatctttcattttattcaagtataattgataaataataactgtatatatttaaagtaaactaaggacttccctggtggctcagatggtaaagcgtctgcctacaatgtgggagacccggttcgatccctgggtcgggaagatcccctggagaaggaaatggcaacccactccagtattcttgcctggaaaatcctatggacggaggagcctggttggctgctgtccatggggttgcaaagagtcggacacgactgagtgacttcactatctatctaaagtaaacaagtatacattttaatgttttatatatgtatgcatt

SEQ ID NO: 51756 - DNA, 2785 bp, Bovine  19866881141911
  misc_feature (1)..(1): n is a, c, g, or t
ncaaaaaataaatttataggatgacctttctaaactcttactattcagataatactacttccaaattggaaaggcacttccaaatagcactctctctttataactaaaattgtcagatctcttgtggaagagaaaatataagattctctgtataaatagtcaagggagacattgacctgggataaaatcagtggtcagtagcaccttgctggagcattatcttacatgcctcatttttaaattcaaatcattattgtgtaaactcactttatgtcagaacagatttctatagattttaataaatttaattacttttttaatattatcattttagtaacccaaaagagccaaaagtagtctatcagggagcataagtaagatgtagttgttatgtatttgccttttgtccttcctggaaattttttaggttaaacttatgacattttcatataaaatgtataaaatttcttccaaacagctgcactgtacaattgaacttggataaaagatccaatgcctctggagcttttagatatgaaaatgtttatttttattaaacctttatcataacaaaggcctgtacatacaactttttggtttacataggtttgggcactttatttgaaagaataaaataccaataatataaatttgatcaaataattatagtattttggctctccacagtttggttttaaaacatatggcaggttagagtaggttttttgttttgtttttagtgcagagtctgaagccatggaaattagacagtctcttaaaacctaatatgctccttattcagtagcatataagcatggggcataatacagattgttctaataaaggattaagacacagatgttttctgtgtttcgcatgatagaatagagtacgctaagctccctttggaggccaagttttctgaatcaacttgtttatggagctgctaagacttctggctttatttagaaaagtctcaatagggtatttgaggccaggctctaaatcctcacctgaattgtgtcagtttacatctccactaataacccagaaaggattagatttatatcactcttttctctgtttgaaaacagaaactctttggtctcatctatcatactttcctagcctgtgaaatgaatgatttgtctaaaggtaatatcccctcaagatctaatatgctatgaaaatataagataatttagatctttatgggacattctgcattgtgattgcaattatttcctgatttagcagttgttaacagtacttatcaaattgttctgaaagagaatttattatgtttgccattatctcagtcctttcttgtaaaatgctatacattaggtggtctgtctacaattctagggcagctgaatgttctagttgcactcaaaactgaagtaaatacatttctttttttattgttttatcaccaaaaacatttgtcttggggtataactgattaacaatgttgtggtagtttcaagtaaacagcaaaggggttcagccatgaatatatatgtattcattctcccctaaacccctatttcatccaggctggcacacaatactgagcagagttttatgtggtatacaataggtctttgttggttatccattttaaatatagcagagtgtacatgaccttcccaaaatccctagctctctcttccccctggaaactataagttcattttctaagtctgtgaaggtctgaagtaaatatatttcttgataggaaaattaatagcatgcaccctcaaaagggttacattgatatgaaaatgcaggtttgaaaaatacttgccacacagctgacaaagggtcaatagccatactatgcaaaaagttctcacaaattgccaataaattgaccagccacccaatataaaactggggaaaggatacaagaggtacttcctaggggaaaaactccaaatggtcaacaaatatgaaaatatgttcaaattaacttatagggaaatgaaaggaaagacatcactttatacttatcaaaccaaaaaaaatttaaagcaattaatacttgttgctgccaaggatagaggaaatgtgtaactatataagttgtaaattttttaaacaattttaaaattaaaagtatgtattcttttttattctgtaatcctattgctagaaatctatcccatagaactataacaatcagaacctaaggaaatatgcacaaagatgctagttgcagcattattcagcacaggggggaaaaaggaaatcaccaagcgaatgctcattttaaaaaatagttgaaaaatcatagtacatccatatctagaacaacgtgcaaaccttaaaaaggatgaactagagctatgaagattaattttggtgattgttcatgaagcataattatgagagagaaaaacaagacacagagaagtgtcgtatcatattatttgtaaaatgtaagatagtgatagtcccagctaatctatatatgtatatgattaaatgtatttatctacaaatatgtgtatttgactatggctaaaatagagaacatatatattcaattgttaattatgcatgaattggatagttggtatgaatatattggtaggtaggaaagatatattggcatgaatatattggtagtaggtaagaaaaaaaatagacaaaataaagactagactataaaaacaacacatatcatcccataaaagcatttatgtcaagttccatatatgtttaaaatatttaacttaaaattattaaaacagtgttttcaaatcaaatccacagatca

SEQ ID NO: 51757 - DNA, 1153 bp, Bovine  19866881148768
  misc_feature (1)..(1): n is a, c, g, or t
ncttgtaaattaataaaattaagctacactttgccttcttccctaagttttactgatctaaaaatgatagttctgtatgtgctcatttttctacaggggatctcatttttaaattgctccttaatacaggacattgattcataacctcagggccttagtaagtggcttccttgaagatgatactattttggatttattcacaagaagtaatccccttgagtgactcagataattttttttttttttttttagttttcttaagaaattcttcaggaattcttgtgagatagaagtagggaaaatattatcactttgctgatagggatgtcaaggcttagagatttgttcaaggtcaaagagaaagtcattggtaaagccagaaacttgaatcctgacatcctcacttgtattttagttctgctaaaataacttcctgtattccttggatctgcattaatgtaagaattttgcattttgggacccaggcaacattttaaaaatctagactacttacaaaagactatatattctaaaacgcattcacaattatttctttttatcattgcctttcaacatgaaaaagtcataggacttaagtctattattccattcatataagttgcttaaacttcaatataggtctctaagtctgtgtattttatttttttcttttggcaagagaatatcccagtgggtccatacatctgtgtcctcaatgcatatggcaccagagtaaattatatcccaggttatttgtggttctaacaatatttagtcaatttcctttctcagcaaacttaagaatccatgcaaaccagatttatgcaaatcatgtttgtgattcagctgtggtcagcctcaggaagcagaatcctgtgtaactgccatgtaggatgtgatttaaagttgaagatttacaagagcagtgcaatgtgtgtggtggcacacacacgggccacttaaatatacagtgatatttaaagatgcagaggggtatgaaaagatgacaatgtgcaaattcccacaaatatgcataattcatggtcaattagtatatgtctaatcatagcaaagtacacgattttcttgccaatcccttcctttcctttttaaattgataactggcatcttgaaagaagaagggaaagatgtg

SEQ ID NO: 51758 - DNA, 842 bp, Bovine  19866881173826
  misc_feature (1)..(1): n is a, c, g, or t
naactatgggttgccaactcaaatgcctaatgaggacagcgtgataatgtaagtgacagaagtaggctggtatgagaaacacacagctatagctgtcttgtcctttcttgagtattcccattttggatgaagacgtggatcaggaaaacatttccctatcataagaatcagaatagcacacatgtgatgctcaggatcatgggggcaggagggagtggtgaggtctgtggtagacagacatggagggcacattaccttggagtgaaaactgagaatcggccccaggcagatgttatcacatgagcctctgttacagctttttgtttttgttttttcaaaatgaattggaagtctggagttttgaattgaaatttctgaattaaaaattggaatttgttgccaacattttaaaaacatccaacagaaagtgtctacagatgttgtatgggctcccggttttcgacctctggcttccctcatttcttgttgttcagtgtgaaatcctgcatctgtgtttcccccggttctacattaaactctaatcagtcttagtcagttttctggtcccgtgacttactcccaggaactataacacatcccttgtctctgcctagacatgtgtgcatagttagtggtgctagattgaggaggtgattgtggttatttggagagtccagtgagtataatctctctcattttgcagatgtttctgttgatatgccagacctacttgatatcaaccatctccgagccagggggttgcagccaggagaggaggaacttccagacatcagcccccccatagtattcctagactctaaaggtaccgtcttctgccagga

SEQ ID NO: 51759 - DNA, 1788 bp, Bovine  19866881201135
  misc_feature (1)..(1): n is a, c, g, or t
nctgggcactaagaacctgcaggcatttttctttttaaaagttagataatagctcccattgttccttcttttaatttcataaaatagcaaatccctgtagtcctgagtgatttagccaagtaagcaattataggatattgctggatccatctgcttttctccaatagatttgaagatgagttgagtatgttccgttttttcattcttccaaaaagtcaatcaaactcctactgctttgtaaggtcactgaatacctcctgcaggctcctttcagaattccagttgggaagcttcttaaaacagcagcctgttatattagtcaggtttcctttggttgcaaatggaagaagcccctcacattagctaatgcaaaaaaaaaaaaaaaattaaagagtaggcactatttaatagttcatataacaaaaaagtctacaatgtaaaatgtcatcaaatatctctctcattctctcagcaatatgtttctctgtgttagctttattcaccacaggctcaaatgactgcctctaccaagctccaggctcatgtcagcattgcatgtgatctcagaaggaaagaggttctctcctcccagcatgtcataaactctgcaaaaacgttggccctttttaatgcacatacagcctgcgtagttcaggatgaatagatactctaataattgaccaacctagattcgatacatcttaataggaatcaggaacttgtggttgagactcaggtggaaggaatcttcttcctgtatctccaccataatgtagtggcatttgcaaaggttgtctggcaaccctcactgcaatcttcgccacatgttacatcacttttatatatatccagagttatacatttgagcttatcaaaagcaaggggagagagaattttcttgttaaataaaactttaataacttgttactgaaggaatgaggtaatacaatcaaggaaaagaatcaaagagaaatgtaaaggacaacaaaaactaagattcagagcacttccatgactctagaaatttcttcactccttcaaagcattacccattgctacattggatttccttctccaggggattttccgaacccagaggtcgaagccaggtctcctgcatggcaggcagattctttaccagctgagccaccagaaatccagaaatttcgtcactcctacttcaagtcattacccactctcacattcgcaaccactgttcttatttctatccacatcgaactttcttaaactatgtaattggaattacacagtatgtaattttctataatctttgactcaatataagatatatccctatttttgtgtacaatcagaagttcattacttattaatgagtgctataccactgaataatatcttcaagtgattatgccattttacactcccaccagtaaggtcaattattccatttgttatggaacatgacatctttgtcatgatactatcagtttttaattttaactatttaggtggttgtgtagtgatagctcattgtggttttaatttgcatttccctgatgatgattatgttaagcaccttttatatgcttcttgtcctttcagtatgttcttttgtcaagttttttttttaagttcttgagcacttttatcgggttatcatcattattgacttttatctgggcttatgctttgttatacatatgtgtcgcaaatattttctcacaatctgtgccttcatcttcttactaatatctttggatgggggagaatttttaaattttcatgaaaactaagtcaaagattttt

SEQ ID NO: 51760 - DNA, 1893 bp, Bovine  19866881205233
  misc_feature (1)..(1): n is a, c, g, or t
nttaatccattgtatattcttgcctcctttgtcaaagataaggtgtccatatgtgcgtggatttatctctgggctttctattttgtcccattgatctaatatttctgtctttgtgccagtaccatgctgtcttgataacagtggctttgtagtagagcctgaagtcaggtaggttgattcctccagttccattcttctttctcaagattgctttggctatttgaggttttttgtatttccatacaaattgtgaaattatttgttctagctctgtgaagaatactattggtagcttgatagggattgcattgaatctataaattgctttgggtagtatactcattttttttagatgagagaactataattctggaaagcaaatatgttacagcttctcaagattctttgggttagcacaatgaaaatctgcagggctttatgaaaatttaaaactctttatcctaactagttggtcatacacaataactttaaagtttctcatctttattttgcaaaggaaaatgttgagaaatgttaggtttggatgctcattttctgcatttcttctggtcccgtgacctttttttcactccatcctacgaaatcacaagaagccctaaaaatgagatattcctttcattccaatccagcctacccaatcactgttagcatctgcttgataaattttcaccaatcactgagcagcagagttcctttaggaacatttgactaattaaaatgtctctcccataatgtgtaatctgaagaggatgagaaagacagagaaatatttaagtactaataatttttgctggtatcttttgccaaataacaggacagattgtagaaatttggctgctgctgtatctcaaaggtgttcttcagcagagtgggctgctttacaggattcatagagccaaatttggctccctgcttccatcaactgtaaggaacttttttatatgacatttttcatttcacttactgatttcatctctgatgtttattatttttatctttagtttacacatcatttgattatcccaggtattaattgtattttagtcttttgaagtgttgtgtttatgctacctcaaaacattttctaagagaaaaatagtgacacttggcaaatgcttactgtgtattaaaactcgttaagcattttacatgcatcaataaatggaatccttatgaccctacatggcaggttactagtattactctgcattttttagaagaggaaactgaggcacagaaaaggttgagatacacagcctttatataatggagctaggaatcttggccccagacctcatgctctaccattacatcatattgctttgtctagtatattgaaaatctcttcctatattttttaccaaattggctaattgaattctcattaattgtattaatcatagtgcaacctcttttatctgttcaccaaatatttatcctatttgtatgtgttgtatcagctgtatcagagcctatttgtatcagttgctcttaaagttgttagaagtagtgaggtctgagattttttttttagtgggtaaatgggttaaatcttaagggaaagatttactatgaagtcagtgaaacttaagcttcatctgcacaagagctttccaaaaccctgggagtggtcccaagtcaatgttagcattgtcaaatgcttttgtaaattaaaaaaaaattagatatcattaacagcaataggtcaagattgctatctcttactacatccactcactctctgtcacactttcagtattaggcagcattggagtggccagaattattctggggatccagttaaagggaagtggagtcaagaacacattcagcttgagttttgcataatatatatatagaagtttgccgtca

SEQ ID NO: 51761 - DNA, 1310 bp, Bovine  19866881263709
  misc_feature (1)..(1): n is a, c, g, or t
ntgggaacctttctccactctgagaaaataaggaatacagcgatactgatggtaccagcatacgtggctccgctgctgtagactatttcaaagttctctttaactgaaacttagctcttttgttctaagaagttcagcaggctgcataactgccttctgctaaagagctttaaataatccctgccccacactatttttggtatccaggacaatagattattataggcaaaaggaaaaattcagggcagtactccaaaaataggccatctcattttaaaatgaattatctgttacttggtcccagggtatcttgcagggacaaaaaaaaattccccaggggagcaaagcaaggaccttgatggcattttgggcagcaagtttcattttcttctattttgttcattatttaagtttgatcaatttcctgtgttcatttacataactttacatcttaccacattcccccaataactggatagtctggcaatttcaacttagcactcttaatatagctcttgtatttttttttagcaaagtccaaaatggtaagaaaattccaagcctcagcttctatgttctctactttgctgtattatttgtgttttaatagaagtatgaatttatatatattattattattattatatcatttgcaaacaaagatacagcagcaacatcataattccacagttgccagttttatgctaaacacttttgttggtgtctctaattattctatttttggcaaattacatttctttcactatttatattctctcagaagaacaaattcaattgaatttacatcgacctgcatttgtggagcaaatacaatgtattaatactatcagacaacatgccagacactggttataaaagtggcatgcacatgttccccttattaaagagctcacaggtaacacaggcaagaaactgatgcaaatatgcaaaagaaacccattccaaaatgtgagaataatgtaactacagatgcaaaaaggacaaataaggagggaatcttttctctttggaaaggggaaggggaagctagaacaaagacatgatctttggtttgggctcaaggcttttgttttgtaggatattttgttttgagggggccaggtttctgttttgtttacagagccaagaatgctataggggaagtacatttcagaagctaacaaatagatcaaagacaatacaaatgcctggtatatttgaggggaaagcatccacattaataggaatacagatatcacctacattgtaagcccttcagaaaaagtgctaaaagtaagctaagcaaagag

SEQ ID NO: 51762 - DNA, 3374 bp, Bovine  19866881356206
  misc_feature (1)..(1): n is a, c, g, or t
ngttaaattcatgatctataaatactgtggtaaaaatagttaatacctggcacttcactaactatgtggcactgaggcattatctaagtagtagcatcctttttttttaagtaaatataacatggaatagttttgagggttaaataatacatgcaaagcattaggcagagttcctgggccaaataagcattcaatgaatgctaacattatttattaggtttttacattattatttggaaaataatattttattaatactatttttagtattaataaagttatttacattcctttcaattcctataattccagaaagcattgtctataaacacttaaggatttttggaacagaattttaaaacattctgacttttcagcccacatcaatttcaatctcatggtcactacaaatttatattaattgtataaggtctaaaaagaaatctcaattgacccaggggcactcagatacttcaaccctcctgttggttgattatcaccctggaaacagctcagcctgggttcaggcataatactccacagatgcctcacaaattgaaaaatcaataaaaggatccatagcagctggtggtacaagagccatagtcagagtctatatgtcaaattataatactgccacccttccttattccagaaattgtttttatcattaaaatttaagtatcagagtttaggacttcctccatcttcttgaatgtatcttgtgtatcatagattagagatgatagaagggatcttttatcattgtagaagtcaactctttctaaaaactgaaaaaaatgaatccatccccatgatgttcataacttgctcaggttccacagcaagtcatggatttctttctaatgaagtaaaaatagaagactactatggtagtcaaggctatggtttttccagtagtcatgtatggatgtaagagttggactgtaaagaaagcagagcaccgaagaattgatggcttttgaactgtggtgttggagaagactcttgagagtcccttggactgcaaggagatccaaccagtccattctaaaggagatcagtcctgggtgttcattggaaggactgatgctaaagctgaaactccaatactttggccacctcatgcaaagagttgactcattggaaaagactctgatgctgggagggattgggggcaggaggataaggggatgacagaggatgagatggctggatggcatcactgactcgatggacgtgaatctgagtgaactctgggagttggtgatggacagggaggcctggcgtgctgcaatttgtggggtcgcaaagagtcacgactgagtgactgaactgaactgatggtcaccaaaaatgacaggtagttagtttctgttaaaactttattgaggtctaattaacataaaataaacttcatatgggcttctctgattcctcagatggtaaagaatctgcctgcaatgtaggagacccgggttccatccctgggtcagaaagttcccctggagaaggaaatggtaacccactctggtattcttgcttggagaatcccatggatagaggatcctggcaggctacagtccatggggtcacaaagagttggacgtgactgagtgactaacactttcactttcaaactccatatagttaaacattaagagtttttatatatgtgtagactcatgaaaccatcactgcagtcaaaataatgaacatatctatcacccccagaaagtttttttcatatctctttataattttttcctcctgctcctcctttttccctgctatcccaccattgtcccaaagtaaccactgatctggctttctattattatagtttcattttcactttctagaatttttatgaataaaattacatagtatttgttttgtctgacttctttcacttcataaaattatttttaggtatatccctgtttttgcatgtatcagtagttgtacccttttactgatgagaaatattgcattctatagctatacaaaaattagtttattcatttacctagacagatgtagatgtgtacgtttgggttttccagtttggggctattaaaaataaagtgacaatgagtatagtgtaaaagtctttgagtcaacatctgcttttgtttttcttgggtaaacaccttggaatgagttacacattggagtagtatggtaggtatgtgtttaaatatactgtcaaaacaccttcaaaagtagttaaatcattttacattttacatttccatccacagttgctcagtgtatttgtcacacattttgtgtaaacagtctttattttagctgttcaagtggatgtgtagggataatatcattgcagtttttatttgcatttcagcaatgactcaagatattgagcatatttttgtgtgcttatttgacatctatatatcttctttgacatgtctattaaaatatttttgcccatttttaaattgtgttatcttctttctactggagtgtaataattctttatacattctggccatttccagaaacatttaattgtttattgctttatcatactggtgagaatatccagtacattattaaatagaaatggtgggattagacatcctcaccttgttcctgactttaggagtaagtctttcatcactaaaatgccttttatcaggccaaggaagttaccttacatttgagtaagacttctttttaataggacagaattcccttggtgtcgcaggagagagtttggctgtgaaatttagttgtagttcccatgggcacaaaagccctgtatgcaaaagtaaaagtcagaggcttgttttggaatcaaactgtactggccacacaagaagcaaatttttgcttctaaaaggaactaaaaatactaatatatgtgcctatgttttttctatgctttatgttagaaattaaccattgatcccagcattctttactggaaaacccaaatgcagacactgaaaccaggtcatcatggggtctgggcagccactagacttggcattgtgatgagtattttcatccataatatttatacatgtctactagttgctcagtcatgtccaactctttgcaacccccatggactgtagcccaccaggctcctctgtccatggaattcttcaggcaggaatattggagttgccatttccttctccaggggatcttcctgactcagagatcaaacccaggtctcccacattgcagacagattctttaccatctgagacaccaaggaagcaaagaataaaatattcagttaagcaacactgtggatgtgagtatagtctcacttggtatctgaatattgttaataaacaagtttagagacttatcttacagctttgggagccttttca

SEQ ID NO: 51763 - DNA, 1301 bp, Bovine  19866881377987
  misc_feature (1)..(1): n is a, c, g, or t
ncaaagttcatggcttattcttttggtgccatttttaccatgcgtattattctattattgtatttgtaatggtgacttatttaaacaattatctcccttattggactgttggtggaaccatgtcttgctcgtattttttttgcataatggggataatttacacagtttcttattccttccccttgactcagtgcaaatgttcctgattttgtaggaccattctttttcctaaatgtgaaggaatcctgaatgtagctcacaaatatctcctgcatgtcatctgtaaagaattgcagggattggcagcaaaagcaaataaagtcagcaatctagggatcagtgttgctgttgcttagtcacagagtagtgtccaactcttttgcgaccccatggactacaattttccaggttctccgtccatgggatttcccaggcaagaatactggagtgggttgcctttcctgttgatcgatcaattaaacaacacagagttgttgtgcatctgttgtatgcttgacactatgctaggcatcccagcagtacaacagcaggtaatctgggcctaaaattgctaactctctattttgtcaccttgataaatgaaggtgtgaaggacttgatgtatataaagcatatttgtggtttaaaattagtaaacagagcaggtaacatttactcctaaaaccttaaaataagaaaaataagcaacctattgtatgatatgttcataggggtcttctccaatcttctggtggatgcctacaattcctccattaaagcctcatcttgttaatataagagtttgatccttgttaaaatgcaaataaattcagggaggaaatcattgtttttaattaattgtgcctccctgttaataaattacataggagtaggtttttaggaagatagaggatgagaggaagagggagtataggaaagaggtgttggcaagtgggtaaaaagttgaggaaccgaatgctgagacaatgtacaaattcacagggctgaaccaaatatgttatgaattattggatgagcaaaattaatgtagattattataaaagaatatacgaatactaacatttggctatttctaataatttgcagaaatttactaatataaaaagtaaatatatactagagtgaacaaatcaaaaggttattgacaataaagacacaatatcagagacaagcacagtatccagtgatatggatagttcagtaaattatgtatttacattaggagtgatgttctagaacagattatcatttcttaagagattataggataggaaagatag

SEQ ID NO: 51764 - DNA, 1505 bp, Bovine  19866881476567
  misc_feature (1)..(1): n is a, c, g, or t
ntgcattgcagatggattctttactgctaacccactagagaagccctaacagacatcttcccaagaaaatatacagaaggcaaataagaatatgaaaagatgctccacataatatgtcatcagggaaatgtaaattaaaataacaatgagataccactacatatctatcatgtgaccatgcttggaaaaattgataaatttcaaatgctgacaagaatatgaagcaacaggacctctcattcattgctagtgagaacgcaaaatgtcacgatcacttgggaaggctgtttggcagctttcattatgttctttggtattcacccaaaggaagttaaaacacatctacacaaaaacctgtacatagatatttacagcatctttcttcatgattgctaaaacttggaggcaaccaagaagtccttccggtggtaaaagggttaaactgaggtatgtaagaaaatgaaatattatctgctgctaaaagtgctataaaaacatggatgaaccttaaatgcatattttaagtgaaagaagccagtctaaaaaagctgcatatcacatgattccagtatgacattctagacaaagcgaaagtatggggacagtagaaagataagtggttgccagaggttgggccaggagaagggatgaataggcagagcacaaaacacactcaaagcagtgaaatactctgtctggtactataatggtagataatgtcattataaacttgtcccattccaaggaatatacaacaccaaggtgaaccctgtgtaaactagactttggtgatcataatgtgtcagtgtaggttcatcagttgtaataaacatgccattctggggggatatgttaataatagggaggctacacatgtgtgggcaatctctgtatcttctgcttaattttgctgtgaaactaaaacatttcaaaaaataaagtccattaggaaagtaattaaaaaatactactgcccacattcaaacatttgcatgcctttgtgggggcacctgttcaaaatacatgctaatatagaagaataagtttacagccaaaattcatttttaaagttggtttatctccaaatgtatgagtgttttattactgttattataaatgccctttaatgcaagccttctcattcattagcttagagagttccaaagtgaaatgaaaaacaacagtttcttgacaagcttacagactttaaagcctttagagtgggtggaagaaatgactgttgcaaagctttatagatatttgataggattgctttattctgaaatgatgacataaataagcctctttaaaggcttcactgagtctatcatagaaatttccatgtaaattttcagaatttgataagctttggaacttgggcataaataatgtatttcccagaaaaacttgagacaatacttttatttgcatgttcacaaatttctaaagtgtcacagtggcaatttccaaaagggaaaactttaagctaacattttttgtgtgca

SEQ ID NO: 51765 - DNA, 1152 bp, Bovine  19866881561787
  misc_feature (1)..(1): n is a, c, g, or t
naacaatgctaatactggagtagaacagattttgtattgaaaaataaggaccagtaaatggtagaacaaggaaaaagtgctaagtagtaagttcactgacacattttccagccaaatctatctatctttctacctaccctacctacccacctacctatttatcaatcatctgttattttaagcattgagatagctactgagtaagaaagcaaatgaaatacaaaatacagaaaaaaaaacttcaaattttttggttaaaatttaaataaaatatttatgacataaatgatctattagaaaagataggtgcattgaggaattggatttgttacctgtgttggaggcactaattccagctccgaagctgactcagagttcaaggcgcttttcccaccgctcagttctggctgagatctgtgttctgaagacctatacggggcacatgaaggaagttaatgtatatcgagaagcaaattcagctagaaagtcagccgaaaaacctggctaatttggatcaccaagaaccttggtaacaaagctctcatcagacttttacttggatgtttccattataaggaccacttttggaataccagtggctgcaatgcgctaggtgttattgtctgtgattgatttagacttcagtgatgtgcaaaaggcaaataaatgcaataccatttttgttgcagaaagttctgcctcatcaaaaaagtattggctttttggggggagggagcttctcacaaagtgtattagtaagattgaatctttatatagaatttgaaatgtcatataagtgggagatgtgttgaagggcaacagaccgaaatatgttgcccttcaggaagttttaaagacatggtaagatttaggcagccagtttttgtcatgggcatccatagattattattagttcattttctgacagtgatgattcataaagtcagaacaggctacctgtttaactagaaacacttaatttaactataactcatttaatgggatcttcctgactcagggatacaaccctgggtctcctgcattggcaggcagattctttaccatctgaaccaccagggaagcccccatttaatatacacatatatgaaatatacctgtgtacctattttgaaagatcagttacacattcag

SEQ ID NO: 51766 - DNA, 793 bp, Bovine  19866881676101
  misc_feature (1)..(1): n is a, c, g, or t
nattttcttaatgtccttgcaacctttatcaagtcttagtttgcaattattaaaaggtgcagactattgcctttttaatgaggaaattatagtgaatacctcctccaatatctctcttattgattgccttctttctttaacaagtaccagatctccttcagaccctcattacctcttctctgtcctataataagggccacctaattggtctcactgccttctgtttttcactcatgtaatccaacccaactcctgagaaactaatcttgctaaaacaaagcatggatcatgccatcttcttgcagaaaagcttttaataattccctcttacaacctgttctatactcagatgctttgccttgatttgcaaggcagccacagttcagctcattcaatataccttatatctctagtcaaaggtaatcacttttctatgaacattccctacctccacagttaagcccttgctatctggaaagccctctctattatgtctagttgcagaaaccttcataatcttacaaagtctgaccttatcaagttctttcaccctcactttaccttgctttagcacttcacagtccaactaaggataaatgagttctccttcctctgaattcccagattcattctttgaaccaccctcatagaagttaccatactctgacttgcattgtgatgatctgtatgcttatttaagcccctcctatactgtaagatccttgtagaccaagctcacatctctttatcctactgtctcccacagtacccatcccagtggcctgtacattgt

SEQ ID NO: 51767 - DNA, 753 bp, Bovine  19866881945860
  misc_feature (1)..(1): n is a, c, g, or t
naacctttctatttttaattgcagtcttattttccttctcccattatttctcatctccttagctctgtgatgccttggttcaggtcaggctcagctcaacttccactttcttcacttaacctctcaattctcctgacagctcattcttttcctttgtcaaagctgtactttgaagaatgttctcagtctataattggtgttttggttcatgattaggcaaaggtatgtattttatttctgattataaagtactagtttataacgtgaaagaaaatatttatggagcaggtactgctgtaagcttggtgatgaagcactcaacaacattgcccctatcctcagtgcagcttacatcttaaggggaaggtagattataaatgtacatatatacattcaatgttgagttttaaactaactttttcactctcctctttcactttcatcaagaggctgtttagttcttcttcactttctgccataagggtggtgtcatccacatatctggggttattgatatttctcccagcaattttggttccagcttgtgtgtcatccagcccagcatttctcatgatgtactctgcagttaataagcagggtgacaacatacagccttgatgtactcatttcccaatttggaaccagtctgttgttccaagtccaattctactgttgtttcttgacctgcatacagatttatcaaaaggcaggtcaggtggtctgttatccccatctaagaattttccacagttt

SEQ ID NO: 51768 - DNA, 772 bp, Bovine  19866882204222
  misc_feature (1)..(1): n is a, c, g, or t
natggtttaattaaaacatctctaattttttgatctattaatgtgattccaaaaatgagaaaagtaagcagaacttcattctatttcagcattgattaaacaaaacaaaaagtttgaaattataatatcagatatactgttcattttccagacataattttttcatgttctcctgccaaaatatggatgatgcaagtgtttctttgaatgatagcattatagcaaatgtttttaagggagtgttttttaaatgagaaactaataatcatactgataataaattgtaaaacactcttcccactctatctgacattatccttgtcttccttttttaattggagtatcttgcacaaatacatctgcctagagttccaggtacaggtaaatggatgtctccaaaataacatgaaaaataaagctttaccatggtttgacattggctgttgggacaaaaatacaataatatgctgtatttttaatggaatttactggggtcagcttggatattggcatggagactgttgtttttctgactaaaggagtccaagaaaatgaaacctaatatatttgagcaaatcttagatgatcctgtacacaaaaatttaaaaataaaatgccattacacagtactggcacctatgcacataaagaaaaacaacaaaaacaactttgtgcagcttatggtgttttgaggtttttaaaaagcttcattctaattttaacaaatcatcatactgtgtttgctccctggagaaaagctagcaacagaaaa

SEQ ID NO: 51769 - DNA, 1812 bp, Bovine  19866880350659
  misc_feature (1)..(1): n is a, c, g, or t
ntccatcctaaaggagatcagtcctgggtgttcattggaaggactgatgttgaagctgaaactctaatactttggccacctgtttgtgaagagctgactcatttgaaaagaccctgatgctgggaaagattgagggcaggaggagaaggggacgacagaagatgagatggttggatggcatcactgattcaatagacatgggtttgggtgaactccgggagtcggtgatggacagggaggcctggcgtgctgcaattcatggggtcgcaaagagtcgcacactactgagcgactgaactgatacagatatgtaattatatatctgtaatatagatatctaatatatttatgtaagatatctttgaaccgtacgagttcagctccttgtcatttggttgttacattaacatgtattcatgaaaagtgaatgtaagtgtaaggtatatacttggagcagacttttaaaatgtaatgcactgttcctaaatggtattcaaacctgtctggaagtctaatagtgctggaatatttatggaacttgtgcagtcatgtcctggaacccatctgctgaaaataaactccagttgcatcgttcctaggcaaaaccacaatgaaatttatttaattcttattcttatttaaagcctgacatgtaatatttaagtaagtgataacagacattcctgtcagtgaacaaaacatgacatagaccttttttccctcaggtgtagaatgagccaaggagactcaaacccagcagccattccacatgcagcagaagatattcaaggagacgacagatggatgtctcaggtaaaggaggtgcacgtgttattattcacagagatgaatctcttcagtttttagagtcttgaccaaagctacgaaagggtgtttttaatggccaacaagaactaattactgtaaataaaaattttatgttagagatgtcattctaatcaccatctgatgttggaactgaggaatattttaaagcatgttcattcccctttgttaattttagtagatagcgaggtttctattttttttaagcttttttaaatttcaaagtaagttcataagtatgcaacaagaattacaaacagttcagaaagaacttcctatatccttcctctagatttgccacttgttaacattttgctgtatctgcataattattctgtctgtatcagtttatactatttaccaacttactgttttttccaaatcatttgaaactatgttgcagtcttcatgatgctcctttacccttaaatatttgagtgttttctaagaaaaagaatattctctcacataactgcagtatagttattaaaatcaggaaattttacactgacagtatactgttacctctggagaaggaaatagcaacccactccagtattcttgcctggagaatcccatggacagatagatgagcctggcgggctatagtccatggggttgtaagagtcgaacccgactcagcagctagcccaccatactgttacctaacgcaaagaccacattcaggtttcttcagttgtctgttgttgctatcagttttcttcccagtcttggatcacacattgtgtttgcttgtcatatatctctttattctcctttaatcagaaacgtttcttagcctttgttttttatgacttgaccatttgtataggctgtttattttgtggtgtgtccctcagtttgagtttgtcgtcttttctcgtaatcagagttcggattatacatttttggcaggaatatcagggaagtaatgtcttccgtgcatcacatagaaggcatttgacg

SEQ ID NO: 51770 - DNA, 857 bp, Bovine  19866880629041
  misc_feature (1)..(1): n is a, c, g, or t
naggtgagcatctgtctgccaccccttgcagggaagtggggccagtttttcctactatgatttgtccagatgctgcagcgatggaactaggtggggtctccctggagtctctgtgcttccctgtgcccttctaccccatcccagcacctgccaccctgtccccggccttaccccgcccgtgggtcttggcctcaatgatctcactgatgcgcccggagcctacgctgttcttggccgccagcttcaccttgtaccacgtgccgcacttgaggctgtccagcctgaaggaccgctcgctcgagctgacgaacacatccttccactcctcactgttgtccaccgagtactgcagcacgaagcctggccgggaggtttgcctggctcaggaggggcagggcggggcctggggtcccccaacagctgtcatgggactgggctccgcagggggtcagcagggggaacttttggccgttaggatggcgtggacgccaattagatgcaaaactggaaggatctggggtgagttgtaggactctctcccatcggctcttgtgttagggtttagaagccagggtggggaggggagcagaaaccggagctgtgagacttcaaaggggtcctattgagaccttgctactccgtgtacagtcccctggccccaaagcatcacttgggagcttgttagacatgcagattctcagctccccgaatcagaatctgtgttcttacaagatcccctggtgattcatatgcatatttaagttcaagtatctagaacatttgttgattttatagatttggaaactaagacccagagaagaaaacagacttcctcaggttcacacagctcaccactg

SEQ ID NO: 51771 - DNA, 1433 bp, Bovine  19866880685095
  misc_feature (1)..(1): n is a, c, g, or t
ncgggtgaaaggatggccctcgccctcccctcctgcctctgcccattcagcgccctgcagcgggctctctccctcgcggctcgcctctgcgcctctggccatgctaccgttcttcccggctcacctcaggtgtcagattctcactaaagcctttccaaacagacgggacacccccgaattctgctccccacagcactgcggcttactgcccggacggcctccctccctgcattctactcttgtgttctggttacacgggtctctcttttataagaatataaactcttcgagggcaggaatcgcagctaactgaggcttgtatggctgacagtgaagtgccacacacagaaagagctgataaatggcagttacttgataaatgagtgaatggatgaattcctttccctgcttgtacttccctcaccccaggaaccccatctggacaggaccgggactaaagagttctctttccaaatatatctccctgagaagaaaggcttaggaaggaagggggaacctgccgggctgagacgtctgtctgcaggcgcttcgggctcttacctcatactcaaagtcaccccccagcgccccgatgtccaggtgcaggttcctaagaagctcacttgagctgcggacgctctgaaaatgaaaacgatggcaaggaaactggtcagccccgggtgcaggaccagaagctcctcacaggtccgagagctccactcctgggtcagacccagcagtgatacagactgggcaaacaaggaagctatgggctggaaaaccgctttcactgattttcaaagtagcacagaggttaaaccagaaggttaaagcagctcaagtacccaccaacagatgaacggctgaatggaatgtggtaatttcatacaatgaaataccatccaatcacacatgctacaaaacactatgctatatgaaagaagccagacacacaagaggacaaagacagcatgattccaagtctatgaaatatctagaacaggcaaattcacagagacagagtagatcagggactgcggagaggggaggatgcagagttattgtttaatgggtacacagtgtttctgggattatgaacaagctttggagacaggtgatgatgaagactgtataacactgcgagggtagttaaggccactgaattgtacacttaaaagtggtttaaatgtaactttcaaggtgtatatatttgaccacaatttaaaaaaaaattttcgttgttgttttttttaatggcccagaggattttcaggccaagaaaaggattcattcttaccttggttgtcactctctgcctcatcctcctcgttggtctcctcccctaaagccaagaggctgagagcattcttgtcctcatggatggagcccaggagaccttttgtagcagcagaaggcttgagaccctgtgatgg

SEQ ID NO: 51772 - DNA, 871 bp, Bovine  19866880766513
  misc_feature (1)..(1): n is a, c, g, or t
ntcaggaagcatggggcgtggggacctggcaggcagtgttttgtccatcgctgccacccccaagcacctatcagctcatggaaagagtctcatgcttagaagggggctctggctccttcgttctatgcaatttacaatctgtcctttccccaggctcagttcagttccctctggccagtgctcagggaggcattaggtgggggaggggctggagtgcaggctgcaaaggggtggggaggaagaagggacaggggaaggcaacactcagctcacagcttctggctagagtggaggtcacaagaaacctcgcttcactgccctgcggctgcccagacagagagagaaaagggctgatccaactcatgccaggatcccttggtcagaaccctagatgctgagattgggcgaccaagatccagagcaaaggggtggggagactcaggcatggtgtgggctgacacctgttcacagcccctgtggtttggactcttccccagatcaggcctccccaatccacgtgtttttcttgtccccaaatccttcctgaggggtgtgtgtataagactaggagtgaggggaggacagtcaaagcctgtgaggggaagggaagtgggaagcggggctttggggctgaatgctgccactatgatcccagaggacatgtttgggagaggatccctccagcccacaccatgcagcccccattttagcaggagccccccgcatgctgcacccccagcctctcttcctcggctcatgaggagggagggcagggctggaccagcgaccttaccgtctgtggggggctgcccaaggtcatctccacgtagtagccctggcccggatttgcccctcaggttgtccaccatct

SEQ ID NO: 51773 - DNA, 1996 bp, Bovine  19866880869414
  misc_feature (1)..(1): n is a, c, g, or t
nactctcattagttatctgttttatacataatagtgtacgtatgtcaatcccagcctcccattcatgccacctctcttccctccttggtatccatacatttgttgtctacatctgtgtctctatttctgatttgcacataagttcatctgtaccattttcctagattccacatataaacagtgttatagtacccctatttttagtgtaaaaattttaaattgttacagacatttcaaagtaaatattttaacttgttacagacaagcataaaaatcataagtgcacagcccagtgaatttttacaaaatgcacacatccatgttcttagaaaccagcttgagaaagagaacatgagaactctagaagttccctagcatccctccagttaccagttaacccataggcaagcacctataggcaaccactatccaaacttctgacagcagaggttccctttatagatttttgaacattatataaatggaagcatgccaagtgtactattttctgtctggcttctttcacacattatgagattcaccaagccaggagctacattttccaggctctcttacagccaggtggggtcatgtgactagtttgggccaatggaatgtgaggaaaagtggatatgtattgcattggaaaagaccctgatgctgggagggattgagggcagaaggagaaggggacgacaaaggatgagatggctgaatggcatcaccgactcgatggacatgagtttgggtaaactccaggaattggtgatggacagggaggcctggtgtgctgcggttcgtggggtcgcaaagagtcagacacgactgagcgactgaactgaactgaactgaactgatccctatcagacatcggtgggtagtgccttctctatattgtcctcaatctttctgtgagactctacagggtaggtactgggagtggcagtgttgaagctcaaaggagcctgaattcctgagatacctctcagatcaggcaagaaaccaaccagaaatatccacatttgactttatgtcaccaagaaacaaacttctattgtagtgagccatgaaggcttggggtatgtttgctttagcagctgccctaccctgattgatatggttgggttcctgggtctctctgtttctcaaaacaaggattgatagggagagatccaatgtggcaaagagtaccttttcctcatttcttttttccctcttaaggaagtgatttctttagtaaaggaagagaaaactgaatcccttgagtggcagtccagggttaggactctgagctttcacttcagggggcacaggtttgatctgtggtcaggaactaagaacccacatgcccaaaaaaattacagaagcccatgcacctgccagccacaaataaagaaatagtgaatgtatgaaagacctgagaagcatgattatattatgatgtaaaaggttcacatcttgcttcctctgcttttaaaaattagaaatctgtcttttctagatctttgtatttagcccattcaaacatggtgtgtgcaaggattattccagatttctcatgggttgatttcctgtttactcctgaaaaatatgcctggaggatccttgtttttctagtggcacagaagacaactgagaagggcatttgagtttttaatctagaacagaggttagcaagctgttttggtcaagggccagataataaatatttcagactatgtgggtcacatacgagctctgtcatatattcatctttgtctctttgtttgttcatttataaacctttaaaaatgtaaagctgtctgagcttaaggactatacaaaaacaggatgcaagctggatttggcctgtggcccatagtttgccaacccttggtctagagcatggatcacttttctctggttccttctcatctggagctgaaacattgcagaaacagtttgcctcctaatccgtaatctggagcaaaacttaacagggtcatttactcaacat

SEQ ID NO: 51774 - DNA, 525 bp, Bovine  19866881102583
  misc_feature (1)..(1): n is a, c, g, or t
nggccccagctcgccaggggccgaacacggcccggagactcggtgggcgcccgccggggatgtgacagccgggaggcagctggttgctgggagcctggagacgccgacggggaaaagggggagcgagggagggaggggaagccggtggccgggccggccgcgaaggggcggagagtctgagggcgaggggcgtgataggaggtagcgatccgacgccgcgcggcgccgccagttctttcgggcgccggccctttaagggcgggcagacgcggcggcttcagcgctcagaactccggggagtgagcgacgccgcggggcggtaaacagcaggactgccggcccgcccgctgacgtcaggggaaactgacacggatttaaagggccagggctcgaattgggtcttaaaggggccgccggtttccagctggaggccctctcccactcctctcctattgccgcctcccctttcattatctttcccgtctctgaaaggtcactttggattagatggatagctccgtgaag
